United States Patent Application Publication US 2026/0103690 A1 - sequence listing, part 97

SEQ ID NO: 481444 - protein, 308 aa, unidentified
MNCTKGQRKQAKIFANSPDGWKLVLSWIKAMGSKQAHVCMEATGRHSLGVAMALHDAAHVVSIVNPAQIRDFARTKLGRNKTDKVDAALIRDYAALFKPEPWTPPSPAMRRLCELQTVRAGIIRNRTDWKNRISSGLGDSIATRLAAATIQHFTSQLEAIDRAIDETIGQNAELRARRELLLSITGVGETLAASLLAEMPEPGVLRRSGEMVAYAGLNPSHHRSGSSIDRPTRISKIGNATLRSSLYMPALSAMRFNPAVAALVMRLKSAGRLKPKQIVVAAMRKLLVLCFGVLKTGKPFDPALAMPA

SEQ ID NO: 481445 - protein, 316 aa, unidentified
MAIVAGFDVHRRQITFDALDAETGEVSRGRIASTRAAVSAWVGRFPGQEVEVALEACTGWLFVCEALAQAGACPHLAEPAETSARRGKKRRAKTDRADACHLRELLCQGRLPESWLPPAHVREWRTRTRLRKTLVDERTQWLQRIRATLFHHGVSVAEVPERLLSRDGRAFLEQLALPAAARERITVALALIETIETQLAPIEHELRSLARRQPGCRALMRQFGVGELLAATILCELGDVSRLSSSRKAVRAVGLDVGVHRSDRRSWGAETRPALSARPAGVAVASAFPSLEAAVACVVALSRRLSAVCVAGASRP

SEQ ID NO: 481446 - protein, 316 aa, unidentified
MPAEPVFVGIDVAKHSLDIAVHQSADRWSVPHTEAGVVALVQRLTALAPARIVLEATGGLERPCVAALAAAGLPVVAINPRQARDFAKAMGHLAKTDAIDAAVLAHFGAAVRPPLRPLPDAATQHLAALVARRRQLVEMLTAERNRLATTPKPMRKDLEAHIRWLERRLTGLDTDLDQAIRTSPCWRAQEDLLRSVPGVGPIIARTLLAELPELGRLSHKAVAALAGLAPLNRDSGLFRGRRRIWGGRATVRAVLYMGALAGVRYNPVLRAFYDRLRAAGKLPKVALTACMHKLLTILNALIKHQQPWNPNHVATR

SEQ ID NO: 481447 - protein, 368 aa, unidentified
MEEVRGFIGLDVHKATISVAVADGGRSGEVRHVGTIENTPVAIAKLARKLARRHGAVEFVYEAGSCGYNVQRQLTGMGLTCRVCAPSLTPRKPGERIKNDRRDAIALARLHRAGELTYVWVPDELHEALRDLVRARHAACEDVRRDRIRIQAFLLRYDLRFEGKPWSTRHRKWLWNRQFAHPAQQIAFQAHLNALDHDEARKRELEEQIRELLSESPWTKQMRALQALKGVGPVVAATVIAEVGDFSRFAHPRQLVAYFGLAPGEHSSGSTIRPRGITKAGSSLARAVLCEAAWNYRTTPKIGQWMNERCPAVPQDIKALAWKAQLRLHKTYRRLTSRGKRSVVATTAVARELLGFIWSIGQRAPLGA

SEQ ID NO: 481448 - protein, 461 aa, unidentified
MSGKRNRGLSLSDRPIEQPCAAGIDIGAREIFVAVHHDPDGEPVRRFATFTEDLNRMADWLQRCGVTTAAMESTGVYWIPVYEMLEQRGLRPCLVNARHMKNVPGRRTDWHECQWIQFLHSVGLLRAAFRPEDQVCAVRAIMRHRQQLVEMAAQHVQHMHKALTQMNLQIHHVISDITGTTGLAIVDAIISGERNPAELAKLRDPRIKADSETIEKSLLGNWREEHLFTLGQSLELYRFCLRAIVAAEEKIESLLSAFTPRVDPEHKPLPSDRKKNRSGSKRRNKAGHSTKFDLRNEAYKLFGVDVTQIPGLDSNVISLFSEVGRDLSRWPTAAHFVSWLALCPDNDISGGRVLWRGMRRANNRAGQIFRMAAQSLHRNATTMGDYLRRLKAKLGPAGAITATARKIAIIFYTLVTRQIEFDHSVWSTTDSQRERRSRLRLERQAKRLGFQLVPLTISTSA

SEQ ID NO: 481449 - protein, 387 aa, unidentified
MPQPNDLSRSLVALDQNSTIIAVIELSQSSWLVAGMLPGIERQPRKKLEPSPERLLGLLHRWRDEAVRAGRTITRIALAFEAGRDGFWLARWLAARGIEAYVIHASSVAVSREHRRAKTDRLDTELLKRGFLGWLRGERGHCSMARVPTIAEEDAKRPNRERDCLVGERTRIVNRIKSTLTRLGIRNFKPTLRKAAERLATVHTPEGMPLPPNTLAELQRDMARLGFVVSQIRQIEDARQQRLEQQPETRPHAMVRLLARIVGVGVETADMLVHEVLSRPMRDRRAVARYAGLTGSPDESGAQRREQGLARAGNARVRRGMIQLAWRFLMFQKESALALWYRARTADSRSGTRKTMIVALARKLVIALWRFVTTGETLEGVVLRPAS

SEQ ID NO: 481450 - protein, 388 aa, unidentified
MQVIADRPEAPSAIRTNLGAIFASLELSHSTWLITSLSPGSGEKMSKHVVHGGDIAGLLQRFAQLREKAVAQTGRNFPIIVIHEAGLDGFWIDRVLKNEGIESHVVDPASVATSRRRRRAKTDKIDGEALVRTLLAYKRGEPRVCAMVKAPTPEEEDRRRLCRERKVLITERVRHVNRLKGLLFSQGVCGYEPLHRNRRRRLDELRTGDGRPLPKHLKAQISRELDRLELLLEQIKTVETERDALLAAQQIAALPSAAMLIAIKGIGPDFAAILWSEGLFRHFDNRRQIASYAGLAPTPWKSGSIDREQGVSKAGNPRLRTTLIQLAWLWLRHQPQSALALWFKERVVRNGGRLKKAAIVALARKLLVALWKYVAAGVVIEGAIMKAA

SEQ ID NO: 481451 - protein, 389 aa, unidentified
MGSSLHLNTPAACGEHGTMFVAFELGKAQWKLGIVLPGKARLSRYVIDGGDGEAAWQLIAKARARAEKQLGGPVRVMSCYEAGYDGFWLHRWLLARGVDNQVIDPASLQVNRRKRRAKTDRLDLEQLIGALIRLLWGDRLACKVVHVPSPAQEDDRRAWRERERLVKERTAHTNRIKGLLHGQGVRDALPRAKAFGSWLGSQRTGDGLALPAHLVDELKREHGRLMLVEAQIGEIEAQAEAARKAAAPSPLAVRINQLIELKSLGPVSSQTLVGEVFFRDFKNRRQVGSYFGLTGTPFDSGDKTREQGISKAGNPRARTAAVELAWLWRRHQPASTLSRWFEERVGHQKGRVRRIAIVALARKLMVALWRFLEHGVVPEGANLRAAPHG

SEQ ID NO: 481452 - protein, 346 aa, unidentified
MMIIGCDFHPSWQQVSWLDTETGETGEQKLVQASGDAERFYRQVAAPALIGMEATGNCHWLVDLLSELGHELWVGDAAQIRASYVRQQKTDKRDAAHILKLLVEGRFPRIWMPSSEVRDLRQLLLHRYKLVIIRARVKNELQHLCLNKGVQRKHKLWSAAGQQILRELPLQPWAGRRRDDLLKLMAMLDQQIEPLDQAVKAEAQRDKMALLLQTQPGVGAITALAYVLTLGDVSRFPRGKQVASYLGLIPREHSSGGRQKLGAITKQGNRMLRMLLVEAAQAAVRYDPQFHKEYLHRCHKKPKAVAKVAAARKLAVRLYWMLRTQRPYPEIVRIESSPRVPLVGAS

SEQ ID NO: 481453 - protein, 356 aa, unidentified
MVEGSWVGLDVHARKVVAGVLDAKSGELRSFRAPTLPAETVEWLRQFPAPVRVAYEAGPTGYGLARACVGAGIACTVAAPSKIPRAAADKVKTDRRDAERLARLLRLGELVAVRVPGPHEEAARDLVRAREDARGELMRARHRLSKLLLRHGLVYDASAWTGAHDVWLRSQQFGSRPLALTFDESYAAVLQAKTRRDALDRAIAELAAEPPFSEIVGRLCCLRGVSTLTAFALTVELGDWTRFRPQALGPFLGLTPSEDSSGERRRLGAITKTGNTHARRLLVEAAWQQRRPLRASATLEKRRQGQPAAVRARADQSARRLHQRWHALERRGKRRTIVAVAVARELAGHCWALATM

SEQ ID NO: 481454 - protein, 395 aa, unidentified
MTATLCQVNDPANNSQVLYLAFELGWSEWKLAFTTGFGQAARLRSLGARNLAGLQEEIAAAKKRFGLPADAPVRSCYEAGRDGFWLHRYLTEHGIANLIVDSASIEVNRRQRRVKNDRLDAEKLARMLMRYHNGETKVWGIVRVPGVVDEDQRQLHRDLLELKAERTQHVNRIKGLLASVGLAATVDAKFPERLPQWKIWNGTAVPASLQQRLLREFARWEFVDRQIKDVENERARKVRTSSEEPIRKVRKLLELRGIGFNSAWLYVMEVFGWREIRNRRELGALAGLTPTPYQSGDSDREQGISKAGNRRLRVMAVEIAWCWLRYQPNSRLSLWYQQRFAAGKSRQRRIGIVALARKLLVALWRYVEHGVVPEGAETVPWQEKGHGRRAKAVLG

SEQ ID NO: 481455 - protein, 367 aa, unidentified
MTVTIVDAARPVTGGADTHRDLNLAPCLVTGGVDTHLDVNVAAALDAIGGLLAVAEFPTTSAGHRELLGWLAGFGPVARAGVEGTGSYGAGLARFLRAAGVAVVEVDRPNRQARRRSGKSDPLDAIEAARAALSGRASGAAKSRDGNVEAIRALVVAKRSARSAKIQALNQIRHLSFTAPEQLRQRLAGVSRHHLAARAAALRPATGAGADPVVAATKTALRLLGRRVLALDEEKARIDALLSTLVMQTAPQLLEVFGIGVDTAAALLVTAGDNPGRLRSEAAWAHLCGTAPIPASSGKVTRYRLNRGGDRQANCALWGIVITRLGNDPRTRAYMARRLAEGRSKPEVIRILKRYVAREVYHRLPRP

SEQ ID NO: 481456 - protein, 359 aa, unidentified
MRYVGIDYHKRYSVLCATDERGQELKQRRISGNSATGFAQFFSELGEESKVVMEACWNWGWLYDLLAKIEGIDEVVLAHPYKTRLMAEAQIQTDRLDAQMLAKLLRGDLIAQSHAPSAATRARKHLLRQRLFWVRLRTMLRNRMHAILDRQHGLERPQLKNFFSRRGQTWLEEVQLPCVEDQPLLTQDLEVAELLEEKIKQLDRSIGQSQSEEEKLLESIPGIGPLFSSVIATEIDGVGRFNSATKLAAYAGVVPTTHASGGRVFNGRLLWQCNKWLRWALIEASWSAIQFSGYFGSIYRCARARGKNKNIAITMVAHRMIKIIWLLLTERRPYTETLPDRSEDGMTVVVRRKVLGLAS

SEQ ID NO: 481457 - protein, 332 aa, unidentified
MSLELALRKAGPIGKEHVVNTMTRFAGIDVSKAHLDVAVRPDEIEWRSPNTEAGVKEVAVQLKELCPDLVVLEATGGMESAAASALAIMGVPVVVVNPRQVRDFAKSTGHLAKTDALDALVLAHFAEAVKPEPRPLPSEQAKQLSALLSRRRQISEMLTAEKNRLQSADIIVRRRLKVHIRWLERELSDTNGDLDVAIQESPLWRMKAEILKSVPGIGPIVSFTLLSELPELGQLNRKQIAALAGVAPLNRDSGTRTGKRTVWGGRARVRAALYMAALVASRYNPVIRIFYQRLCAAGKPKKVALTACMRKLLLILNSMIKHDQKWNVPEAA

SEQ ID NO: 481458 - protein, 430 aa, unidentified
MKSNTQNAKIEAITEKTLVLGIDVGSETHYARAFDYRGIEYSKKPFKFSNTEAGFATFKEWILELKERHEKDKVVPGMEPTGHYWFNLGKFLQDNEMKPVLVNPHHVKKTKELDDNNPTKNDRKDPKVIAGLVREGRYMIPYLPDGVYADLRTASNIRFQLQAELTRIQNRISRWFNIYFPEYKTVYGKPDAKSGMLILKAAPLPEDILTLGIDGVNQIWRDAKLRAVGKARAKTLIEAAEHSVGSKEGAVSARMEIRMLLEDYESRNTRLQEVMVLIEELVRKIPMAEKLLEIKGVGIRTVSGFLAEVGDISRFNNPKELQKLAGLALVENSSGKHKGETTISRRGRKRLRYLLFEVAMSLVSKNQEFRELHNYYTTRRLNPLKKMQSLMAIAAKLIRVFYAMLTKGVDYDPKKMVSDIKRPAVYLQAA

SEQ ID NO: 481459 - protein, 330 aa, unidentified
MNVLHFIGIDVAKKKFDVAYLKDKDRQLVKTKVLENKPAGFSQLLDWMKKNVTDDFSQIHITMEPTGVYHEALAHFLHDHGCIVNLINPARLPKFAAYKGFVHKNDRGDSKLLALFGTENPQERWLPESKSIRELKAKLARLEALKGDLLRENNRLEQAEATESPSEVMLSIHHIRKALNEAIALLKKDINDHINGNPELKSDKKLLESIPGVGDVVANQMLVVYHSKNFKKASEMAAFLGLIPKERASGTLKGKTTLSKAGSPHLRALLFLPSVKATSCNPDIKAHYNRLLERGKTKMQAVGAVMRRLVHICFGVLKNQSVYQPQIIFA

SEQ ID NO: 481460 - protein, 371 aa, unidentified
MTYYAGLDVSLREISICVIDADGTIITRDTIPADVMAVDGWFKNRKLSPKVIVHESGQLSIWLQRGFQELGLPAVCIDARRAHKSLSARINKSDASDAEGLAQLARTGWFTPVYVRSVEADRVRALVGARERLIRLRKDLEGHVRGVLKTFGIRMTGITKGKLRQSFRDQLAAAGETDPVLRTLADSFSDIHTRLCKEATDLEKALKVKAETHPAVRRLMTIPGVGPLVSLSFVALIENPDRFAKSSDVGAFLGLTPKRFQSGDVDWSGRISKQGDKAMRALLVDAAATLIQNVKRFSALKSWAIRLAGRKGFRKAAIATARKIAVLMLTLWKNGTDFTPKMEASANPNFCSKLAAETMSGRDGGRSISRV

SEQ ID NO: 481461 - protein, 400 aa, unidentified
MNKSSFSGFLGVDISKDKFDAYCIDMNGEKHSYLSCPMDRTGFEKLVSRLESLSIPQENLLIGMESTACYHINLFSFLLAGGYTAVLINPLLISNFVKMQLRKTKTDKKDAFVIAQFLLMSVDALAQTIISPHISDLRDLSRQRESLLSQMTALKCDMKRVLTMTFPELEKLTGVFTKSILQLLSRFPSAQAIVQADPAEITQLLMDHSMGRNSATMTQAIIEAARSSVGTTSPSRELILKQKADVLIHLEGHLKELTAMMIELCRSGMGDDIDIMTSLRGIGEKTATSFLVEMGGDIRKFNNHKKLIAMAGIDPAIYQSGKHDGQGRITKRGNRHLRRVIWLMTIRVIQFNDCFRQHYQKRRQDGLPFKKAVLATAHKLLRTIFAMLTQRTAFNYVANS

SEQ ID NO: 481462 - protein, 373 aa, unidentified
MDYTTTFVGMDVHKETIAVAIAEEGHSEPVSLGLIPNNHDSLLKLLKKLQKPGRKLKFCYESGPCGYEIYRFLTERGISCIVAATSLIPTKAGDKVKTDKRDAKKLARLFRSGELTAVWVPGEAQEALRDMVRSREDAVRDLQRKRHQLGKFLLRLGIHPPLGIKNWSVKHRQWLDALKMELSAHQVVLSDYRNAMIQAEDRVKHLEREIALHVQGSVYEPVINALKALKGIELITAVGLVAEIGEFGRFKGPDQLMAYAGLVPSEYSSGAKSRRGSITKTGNHHIRWLVVESAWHYRHTPKVGYKLKKRQQEQTAIIKQISWRAQNRLNLKYRKLVGKGKLKQVAIVAVARELLGFIWSIAVEAEKEVKKAA

SEQ ID NO: 481463 - protein, 447 aa, unidentified
MTLDVVYKTGKAPILVRMLSKYVGRQTSSIENDITKIWNHSRQRGNIMRAVFGIDVSKASSEVAILVNSEKVHGYSMTNDAIGFSRLLKDLNTVSNPEIIFEATGVYSRRLQAFLEENAYAYTRLNPLEAKKQLDSLRVRKTDKIDAKKLAESQFILNRKSTYGQEEVYQNLRDLSRFYQNLTEDMVRTKNRLHKILQVTFPELEQLLSAPTGEQYWNLVFSFPSKDFVLDLSPSELAEVIRQSTSKRISEKRVTLLSDKLTELAKQSYCAVKKTSPMIEEIKYYAQELLRLIERRQVILDEMVNLAQPLPEYEILLSIPGIAETTATSIIGELGDVRRFHSANQINAFIGIDLRHYESGNFLAQEHITKRGNPYARKILFKCIHNIAAASHTNPCHIADFYEKRKRQSQTTSTKPHTIAAVHRLIRTMYYLITHNKLYDYTATQSH

SEQ ID NO: 481464 - protein, 399 aa, unidentified
MIAIGVDVSKGKSTVSACKPFGEIIFGPLDVAHTSNDLKELAESIKSLNEECRIVLEHTGKYYQPIARYLFDLGYFVSVVNPKLIHDFGNNSIRNVKTDKADSLKIANYTLANWDSLIPYDFEEDIRMQLKACCRQYYFYLNYRTSLKNNLISILDQTFPDCNYLFTSQKADGSTKWMDFALRFWHRDCVTKHSLADFTRIYNAWCKRHNYRPSDSKAASIYAFAAACVPSLPCNSSTKALIKTASEPLQATCNTMGNLLVEMNNLASQLPEYPVVMSMPGIGPAMCPQIIAEIGNIYRYHDKHALVAFAGVDAPPFQSGTFNSKRRKITKRGSANLRRVTFQIVCGILQRKAEEDPVYQFVRKKQSEGKPYYVYMIAGCNKFLRVYYGRVKEYLDKQA

SEQ ID NO: 481465 - protein, 317 aa, unidentified
METPSKDPFFGVDISKKKLDTAMWGDTRLWSFFNDAEGIPQLISFLQEKYPALVVVEATGGYEKAIVKALQQAKIPVALVSPKRVRDFARASGLLAKTDKLDAHNIAHFAYALHPRPTPPSTPEQIRLDELLARRRQIVQIIQDEKNRLQKGSQEMRDRILAHLAWLEDEEKNLSREIQSLIDHQPEMKAKADLVRTAKGIGPITASSIVAEIPELGLLDRKAIAALVGVAPMNNDSGKKNGKRRTQGGRQPFRCTLYMATLSAIRFNPVIQRFHDRLIAHGKAKKVANVACMRKFVTILNAMVRDNRPWRSQLVLA

SEQ ID NO: 481466 - protein, 339 aa, unidentified
MVLYGGMDLHGDNVFCTIMDQAYRPVFEERLPNELPVILEALAPYRERLKGVAVESTYNWYWLVDGLQANQYPARLANPARMQENIGLKSANDKTDARFLAKQMAMGVLPEGYIYTKEERPVRDLLRRRMRLVHMRTGEWLNLEGQVARHSGRDLGLTALRGLEAGELSQLLGGDPLVLEAAQINYRLIAFLDREIRQIEKAVEGRVKLTDGYERLLDVPGIGRILAMTIRLETGSIARFPGPGNYASYCRAVKTEHTSNDRKKGEGNGKSGNRYLAWAYVEAANFSIRYSPELRAWYQRKAARTKRVIALKALANKLAKACYFILRDGVAFDVKKLVG

SEQ ID NO: 481467 - protein, 429 aa, unidentified
MDEAVKPTTKSEDKHMKIHKYLGLDVHQDDSIIAVAEGDRTGEVRVYGKVSSDLYATEKALRKIRGADGVLHVAYEAGPTGFVLYRRLQQLGIDCIVVAPSKTPQPKGGRLKTNRRDALQLARLHRAGELTGIHVPDTVDESVRDLTRARSDASRDLKRAKQRLKSFLLRQGYHYTGKANWSEAHQRYLRELVLPLPALKSVLEEYLLAIDRSMERLTRLEELLVAQVPQWRMYPAVQALMCLRGFELVAASILVAEINDVRRFAHPRGLMAYLGLVPSEASTGDTRRLGAITKAGNAQARWILVEAVQSAANPPKVSAPLALRQHGQPEAYRALGWKTQVRLHKRYWHLTRRGVMAAKVKVALARELVGFVWDLLRQVPIPAAPATATGPASGTTLAVPPASATPAPVSRSATRRHQPGALLHALVGN

SEQ ID NO: 481468 - protein, 338 aa, unidentified
MELKRVGLDTSKAVFTVHGVDHAERVVVRRDLKRPALEAFFAKLPPTVVALEACGASHHWGRRLTALGHEVRLIPPQYVKPFVKRGKNDRNDAEAISEAASRPGMATVPVKSAERQAEAMVLSMRETLVKQRTQWVNTMRGHAAEFGVIAGKGVGRVSELLDKVASDATIPPIAKEMLSFAAAEVSHLDDRIGELERQMQRQHKANPVSQMLAKVPGIGPIGALSLALTVDAERFQSARHFSAWLGLVPKQHSTGGRQQLGSISKAGNERLRQLLVVGAMSVIRFAKPGSKSASAWLLQLLERKPRKLAAVALANKMARIVWAMMTRGEAYRPQAVAG

SEQ ID NO: 481469 - protein, 351 aa, unidentified
MLRQSTPSTVATIGIDIGKNIFHLVGLDQRGHVVLQLKTSRGQLDRRLANVPCCLIGMEACSGAHHIGRRLEALGHDVRLIPAQYVKPFLKGHKNDYRDAEAIAEAVQRPTMHFVRLKTPDQMDLLALHRVRSRLVGLRTGVINQIRGFLIERGITVRQGPAPLRKALRDILGSSSGGLSQRIVRLMIDLTEDWRRLDARIAAVSADIEALAEQDAPCQRLMTVPGIGPIISSAVVAAIGKGTGFRQGRDFAAWLGLIPRQESTGDRTILGKISKRGNKYLRTLFVQAAHVVLARRPSTAMQGLWPWIEQASTRLHRNMLAIALANKLARIAWAVLARGGEYQPKVVAHAA

SEQ ID NO: 481470 - protein, 440 aa, unidentified
MDAGNTECLTEPDWAAFIAIDWADQKHDWAMEVPGQSKRERGQMPHTPEAIDTWVMQLRERFTDRPIAVTLEQSRGALLFTLSKYANLVLYPLHPGTVSYFRQAMYPSGSKSDPLDADVQIELLVKHRDRLQVWKPDTEETRLLQFLVEDRRRRVDQKTGLLNQLIGRLKLYFPQILRWFSSSDSVLMWQFLEHWPDLQSAQKASRQKLKAFLIRDARSCPADVDDFIQQVREAIPATKDRAVVASAALFVQELVCQLQVLRNTIQKYEKQIEAIAQQHPDFPIVSSFPGIGKALAPRLIAALGTQRERFPDAKSIQSYSGIAPVREASGRREWVHARWACPKFLKQTFQEWAQHSMTRCAWARKHYDSQRARSKGHQAAVRSLAFKWIRILFRCWQARTPYDETRYTESLGRRSALPKPDVQIRWKNVAGFSKPAAFSA

SEQ ID NO: 481471 - protein, 392 aa, unidentified
MKKLYVGIDIAKHMHEATVIDETGAIIGGSLRFANTTSGAEKCLAYLQRLHADPEWSHVGLEATGHYWLALYSFLVAHQYHVSVINPYQSDAWRKVYLSSVKTDKEDAFLIADILRFGSFTETHVPDETHIALRNLTRFRVTVNLQMTDTKRRILTVLDQVFPEFAELFSNVFGKTATTILETYSTPEALESLSVRKLTNLVSKLSRGRFGKEKAQAIKDAAHTSFGVTYALDSFTMQLTLLLKQLELLNGQLDLLDAEINKRMETIPSTLTSIPGIGPGLAAAIHAEIGDIKRFRTSSQLISFAGINPTVRQSGNFTGTKNRMSKKGSPYLRLALWHAAVVASRANPTLKAFYEQKLREGKHPMTIYGAVARKLTGIIFAMLRDNKPFVVV

SEQ ID NO: 481472 - protein, 340 aa, unidentified
METMHYIGLDVHKKTISYCIKSHQGCTIDQGTIASTRPALRSWLGQRDMPWLGAMEATMFTGWIYDVLKPHATELKVAHPEMLKAITAAKKKNDRADAEKLADLLRVDLLPECTMMSSELRELRRILRYRNMIVRTAVSMKNKIAGLLMETGVSYDKRRLHGKRYFTTLINQRLEEVPESVIELLQLSRSNLELFTAIQKKLINVLRHHRAIRQRVETLMTIPGVGEILALTWVVEMGEITRFMSTRQAVSYCGLCSAQRESAGKEQRGPLSKKRNKHLQTMLVEAAKLAPRFNPQLQTVHERALRKGNRNRATLEVARRLVKYLLAVDRRGTPFVPQSC

SEQ ID NO: 481473 - protein, 352 aa, unidentified
MTLYIGVDFHPHQQTVAWCDTQTGETNTCTLPHNLSEVLKFYQSVSPSIVGIEASSRAVWFEQLLSETNHQLLVGNPTLIRARARSRHKSDVRDAQLILDLLVKNEFPAIWRRPQTSNQVIDVLHLRRQLVHQRTQTYNRLQALAHSAGLPKGKMKTLSFQSSLKAVPMNESGRMQREHLFSLLEQLTKQIRELQSWLNRKASTDKQVQLLLTQRGVGYLTALAMVHTLGDVSRFEKVSKQVIAFAGLDSLEKSSAGKTRFGRISKAGSPLLRGLLGQSANIVIRYDTRLKAFYKGLAKRKPIAVAKTATARKLLVKLAIMLRDNITADEFDRRGVTVGNARFWTRSEMTVG

SEQ ID NO: 481474 - protein, 349 aa, unidentified
MEHVGMDLGKKESQVTILSEAGELIEKRMRTERERLVEYFKDRPRAKILMEASTISEWVARVLEELGHEVIVADPNYAPMYAQRSRRVKTDKRDALALAEACKLGAYRHAHRTSDEQRHVRAMLAVRESLVRVRARCLALVQALLSLEGFRVAPGSSRCFAARVEKLELPEHLTAEVAPLLALLEPLNAQIELLDEKLGELARKDERVKRLMTMPEVGPVTAVAFVATLDDAKRFRGAHQVEAYLGLVPREWSSSEVQRRGHITKAGHSRMRWLLVEAAWRLATHKKRPETQPLRDWADRIARRRGKRIAIVALARKLSGVLYAMWRDGLPYDPAKLGNAQVAKTEHAA

SEQ ID NO: 481475 - protein, 368 aa, unidentified
MGQKSSKLYVGMDVHKESIDLAVAEEGGEVRHHGQIGGEMNALWRAVRKLESSGRELVFVYEAGPCGFGIYRGLTARGHTCWIVAPSNTPRRVRDRIKTDRRDSLKLAGLARAGELTPIYVPDVRDEAMRDLVRGREDAVVMQRQARQRLAALLLRNDVRYAGKTAWTAAHRRWIADLKLPQSAQRLAFEEYVQAVEEASARVQRLTQCIEQELAHWRWRSVVVALQACRGIQLIHAVRIVAELGDLSRFSHPRQLMGYLGLIPGEDSSGEHRHQGAITKAGNSSARRALVEAAWAYQYTAKVSALIARRQADVPKAALDIAWKAQVRLCARFRRLAARGINRNKIVVAIARELAGFVWAIAQHVKPV

SEQ ID NO: 481476 - protein, 397 aa, unidentified
MYIVGIDIAKRKHEAAVIDGDGAVIIKPFSFTNNCSGYNRLLAMLTKAKLPLDEVSFAMEATGHYWLALFTRLQKEGFRVQVINPVQTNSIRNFYIRQAKTDPRDALLIAEVIRFGHFSESTLHPENIYELRELCRGRHAIVSMQADVKRKVVALLDQVFPEYETAFTNMFSDTSMAILQTCPTPKELSEMPLEELCHLIEVSSHKRFRMAKAQDLQALARNSFGFAMAGDVFSTMIRLYAKHLDFLKQQVREMDRKIAEIMETLDTPITTITGIGPTLGAYILSEIGDISRFSSAAKLAAYAGIDPTMRQSGEYNGVRNRMSKRGSPYLRHAIWLAASSAVLHDPALKLYFQKKRDEGKPYMASVGHACRKMVSIIYAVMRDNKAYTPCIPNEISA

SEQ ID NO: 481477 - protein, 314 aa, unidentified
MSGNFVGVDVSKDRLDVAVLPETSSWSVPNDEAGIQALVKRLLPLRPARVVLEATGGYEMAALGALAGAGLSVAAVNPRQSRDFAKAAGLLAKTDRIDARVLARFAEAMKPEIRPVPDAAAQKLGALIARRRQLIQMLTAEKNRRQIAPKSMLKEIDRHVAWLEESLRRIDDDLQKTIRNSPAWREKDDLLQDVEGIGPKTSAVLIAELPELGQLNRHQIAKLAGVAPMNRDSGRYRGERHIQGGRAMVRSALYMATLTAIRCNPVIAAFYRRLRDDGKKFKVAITACMRKLLVRLNAMLRDRVPWREKSPQIA

SEQ ID NO: 481478 - protein, 346 aa, unidentified
MEHYVGLDVSLKLTAICIVDRTGKIEREGVVASDPETIAAFVKSHAPHVARVGLETGATSTWLWTELNKMGLPVICIDARHAKAALKLQINKSDRNDAVGIARIMQCGWYKEVRVKDLDSHAIKALLVSRALLVKIKRDIENQIRGLLKNLGLVIGQAKMNVFSVRAAELAEARPELAAAVEPLLKAREAIGRQIADLDRKVMRLARNDAQVRRFMTAPGVGPITALCFLATIDDPSRFKRSRSVGAYAGLTTRRYASGEIDWTGRISKCGDKMLRSYLYEAANVLLTRVAKWSALKAWGIRLAKRSGLRKAKVAVARKLAVILHRMWIEGTEFNWSSKEAANQPA

SEQ ID NO: 481479 - protein, 336 aa, unidentified
MKKKFDYYVGIDVSKLTLDVTVLYECNDTTKNEHYKIENNEKSIVQFVKKKLSNYASEQMLFCFEDTGIYSLPLAYYLSGNKLSYWQVPSVEIKRSKGITRGKSDKIDSKDIAFYAYTHTHKFRPSVMSAKSIQQLRLLFTEREKVLKALALFERTSENKNFVKKEVFNAVASVNKSVVNKLNQALKSIEEKMLAIIDSEDRIKQQYKLITSIPGIGTQTAIYIIIATKGFDTFDNWRQLACYAGIAPFPHQSGTSIRGRNKVHPLADKKLKSLLNMCAIVAVRYDKELKTYYERKQKEGKPKMLVINNVRCKLLSRVFAVINRKTIFINTFKFAS

SEQ ID NO: 481480 - protein, 400 aa, unidentified
MNAVGIDVSKGKSIVAVLRPFGEIVSKPFEVLHTSSDIQQLIDFLNTLEGSTRIIMEHTGRYYEPVAQWLTDAGFFVSTVNPKLIKDYGYNSLRKVKTDKADSLKIARFALDNWQELRQYTCMDTLRNQLKTLNRQFGFYMKQKTACKNNLIALLDQTYPGVNALFDSPARCDGSQKWVDFASSFWHVDCVRGIGLVAFTDRYQKWCKRHGYNFQRGKPAALFKASKELISMFPKDSMTKMLIKQAIEQLNTVSATVELLRTEMNRLAAQLPEYPVVMAIKGVGPSLGPQLMAEIGDISRFTRREALTAFAGVDPGANQSGKYEAQSVRTSKRGSPQLRKALFQVMDCLIKTTPTDDAVYRFMDKKRSEGKPYYVYMTAGANKFLRIYYGRVKEYLSSIS

SEQ ID NO: 481481 - protein, 374 aa, unidentified
MQSIVYVGMDVHVDNFTLACYEFGKRPFAQNQVKNADWRTVIKYLENVQKNRSGEEIHFVCGYEAGCLGYSLYHELMKAETSVSLDCIIMAPTTMAVQGNKPKTDHRDAVMIAQNLANNTYSSVYVVDEEDNGVKDFIRMKDDTKARCKALKQQILALCLRHGKQYTDAGKWTLKHRDWLKKLDLGERNSNRALQEYLHQLSQVEEDLERYDREIEEIAAGERYAEKVGQLRCFRGVETCMALAFLSEIGDFRRFASAERFAAFLGLVPGEHSSGGNINRTSITKQGNSHLRKLLVEAAQSYTRANLYEKSKKLKEKQCKQNRQIIDYCDRGNFYLGRKYHRLVNRGKNSNVAKTAVARGLACFIWGLMTENIS

SEQ ID NO: 481482 - protein, 355 aa, unidentified
MDRTKYIGMDVHQASISIAVRDASGKLVMESLIETKAATILEFLQGLKGTLWVTFEEGTSAAWLYDLLKPHVVKVIVCDPRKNALLKTGNKNDRVDARKLSHLLHAGLLTPVYHGESGVRTLRELARSYLTLTKDLTRVMNRLKALYRSWAIPCVGEKVYSPRHRSAWLEQLSEAGVRRRAEQLYQQLDILLQIRRDARRELLRESRKHPAHELLRQIPQLGPIRVALLIALVQTPHRFRTKRQLWAYCGLALQTRSSGEYRFTAGQLQHSNRLPALRGLNTNHNHDLKNVFKSAAMHVSTSQDALGDFYRSLLAKGMKPAMARLTLARKMAAIVLTVWKKGARFDPGELKRQAA

SEQ ID NO: 481483 - protein, 407 aa, unidentified
MEVFLGVDWAEDHHDLCLQDQVGEVLFSRRIPDGLDGVQLLHALVADHVEVPAEVVVGIETDHGLLAASLVAAGYQVYAVNPMSVSRYRDRHHSSRAKSDKSDAKLLAGLVRTDRHNHRRAVPDSELLEAIKVLARSHQSLIWTRQRLANQLRSSLREYFPGALAAFEDLHHHDTLAVLGKAPTPPQARQLSTTQIRAALKRGGRQRNLQRRAEEIHAVFQQPQLRAADLVEDAYGTATAAQARIIGDLNEQIAVLEAKLEERFNQHPDAELLLRLPGLGVILAARVLAEFGDAPNRYLDAKARKNYAGTAPITRASGTSEVVIARMVRNKRLFDACYQWAFCALSASPGARTYYDAHDPGPKTGKTARRKLANKLVGVLHGTLTHRTTYDETTAWQHWQVSEPHAA

SEQ ID NO: 481484 - protein, 341 aa, unidentified
MTQYVGLDVAMDETKIHVLDGDGKRIWRGKCQSNPDDLEAVLRQRAPQAERIGIETGPLTTWLWTELTVRDLPMVCLDARHAKRALDMRANKTDANDAEGLAHIVRSGWYREVRVKGPEAMFSKALVGARTQLTTMTTDLSNQIRGIMKTFGLIVPKGSGGIFERNVRALLDNAPTITAVIIPLLEVWRMTRQRTAELDRRLLAAARESADCRLLMTMPSIGTVTAASFIAAIERPESFSSSRDVGAWLGLTPRRYQSGEIDYEGHISRRGDSRLRALLYEAAMRLLTRVRADSALRRWGLALKARLGFKRASVAVARKIAVILHAMWRSGKTFDPAAAAA

SEQ ID NO: 481485 - protein, 410 aa, unidentified
MRRMKGKRSASSIVGCAPKCAEPHAETPEGVLPQAFRGGRPVSKTITSFVGLDVHKDSTALAEAEAGRETPRFIGTVGSELGQLLKALRSLGKPETMLVVYEAGPCGYGLARQLRSRGYSCEVVAAGKIARRPGERIKTDRRDALTLARLARSGDLVKVRVPDERDEAMRDLSRTREDAVKARLKARQQLKALLLRHGHRYGGKSSWTLAHERYLATVGFAHPAQDIAFAEYRQAVREGQERVERVTQALRTQTEHWRLQPLVAALSSLRGIDFVAAVTLAAEIGDFGRFAHPTELMGFLGLVPSEYSTGDTRRQGDITKTGNGHARRVLVEAAWNYRFPARISRILQIRQEGQPKAVREIAWRAQLRLAHRYRRLSSRKLHPNKICVAIARELAGFLWDIARQVKVAEA

SEQ ID NO: 481486 - protein, 409 aa, unidentified
MQPILKSCCGIDVHKDMIKACIAKGPLDKPPKFEIRTFSTMTSDLLKLKDWLRQNKVESVAMESTGIYWKPIFNILEDEFPIVLSNPQHLKKIPGKKSDVSDSQWIATLLRCGLIPASFIPPKSIRELRDLTRTRRKLVGVMASEKNRIQKVLEDANIKLTSVVSKVDGVSSMNMIQALLTKDELTREEIKAMVHGKLRSKIDQLVEALNGKLTDHHRFLLKIHLENIAFMAEQIQELDEEIQKRMIPFQKEAKLIQTIPGINSNTAAAIIAEIGVDMSQFPDVAHLSSWAGISPGNNESAGVRKSGKIRKGDKFLKATLVEAAWSASKRKGSEYSAIYNNIARRRGKKKALVALGHQILMDVYRVLKTGEPYVDEGAEAVFKRNSAARQKSAIRFLEQSGYIISKASA

SEQ ID NO: 481487 - protein, 414 aa, unidentified
MNYSPITAVGVDVSKSKSTVAIRRPGGEVVRLPFDVQHNTEDIQQLISMLHKVDGEIKIVMEHTGMYWRPLALTLVNAGFFASVVNAMLIHDFRDNSIRKVKTDKADSMKIANYALTYWAELRPYTSEDETRNMLKIQSRHYERTMNTSIALRNGLIALLDQSFPGVNHLFGSEMRTRSGHLKWIDFSRRFWHKDCVAVVSLNSFADSLQKWCKRTGYHYSYADAERIHRIAKSSIATFPKNDSTKLLITQAVDSLNAVYDALNILRSELVRLASLLPEYDVVTAMQGAGPITGLQLMAEIGDVRRFTHKGALVAFAGMDAPPFQSGTFDSKSRQISKRGSPHLRKVLFTICSIILQHSNPENPVFQFMDKKRSEGKHFYVYMVAGGAKFLRIYYARVKEVLDAQDTLNAQIQS

SEQ ID NO: 481488 - protein, 376 aa, unidentified
MTKTELYIGLDVHKETITAAVAEGGRNGEVRQAGTITNDLHALEKLLRRIRGDQDRTLHVCYEAGPCGFVIARRLSQLAIDCTVVAPSLIPKKPGDKIKTDRRDAEKLARLLRAGDLSPVYVPEATDEAIRDLCRARTDAVDDHRRARVRLKAFLLRHGFRYSGKSTWTPAHIRYLRELVLPHPAMKVILEDYLCAIDAAHERVERCETAMEELLGTWRLRSAVEAVMAFKGFKIVAAMITVSELGNIHRFAHPRQLMAYLGLVPTESTSSETRRQGGITKCGNPHARWLLTECAQHYATPPKVSKELSMRQNGQSREVKEISWRAQNRLHSRFKKLIGRKIHRNKAVIAVARELTGFLWELLRGLPCYTKVANAQ

SEQ ID NO: 481489 - protein, 338 aa, unidentified
MHITTLGIDVAKSVFQLHGVDARGRAVLSRRVKRQQLLDTVANLPACVIGMEACGSAQHWGRAFEQLGHTVKLMHPKYVKPYVKTNKNDGRDAEAICEAVGRPTMRFVSIKTVEQADMQALHRTRSLFMKHRTAVINQIRGLLAEYGLVIAQSPEKVRPAVVRFLDDAASGLTAFARDTFSELSEQLTELDARIERVTHRITRVYRTHPVCQKLAAVPGIGPLTATVLLATVGRPQAFRNGRHLAAWLGLVPRQYSSGGKERLGGISKRGSRYVRTLLIHGARAVVQRAARRTDTQGRWLCALTHRKGTNVAAVALANKNARVVWAMLAHDEEYRPPV

SEQ ID NO: 481490 - protein, 370 aa, unidentified
MGSIAFVGMDVHKATIAVAVAEGGRDGEVRQLGTFPNRADVIARLVRRLAGQGRELRFCYEAGPCGYGLQRQIQELGQTCEVVAPSLIPIRSGDRVKTDRRDALSLAKLHRAGELTPVWVPDAAHEAMRDLIRARATAVRVLGKARQHLQGFLLRHSRIYAGRRAWTLAYRRWLTTLRFEHPAQQIVLQDYIHAVQSAEQRVRQLVEQIAALLPSWSLAPVVQALQAMRGVALIVAVTVAAEVGDFSRFVNPRQLMAYLGLVPSEHSSGSTVRRGGITKAGNALARRVLIEGAWTYRMQARVSRKLHDRLEPLPDSVRDIAWKAQTRLCGRYRHLIAAGKAKVVVTTAIAREMVGFIWAIARQVRPQPAR

SEQ ID NO: 481491 - protein, 396 aa, unidentified
MPEIWAGVDIGKEHHHCVVINADGERLLSRRVLNDETELLELIGDVLAISADVLWAVDLNHGGAALLIGLLVSHDQPMAYLTGLAVHRASATYKGEGKTDAKDAFVIADQARVRRDLGLLRPGDEIAVDLRTLTNRRLDVVFDRTRQINRLRAQLLEIFPALERSLELVNKGPVMLLTGYQTPAAIRRAGAKRIETWLKNRKVRGAAALAKTAVEAAQAQQTALPGEKLAAAMVVRLAKGVMALDEEIAELDALIEARFREHPHAEVIRSLPGMGAKLGAEFIAATGGDMDAFGSADRLAGFAGLAPRPRDSGRVSGNLRRPKRYHRGLLRSMYLSAMVSITTCPASKAYYQRKRSEGKGHKQALLALARRRLNVLWAMIRDGQCYQGSPPVTAAA

SEQ ID NO: 481492 - protein, 392 aa, unidentified
MIFVGIDIAKRSHVASAVDEDGGTVVESFKFNNTASGFAKLLKRLRKADATPENSLVGMEATGRYWVALFDFLSSHGYEAAVINPVQTDALDAAMIADLVRYKRYSPSALGDEATEELRNLARYRMSLVERSTALKNRATAILDRTFPELAGLFSNAYCPTRRELLQHCATPDQVLGTDVGTLERILREASRGRCGRAKAERLKALAEASVGVGFGSKTLAFEVRLLMEELDFVQGQIKEVEGELESLLERTRGKWLVTIPGIDVPLASVIAGEIGDPDGFDDPHRLMGYAGMDPTRSESGETVKSDGRMSKRGPGALRWALMQAADCARKNDPYFGDYYDRKKGEDKKHHYVALSGVARKLMGVALAVMKEGRPYEPAPPRNHRPGHLKEA

SEQ ID NO: 481493 - protein, 379 aa, unidentified
MREATRFVGLDVHAETIAVAVAEPGRGEVRSLGIIPNDVASVRKLIQKLGKKDLRVCYEAGPTGFVLYWQLMELGIECEVIAPTLIPTKPGERIKTDRRDALKLARCFRAGDLTRVWVPDQAHEALRDLVRAREAAKYDQNRDRQRLGKFLLRTGKKAPTGCSKWSQKYVEWIRALQYDHVAQQATLVDYLAEVDHAGERILRLEKAIDHAVEQASASMRALVDGLQALRGVGKLTATTLAVEIGNFARFQTAKQLMAFCGVVPSERTSGNTRRQGAITKSGNAHVRRVLFESAWGCRHRPNLSAALKQRQRGLSPTTNEIAWKAQHRLYRRYVALSARGKPSPKIVGAVGRELLGFIWAIGVQIEQEHAATKPQKLAA

SEQ ID NO: 481494 - protein, 342 aa, unidentified
MKDMMIGVDLAKNVFQVHGALRTGEVQFRKKLTRAQFSAFMAQQEHCLVIFEACGSAHYWAHEIEAFGHEVKLIAPQYVRPFVKRQKNDAADAEAIVIAARQPEMRFVEPKTVEQQSRAAVFRGRERLVHQRTADVNALRALLYEHGHVFPQGIRYLNRMTALVEDETTDLHALIREECLDLLAQIAEKTARIIERNTKLKTLAAESDKARQLQTMPGVGPLTAVAVEAFGPDMAQFKTGRDFAAWLGLVPKQHSSGGKERLGRMTKAGQADIRRLLIIGAMSRLGWLGQRKIVEGSWLSRMLARKPKMLVAIALANKMARQIWAMLTKNEDYRDPALAGAA

SEQ ID NO: 481495 - protein, 400 aa, unidentified
MDVHEKKVDVCIAHGPLDKPPKFEIRTFSTMTSDLEDLKIWLKKYDVTTIGMESTGVYWKPIFNVMEGELKIVLANAQRLKAIPRKKTDIMDCKRIANLLRYGLLPNSFIPPREIRELRDLNRTRRKFVGMMTSEKNRLVKVLEAANIKLSSVVTKIYGVSSLAIIRSLLEKNKLSKDDISKMAKGKLKKKVDLLEKAVNGKLTDHHRFLLEMHLQNIDYLAKQIKKLDEEIEKKMVPFQKESNLIQTIPGISEVNASAILAEIGVDMSQFPDEAHLSSWAGVCPGNNESAGKKKSGKTQKGNSFLKGALTEAAWAASKTKNTSYNAFYHNLVRRKGKKKTLVALAHRMLIDIYFVLKTGEPYQDMGAEAVHERTSKRKERSMIRSLEKAGYSVTKAATA

SEQ ID NO: 481496 - protein, 355 aa, unidentified
MEEVTKLSFKGQSIYVGMDVHKKSWKVSLFTDTCEIKTMSIPPSVEVLSGYLHKMYPEATYYSVYEAGYCGYWIHEKLQRAGIFNMIVNAADVPTTDKEKKRKTDPVDSRKLGRSLRGGELKSIYIPPETKQNDRLLLRARHDNVKKQTRCKNQIKSVLNFFGIFLSDEKIKSHWSKAYIQWLKSLCNDSSGKTIKLKTLIAELEYFRRTISDLTKSIRTLSLEPAYKKYVKLLTTIPGISTLTAMTILTEFGDIKIYSSVDKLSSYVGLIPDEHTSSDNEKRYGVTKRGNRYLRKVLLESSWVAIRKDPSLYLSYRNYLKRTIAVKSIIKIARKLLNRIRYVLITENEYQLMRY

SEQ ID NO: 481497 - protein, 362 aa, unidentified
MIMNNTPQIYVSVDIGCRQHSVAIGLPNGDVLDEFDILHRPEGFKQFFERIEHHHRHYGGTVAVAMEGYNGYARPLDSLVKVHGYQLYNINNLKLARFKEIFPAAAKNDRIDACKGLELFQLRDHLPLAKDVLQEIMPAPRENDMLKRLSRRRHALVDEKSRLQSRLQGDLHAVCPGLLDITKDADNLWFLRFITSVDELTKLSRLRLSTLLKIPGVGRKDINAWQSHASFSPEVEWVGEMIIEDARRILALKNDIKALESRCKTLMQESQAAKLIDSIPGFAVICASELAGEIGTIDRFASERSLALYLGMANLDNSSGKFRGSKAPKHVNKRAKGAMMAAVDKHRKCVPESQRYYEKKTG

SEQ ID NO: 481498 - protein, 408 aa, unidentified
MARYYLGVDWADQSHQLYVSDESGRKIRELEVQQTADGLAELGRWLDESRSQGIELWAAIEKPEGRVVDFLLDHGVVVYPVNPKALDRARDRFRMSPSKSDGFDAYVLAEFLRTDHAHLRALEPNSAEGQELKMLTRDHQRLGRQKTRLLNQIGITLKEYYPVPLEVFESLDTKIALDFLKAYPTPQALSKLTRRGWKRFAKRDHHLSEARCSELWDKLNKPQLAVPAHVVRAKAKLLAALVMQLETSVKAVDSYSQEVQSFFAAMPAAEIAKTLPGGKSGTTVASIWAELGDAPKRWNSFRHLQAEGGAVPVTKASGKSRMVQFRFACNKHLRQAMYWFSFNSLQRSEWAKKYYRNQRAKGHSKHESLRALGAKWLKIIFVMWRDHKPYDENYHLANIARQMMRQAA

SEQ ID NO: 481499 - protein, 346 aa, unidentified
MYQDNLFALDLSKETIQGCLFSKSHHVKLNRGFTPRKLVEWLSGQSPLTVVMEACSTAHYWVRVVERLGHRGLLVPTRTSNRYREGHKTNSTDALAVGVAARQPTTKFVAPKTIEQQELQSVERIREHLSDQLTATSNMMRSLLAEFGLPIAKGKKAFKHRVVEYLEDVDNEIPLVLRTTLIEQWDYYLDLEKRLRQVTRTQEQLVNQHEACRWLQQLEGVGPVNALGLYLALGDRGSSFKNGRNAAACIGATPKQYSTGDTVTMGGISKVCANKRLRSNLIQGARSVIKQLKKRDPRNRKEAWLKQLMERRGDGRAAVALANKTIRVAWAMLHYGDEFKLHPNMT

SEQ ID NO: 481500 - protein, 433 aa, unidentified
MASRTYSKIIAFRRARRDNFYKERLVMEVVYRCCCGIDVHKKVIVACLVNGGEQELREFGTTTSEIKTLANWLTESGCEMIAMESTGVFWKPLYNLFELMDLDAMIVNAAHMKALPGRKTDVKDAEWIADLLRHGLLKASYIPNREQRELREITRYRKSLTEERCREVNRLQKILEGANIKLDSVVKDITGKSARKLLQRIIDDDIPDSDEVSKLVHGRMRPKLDQIVASIEGITTPLQRKLLAQIIDHIDDLNRRIGELDKLVQEYMAEYEAAIEAIDEIPGIARRSAEVILAEIGLDMGRFPSVAHLCSWAGVCPGNYQSAGRRKHGKTTKGNKALKTILTQCAKSAKTVKSSYFFAQYQRISARRGKNRATLAVAHSMLIAIYHILKNKTAFHDLGSDYYDSFNRDRKINSYLKRLKALGWEPDAIPSSA

SEQ ID NO: 481501 - protein, 355 aa, unidentified
MKTKIPSITIGLDLGDKKHALCVLNEDGDMIDERTMTNHRESLRRLSLKYPGSRIAFEVGSHSPWIKRFLSALGHEVFVANPRKLRAIYTSDRKSDRNDARMLARIARMDPKLLYPIEHGSEEAQRDLLQIKLRDNLVRQRVDIISSVRFTLKSLGVSLPSPNSACFAKRCRTLLAGEHQTLLETIEPSLQVIDVMSLKIRELDKSIEKLCDEKYPVTKRMRQIVGVGSITALSFVLTIEDAERFERPRDVAAYLGLVPRRDQSGGLDKQLRISKAGDAYLRRLLVGSAQYILGPFGPDTDLKRHGLMLATRGGGRNKRKAVVAIARKLSVLMLTLWKYERDYEPLRVDQEAQAA

SEQ ID NO: 481502 - protein, 355 aa, unidentified
MQKYKVSFKGQNIYVGIDVHLKTWHVTTLTESGYKYSFAQHADAKELFDRLNKKFPEAHFKSAYEAGFCGFSAHYALTELGVENIVVNAADIPTTGKEKVMKTDAVDSEKIAWSLKRGELKGIYVKDKRYMDDTNLMRLRQRFIKDLSRLKCRTKSLLYTQGVTYPERFSRNRTHWSRNFMKWLREEVELLSEEKMTLMLLCDEVENMRKAVLKVTREIRRLSTTEKYKENFELLTSVPGFGLIISMTMLTEMDNNPMRFPNERKFVAMLGLIPTCHDSGEKTVNGEKTFRGNKQIGPLIVEASWIATQRDYQLGAYYTNCCQSMKPQKAIIKVARRLACRAYAVMKTKKKYVLS

SEQ ID NO: 481503 - protein, 387 aa, unidentified
MSHKVAVLIPASVDYEKTLVLAIEVSNESWVLAAQVPGQPHTKAKRKINPDAESLKTAIAGYRTRAAATGSSIERIIAVYEAGWSGFWLARWLMSHGVEAYVIQPSSVPIDRRMRRAKSDGIDAELLLRTLLAWLRGEPRVCSMVPVPDEADEDARRCIRERTELISERVGLTNRIGAVLATLGVSDYNPLLQSRRRRLAELRTGLGEPLPPNALAKIERLLARLELLLAQIAELERERDAVMETEAPDKASKMIQQLASLRGIGVQSATVLVREAFIRRFANGKALGSYAGLASSPYSSGGIDREQGIAKAGNRRVRTVMVELAWLWTRYQPGAAQVCWFRERVKSTGRRVRKIMMVALARKLLIALWKFVTDGVVPEGAVLKPAV

SEQ ID NO: 481504 - protein, 361 aa, unidentified
MAKVRSWAGLDVHARSVLAVTMDAETGELRCQRLTAQTANVLGFLAALPGPTRVAYEAGPTGYGLARALHAAGIGCTVAAPGKIERPAQDKVKTDLRDAERVLRLLMIDALVAVRVPTVEEEAIRDLVRAREDVRGDLMRWRQRLSKLLLRHGIVYEDTGSTWTQRHRAWIRAQDLGGGAQVTLLDHLGAIDTLELRRGALEQSIGELVPASPYADTVARLRCLRGIDTLSAVGLAAEIGDLTRFDRPGKLMSYLGLVPSENSSGETRRQGRITKTGSKHARRLLVEASWHYKKTPARGVTLQRRQEGRPATVVAISWQAQQRLHRVWRRLCEERGKRSTIVAVAVARELAGFCWALARTD

SEQ ID NO: 481505 - protein, 335 aa, unidentified
MNKRQAEVRWYVGVDVSARELVVAISQGVSTTMHKYANTAAGHKQLQQALQQLPGVVWVVMEASGTYSLDVALVLARMGERVQLQMVNPRRARRFAESLGQRSKTDPVDTLALCQYAQRMPMVCWQPPSAAALRLRALSRTIAALVGMCTQHKNRQHALAASAALPACLVRELEAQVRYTEKRIAKLRRQAIQLIAREPELARRFQHLLSVPGVGEASALAVLGELAVLPDSLDERQWVAHAGLDPKHHQSGSSVAHKPQISKAGNRYLRAALYMPALVAVQYDPALAGFYQRLLHHGKAKLQALTAVMRKLLHAAWGMFRHDQPYDGAKLCPQT

SEQ ID NO: 481506 - protein, 405 aa, unidentified
MKERQKYIYIGADVHKEQHTAVLINCWTEVLGDFTFASKISEYPKIMEEIKKIIPEGLIPIWGLEDVGGNGRSLAVFLKENGYIVKEVNPSYSSSERKNHPTTKKNDTWDAECIANVLVKKLNELPDANPSDLYWTLKQFVYRRESIVKSLTTTKIQIHEQLVKNYTSYKKFFSEIDGNTALAFWEKYPSPSKLDGIEAEELRLFLLKASNNACSTKKVESILSLIEGDGDTFREYQKDRDELVKSYVRSIKFYKKEIENLNKGIKIILSKLDYKLENLTGIGTVTAGQLISEIGDINRFKNSDKLAQYCGIAPTRFSSAGKGKDKKSKQGNRKLNGVLYFLSMQQIQITKGTKKPRNPILYEYYQRKLTEGKTKVQALICIMRRLVNIIFGMMKNKTEYVMEYR

SEQ ID NO: 481507 - protein, 318 aa, unidentified
MTFTPIGIDIAKAKFDAAALRHGKYQTKVFHNTPEGFTAFLAWLQTFPAPHVCLEATGRYGDALALFLSDHDLAFSVINPTPIHAFGQAELSRTKTDKRDAKRIARFCHSQRPPLFQPPPPAVRQLQALVRRFDNLVEMRQMEKNRLEGADPTVRTSIETLLATLEAEIATPRNRIREHIDHDPDLRQRRDRLDTIPGVGDATIAVLLAALGDVHRFDRARCVEAFAGLSPQERQAGKWKGHTRLSKIGDARLRKALYFPALVAWRHNPLIRAFCERLKAQGKNGKIIACAALRKRLVLAYGVLKSGQPFDPNYALAA

SEQ ID NO: 481508 - protein, 408 aa, unidentified
MQVLYARCAGLDVHKDTIVACVRCVSPPMHQEVRSFGSTTTELLALADWLGEHDCSHVAMEATGVYWKPVWHVLEGEFELVLANAAHIRNVPGRKTDVNDAMWIADLLAHGLIRSSFVPPQAIQQLRDLTRTRKQLVREVSQHSLRIQKVLEDANLKLGSVLSDVLGKSGRAMLDAIVAGQSDPAQLAALAQGTARHKTAELREALRGRITEHHRTMLRLHLQVIDALQRTLAELDTAVGKALAPIRQRARLLTTMPGVSDLTASVLVAEIGVDMARFPSAGHLISWAGLCPRSDESAGKRRSTRVRKSGTWIKTTLVTAAWAAVRVKTSYLRAQFLRIKARRGAKKAILAVAASMLTAAYHMLRDGTEYNDLGSEHFDHQDRSKTIRRLLKRLQDLGCDVPELAHAM

SEQ ID NO: 481509 - protein, 420 aa, unidentified
MKDLLEISCGLDVHKEKIVACILTGPLGKPTRSEIREFSTLIPDMIALRNWIVSKNCHHVAMESTGIYWMPIYEILEDAFSGDITLLVVNARHMKNVPGKKTDMRDSEWISTLLRAGLLNGSFIPEKRIREFRDLNRYRKSVIRDITSQKNRIEKFLQSSGFRLSSFISDIFGASGRNIILHLIEHGQIDKTALDSCLKTKTRNRIDEILMSVNGTLSEHQKAFLRILMTHYDSLKKHLAEIETSLEEDMAPFALQVEQLNSIYGISTTASCAIIAEIGIDMKPFKTAEHICSWAGLCPGNNESAGKRKSTSVTKGNPYIKSMLCEIAWVIAGKRNTYLSAWYWRIKQKKGAKKAIVALARKLLVIIYTMLKQGTLFDESCFETRRKHCEQKQLSRYIRELEKHGLKCYTNVVTVVANKI

SEQ ID NO: 481510 - protein, 339 aa, unidentified
MKAYAGIDLHSSNNYVGIINENDQRLYSKRIANNLDNVLMALEPFKKNLKGVVVESTYNWYWLVDGLQRNGYDVHLANPSAIKQYEGLKHTNDQWDSFWLAHMFRLNILPEGYIYPKEQREVRDLLRRRLLFVKHRTALILSFQSMVARNLGIRISGNAVKQLTTEKIREIFTTPSLVFAAEKIIDGVRFLGVTIRDIEKHVLSRAKLRKEFELLQTIPGIGVILALTIMLEVGDITRFPKVGNYSSYCRCVNSERTSNGKKKGENNRKNGNKYLAWAYVEAANYAKRFCPEAERFYHRKKATRNSVVAIKALSNKIARSSYYMLRDQKPFDKGKLFRA

SEQ ID NO: 481511 - protein, 350 aa, unidentified
MLIIGCDYHPSFQQIAYVDTDTGELGERRLAHPEEAGQFYGELKQRNVAVRVGMEASGHARWFERLLRQLEFEVWIGDAAEIRTKRVRKQKTDRQDAQLLLRLMMEDRFPRIWVADAENRDLRQLLWHRHRLVQMRTRVMNQLHVVALNEGLQRKKALWRPAGRNELESLVLAPWASRRRQDLLELLDQLAPKIAELTQALEREVEKRPVTRRLMTHPGVGPLTALAFELVIGTPERFRCGKQIASYVGLIPEEKSSGNRRRLGHITKQGNALLRFLLVEAAQVTVRSQPQWRSRFFHLAMRRGRKIAKVAMARKLAVHLYWMWRQGLDYGQWQKLGSHAGEPGNLYGGK

SEQ ID NO: 481512 - protein, 374 aa, unidentified
MKNSITYVAMDTHKKQHKIAYQQPGQMEIIECTVLNTARDIKKMVQKILREAPGPVEFCYEAGVCGFTLKRRIEALGCRCRVIAPSLVPRKPGERVKTDRRDTRKLLPLFQADLLTEVQAPDEPQEAARELTRLRETAQENLKRIRHQILKFLTRHGYVYTEGHHWTQKRMTWLQALEFEQPRLTQVFENYFAELVHCLSRLKNLDQEVTLLAQSPRYKEIVDGLCCFHGINTLTAITILTEIFAFGRFESARHLMSYLGLTPSEDSSGEKQRKGAITKTGNKRIRRLLNETAWHYRHRYHPSKALEQRRTGQPAWAIAIADNAGQRLSKRYRDLIRKGKLPTKANIAVARELAGFIWFMITQYEARANTKEAA

SEQ ID NO: 481513 - protein, 335 aa, unidentified
MWPPQQAHFSSGRQAYANHRSNPPYIGVDVSKDTLVSCVHSSGVRGTLANQRAAIEAWLSRLPAGSRIGMEATGTYHELLADLAQRKGMLVYVLNPKDVRHYAKGVGMRGKTDRVDAALIARYIAHEHAKLHPYRPPTPEQRQLQRLLGRRAKLSRARAGVQQSLHGLPGLKRPLRNLLERFDALIAVIDARIQGLVNACPQRQAACERLRSIKGVGPVVGPALLNPLEHFVFASADSFVAYSGLDPCPDDSGQRSGRRRLSKHGPSELRRLLYNAAMAAVTSPAWKPLYQHYLDKKLARTEALVIIARKIARTAWSVYTHNTTFDPLRLTSGLT

SEQ ID NO: 481514 - protein, 353 aa, unidentified
MALAEDGRDGEVRFFGDIDASPASIAALATKLAKRGARLHFCYEAGPTGYDLYRQIIVLGHDCAVVAPSLIPQRPGDRVKTNRRDAVSLAKLHRAGELTPVWVPDVGHEAIRELVRAREGAMEALRRARQQLLSFLLRHGRIYTGRTPWSKAHSSWLCGQTFEHPAHQIVLAEYRHAIEEAEVRLKRLTAQVTETAASWSMAPVVKAYQAMRGVAFMIAVTFVAEIGDVRRFENPRQLMAYLGLVPSESSTGERVRRGGITKAGNSRARRVLIEGAWTYRFPARMSRLIQGRQDDLPKAVREIAWKAQVRLCGRYRKLIAAGKLKAVTVTAIAREMAAFLWAIGQLVVPVLAA

SEQ ID NO: 481515 - protein, 386 aa, unidentified
MPQPAALPHASPDYDRTLVLAIELSSKSWVLAAQVPGLAQVKAKRTIEPTKEALLEALASYRARAAAAGHQIERVVSIYEAGWSGFWLARWLITQGVQVHVVQPSSVLTDRRMRRAKSDGIDAELLLRTLLAWLRGEPRVCSMVPIPDQTDEDARRAVRERGELIAERVGLVNRIGAVLATLGAGDYNPLLQSRRRRLNELRTGLGEPLPPHARAKIERLLARLELVLAHITELERERDAVAETAAPDHAARMIQQLAGLRGIGVQSATVLVREAFVRRFANGKALGAYAGLTATPYSSGGLEREQGIGKAGNRRLRSVMVELAWLWQRYQPGAAQVVWFRERVGKTGRRLRKVMVVALARKLLIALWRYVTDGVVPEGAAMKPAT

SEQ ID NO: 481516 - protein, 350 aa, unidentified
MARSIVAEREAVVVGVDTHADIHVAVVLSSLGAWIGSTVVATTPTGFGELVGWARGFGRIRCFGVEGTGSYGAALARHLRAGGHTVVEVDRPDRRTRRVQGKSDPVDAEAAARAVLAGTASRCPKAGDGRVEMIRSLRVARRSALKARTQATNQLLGLVLTSPERLRGSLRGLSVPSVVRVAARFRPGPLVDPAAATKLALRHLARRHTALSAEIAELDRNLALVVAAVAPALLALPGVGTDVAGALLVAAGDNPERLSSEAAFARLCGVAPLPASSGKTNRHRLNRGGDRIANNALWRIVMVRMSTDPRTRNYVQRRIKEGLSKKEIIRCLKRYVAREVYHRLEGVDEQ

SEQ ID NO: 481517 - protein, 333 aa, unidentified
MLDTDGAIVAEGKLKTTQAAIDQQFASLAPARVALEAGTHSGWISRLIESYGHEVIVANPREVRKIYQNDRKNDRSDAQILARLARFDPQLLEPIRHRTAPMQADLATIRARETLVTARTKCVNAMRGLVKSMGGRLPKCSTESFCKRVSADVPAELEDALRPLLTAIQTLNEQIRCCDVQIEKLATEIYPQTALPRQVGGVGALTALAFILTIADGARFAKSRDIGPYLGLVPRQDDSGDHSSQLRITKAGDPYLRRLLVGSAQYIVGPFGPDTDLRRHGEKLMQRGGKNAKKRAIVAVARKLAVLLHRLWITGEVYQPLRNSNRQASMKAA

SEQ ID NO: 481518 - protein, 343 aa, unidentified
MVHYVGLDVSLKQTSICVVNQLGSIVREGVVDSDPEAIAAFVRSKAPGAVRIGLETGPTATWLWTELKQLGLPVICIDARHAKAVLKMQINKSDRNDAAGIARIMQTGWFKEVRVKGLDNHSVRALLASRALLVKIKRDLENQIRGLLKNVGLVIGRAKFNVFTVRAEELIADRPELIAVVGPLLKARQAIEQQTDDLDRKVLKLARYDAQVRRFMTVPGVGPITALCFKATIDDPTRFKRSRSVGAYVGLTTRRHASGEVDWTGRISKCGDAMLRSYLFEAAGVLLTRVPKWSALKAWGIRLAKRSGLRKAKVAVARKLAVILHRMWIDGTEFNWSTKKAAA

SEQ ID NO: 481519 - protein, 408 aa, unidentified
MKALHRRCAGLDVHQQEIVACRRIVAGRKVQTEVRRFSSTTQGLLELADWLEDGKVTHVAMEATGVYWKPVWHVLYGRFTLILANAAHIRNVPGRKSDVNDATWIAELLAHGLIRASFVPPRPIQELRDLTRTRKELTREIVRHTQRIHAVLEEANIKLASVITDILGLSGRRMLKAIVAGETDARRLADLGSSRLAASREALIAALNGRIRDHHRFLIGQHVKTIEQIETTIGEFDARIEAALAPFRDIVERLIGVPGISQTTAQIVIAEIGADMSQFPSADHLISWAGLCPRLDESAGKRRSTRLRKGATWLKPVLVQSALAAGRKKNSSFKTRYHALKGRLGPKKAAVAVAANLLRVIYHMLKDGTCYHDLGEGYRRPRNPARAAANLANRIRALGYQVDIRQAA

SEQ ID NO: 481520 - protein, 388 aa, unidentified
MTQTSVSLPHPVALDHNETLVLAIELSNKSWVLAAQVPGLTRVKAKQTIEPTAEALLAALQGYRERAKIAGRQVERVVAIYEAGWSGFWLARLLTTHGIETHVVQPSSVLVDRRARRAKSDGIDAEQLLRTLLAWLRGEPRVCSMVPIPAEGDEDARRCVRERTELIAERVGLVNRIGAVLATMGCGDYDPLLRNRRQRLDELRTALGTSLPPHAYAKISRMLDRLDLVRKQIAELEQDRDAVLEEEVPDKAGEMIQQLTKLRGIGVQSATVLVREAFVREFANGKALGSYAGLCATPYNSGGTDREQGIGKAGNRRLRTVMIELAWLWQRYQPGSAVVNWFRARVSGTGARMRKVMVVALARKLLIALWRFATQGVIPEGAVMKPAP

SEQ ID NO: 481521 - protein, 441 aa, unidentified
MAMRKREEDLVFPNAAGVDIGGSSHWVAVPRQASDEPVRQFGAMTGDLNAMADWLLACGVDTVALESTGVYWIPVFEVLEQRGLKVWLVDARQMKYVPGRKSDVQDCQWLQKLMSLGFLRAAFRPGDDVCVVRAVARQRDVLLSEQASWVQRMQKALVQMNIQLTEVLTDVMGTTGQAIIRAIVAGERDPKTLARHRNGRVKASEPEIAKALTGNWRDEHLFVLRQALAIYDDIGRHLGECDAKLQGLLSKLGSDKVDLGKTPRAGSKLRAQFDARQILANWAGVDLTRINGLGLAAVMKILSELGPELSRFANVKHFCSWLGLCPGTKISGGKVLSAKTKRSANRVRQALKMAAMSLSHSDSALGAFYRRLAGRMDKPRANTAVAHKLARMVYFMLTRGEAFVDQGQLRYEEQQRERSIAALKRRAAALGFQINPTAVPA

SEQ ID NO: 481522 - protein, 343 aa, unidentified
MKLIRVGVDLAKNVFQVHGVDRSEKPVWRRKLSRANWLKALLETVEPGCEIGMEACAGAHHWARQLQQAGYAVKLIAPRFVKPYVKSNKNDANDAEAICEALGRPSMRFVAVKTVEQQDVQAAHRIRAGLLEQLIAKANQIRGLASEYGLVAPKELVHLRHAMAHWLEDADNGLSVRFRRLLHGLRADLMALDERVGELNEEIASIARADPLAQRLQQLRGVGPMIATALVATVGDVRQFANGRQMAASLGLTPRQNSSGGKARLLGISKRSDAYVRCLLVHGARAMIRTAQAKDDRLSQWVMRIAARRHPNIAAVAMANKTVRIAWAMMKNGTDYHPQLAAG

SEQ ID NO: 481523 - protein, 393 aa, unidentified
MKQRKNAESEPVRIKKFARFIAISGLPACLNPDPDSRLTSIVKVVGLSSNPFFLKSVKDKSMENFYFIGVDVSKKKLDFCVMFEGKVVHEEETSNNQGAIMSLLHHLEEDYGIASGQMLVCAEHTGQYTFPLACACKAVECKLWLENAAEIKYSSGVQRGKNDRVDAKRIAIYASRFQDKVQYYERPTEDIERLKQLESERTLYVTDLAKYKGQMKDQKEYMPKSLYERKMKRLQALMDDLEEAIQSITDEMDEVIASCPVLFRQRELLMSIDGVGRVVATNMIIATEAFTRFGDPRKFNCYAGVAPFSYSSGSSLHSKARVSHRADKVMKRLLHLAAVAVTHRIGGELKKYYERKVAEGKNKMSVINALRAKIVARMFAVIKRNEKYKPILS

SEQ ID NO: 481524 - protein, 394 aa, unidentified
MVSVQSNRGGHAAFMEGAPMLDATTFIGLDVHARSIKAVSLDVMTGEVRAATFGYDAGAVAGWVRSVDPGARCAYESGVTGFDLQKRLSGLGVDCVVGAVSKMIKPSADRRRKNDRNDAEFLARMLSVGNVVEVWVPDDECEAARDLTRALEDARDDLSRSKQRLSKFLLRHGLVFDERTPTGRRKGNWTRAHWSWIESIRFAERADNEALAYYVDAVRRAAEEKARLEGLVEAEARKPRWRRRVDSLRCLKGVDTATAADLVFEAGEFSRFRNARSFAAWVGLTPSEHSSGESDRRGSITKAGNKHLRKTLVEAAWHYLTCSGRPKDLARGQAPDRGARRHAAKGVRRLVERREALLARGVHGRTSPRRACSPAGYGRSASWPRRRRGPVPRT

SEQ ID NO: 481525 - protein, 389 aa, unidentified
MVYVGIDVAKDKHDCFITNSDGEVLYDVFTIQNDMDGFEDLLFKIKTASKDLSKVKVGLEATGHYSCNILGFLHNKGLTTIVINPLYTSLSRKSVSLRKTKTDKVDARTIASMIMSDVSLKPYSDTVYHNEDLKSLSRYRFDKVSDRSKLKQSVSRLVNILFPELEKLVSTLHAKAVYALLSEFPGAHQVASANLKHLTALLSTASKGHFGREKANEIREAARRSISSYLPAKSLELRHTIKLIHELNAEIAEIETEIKKIMDSIDSPTLSVPGISYALGSVIVSEVGDFSRFDNPDKLLAFAGCSPSTYQSGQLYSTHAKMEKRGSKYLRWALLNAAKYVCKWEPTFAVYLRKKLAEGKHYNVAVSHAAKKLVRLLYHLETTGEKYIP

SEQ ID NO: 481526 - protein, 375 aa, unidentified
MINVRPHGRSTIRPLEANSVGEQEIAVRPLRSRARTVARAKSSHLARSGRRSDHRTRGTMADIYVGIDVSKARLDVAVLPSGEVRSSSNDEVGFDELITWFRALGPKLVVMEATGGYEAPLASALAVAGIEVAVINPRLVRDFGKALGKLAKTDRIDAQVIALFAEKVSPEPRPLPDSDTQELAGLVSRRKQISDMLVAEQNRLAATAIAPVRADIQEHITWLRRRLKDADKDLYDRMRKSPLWRVKEQLLRSAPGIGPGNALSLIAMLPELGSLTGKQVAALVGVAPFNRDSGTLRGKRTIWGGRADVRSMLYMGTLSTIRYSPTIGATYARLVAAGKPKKVAIVACMRKLLVRLNAMMRDGKPWIEDSAAIAA

SEQ ID NO: 481527 - protein, 357 aa, unidentified
MTTQQKQSCLFIGIDVHKDTHTAVGISPYGEKLFEIMVGNYKNDFENLTNKVEEMKGTLSPFFGLEDVRGYGERLAGFLYEKYPVYHVPSILVDRQRQNATHPEKSDSLDALGVAKVMIQSIDTLLPYTISKESEKAKQIKEISIDREDLVLERTRLKNQVHTLLYRIYNTEYEQKFKDPFSIKALRFWSKAKPKCDPYLLKTMKRKIRRLLDIHTEVVDLEKDMDKLLTEGEYTIQTASGCGVVIASTIIGEIGDITRFTSPGALSKYAGCSPRERSSGKKTRHVKSRSGNRRLNCAFHRMALSQISRMGNDMAKTYFKREISEGKSKSQALVCLRRQMVNVVWMMLKHKTIYRNA

SEQ ID NO: 481528 - protein, 345 aa, unidentified
MSQQELYVGLDVSLETTSICVVDHEGSIVWRGTCPTDAAIMADTIRLRAPNAVRIGLETGQMSNWLTLSLQRRGLPVICLDARHAKAALKMQINKTDANDAWGLAQVVRTGWFREVAVKSMDAHKLRMLLVARSQLVGQRQSLANTIRGPMKTFGLVITRGCGGVFAARVREAGEGNNALMAIVEPLLAAWQSLREQIAVFDRQISARAKSDSIARRLMTVPGVGVVVALAYSAVIDDPARFKHSSSVGAYLGLTPRRYQSGDIDVTGHISRCGDGLLRSYLFEAATVILQRYSRASELKAWGLALAKRIGMRRAKVALARKLAVIMHRMWMDATEFQGGERAAA

SEQ ID NO: 481529 - protein, 411 aa, unidentified
MDLLVERCAGLDVAKEEVVVCVRSPGVGGQRRQQIRTFATFSGELERLADWLQAEGVTQVVMEATGQYWKPVWYVLEERGFELLLVNARHVKIVPGRKTDVADAAWLAELLEHGLLRGSFVPPPAIRELRDLTRYRKRLIQAHSAECQRVQKTLEDAGIKLDSVASDVLGVSGRAMLGALVDGERDPEVLAQLARGVLRKKLPQLRQALKGRFGDHHALLVRLSLGHLEHLEHAIGQLDRRVDQVIAPFAEARDRLDTITGVGKRAAETIIAEIGADMGVFPTAAHLASWAGRCPGNNVTGGKRRSGKPTRGNRWLGEVLTECAWAAARSRDTYLAAQFWRLARRIGKKKAAGAVGHSILVIAWHLLAEGCDYHDLGGDWFTRRSDHDRHKTHLVKQLQALGYSVTLQPAA

SEQ ID NO: 481530 - protein, 408 aa, unidentified
MEVLYARCAGLDVHAASVTACVRIAAGPDVTSQHRTVSTTTRGLLDLGEWLAACGCTHVAMEATGVYWKPVWHVLEGRFTLILANAMHIRNIPGRKSDMNDATWIADLLAHGLIRSSFVPPAPIADLRDLTRTRKQLVREITRHTQRIHKTLEHANVKLTEIISDIVGTSGRAVLRGLIAGETDPQRLADLTSGRLKASRAQLVDALEGRVTAHHRFMLQLHLTQIEALETAVHDLEARIREALAPFRAAVSLVTTMPAVKATTAAVILAEIGTDMTQFPSAGHLLSWAGVCPRLDESAGKRRSTRTREGARWLKTTLVQAAWAAVRKHDSYFHAQFVRLKRRRGSKKAILAVAASMLTAVYYMLRDGVEFHDLGSQYFAHHDKEQLTQQLLRRLRDLGVEVEVKNAA

SEQ ID NO: 481531 - protein, 441 aa, unidentified
MSTGEKHLHGDRPEYLSACNRLTRFRPPAPLLGNTKMDKNANLLPRVIGFDCHPDTFTAALLQGPTPAAAVTEKIFNQVPLAHLASWTKKHTALQDLFVLEASGNSFQVVRALAALGRKALVLESGQMGKLKEAHANNDKISAVRIAKAYLAGTAKTVWVPDAKTQERRDWFHAHQKAVKRTTQMRNRLLSYLSDNGVRLKKGTPLAKGTRAQEQLRQTRNWSPRQWQVIQGMLLELRHADEQRTHWRSLIAQEVLADPQLLSLVRLCGVREMVAFALGAILGDITRFSEPKKLVKYVGLNPAFDESGENQWRGGIGGHGRKDLRGLLIEAAHSILRSKDPLAQWGKKLLRRKGQVKLVVAAMARKLAVAVWYLMMGRWTPLEELDERLEIKVGKILTSVGTQGLKELGKTRSAFKKEVRGALTAGRVYLLDPNKKYVPLA

SEQ ID NO: 481532 - protein, 326 aa, unidentified
MRKKGYSFMSNSPTSFVGIDVSKKTLDVVIQPSGEYFQVPNSPDGHRQLIERLKAIDTGAIVLEASGGWERTCTAALVDADLPVAVINPRRARDLARGLGKLAKNDRIDAGVLAYCAQHCQVKKAVKIPEKQAQLGALVLRRRQLVATRATEQTRVEQTLVKEAKKDVQQMVAFLSKHIDKIEKQIARLIDSDDHFGERSKIIDSVPGIGPATAAVIVAELPELGSLNRQQASALVGVAPYHHESGSRKGKRSIYGGRLALRCSLYMATFAAITKNDVIKTFYQRLQAAGKPFKVAMVACMRKLLSILNQMVKNRQHWNQHLLKSA

SEQ ID NO: 481533 - protein, 391 aa, unidentified
MLICGIDIGKNHHEASVIDQDGRLLTKSLRFANTTSGGESLLEYISRCNPEKDVVVIGMEATGHYWLSLYCFLFDAGFQVNVINPIQSDAIRNLFLRKTKNDAKDSFLIAETIRIGRFSNTTLADEDILSMRQLCRHRMDLVDYIADQKRKIIGVLDRVFPEYHNFFSDTFGKTSTELLSKAVTPEELLAIPTDELCKLLKSNSRGRFGEAKAEELRQAAKTSFGITIGTTAFTMQLRQLLEMIALLERQLVELETEIEQYLLKLNTPITTCPGVGKVLGAVILGEIGDISRFTEPKKLVAFVGIDPSVKQSGEFTGTQNKMSKRGSPHLRRAIWLAANVAAFHDPVLSAFYQKKRSEGKHHYTAIGAVARKLTFIIYAVLRDNKPYVPNC

SEQ ID NO: 481534 - protein, 352 aa, unidentified
MDASRFPATMSGRTMEADMTFSVVAIDLGKQSFHLHGVSSEGVVLSRKVSRAKFFAAVIELGPTNIAMEACPSAHYWGRRFIEAGYQVRLIHPRFVKPFVRGAKNDAIDAEAIFDAASRPTMRFVPVKSVAQQDLQAVHRVRDRLVCQRTSLINQVRGLLAEYGIVLAKGPSRLAAEAPAAVADALLSELARELFADLFDQLHDLEERIRALDARLVAICRENPASRRLASLPGVGPVVATALLASIDDGRHFRSGRELAAWIGLVPRQHTTGGKVKLGGIGRQANHYLRRQMIHGARAVAFRIAGHDDLRSRWLQALVTRRGFNRAVVALANKTARIAWVLLTRQEVYRAA

SEQ ID NO: 481535 - protein, 349 aa, unidentified
MQEITRVGVDLAKHVIQVHAVDGSGKLRTSRALARDKFMAWCAQLPPGCMVAMEASSSAHHWARKLAVLGLEPRIIAAHLAAPYRLQGKGGKNDANDAAAICEAASRPTMRFVPVKSVEQQSMLCIHRLREGFKVERTACINRIRGLLAEFGVVFSQSPAVLRQALPDALEDATNELGGLARLALQRAWQQWQELDAHVSWCDDRIKAHGKSSAAVASAEQLMGVGPVTASAVVATVGDFRQFKNGAQFGAWLGLTPRQNSSGGKSNLGGITKRGDMYVRSLLIQGAKSAVMNAHKRDDPISQWALALRERSGWQKAVVALANKNARILWAVMTKGHAFDARHVSIKPC

SEQ ID NO: 481536 - protein, 387 aa, unidentified
MNEAKYIGMDVHQATISVAVWDSSGNLVIEAILETKAETILQFLRGLRGSLHVTLEEGTWAAWLHDLLKPHVTRVVVCDPRKTGSGKVRNRNDRNDARELAELLYRNKLEPVYHGEHGIRTLKELARSYLATTRDLTRVMTRVKAIYRSWGIPCAGQQVYAPRHRLEWLAKLSEVGVHRRAELYYQQFDALAALLQETRRELLVESRKHSAVKLLRQIPSIGPIRAALLVALMQTPYRFRSKRQLWACIGLALKTHMSGEYRFEDGQLKRSKKILAIRGLNRNHNHDLKNIFKGAATWAAGNSGPFQNFCEACVARGMKPHMACLTLARKIAAITLLVRKKGVRFDAEHLKQQAACALAREPFSSQDSFSGDDFSVLPALWFEGEYP

SEQ ID NO: 481537 - protein, 406 aa, unidentified
MRGPVITVDVSKGSCHYQPFLENGKPLRKPKVLHDTIEGFNQLMETIEMTREKSSEEKVSVVFEATGVYHRCLQKYLDDNGISYYIISPILSAAYRKTNLHSNKTDPLDCAHIAKAYYCEDNLIPFYKQEDIYVKLQKMNRYYETELIHLKKRKVSFRSFLDIIYPRLDKCFGSNASLYDPIPMEVLKKYPHPSLLLKHREETIVKAIEKKVNHDKKFIEKIVHKMCECASHCYSGAEVTDIEVIKLPEMIVELQDQMNTCNTLLNELICEAEKITYFNCVVSIVGIGRNLAARIIAELGDMTRFPNRRAISAFAGLNPKILQSGDVDGTHLKISKKGNRHLRCLLYLGATCNYRLRKHDPLYEFNQKKRQQANFPLKPKAANTATAHKLLIMIYAMSQSGESYRF

SEQ ID NO: 481538 - protein, 322 aa, unidentified
MQGKVSLNQSAAVRVYVGIDVCKERLDVYLHPLGRKLSVANSREGLVILKRELANHDVALVVIEATAKYHRLAQRMLHAAGLRVAVINPLRSRLFAEAAGQLAKTDPIDARMLAIYGQSLSPDATPPVPEILQELQEIVRARQEATADLTAFKNRRGASVGAFVKREIDRVIKGLEAHIERLEVEIARRIKADPALRQRYRILVSVPGIGPTVAAVLLIGMTELGSCSNKAAALLAGLAPIARDSGAKEGKRHIRGGRGFVRNTLYMAALAAVRCNPDLKAFFQRLCSKYPKKYALTAVMRKLVVLANTLVKENRPWQPIRP

SEQ ID NO: 481539 - protein, 341 aa, unidentified
MAKNVYFVGIDIACDDFVASIYQSPKQSILTKEGIENTFDGFNVFISWLKEHRLSKTNSIICMEATGVYNEAIAHYLVSRGFRVSIEPPLKVKRAFDPVGHKTDPVDSRQIAEYAYRYSDELRFWQPREDIIEKIKQLLTAREQFTKQSTAIQNAITSYQRHVVQVPLIVKAHHQTLKELKKHIAEIDKELDRLIRQNPIISQMTNQLKSIPGVGLLLASDLIAITGAFNDISSYKTLSAFLGICPYQHRSGKSIHKAAHIRNFGPTYARKLLMLAARSVATHNISFRKYYVRKLAEGKAKQLVLNNISNKLIKIACALIKNNSQYTEGYYSVNPLCLNLT

SEQ ID NO: 481540 - protein, 384 aa, unidentified
MEKSSTLYVELDVHKDIIDIATVDAGLEGEVRHVVSLGGDLVGLDKALRRLISKGHRLHVVYEAGPCGFVIWRHLRAQGIDCDVVAPSSIPKRSGDRVKTDRRDAMMLARLSRSGDLTAVRVPGAADEAVRDLARSREDAVRKCRNARHRLKALLLRNGIGYAGKSAWTAAHLRWLATLKLEHAAQQIALQEYLHAVTEATARIARLEQAMRDTLPEWGLAPVVQALQAMRGVQLVAAMTLVAELQDFLRFDNPRQLMAYVGLVPGEHSSGPKRRQGSITKAGNSAARRMLVEVAWHYQHSPRVSPIIAARHDQLPKAVTDIAWKAQLRLNAKFKRLVARRVMKNKAVVAVARELTGFVWAIGREVQTSGWQGIKAEPVRSAAD

SEQ ID NO: 481541 - protein, 374 aa, unidentified
MAGGRPAKKVGSSLPMNGPSERLGVAKHTRSRKRGPVERQYVAIDLHRLRSLIVREDEGGNEVGVVRIDNDPMTLAVAVAEAGPAPQVAIEATYGWYWAVDVLEELGAEVKLVNPSGLQWGDRRVKNDYKDCKELLDRMRLHKLPEAWIAPPPVRELRELVRYRHKLVCLRTGLKAQVKAVLAKHGLRPPLNDLWGPGGTAYLNSLELDDGYHIRVDSLRDLVEHCNREVAMLERVIHQRLRNHAGYRAIQAIDGVGPILAAIFVTEIGDVSRFPNPEALCSWAGLTPKHRESDTKAHRGRITKQGSVLVRWGAIETVAGGHGGPKLKADYQRIAARRGTRIARVAVARKLLTLVYFGLRDGEVRCLARAAEVA

SEQ ID NO: 481542 - protein, 339 aa, unidentified
MAQVTTLGVDSAKNGVCIHGVDAHGHVIVKKRLARQKVLPFVAQLPPCLIGMEASGRAHYWAREFTKLGHTVKLLSPQFVKPYVQSQKNDPNDAAGICEAVARPRMRGVPVKSVAQQDIQALHRIRERQIKARTALINQIRGLLMEYGIVIPQRASQVRHKLPFVLEDAENGLTITAREWLQALAEELQVLDQRLAATDHRIEQVFEADEACQRLAQLGGIGPLTATALVAAVGDATGFKNGRQFAAWLGLVPRQHSTGGKTTLLGITKGGNRYLRMLLIHGARAVLRVVDRNTDAWSRWLQGVQVRRGTNCASVAQANKTARVAWALLAKGDRYRRAA

SEQ ID NO: 481543 - protein, 344 aa, unidentified
MKISTIGLDLAKSIFQVHAVGEDGKAVMRKSLRRSQVLPFFRKLPPCQVGMEACGTSHHWARELAALGHEVKLMPPAYVKPYVKRGKTDANDAEAICEAVTRPTMRFVAVKSPQQQAALALHRTRDLLVKQRTQLVNMIRGILAEQGVETPRGLHHALELSARLVEGDTPQVPALTQRVVEGLARQIAALQTELTGIEKEILAWHRSSDVSQRLATIPGIGIISATALAASVTDPRQFRSGREFAAWLGLTPLQSSSGGKERMGRISKMGDKYLRRLLVVGMTSLVRRARVSPTSVDPRIIELLARKPVRLATVAMANRSARIIWAVLARGETYRRPATMALAA

SEQ ID NO: 481544 - protein, 352 aa, unidentified
MTSQQTIPNVTIGLDLGDKISCICEIDASGQVVKRATIASTPSAIERYFGGCPPCRVALEVSTHSPWVSRQLEAMGHETVVSNTSKVYVKPRRKRRNDRIDAEFLARQARSDVELLHPIQHRSAEAQQDLALLRARDQLVQARTKLINHVRGAVKSTGSRIRKCSAEAFARQAAEQVPEPLRLSLQPLLEVVADLTKRIRGMDDQVERMAEAYPEAVRLQQPAGVGVLTAVAFVRAVEDPKRFKHSREVGAFFGLVPKLDESSDSSPQLRITKTGDPLVRRLLVSAARYILGPFGPDCDLRRFGQAIAARGGKNASKRAAVAVARKLAVMLHRLWVTGADYDPEWVQHHRAA

SEQ ID NO: 481545 - protein, 404 aa, unidentified
MSENYAVFVGLDVGKSAHHACALAQDGSRLYDKPLVQDEVALRKVIVELQQHGPVLMIVDQPNTIGALPIAVARDCGCEVAYLPGLAMRKAADLYPGRSKTDARDAFIIADTARTMPHTLRAVDRDSEVLSALKMLAGFDDDIARDCTRAKNRLRSVLTQIHPAFERVLVGEILARAIVLDLLIHYGGPTKLAAAGRGRVLKWARNRSRKDPVELIDRIFAALAEQTVTVPGTDAAELVIPQLAANIKALQQQRETIAGQVEGMLDEFPLAEVLISMPGIGIKTASNILLAVGDCSDFASASHLAAYAGIAPVTRRSGTSIKGEFPARSGNKRLKNAMFRSAWIASNCHGPSQAYYQRKRAEGKKHNAAVMCLARRRSNVIYAMLTNREFYREPPAPNDVAAAA

SEQ ID NO: 481546 - protein, 353 aa, unidentified
MILIPSIAWLGLDAHSRNCVLAQLDDQGNEINHWRFPTDPRQLLKHVQAIPVTVKHLMLEESNLARWIAQLLNPHVQQLIVCDARRNRLISQDAHKHDRRDAFALARLLRLNEFKPVWQPTDDQRVLFKRAAQAYEKSVLRQTRLKLQLKSLFQHWGFFPTGATVFSPAGRATWLKQLPYDALRFQALLLYELLDQALAAQAQARRLLCQAGRLFPEVQRLRTAPGVGLVGAHLFVAYVQDPHRFAKFSRLTKYCRLAIRDRTSDNKPLGFKQLDRQGNGVLKAISYRAFLQATKRRCGPLWDFYQASLRHTGSITHARLNTQRKILLVLWTLWLNGEDFDPNKFSHSQPIDG

SEQ ID NO: 481547 - protein, 337 aa, unidentified
MNYSGIDLHSNNSVVSVIDETDRVVAEKRLPNDLARILAFLAPWRAELVGVVVESTYNWYWLVDGLQAAGFVVHLANTTAIKKYDGLKHSGDETDARYLAHLLRLGILPTGTILPAKHREVRDLARKRMQLVRSRTSQILAVENITARQSGTRITSNQVKQLDQAAVDQLHLPDDVALAVRANVAVITTLSAQIAIVEKRLHEKVAPRADYALLNTVPGIGQTLATVIVLETGTIERFASAGNFASYARCVDSQRMSNGKKKGEGNTRNGNPYLCWAFIEAANFAMHFSAEARQFYERKKARTNSVIARKALAHKLARACFHMLKERKPFDVNRCFA

SEQ ID NO: 481548 - protein, 410 aa, unidentified
MEVLHTRCAGLDVHKDSVVACVRQMKDGTVRTTVKSFKTTTRELIALSDWLSAEAITHIAMEATGVYWKPVWHILADGEFQLVLANAAHVKNVPGRKTDVKDAVWLADLIAHGLIHGSFVPDEPTQQMRDLLRTRKQFVRERSSHIQRIQKTLEDANVKLDSVVADILGLSGRRMIEAIIAGQTDPQILAQLAHRNLHASATQLEAALRGRVKAHHRFLLRLHLDHLDAVDAAIASIDQEVDLNVEPFRAAIALLTTIPGVSQLSAETIVSEIGIDMARFPTEAHLISWAGLCPKNDESAGKRRSNRMKKGAPWLKTSLIQCAWAAARTKHSYLQTQYLRLRSRRGPKKAIGAVAASILTAVYHMIKHGIRYIDLGPDHFEKRSQAQKVLRLVNRIQNLGFTVQIAPLAA

SEQ ID NO: 481549 - protein, 324 aa, unidentified
MIVRTTEAGEVLEAVRIVNDVQRLASVMARAGDCPEVVLEATYGWYWAVDALQAGGANVHLAHPLGVKAFEYRRVKNDFRDAQDLADLLRMGRLPEAWIAPPPTRELRELVRHRAKLVGLRSHCKAEVHAVLAKCGVQVLMSDLFGVAGTELLDGLDLPAPYAARIASLRRVMDDLDFEINAFAGIIRGRMAQEPGYTAVQNIPGIGPTLGAVLVAEIGDITRFASASKLTCWAGLTPKHHESDTHVRRGRITKQGSRLVRWAAIESVKTISKTSEVGVLRERVADRRGRNIGSVAAARLQLEFVFYALRDGHVRALEHLPRVA

SEQ ID NO: 481550 - protein, 332 aa, unidentified
MKKIIHFIGIDVSKETLDIALIRNNDKSNIYSSKVTNNKTGFKKMKQWLKVENVSLQETVFCIEHTGMYSKPIGQFILSLQGNLWMEMSLKIIRSMGVQRGKNDKIDAMRIALYAQRCQDEMKLYEPPRPIVEKLRTLLQLRKRLINSRNSLQVPCDELTTIDEQAGKEATRLIKSSVSALEKNIDVINEAIDELIASDEQLTHEFEIGTSVPGIARITLAYIICFTNEFKNYSGGKQLACYCGVVPFEYTSGKSVKGKPHVHNMANKLLKKLLHMGAIAAVTYYDEFKHYYKRKVEEGKPKMLVLNNVRNKMVLRLAAVIKNNKPYQKIAA

SEQ ID NO: 481551 - protein, 339 aa, unidentified
MKLYAAIDLHANNSVLVVLNEKDRVVLEERRPNDLKAIVAELAPYKKKIQAIAVESTYNWYWLVDGLMDEGYDVKLVNTAAVKVYEGLKYTGDEHDAKHLAHLLRLGVLPTGYIQPREDRAVRDLLRKRAQLVRCRTTQILSIQGLVTRNSGKRINTDGVRKLDDEQIGQYCGGDSVLVLAIKSNLSVMRCLDEQVVALEKVVLKQARLKPEFRKVLTIDGIWEILGMTIMYEAGDMKRFEKVGHFASYARCVSSSRWSNGKKKGEGNRKNGNKYLAWAFIEAAHFAIRYNERIRNFYQRKTAKTNKIVAAKAVAHKLARACYHVLKDQEVFEESLAFA

SEQ ID NO: 481552 - protein, 363 aa, unidentified
MEEKNRRYVGIDLGKFEYTMAIIGRKGKVSIHKGKTSIQGRTSLYGLLERGDKIALEAGNLAFLMTREIQQQVGSEVRVLNSAKLPFIWDAPTKTDKEDAIKLARLVEERRDEKLPIVPLPSEKEMERREVVSNYSREMRGRGSTINTLHSLFVKQGITTVVRKNLATVEKARQAIEVLKGQLREDAEYQIKHLELHEKRIKELKARIKKETKTDDDMVKLQTIAGVGPIVSYAFVAHVGDGSRFSKGAQVSNYIGFVPRLDYSGTIQRHGHITKRGNSYLRGLLVQAAWCMVRSRMGGSLKDRFIYITKFQGKSKKKTIVSIARRMTELMYSVLRDKTKYEVRPWKIPSNITAEMAREAMSA

SEQ ID NO: 481553 - protein, 352 aa, unidentified
MKVYIGVDFHARQQTVSYLTTEDGEIHQCTLDHQKDDIADFYRQFDGEVVVGMEASGYIEWFEEMLLGMGHEVWVGDSAEIRRRARRRQKNDKRDSLLILDLMVKGEFPKVHRQTTESRQVLKQLRYRHRLVKIRTIAKNNVQALALSAGLLAKRQYTSKWRQELRRLEREPMLGEQAKQLVKIIEEVTVEIKRVEQWLHKQAEADPRVMLLQTHPGVGLLTSLVLVHTLWPVERFRNGRKVTAYLGMDPVEDSSADRIRIGSISKQGSRLARYLVIEAASTAAKSDKDLKCFYRRLMSRQGKPKAKVAVGRKLLVRCFIMLRDTIDYDEFLRRGVEVRSSRQASGPVCLNP

SEQ ID NO: 481554 - protein, 413 aa, unidentified
METLVARCAGLDVHKDSVTACVRVPDGHGGRHGQTRRFTTTTAGLVVLAEWLASFGVTRVGMESTGCYWKPVWQLLEDQVECWLLNATHMRNVPGRKTDMADAAWIAQLVEHGLVRPSFVPPRPIRELRELTRYRKTQIQERCREVQRLDKVLQDAGIKLSSVATDIIGASGRAMLEALVGGTHDPEVLAALAKGRLRSKLPALRAALAGRFRTEHHGLLVAQILAHVDYLDEAVALLSARIQQLIAPYAEQVALLDTIPGVDRRAAEVIVAEIGPDMGQFPTAAHLASWAGVCPGNNESAGKHRSGRTRKGSKWLGGCLSEVAKAASRTKGTYLNAQYHRLRGRRGPGKATMAVAHSVLVSAYHVLDRGVAYQELGDDYFQQRHSLERHQRQLVRQLERLGHKVTLEPIAAA

SEQ ID NO: 481555 - protein, 352 aa, unidentified
MEIISMDSHKRYSQVCIQDSKGCFLCEQRINHGKGNILNFLSKRKQGDSVAVETIGNWCWIVDEIEAAGMLPQLVHAHKAKLMLGSVNKTDKLDARGLNKLQFAGTLPTVWIPPADIRDMRELPRTRMVFANLRTRLKNRIHSVIDKYGLHTDFADISDIFGGKGQEQMTATIKKLPSQTAYTLRCLLRELAEVGDQIERIEKRVKKVFGETEEVKRLMTLPGIGFILAVVIALELGDIKRFSSPERLASYSGMVPRAHSSGGKTRYGQLRSDVNHYLKWAYSEAGNSTAVNRTRLPGRHVSELYCRIRSRSGHAKAVGAVGRHLAEASFWVLTKNVDYKEPKLKSFSSTAV

SEQ ID NO: 481556 - protein, 457 aa, unidentified
MRKKSQRTKGIEEVRPFDGLSKVNLNAAGVDIGAREMVACVSGGEEVQLVKGFGNYTVDLKAIAQWFHEHQIKTVAMESTGVYWIPLFEELENQGFECLLISSRSLRKVAGQKTDVEDAQWIQTLHSYGLLKGSFRPQGDLVALRTLLRHRTQLLEHRAPHIQHIQKALLQMNIQLTQAVTDVMGMTGQKIIRAIVSGERNPEVLAAFREPGCKHSVEEIEKALTGTWRAEHLYVLKQSVEIYDFYSEQITACNDEIEQQYGVTRPEWEAGELAAWKAKKNNSHSKNAPQNQEEIRKHLKRISGVDLSVVDGFGVSLAQTVIMEVGTDMSKFPSEKHFCAWLGLAPKHEITGGKVLSNRTIKTRNRAGQAFRMAAQSVKKANNPFGMLYRRLRMRLGPAQATVACAHAIARVVYKMLKYKVEFDPLSVNEYQAKYDEQQVKYMKKKAAKLGYQLVAA

SEQ ID NO: 481557 - protein, 408 aa, unidentified
MRVMHPNCAGLDVHAQSVVACARTMDGNRVAHEVKSFGTTSRELFELLHWLEGHGCTHAVMESTGVYWKPVWHVLEGSLELVLAQASEVKNLPGRKSDVSDAQWLSDLMAHGLVRASFVPPEPIQELRALTRTRKQLIREVGQHAQRLQKVLEDANVKLASVLSNVLGVSGRQVLRALIEGERDPKVLAAYVSSRVKAPRDRIVDALQGRVTPHHRFLLRLHLEQIEHLETVIESVEGEAATALRPFRDSLERLTTIPGVSDVVARVIVAEIGLDMSRFLTAAHLISWAGLCPRMDETAGKRRSTRLRRGAQWLKSTLVQAAWGAVRTKDCYLRAQFFRLKARRGPGKAIVAVAASILKAAYFIVRDGVPYRELGGDYFQRLDKPRIAKHLVRRLNELGFEVTIQPAA

SEQ ID NO: 481558 - protein, 345 aa, unidentified
MKYYAGLDVSVKETTVCIVDEGGRICREMKVASHPDDLVEALKNPVWNLVRIGLEAGPLSQWLFSGLARAGLPAICIETRHAKVFLKAQVNKTDRNDARGIAQMMRVNLFRPVHVKTLMSQKRRALLTARKLLQEKAIAIENDIRGLLRNFGLKVGVVGAAKFAVRIQDLSGDIPELRDIMEALLAARQKLREQFTILHERLLSIVKDDTVCRRLMTVPGVGPVVALAFNATVDIPARFKNSKAVGPALGLTPRLHQSGEDNRVGRVSLCGDVMMRTLLYEAAQVLLTVVKKWSWLKAWAMNIAKRRGRQRATVALARRLAVIMHRIWSDGSEFRWAREEATAVI

SEQ ID NO: 481559 - protein, 341 aa, unidentified
MNFIGLDIHKKTISYCVKDAAGEVLAEGTILSTRQSLDVWMRTLCEPWTVAMEATMFTGWIYDYLLPHAAAVKVAHPLMLRAIAAAKKKNDRIDASKIADCLRCNFLPECYMASTEIRERRRTLRYRKLLVRQNVQLRNKVSQMLMESGVVYNKQKLHKVGYFKELMTTNPDIGEGLRPLLTICRETIVRIGKTEGALVRSLARDPLLSDRVQRLMTIPAVGPITALTWVLEVDDVARFGSVKQAISYCGLCGAERSSADMVKRMPISKQRNKHLQSVLVEAAKLGPRLSPDLALVYETEKQKGHANRATIAVARKLVAYLLAVDRSGREFVVAGERREAA

SEQ ID NO: 481560 - protein, 353 aa, unidentified
MKTYYVGMDVHRASIVIVVLNGAGKVVMQSVIETGAERVRGYLKQLRGKVYVTFEEGTQANWLHEVVRPLVTEVVVCDPRHNKLLTSGNKSDRVDAQKLAELLRLGSLKAVYHGDHGMRALKELVRTYDCLVSDTTRVMNRLKAIYRGRAIGCAGHDIYRQDRREQWLEKLTERGAKQRASFLYQQLAALKPLRHEAKRMMVKEARRQSAYPCLMSVPQFGSVSVAQLLAIVSTPHRFRSKRQFWTYIGLAVVTRTTADHEVVNGVLRRSKRPVSTRGLNRNHNHLLKRVFKNAANGACHGGPFKAAYELRVAQGMVPSLARLTIARQLAAITLAVWKHGEQFNPERIKPQAA

SEQ ID NO: 481561 - protein, 399 aa, unidentified
MIEQFRIDHGPAGVAVLIERALRLEPDPAEVRVVLETRHGLLVEALVDAGFTVVPVNPDLVARRRGPARKKDDAEDARICCLLALDRHAALKTLIPHGQIGGELRAIGRDDERAARDQRRLLNRLRADLQTTYPAALALAGKDLGAPTVLRLLQRWPTQPELAEASRDELVGFARAGRHGWPETFADRVAGALAVPSLPTRDYLVRAKAAGIRLAAVQLLALHEARHGWQARMGELLLGGPRTGRDRTVKDPDPGKAFPGGEIYLSMPGLGDLLAARVAGEIGEHINQFDCPNGLQCYAGSAPVTRRSGKSDFVVARRLAHNHYLGAAVHQWAFCSLLRSVWAREFYDSKITAGKSHHAALRALSNRWLEVLWHCLTKGVLYDEAVHVANRNRALGHAA

SEQ ID NO: 481562 - protein, 444 aa, unidentified
MGKFLLLGIDVAMAENTCCPLLEDGTEARRRFTVPNNLPGAEHLVREILALMERYGLSRLLIGLEATNLYWWHLACLISSCLELSPFQPRVYAFNPRMVKAFKKAFTDTGKSDISDAHVVAERLRFGRLPAPFMVNEVCQPLQRLTRFRCHLMDQIIREKNYFLSFLFLKFSEYQNLDPFSNTFGAASQAVLTDYLTVDEIAAAPLEELASLLAKESRNRFPSPETIAAVVKRAARDSYRPHPNLNEPLNLILSATLENIRTLSQQVKKIDRAIEREVRKFPNTLNSIPGLGPVFVAGILAEIQDINRFPDHASLAKFAGLFWRTRESGSFQAEETFLGKSGNAYLRYYLIEGANSVRMHNAEYGRYYRIKYDESTKHKHKRALVLTARKLVRLVDAMLRRHQLYIPPHLNSIEEVSKQGSTKARPAKQHRYRQSESRPLAICA

SEQ ID NO: 481563 - protein, 360 aa, unidentified
MGQARTFVALDVHVSATVAAIIDRDSGELRRQRLSGRGSEVCEFVAALPGPVRATYEAGPTGFALARRLQAAGVDCLVCAPGLIPRGPSDRVKTDQRDAERLVRLLIAGELHRVAVPTVEAEGLRDLVRAREDLRGDLMSARHRVAKLLLRHDVRFDGEQRNWTQPHLRWLSTVRFDQPGTQAAFDDYRGAVEALMIRRTELEARIAEQLPRSPWAQTARRLMCLRGIDTLTAAGLCAEVGDFSRFRHPEQLMSFLGVVPSEHSSGTRRRQGSITKSGSRHARRLLVEAAWHYRQPPRVSEPLRRRQAGADPAIVALSWKTQRRLHRVWSRMEQRGKRRTIIAVAAARELAGFCWAVATE

SEQ ID NO: 481564 - protein, 409 aa, unidentified
MQNLSPMKQIIKHVAFDVHAESHHVAIASPDGEVRDYGAIGSKLSDVDRLISKLKTSDNIELRFIYEAGPTGFGLARHLRSKGFVCEIVSPSLIPQRASDRVKTNRRDARNLARLYRAGELTFIHIPTPEDEAVRDVVRLRESAVRDQRQARQRLKSYLLRNGGRYTGKTSWRPAHLNYLSKIKMPFPAQQLVLEGHIRQVEHLTERLALLTKAVEDQLPGWRWEPLVRALMTFRGIALVNAMTLVSEIGDFSRFDKAPGLMNFIGLTPSEHSTGEKRSQGPITKTGNSFCRKALIESAWHYRQPARVAPILRLRQHGQPKEVNDLSWKAQQRLCSRYRHLQRQHKKSVVIVTAVARELAGFVWAMAKLVAGQPVPDRKSKTESNTKCETKKVYTLKPAPSNRVKQTKK

SEQ ID NO: 481565 - protein, 343 aa, unidentified
MQIRSVGIDLGKTTFHLVALGDNGKVLLKKKFTQKQLIAFTANMQTCLIGMEACSGSHFLGRALREQGHDVKLIPAQFVKPFVKSNKNDFIDAEAIAEAVDRENMRFVPIKTDDQLDLQALHRVRDRLMARRTSLINQIRAFLLERGIVFAKSPIRLREALPEVLENVNENLTPRMRNLVAMLWSEWKDLELQIVQMNDEVERIASSDAACRRLRQIPGIGPLVATAIVASIGNGAAFRKGREFAAWMGLLPKQHSTGGKARLYGISKRGNSYLRKILIHGARAVVLRSKRDRIAMGAWMTSLETRAPRNVLIVATAHKLARIAWAVLSTGQDYRAEPEAVTV

SEQ ID NO: 481566 - protein, 451 aa, unidentified
MEAEGLPVVRANVAGIDLGSKQHWVCAPKPGGPGREVKSFGATTPELERMVAWLKERNVASVAMESTGVYWIAPHEVLERHGLEVVLVDTRQLARVPGRKKSDPVDCQWIQRLHSCGLLMGAFRPVEQVCMLRTLVRDKAVLVAETGDWLRRMQKSLDQMNVRVHRAVSDIDGVTGMAIVRAIVGGERDARQLAKFRDPHCHQSEESMAEQLSGHWRADHLFTLEQTLKMYDAIQERIAAYEQEIMRKLAEMEREECRGKEAPKLNNPNKAKAIKKRGEEPLRQALYRSGGVDLTGIDAIGVETVLLVQSEYGTDLSMFPTEKQFVSHLKLAPHKPTSGGKPVKKQKKKRGSATSRVAAGLRMAALSLRNSKTALGAHYRHIAARKDGDVAVFALARKLATLIYRLLRWGQPYLDEGAAAYEKRYQEGRLKRLTATAKDLGYQLTPKAVTA

SEQ ID NO: 481567 - protein, 315 aa, unidentified
MHLGIDVSKQTLDCCLISDGIFYERKFYNDSSGMNKLQTWLDEHGADHTLHCCCEATGTYYETVAVALSGQYKMSVVNPRTVKGFGAAILNRSKTDRQDAKLIARYCQAMKPEQWQPLIPEHKQLQELVRYIARTKRQRAAEQTKWQTAPDYLKPHIQSTIEHLTELLNRLEQDLKAYYRSHPEQDSRRKQLKTIDGIGENAAAVLCSIITERFTHAKQLVAYLGLDPKEHQSGTSVKGRTRISKIGKSETRAALYMPALVAYRMGAFPGFTARLEAKGKPPKVIIVAIMRKLAVIAFHLLKNGENFDRSRYRKI

SEQ ID NO: 481568 - protein, 359 aa, unidentified
MQTQSNKIDFNGQNIYVGFDVHLKSWTVTVMTEKLIHKTFSQSPKPEALYHYLIKNFPGGTFHSAYEAGFCGYWIHNKLTKFGINSMVVNPADIPTTGKEIVMKDDTRDSIKIARSLRNGDLKPIYVPSLPTLEDRGLVRTRATLVKDLTRYKNRIKSFLYFHGIELPEAFNKPKTYWSNRFNKWLEDVQMTESSGKASLNVLLEQSKHLRASILQVTRQIRGLAKTDRYKMQQELLYSIPGIGLLTAMVILTEIETINRFDSIDQLCGFIGLVPSTNSSGDHEIIGDITPRGHSVLRTAIIESAWMAARLDPALNKCYHDYCKRMEPNKAIIRIAKKLVSRIRFVLKNNQPYVCSVVK

SEQ ID NO: 481569 - protein, 412 aa, unidentified
MEILYAICCGLDVHKDSITACLRRLGGRGPVTQELRPFGTTTGELLTLLDWLVAAGCTHVAMESTGVYWKPVFNILEGHVPQVLVVNAQHIKALPGRKKDTLDAEWIAQLLQHGLLRGSFIPPAPIRDLREATRYRKQLIRLRADETNRLQKLLEGGNLKLGSVASDILGVSGRAMLAALVHGETDAAALAGLAKGRLRKKQPQLVAALTGRLTPVQRALLGQQLAHVEYLDKAIATLDALIATLMAPYQAEAERLRSIPGIDTRGTENLIAELGVDMAVFPSDGHCASWAGMCPGHNESAGKRKSGKTRKGSKWLRAALTEAAWAASHTRSYLGAQYHRFARRRGKKKAVVAVGHSILVIAYHILKHGTTYREFGQDYFDTRDTARIQARLLARLQALGLHVTVEPMATAA

SEQ ID NO: 481570 - protein, 345 aa, unidentified
MIAIGADVHKGRCVFARMEEDGKVKMLEPIECTREAWLKRLAELPPQAEIALEVSTSGYFAMSVMEEAGWRERAHWVHTAGVDSLRKQKSDRLDARKLARKLGANAADPLPEAWFPQAPIRQLRMLARQRCRIARLRTLTKNRLSSLLQMHGLRPPASIISGAGREWLQRQKLPEPVQQCFEQTFRLYDFLSSERQTSEKNLADFAAQFPEIQRLATIPGIGHILSALIWGEIGTLERFPSADALVNATGMVSRLYQSGEVSLQGSITRQGSAWLRWALITAANCVTRSRGPLGRRYWSLRRRKRPNVAKTAVACSIARCVYGVLKHVEPFQAERWGRRSGKLEP

SEQ ID NO: 481571 - protein, 408 aa, unidentified
MEVIHTRCAGLDVHKQTVVACLRTQEGQEVRREVRRFATTTRALLQLADWLRETGCSHVAMEATGVYWKPVWHMLEGEFELVLANPAHIRNVPGRKSDFNDAQWIADLLAHGLIRSSFVPPGPIQELRDLTRTRKQLIREATQHKQRIQKVLEDANVKLASVVSDISGESGRRILKALVAGEADPNRLAELGSKRLAASPATLAEALQGRVTAHHRFLLGQHLKTLEQLETTVAEFEAQIEAALEPFHAAVERLSAIPGVSTIAAQVIIAEIGCDMSRFPSAAHLRSWAGLCPQLNESAGKILSRKLRKGAPWLKTTLVQCAWAATRNRGSYLHAQFLRLRARRGPNKAILAVAASILTSAYYLLHDEVPYRELGAQYFASFDQQRTLLRLTRRIQDLGYHVEISKAA

SEQ ID NO: 481572 - protein, 316 aa, unidentified
MKDVLTFVGIDVSKARLDVASHPTGATHSVANDANGIKTLVEQLRAVKPLLVVLEATGGIERAVVRALVAAELPVTVTNPRQVRDFAKATGQLAKTDVLDAQILARFAEAVRPALRPLADEITLELRALISRRRQITEMLTAENNRLSRAPRRVQKRIEAHIRWLQSELERADEDLDQTIRQSPVWREQEDLLKSVPGIGPVVSRTMLAELPELGNLNRKQIAALVGVAPLNWDSGLLRGRRVIWGGRSHVRTALYMAALTASRRNPVIREFYKRLRAAGKAPNVALVACMRKLLVILNAMLRHRVPWRPVVAQIP

SEQ ID NO: 481573 - protein, 429 aa, unidentified
MTILQSTLETIVWVAIDIAKDRHEALIEAPGWRSRKRVRVQNRADDFRSLADFLHSLGFPVRIGFEPTSNYHRALAYFLHSEGFELQLISSLALARTREAMHNSWDKNDPKDAQVILHLLKSGLTQHYHDPIVHNLNDLQELSKTHHQVSLEKTRTQHRLLTHYLPLYFPEIARYHCSARSEWLWSLLIEFPTPRSMTCLSKTEFIRKAWPLVGRKVAKERVLTDIYLTAQTSIALPVEEHSETVAMLRVVLRQLLSLCQLRATIEERSHVLLESNMDYQRLRCIPGIGPITALTILAEAGDLRRFSHHRQFLKFCGLDLATEQSGQFRGLTRLSKRGNARLRAVFWMAASVAVRMRENSFRAKFERYMRSDPGNVDRKRKAYVAVAAKIARVAFALVRSGADYRCFPEVAVPSGRTRSARAVEAIPTS

SEQ ID NO: 481574 - protein, 354 aa, unidentified
MTDLSMADPDRLVTLGVDTHLDVHVAAALDERGRLLDTISLPTTAAGYRALLDWAAGFGTIERVGVEGTGSYGAGLTRWLTARGIVVLEVDRPDRRTRRSRGKSDPLDAEAAARAVQAGRASGLPKAGGGAVEAIRALRIARDSAMEARSRIANQLHALRVTAPDRLRDELRGHALEALVRRAARLRVPGVVDEPSAATRLAMRSLARRHAALSAEIATLDVHLRRLVTRTAPQLVARPGIGVHSAGQLLVTAGGNPARLRSDAAFGMLTGTSPVPASSGKTVRHRLNRGGDRQANRALHMVVLTRMAHDSRTRAYVARRTTEGKTTSEIMRCLKRYVAREVYGLLLQSPGLTT

SEQ ID NO: 481575 - protein, 323 aa, unidentified
MEYYVGLDVSLKEISICVVDKDGATVARGVCPADPEGVAGWFRNRELTPGRIVHESGMLSIWLQRGLASLGLPATCIDARKAHKSLSARLNKSDAADAEGLAQLARTGWFTPVHIRSEEADRLRSLVGARERLIRVRKDLEGHIRGVLKTFGIRMIGISKGRQRQAFRDQLAAAGETDPALRAMADAFIAAHARLCQVADDLDKAVKTRAKAHPVARRLMTIPGVGPVNALSFIALVDDPSRFSRTSDVGAFLGLTPKRHQSGEMDWSGRVSKCGDGAMRGLLFEAASSVLHQVKRFSRLPQGGGRDGAQNRRAYADALEERN

SEQ ID NO: 481576 - protein, 398 aa, unidentified
MKRAEVAGYGVFCGIDVGKESHFARALAPDGETELLARRVGQDERELAALFAELKGLGRTLVVVDQHSGFGALVAACAREAGVGLACVPPARFARLSGLSGEEKTDESDALDLARLPAEAPRHISWAPEPDGEAEMAKVLIRYRHDAVCERTRAYNRVHDALNRACPPLEALLSGSALHSLHALSLLARFGAAGLAAARRCDVVRWARGQRGLGPAAEAGAVAMWEAARSSSSQLPAASVLDETVMMDCARIIELERLDDSLSERIAGLCALVPEVEIARTMAGVGEVYSRTIALEIGDISRFPSHSALAAYVGVGKCPRESGKKRGQRKRRSYNRRLHTAMFESAKVAIRLPGPDHDYYLKKLAGDMNEHQALHALVRKRVAIMYAMLRDMEVYRAA

SEQ ID NO: 481577 - protein, 370 aa, unidentified
MGNRSMFVGLDVHKETIDVAVAEGGRQGEVRHYGVIAPDVEALDRLMRALQAPSLVLHVVYEAGPCGFGIHRHLATRGVDCVVVSPSMVPKRSGDRVKTDRRDSVTLARLHRAGELRAIHIPDATDEAMRDLVRAREDAVVVSTQAKYRLKAFLLRQGRRYPGRAGWTRPYRRWLADLSFSSAAQHITLQEYRDTIDETERRLERLTEQLRQLAPTWRWAPLVAALQALRGVSFLTAMGLVAELGDLTRFGQPRELMAFLGLVPSEYSSGPRVRRGGITKAGNPHVRRLLAEAAWAYQGIPRIGRQHLYRQEQLPKVVCDIAWKAQLRLTGRFRRLLARGKSKPKVATAIARELTGFIWAIAREVRPASA

SEQ ID NO: 481578 - protein, 315 aa, unidentified
MTEQVIGIDVGKAKLDVGLSTEKRVRVWANDADGRAELSDWVVAQGASLVVVEASGGYEAALVSELVGRGQAVALVNPTRVRAFARAEGILAKTDKIDARVIARFGVTMKPQARARREEAQVELNELVTRRRQLVLMLTAEKNRLQTASPAMQEHIARHIAWVQAEIEALEQQISQAIEANPAWAETAKRVDSAPGIGFITAATLVADLPELGQLNRQKIAALVGVAPFNHDSGKHRGKRRIFGGRTSVRSVLYMATLSAIRHNPVIKAFYQRLLDTGKLKKVALTACMRKLLVILNTMVKTGQDWNPPTPSSAI

SEQ ID NO: 481579 - protein, 335 aa, unidentified
MNESPPPVRRFGLQSTPVFVGVDVSKARLDAAATGSDETWSVSNTASGIAQLLKRLQELGPALVVMEATGGFEVPAAAALAAVEIPVVIVNPRQVRDFARSTGQLAKTDTIDAQMLALFGERIRPPVRALPTEEARALDAIVGRRRQIIDMITAEKNRLGFALPAVEKGIKKHVRWLERQLEGVDSDLDGLIRASPVWRAKSDLLRDVPGVGPNLARTLIAELPELGRLSNKEIAALVGVAPLARDSGIFRGKRMIWGGRASVRSALYMSILSATKWNPVVRVFYLRLRAQGKPPKVAMVACMRKLLTILNAMVRDGREWDPSIPLDQLRLQHSC

SEQ ID NO: 481580 - protein, 364 aa, unidentified
MYDSTTTVAVGLDVHARSIRLAAVRADELLEERTLPYDEEAVERLLRRWPSVRCCYEAGPTGFGLYRHLSQRGIDCAVVAPGLVPQRPGDRIKTDPRDARKLARLLAGGLLEPIHVPSPELEAARDLVRAREDARLDRMRDRHRLSKFCLRHGRLLPGLSWSVVRRKWLSEQRFEFVAEQLTFDAYLHAVDLVDARIESLERAIRETAEQAPVRELVARLRCLRGVDTLTALALVAEISDFSRFTCAQEFMAFVGLVPSEHSSGEKRRQGTITKVGNAHVRRLLVESAWHARRRPKVGYELARRQRGQDAIVVERAWRCQQRLYQRWQRMAGRGKPQQKIVVACARELAGFVWAIATDQPLRTP

SEQ ID NO: 481581 - protein, 352 aa, unidentified
MRYLGMDVHGKSTVWCLVDQRGEVVREGRIPTTAPALTALMRELAAEGEVLAGQEVGTLTYLVHDAVTAAGTTILSFNAHQLRMIAASRKKTDRRDAYWIAKALQSGMYPHPVYVPTGEIRELRAVLSRRRVLKAEHNRWRYRGRAYLRAAGCPAAPGAAALRTALRPGHEPQTGSVPWLAESVALCQRQEAALRLELQRVDAALAARVRAIEAIGRLLTVPGIGPLTATTIYAWVGDVRRFPNAKALAAYAGLVPTVRQSGGVSTYGGITKQGAPALRVTLVQAAHVLLSRCRSAEAAPLQAIGLRIRGTRGRRKIAVVALARHLLRIAYYLLRDGTTYEAARLGTMTPAA

SEQ ID NO: 481582 - protein, 470 aa, unidentified
MIRHRSDSVLLGPLASVRKPVSQPVIAAVRFMQVELPLHVRLIPQEIESAMRNAGIHADSLLEVRRMYNAVGIDVSKGKSTIAVLQPGGTVIRKPFDVSHTSQRLIELARYLGSLEGSTKIVMECTGRYHEPMLKALYEAGLFVSVVNPHLIKNFGNNSLRRVKSDPADARRIARYTLDNWAELRQYSGMDNTRTQLKTLNSQFSFFMKQKVAAKANLIALLDNTYPGVNKLFDSPPREDGSEKWVDYAYSFWHVDCVRRIGLKTFTERYRAFCRKHHYIFQPDKPEKLFHASKELVAVFPKEKTYKLLIQQSIQQLNLASGHVERLRQEMNALASTLPEYSTVMGIYGVGKTYGPQLIAEIGDVSRFTHREALTAFAGVDPGVDESGQHKSKSNRASKVGSARLRKTLFQIMTTLLQNAPEDDPVYRFLDKKRAQGKPYYVYMTAGANKFLRIYYGKVKECLRNLEQAE

SEQ ID NO: 481583 - protein, 426 aa, unidentified
MQKAEKKALVYGNVLIVGVDVAKKNHYARIYNSMGIDVVKPFYFHNSREGFCRLLGKISEAKEKEKAERIIIGMEPTGHYWKPLAYFLKEAGYTVVIVNPYHVKNSKEMEDNSQDKNDRKDAGLIAQLVKEGKFLHCILPEGIYAELRTLYITRQQEHKKLNAALCQLKAIVDEYFPELMEVFKSLLGKAAQWVLRNCPFPKDILSLKLEELEEGLKQASNSRVGIKRALALRQAAEKSIGVKEGLEGAKVKLQACLEEIEFYQGQIRKTEEAMGRYLEETGLANYLLSIPGVGVVTAAGFLGEIGDPAKYQHWRQIRKLAGYNLTAQKSGKKQKAKTTISKRGRPGLRNLLYQASLILVAKNKEFKALYHYFLKRPENPLTRKQALVAVALKLVRVMFTLITQKKEYDASKVLGKYREEQLKKVA

SEQ ID NO: 481584 - protein, 450 aa, unidentified
MTNGNGVSRGDRNRNARLARLRELVPVSNAIVGIDLADRKQMVVVCDHDSKVLARKTFRCRAWDLSVALDWAAQRAAASGFAGATVACEPTGHRWRVLGQLAADRDMSFVCVQPIQTSWARRSEDLTFDKTDDKDAILIARLTAQLRCYTPEPVDETWGRLRHLGARRERLIVDAGAQVRQIRDLLECVWPAALETANYPFRSKTWPAALWVFLDRDGGDLARTRRLGLARFESAVRREIVRRGGQRPCLRIVRKLFTALADPTGVTAHRRGALERVQLLLEDWAETQRKLADTETRMTTVLDELGLTELATSIHGLSPVGAAAILAETGDPTRFATARALVKHAGLAPREKKSGTFSGKSKLTGQGRPKLRLAAWRAVWGALQTNTVYAARYRHLTTRETNRLTATQAQSVIAAAILRHLHAVITTGTAWDPVIATRGTRSKETITIAA

SEQ ID NO: 481585 - protein, 388 aa, unidentified
MAKRKESTFERLQRGQPLNRRERREVANGLNSPDPGWEIVHPHAAGIDIGNESHYVAVALGEDEHPTREFGSWTADLERMADWLQACGVQSVVMQSTGVYWMAVYDVLQRRGFDVHLVDARGTRNLPGRKSDVQECQWLLKLHTYGLLRRCFLPGEEIRRVRTVWRLRDQHVKEAGRAVQHMQKALTEMNVQVHNTISDLSGVTGQAIVRAILEGERDAARLAALRDSRIQASEPELVQSLRGNWQEDALFELRQAVEAYDFYRQQMKQCDAQLEQYLAALPSREPVAAPPTAETPEASRKRPVRRGFRKPRKAPGNQPALDLRTELQRILGVDATSIDGIEVMTVQTVVAEVGADLSAWKTERHWASWLNLAPKREVSGGRVIPPHP

SEQ ID NO: 481586 - protein, 413 aa, unidentified
MDILYGCCAGLDVHKETVVVTVRRRQDHGKVQQQTRTYGTMTEQLLELADGLHDQGVTHLAMESTGVYWKPIWNLLEDRFQILLVNAQHIKHVPGRKTDVKDSEWIAQLLQCGLLRGSFVPPTPQRELRELTRQRRQLVHSKASVANRIQKVLEDANIKLGSVATDVLGVSGRDMLRALVAGQTDGKKLAELARGKLRAKIPALRLALHGRVTEHHRFLLRLLLDELTHLEGLIERLTARVTQVLPSSFAEAIELLVTVPGIDVRAAENIVAETGVDMEVFPTDGHLASWAGICSGQRESAGKRQSGRTRKGNQWLRTTLVQVAWAASHTKQTYLSSQYRRLAGRRGKKRALLAVGHTILVIIYHMLQDRVTYAELGADYFDRLDTDRLTRLLVRRLERLGHEVVLRPKESAA

SEQ ID NO: 481587 - protein, 452 aa, unidentified
MAKLAKKKQTAKGLRLEVVNPNAAGIDISPKEMQVCVPADRDGDNNRTFDVYTEDLHCISEWLRACHIDTVAMESTGIYWLPIFRVLKESGIDVILVNASDVKNYSGRKTDASDAEWLMMLHSYGLLKSCFQPENIARTMRNLVRHRDNLIKSSSREVLHLQKAMEQMNLKLDNVFSDILGKSGQAIIKAILNGERDPKVLSALADSRCKTSKEEIEKSLQATWDEEHLFEMEQSDSLYQFYQQLIAECDAKINEIATRYTAIVDAPKAELLRSEKYNAKKNQIGFDVEMTAFELWGVNAMRIPGMSRGALLRLLGELGADFTTKFADVKHFVSWANLVPNNKISGGALLSSKVPKKKNPVGIIFRQAANTLKAAKNPLGDYFRHMRAKGGHLQAMVATGKKLASIFYLMIQRKVEYDETIYSGHRKFELQNKVAYLQRKLQRMNAELANCV

SEQ ID NO: 481588 - protein, 403 aa, unidentified
MSSVFAGLDWASRTHAVCVIDEHANVCKQWEVAHDADGLRDLMRQLRALHVVRIAIERPSGLLVDALMQAGFEVVPIHPNAVKASRPRYRSHGGKSDASDAYLLADLLRTDGHRFKPLAAQSDDIRALRALVRGRDDLVATRVQLANQLRALLESYWAGAAEVFADVDSPIALAFIQRYPTPDAAARLGPKRMAAFCAQHAYSGRRSAEELLQRLRQAPSAASGELEIDAKGELACALGRTLAKLVEQIRLLSSRIEHHVAHCDDGLILMSFPRAGRICAAQILAELGSVRERFDSDEHLAAEAGVAPVTYASGKHKAVVWRWACNHRLRAALTTLADNSRHANAWAAAIYAKARGRGCDHPHAIRILSRAWLRVIWRAWIDRKPYDPALHGGLQTMLKTAGG

SEQ ID NO: 481589 - protein, 480 aa, unidentified
MATRKAARRPAAERVPALELPVLEPAAAGIDLGATELCAAVAPERGSPSIRTFGTFTAELQELAAWLRQCEIRTVAIEATGVFWVPVLQILETAGFEVCLVNPRHLQNVRGRKTDVVDAQWLQHLHAVGLLQPSFRPPEAICALRTLWRQREHLVRAAAEQIQLMQKSLTQMNLHLHHVLADLAGKTGLQIVDAILRGDRDPQTLARLRDPRVQSDEATLAAALTGDWRPEHLFTLRQARQTFQHYQDLLQACDAELEAWLQSHPSVPRAPSAGGAGGAGGAATADALPPSARPLAPKAARKTSRNAVALPTLDLRQELAQRFGVDLVAVPALGLTSVAALYAELGSDLKAFPRLKQFTSWLALCPDPRKTGGKVVASHTRNVQHRVARIFRQAAQTLARSDCHLGRFYRRIRGKLGGPQAVTAAAHKLARIFYHLVTTQEAYDESVFQREDAQYQARRLAAVHRQAKSLGYSLTPCEVS

SEQ ID NO: 481590 - protein, 380 aa, unidentified
MKLYIGIDWSQSKHDICFVNTKGVIQSQLVIPHSQTGFWEFEQRRKRLGVPSEDCLVGLETSHSILVDFLWDRWYANLFVLPPTLVKGSRTRMRSSAAKDDPGDAYLIADILRTDHGRLQAWQPDSGLTRQLRTKVRFISFLTRNIVRMTNRQRAVLLRYYPVATELFSSLSTLISQHFILAYSTPQAAAVLDLDSFRKFARQHGYTHKSKLANILAKLDQDDPQADMDIIDACRDEAQGLAHVLLDMIRLKRDNLKLLQQLLDLHPDQNIFASLPGTGVYLQAALISKFGDDRGRFPAPDRVQAIAGTSPVTIRSGKSKYVRFRKSCDYEFRHIVQQWAKQSLRSSVWANAYYARVRPNCESESHAFRCVANRWLAILW

SEQ ID NO: 481591 - protein, 391 aa, unidentified
MIYVGIDAAKDKHDCCILGGNGQTVQEAFAFRNNHEGFEQLISAIQRSSEAEGSGQIKAGLESTGHYSGNLEAFLRDSGVELVVFNPLQVNLYRKSQTLRKTKTDKVDAKCIAQLLMTAESNPVSVSYQIQELKALTRHRSRLVSQRTKLKVSISRLVVILFPELPAACNSVTQAAIKALLLELPSARQIAACRIDRLTNLLRTASKGRYGRAKAEEIKSLAQQSIGANSPAAALELQLTLQHLDFLQKQVNELDKAIRAAVVQTQSPILSIPGIGPTLAGIILAEIGDIHRFSSPDKLQAFAGLDPSTYQSGKFKADKTPMVKHGSTYLRWALMQAARLAAVHCETFGRYLAAKQAQGKHYFVALGHTAKKLIRVIFRILSANEVFVPQT

SEQ ID NO: 481592 - protein, 344 aa, unidentified
MKHYAGLEVSVKETSICIVDEAGRICREMKVVSHPEDLLAVLCDPAWRLERVGLEAGPLSQWLFSGLAEAGVPAICIETRHAKAFLKAQVNKSDRNDARGIAQMMRVGLFRPVHVKTLASQKRRALLAARKILQEKALAIENDIRGLLRNFGLKVGIVGVVGFEQRIHDLVEGVPELADIMEPLLAARRVLREKFAKLHRKVLLLARDNVVCQRLMTIPGVGPVVSLAFISTVDVPARFRNSKAVGPSLGLTPVLNQSGESHRVGRISLCGDEAMRALLYEAAQVMLTRVQKWSWLKAWAMNIAKRRGQKKAIVALARRLAVIMHRMWSDGTEFRWTREMAPTI

SEQ ID NO: 481593 - protein, 403 aa, unidentified
MKNCYAGLDWASRTHAACVIDRSGKVLLQLEVAHDAAGLSELCRRLKAAEVRSIAIERPSGLIVDVLLQAGLAVVPIHPNVVKASRPRYRSHGGKSDASDAYLLADLLRTDGHRFKPLAAQGDDIRALRALVRGRDHLVATRVQLANQLRELLRSYWAGAAEVFADVDSHIALGFIQRYPTPQSAARLGPKRMAAFCAQHAYSGRRSPEELLQRLHQAPAVAMGDLEMLAKAELACALARTLHRLVEQIGLMTSRIEHHIASSDDGRLFMSFPRAGRVCAAQLLAEIGSVRERWDSDEHLAGEAGVAPVTYASGKSKSVTFRWACNHRLRAALTCLADNSRHASDWAAAVYTRAKARGCDHPHAIRILARAWLRVIWRSWQDRQPYDPARHGSAKLLLNAAGG

SEQ ID NO: 481594 - protein, 371 aa, unidentified
MSMMHHRYVGLDVHRATLSVAIADVDQPPHSYGKIPNDPTAIRKLMQRLGGPETILQVAYEAGPTGYVVQRQLSELGIACLVVAPSLIPVRAGDRVKTDRRDALKLARLLRSGDLTPVWVPDREHEALRNLVRARAAAKADQVRAKHRLGKFLLCQGARPPSGVRNWCKRYFQWLQHLTFEHVADRVVFADYLAEVVAAGERVKRLEAALRECAQTTPQAVLIQALQAFRGIGFLSAVTIVAEAGDLRRFPTAPQFMGYTGAVPSETSSGSKQSRGRITRTGNSALRHMLGEAAQHARHAPSLSAELKRRQKHVSQPVIDLAWRAQLRLHARYRHLSGRLGPHKAIVAVARELAGFVWATGALLAQGTPAA

SEQ ID NO: 481595 - protein, 391 aa, unidentified
MQKLNDLSRSLTALEPDGTLIAVIEMSLSSWLVAGMVPGVERQPLKKLAVDESALLKLLHRWREEAEKAGRRIDRIAVAFEAGRDGFWLARWLKARGIEAYVIHASSVAVSREHRRAKTDRLDTELLKRSFLGWLRGERDHCKMVEIPTMKDEDAKRPNREHDSLIGERSRIVNRMKAALVRLGIRGFNPKLKRATTRLDGLRTPEGEPIPPNALAELRRDMERRRLVNNQIRQIEEERLERIEQAPCDGPHVMVRLLARVMGIGIETADMLVHEVLSRNLRDRRAVARYAGLTGSPDESGRKRREKGLARSGNVRVRRGMIQLAWRFLLHQKNSALTKWFRSRTENARGTRKPMIVALARKLLIALWRLVRGGHCPGRRRFACGTMNGGR

SEQ ID NO: 481596 - protein, 348 aa, unidentified
MDHYAGIDVSLEYSSVCVVDASGKIVREDKVASEPEALIHWFQSLGVKLTRIGLEAGPLSQWLYAALREAGLAVELLETRHVRQAFQAMPVKSDRNDARGIAQLMRLGWFRPVHCKSIGAQEGRAVLTARKLVQSKLQDVENSLRGILRGFGLKVGKTTARSFAGRICELVAGHPNLEMIAQALLSVHAVLLREFNAFEKHVRIMARSNVQARLLMSTPAVGPIVALTYAFAIDDPARFKSSKQAGPHFGLTPKKYQSGETDRSGRISKVGDASVRAALYQAAHVMLTKPVKGCSELKSWAMRIARRAGHSKAKVALARKLAVIMHRMLADGTPFNPTAKAKPMAAAI

SEQ ID NO: 481597 - protein, 345 aa, unidentified
MQAVTIGIDLAKHVFQVHGVSAGDKVVFSKPLRRAQMLPFFARLKPCLIGMEACASAHYWARELKKIGHEVRLMPAKDVKAYVKRNKNDAIDAAACCEAVRRPVVRTVPVKTPEQQARLMQHRVRDLLIRQRTQAINALRSHLAELGIVAAQGYDGLKTLLSIVADESDARLPEDGRASLSALVNQIAACQAEISAIEKRLLAQHRKNEDSKRLETIPGIGIIGASAIVATVPDASVFKTGRDFAAWIGIVSREDSTGGKQRLGPISKQGNRYLRRILILGALSVVKRARCCPENYPWLTKLLARKPAKVAAVALANKMARIAWAVLTKKETYHVPQITAALIPA

SEQ ID NO: 481598 - protein, 340 aa, unidentified
MQVTTIGVDLAKNVFQVHGITASEEVVFNKPLRRAQFLPFFAKLDPCLIGMESCSSAHHWARELTALGYEVRLIPPMYVKPYVKRGKSDAIDAEAICEAVTRPTMRFVATKTVEQQSLLSLHRARDLLVRQRTQLINNLRGLVAEFGIFIPKGLARVIGFAEDITLGEVLDLPDIANEVIRNLSEQLMALHKQVRWYEERLKQVAKEDARVRLLRTIPGVGAVTASAIIASIGDGHQFKNGREFAAWLGLTPTNKSSGGKEKLGRITKMGDQYLRSLLVVGMTSLVRQTRSHPERASKWLTSLLERKPARVATVAMANKTARIVWAVLTRNEPYSPRTVA

SEQ ID NO: 481599 - protein, 459 aa, unidentified
MPKKSSNKAKSQRSRERALLQKVHLNAAGIDIGADVHWVAVPEDRDASPVRSFGVFTRDLILLCEWLKRCQVETIVMESTGVYWIPLYQMLERKGFEVRLVNAHHVKNVPGRKTDVKDCQWLQQLHTFGMLGGSFRPQAQMCVVRSYLRLRDTLSKDCNSLVQRMQKALTEMNVQLHRVISDITGVTGMSILRAILAGERDCLKLAQLRHPQIKSSALDIAKALEGDYCQEHLFALQTALELYDSYLLKIMACDRHVQEALSTFEPKTGAPAPELSRMRSAEKRQEALRRHHLEQMTGADLTKLPGLDLLAVERILSEIGLDMSRWPSEKHFCAWLNVAPNNRISGGRILSSKPRKNANRAAAALRLAAQSAMQSKSAIGAFIRRIKSRLGAPTAINAGAHKLARLVYRMLKFGQAYVETGQEAYEKFFKERTLRNLQRKARQLGFQVTPITTPTVPVS

SEQ ID NO: 481600 - protein, 341 aa, unidentified
MWIIGCDFHPRFQQIAFVNTEGGECGQRRLEHRGEAEQFYRSLAGQGVRVGMETGGSSRWFERLLSELGQELWIGDAAKIRAAETRKQKTDARDAEHLRQLLCSGQFEKMRIWIPPAENRDLRQLLRHRHRLVQMRTRVKNQLRSLASSEGMERKPGLWSQRGQQQFQALELAPWAGRRRQDNLELLTELLRRTDPLDEEVAQQAARQPEVLRLMTHPGVGPITALAFVLVIGDPARFPNSKKLASYLGLIPREDSSGGKQRLGHISKQGNAMLRGLLVEAAHVAVRHESQWKRDYRRLAMRKNRSIAVVAVARKLAVRLWWMWRRGVDYAQLSASGSHAG

SEQ ID NO: 481601 - protein, 350 aa, unidentified
MQGTGRWIGLDLSKETYEMRYFDQKGKVAGSGGLTTKVGRAKLYAKLKSEDIVAMEANSLAFVMEQEMRTIGCTVIILNASQLSVIYASTKKTDKEDAVKLARLIKIYEKEDLPTVDVPTDKEWYRRKLIKEYKTLKADRTREINRLHALFVQCGITTIKRSNVQTDVNRQEVLPQLFDYEARQAKRVCARLTVLDAQIEELDQLIKKECKEDKDIQRLQTIPGVGDKTALAFAAYVGDGKRFNNGNEVANYVGLVPRVDCSGTINKYGHITKKGNGVVRSLLYQAAWAIVRSKRGGALKAKYFYMTEHGKGKKISITAIARKMAKLLYVVMKNKQMVYQEMPAPSLRAG

SEQ ID NO: 481602 - protein, 325 aa, unidentified
MMEVGINGKRSIGIDIGKRWLDVAREDAAEVERHANEAATIAALVGTFDPARDIVVFERCGGYERELEAALATANVPWAVVHSLRVKAFRQVQGIKAKTDTIDARLLRGFGRDRLNAGKLRLGRAEDVVLDALMARHRQLKAALHAEQCRRETAAIAPVRASIERMIAQIEAELSAIASELSTHEAHDQRLAFKERVMCERKGVAQATARALLAELPEIGRLDRREIAALGGLAPRVHKSGRTDRRRGLAPGRSCVKVILFNPARTAMRWDPEIRAFCNRLRARGKPGKVILVAVMRKLLVRLNAAVRDALNQEEVRSSAALAAA

SEQ ID NO: 481603 - protein, 408 aa, unidentified
MAPVTVGIDWAEGHHDVAVMDEAGAVVGKTRIDTGVAGFTELLALIAEHGGTPEQTPVGIETDKNLLVVALVAAGFTVYPLNPRAVARYRERHSQSGRKSDARDAALLADVLRTDRHLHRPMPAISEQGLALKALARQHQEAIWAWHDVLNRLRSLLMEYYPQALLAFPNLKHKAAIEVLGLASSPSSARTLTRRRLVAALHRCGRRNDPPLVDQLLTALRADGLAQPPAVEAALGTAAAQLIAVAKTMSAGVDELEAALTAAFAEHPQAAIVASAPGLGPVLAARVLAEIGDDPTRFPTAAALRCYAGTAPVTRSSGRSHYVKARKVRNKRLGDACHWWAFATLTRSPAARAHYDARRAAGDHHNAALRNLANKLLGKLWWCLTHGQEWDDATAWPAHPRAALPAAA

SEQ ID NO: 481604 - protein, 384 aa, unidentified
MNKHSILFIGLDTHKEFNEVAYIEEHRGAQPVHLGRVSSSKMAVQKLVRQFESKYPGATLHFVYEAGPCGYWIYRLITSLGHCCYVVAPSLIPKKSGEKIKTDKRDALKLSKLLKSEDLTPIYVPEPEDEAVRDLSRAREVAMKDLKDAKYQLKALLLRNNINYKGTANWSQKHLRWLTELVLPHPAQHIVLQEFLHTITERISRLERLDNELTHHVHQWRYYPVVKAIQAMRGVRLLVATGVVAELGDLSRFDHPRKLMSYLGLVPSEHSSGGKRHIGAITKCGNGRARRLLVEGAHTYRYAANISTDMQKRQEGLPKDIIDIAWKAQIRLCKRYKKMIAKGKHYNLVVTAIAREMIAYIWAIAREVVLTPVNKKLRLAIVPA

SEQ ID NO: 481605 - protein, 397 aa, unidentified
MTQAWAGVDAGKAHHHCVVIDGDGKRLLSRRVANDEPDLLALIADVTALAGQVTWAVDLPDGGAALLIGLLVAGDQELMYLPGRAVSRAAGTYRGEGKTDARDAAVIADQARMRRDLQRLRPGDEISVELKILTARRADLVADRTRVINRLRGLLTSIFPALDRALEDLTAAGPLILLAGYQTPGAIRAAGPAGLEAWLRERKVRSPGKLAALAAGAADRQHAVLPGEQLTASLIAGLAGEVVTLGEQIKATDKLIEGRFHRHRLAPVIASMPGIGVLLGAEFLAATGGDMTAFATPDRLAGFAGLAPAPRDSGRIRGNLHRPKRYHRGLNRVFYYSAMISIARCPESRRYYDRKRAEGKKHTQAVLALARRRVNVLWALLRDERMYHATAPLRQAA

SEQ ID NO: 481606 - protein, 428 aa, unidentified
MTENSTTHPEPEFVAFVGIDWADQKHAWCSQRAGATQREHGEVKHTPEMVEVWVSQLAQRFGPGPIAVALEQRKGALVYMLSKYECLHLFPVPSTMSASMRKSLYPSGSKDDPRDAELLLDLLLQHRNKLRRLMPDDEVTRRIQNLVEERRNLVDEKTTQLNRLTGYLKVYFPQMLEWFENLDTKLVCDLLERWPSLEELQKVPPAELRKFFGQHRGRHQELTERRLEGIGRAMPAIRDRAVLEAKRAMVQVSAQLLRILLEGIANLDSKIEEAASAHPDFFIFESLPGAGSALAPRLLAAFGSQRDRYGSAEEVQTHSGIAPVMEKSGKKKWVHFRWACPKFLRQSFHEWAGHSISQSTWARAYYQQQRGRGKDHQAAVRALAFKWIRILFRCWQDRVAYDENKYLAALARRGSPLSSVLTVTAATL

SEQ ID NO: 481607 - protein, 375 aa, unidentified
MSKIRFIGLDVHADTIAVAVAELDGEVRPLGIIPNRLESVRKIIAKLGPVNQLKACYEAGPTGYVLYWQLTSLGVACEVVAPSLVPVKAGDRVKTDRRDAAKLARSYRAGDLTAVWVPDAAHEALRDLVRAREDAREDQQRARQRLGKFLLRHGWQPPEDIKKNWTQKHMDWIKRQVRFEQPASQAAFLDYVHEVEHAADRLQQLEKTIDDAIAAAPAEIQEVVQSLQALRGVGKIVAVTVVAEVGSLSRFGNPRQLMGYSGMVSSEYSSGSHIQRGAITKTGNAHLRRVIVEAAWAYQHKPWIGGWLAKRQQGLDEQTKAIAWKAQWRLCTRYKKLAAKGKNKPQIVTAIGRELLGFIWAIAVRAEARVAGRAA

SEQ ID NO: 481608 - protein, 326 aa, unidentified
MDEVKRFVGIDVAKAALDVFIGSAGAAFSVPNHEGGIRELLKQLKPTDFVILEATGGLETPVASALAAAGIAVAIVNPRQVRDFARATGRLAKTDRLDAEVLARFGEAVRPEARPLADEQAQALEALVTRRRQLVEMLTAEKNRRASAPKVSYRSIDEHIRWLEKRLAGFDDELGELIRDTPLWRERDELLRSVPGVGKVLSSTLLAQLPELGMLNRKQIAALAGLAPFNRDSGSMRGSRCIWGGRAQVRRVLYMATVAGVRSNPTIRTFYLRLRAGGKHAKPALTACMRKFLVILNAMLRNKTNWQASALDSSNIFPDAFAAALD

SEQ ID NO: 481609 - protein, 355 aa, unidentified
MTRMKYIGLDVHQASISIAVLDESGKLVMQSVIATRASAILEFLEGLRGTLQITFEEGTYSAWLYDLLVRRVSKVVVCNPRKNALLKQGNKSDRIDARKLSELLRNGSLSPVYHGENSTRTLQELARSYMTLTVDTTRVMSRLKAIYRSQAIPYGGKKLYTRKHRQEWLTQLHQPGLLRRAERLYEELDLLLQLRRQAKQELMMESQKHCVCERLRTIPYLGPIRAAVLAARVQTPHRFRTKRQFWAYCGLGLETRSSADYQQMEGQLQRSRKKVLIRGLNVDHNHDLKNIFKGAALSASIFAGPLQDFYQERITSGIQPEMARLTLARKIAAVALTIWKKGESFDAAKLKTQAA

SEQ ID NO: 481610 - protein, 366 aa, unidentified
MKIIHWIGIDDHADKWTIAHLRGNEDKPAREFELVPGGEGYRKLIKYAKELDGEVRIVYEAGPCGYELYRRLTKAGLKIDVAAPSLTPRKPGDRVKTNRRDAAKLARYLRAGDMLTLIVVPDQGRESLRDLVRARHAVQKDLLSVRHRITKLVLRYGHRYREGSAWTNRFWTWLSKIKLEGEHSQFVLDELILAHGHRLEQRGRYDDAIEVAAKTPQYAPFVAALTVLRGIDRLSAMTILSELGDLRRFATAPQVMAAIGLVPGEASTGDDTHRLPITKTGNAHVRHIAVEAAWQYERRISNGPVIRRRRKDQPKALLDIAEKCDLRLNRKFHRMTSRGKRSTVAAVAVARELMGFIWAIGQIVHP

SEQ ID NO: 481611 - protein, 401 aa, unidentified
MVSDFMKGRYNLMKIFVGIDIAKLNHFAAAISSDGEILIEPFKFTNDADGFQLLVSKLESFDKNSIIIGLESTAHYGDNLVRYLVAEFYQVCVLNPIKTCQMRKNNVRKTKTDKVDTFVIAKTLMMQDDLRFITFFDLDMMDLKALGRFRQKTIKQRTRLKIQLTTYVDQVFPEIQYFFKSGLHQNAVYALLKEAPSPKEIASMHMTHLANLLKVNSHGHFTKEQAKELRVLAQKSVGANDSAISIQITQTIQQIELLDSQLQKIEAEITDIMKFNDSVIMTIPGIGYINGGMILGEIGDIHRFSNPNKLLAFAGLDPSVYQSGNFQAKTTRMSKRGSRVLRYALVNAAWNVVRNNATFKAYYDAKRAEGRSHYNALGHCAGKLVRVIWKMLTDEVEFNLE

SEQ ID NO: 481612 - protein, 346 aa, unidentified
MNITTVGVDLAKDVIQACVFSNNKVLSNKEMTPSEFSQWLVCRKHSLVIFEACSTSNYWAQKAESLGHDTKLISAKLVSTVRQNQKTDKNDALAIVQASLLADIKFINGKSSEQQQLQSVLRMRELTVKQKTALSNQLTALLLEFNIRVAPRNGGLKGAIQSALEDAENGFTMTFRYALEQMWLQFLNCVATIKKFDEYLSTLVNTVPQCKKLLKLEGVGVINAINLYITLSTSEIGVFKDGKGAAACIGLTPIQHSSGGKTKLGSIGKQVKNSVMRSQLVTGAFTYINHVSKRSAKSKKDIWLQELIKRRGKKCAAVALANKTVRTAFSLIKNNTEYAVQLQNIT

SEQ ID NO: 481613 - protein, 421 aa, unidentified
MTPPNEVVWAGIDTHTDTHTIALLDERGRPLGAETFTADPDGYDRLIGMPPGPGRVAAVGVEGTNSFGAALARRLTAAGYEVREVLRPRRSVRRRDGKSDPLDAVAAARSVMAGDGTSLPKSSDGWVEALRHLNAQRSQLVSAMTAIPDSTNGLLAAAPEPIRERYRGLRSETRMNRLAECRPAGGLVERSVLAALKSAAKAWKALKRQAGLLEERMRLILEEHARPLLDMYCAGAVIAATLAIVAGDNPERIRSEAAFAKLCGVCPIPASSGRTNRHRLNKGGNRQGNMALHRIAIVRLRYHKPTRDYMAKKTREGKGKLEIIRCVKRFIAREAYRALISIRNGEVGRGTPAERGAKLRELRVSRNITQQQIGEALCVPSSRISEIERGARDLPELEQRAIQWIHSTTNPKQHTQTLDNV

SEQ ID NO: 481614 - protein, 346 aa, unidentified
MAVIGIDSHKDTLAGCLIDEAGTPIEHRELSNTAAGHAELVAWASVAGVQRVGVEGSGNFGRPAAEALIAAGIAVAEVPPQMTAAARRGRRTGAKTDEVDALEIARITARDHDLPAPRFTGAPDELACLVGYRRELVKDRTAAINRLHADLEKIRCGYHTRIGALTSRRGLDAAARLLRGDPGAPAEVARSRITHIRRLNRQIDTLSTRIAGAVTHTGTSLTGIYGIGALVAADILTEVGDPARFETKARFAMANGTAPIEASSGRTTRHRLNRGGNRQINRALHIAALAQITRPSTEGHTYYQRCLAKGKTHREAIRALKRRISDRVWTHLQADLQHTNPTPSLT

SEQ ID NO: 481615 - protein, 450 aa, unidentified
MTQRKIGTRNKAGAARQSFSLTHPNAAGIDIGSASHYVAVPADRDEQPVREFRSFTEDLEKLGDWLKACGIDTVAMESTGVYWIPLFELLESRGFTVLLVNARHVKNVSGRKSDVLDCQWIQQLMSYGLLRGAFRPAEDICILRSLSRQRETLLRLQARSVLHMQKALTQMNIQLANVIADVVGETGQRIIRAILAGERDGRVLAAMRHARIRATEEDIAKSLQGNWRTEHLFVLKQAMNRFDFYGTLLAECDRETELHLRSLQVRQDTPAKGKKKSRTRNAPKIDLRTQLFQMCGVDLTRIDGINVTTAMTLLSEVGADMSRFPTVKHFASWLGLCPGTRITGGKVMNGKTKRVANRAAQALRMAASSLRSSQSSLGAYFRRMCSRMDKSKAITAAAHKLARLVYTMLTKGEQYTDQGQDYFEERHRQRTLHHLAKRAEKMGMQLVPVP

SEQ ID NO: 481616 - protein, 329 aa, unidentified
MSKLSKKVIGVDVGSKFLTVSFNNDQNQDQIYNIGNNQRSILSFLKKICAEEYCFVIESTGNYSSRLLHLSLSSGFEASLINCMSVKHFSRMKNIITKTDAEDAKLIRLYGEMFRPEIYKAKSIEIEYLDQEIKLLNDLEEEKRRYGVKLKALRYNPQLNPDTEKHYERRLKQLDKEIREVELRLPQLQDEEFKEVKGLLQSVSGIGEKTSLQLMTATSGFRNFDSAGSLVKYFGLAPRIYQSGKKSYSPGKCRTSKTHIRSLLYVCSWTAMKHNTQCKALYERLLEKGKAKKLALIAVCNKLLRICFGVVKNKTAYQQDYQKNFKILT

SEQ ID NO: 481617 - protein, 460 aa, unidentified
MNRKRSKSRVDRTLPMMHPNAAAIDVGATIHMAAVRADRVPEPVRCFGTFTTDLHRLVDWFTECGVETVVMESTSVYWIPIFELLDARGFTVFLVNARDAKHVPGRKTDVSDAQWLQRLHSYGLLRASFRPKGQIAELRAYVRQRERLLEYAASHIQHMQKALTEMNLQLHHVVADITGSTGLRIIRAILAGERDPEVLACLRHYSCHSSAETIAKALTGSYRTEHLFALEQALALYDAYHEKASACDVRIEAVLKELSIHRGRDIGSVPPASRRRHRTDQANALAFDVRAALFALLGKDITRIDGLGPYLSLKLIAECGDDLSSWPSAKHFTSWLGLAPSNKVSSGKMLSSRTRRSGGRAAALLRLAAVTVGRTDTALGAFYRRLSSRIGKAKAVTATARKVAVLFYNAVRHGMEYVDPGASSYETRYRTRVVNNLHRRAKAFGFVLQPLEPKADAVVS

SEQ ID NO: 481618 - protein, 353 aa, unidentified
MSDKSNLLIATMGIDIGKNAFHVVGLDRRGAIVLRQRWSRGQVEARLVNMPPCLIGMEACVGAHHLSRRLHSQGHDARLMPAKYVRPYSKGQKNDFRDAEAIAEAVQRPTMKFVATKTADQLDLQALHRVRARLVSQRTGIINQIRAFLLERGVAVRQGLRFLRAELPILATRSDVLSPRMVRVIEELAGDWRRVDERIDGLSQEIEALARQDPACERLMTVPGIGPIISSAMVAAIGNGAVFTKGRDFGAWLGLVPKQISTGDRTILGAISRRGNRYLRALFVQAAWVVLVRIKDWDRYGLKAWIDAAKKRLHHNVLAIALANKLARIAWAVLNKERGFEYVKTRATASQPA

SEQ ID NO: 481619 - protein, 424 aa, unidentified
MKLQSDAEFAAFVGIDWADTKHDICLQVATSEEREFAVVPHRADAIEAWVGSLRHRFEGQPVAVGLELAKGPLVYALQKYDFVVLFPIHPSTLAKYREAFTPSHAKADPTDAELALELLVRHRAKLKALKPQSVAMRMLLRLVEQRRRLVGDKNRISNRLTDALKQYFPDVLEWFADKDTPLFCDFVGRWPTLKHVKHARKATLQSFFHEHHVRSQSRIDERLHTIRSATPLTDDPAVIRPNQLLMLALVEQLRVTLQAIDRFDAEIATVSQTLPDYSLFRALPGAGPAFAPRLLAAFGEQRERYQSAAEVQRYTGIAPVTESSGNKHWVHWRLQCPTFLRQTFVEWAGATIPRSFWAAAYYRQQRDKGSTHQAAVRALAFKWIRILYRCWQTRTPYDESTYLNALKRRGSPLLTSIVGAAKNT

SEQ ID NO: 481620 - protein, 323 aa, unidentified
MGWTPPRRPWCARVVAFVTTEQEASVSKVSTIGLDLAKHVFQAHGADASGKVVFRKRLRREKVLEFFAGKPACVVAMEACSSAHHWARELARLGHIVRLIPPAYVKPFVKRQKNDAADAEAICEAAQRPTMRFVAVKSATAQANAVVFRARDLLVRQRTQAINALRGHLGEYGLVVAKGPGHVIKLVEHVEDPGSDVPDAARLVLRTLVEALRFLSERIDLLDREIARRAREDDEVRRLTSIPGVGPITATALAALAPSADAFKKGRDFAAWVGLTPTQHSTGGKQKLGTTSKMGERTLRRLLIIGASSVVRKALRQGIAAES

SEQ ID NO: 481621 - protein, 384 aa, unidentified
MRNVCGLDVHKDSVFVCVLNEEGVIFQEKYGVLTPELAKMSAALEMYGVEEVCMESTSIYWMPVWRVLEPSFSLKLVNPYFIRQLPGRKSDVKDAEWIATCLLKDLIRGSYVPGDTVQRLRQYDRRISDLNREIVYKLAKLDAALQRCNIRLSNYVSNVDSKSYREVVKLLAEGVSDPERLVAKVHGRTVKRWGRETVKAALTGVVTEVDSEVISQLRDELELATGHRAECQSRMAKMCNELFPKQMHNLQTIPGVSERAATAILAEAGTDLSSFQDAAHLVSWAGLRPRNDESAGKIKSRGITHGNKYLRKTLIEVSWAARRTQGSFFSKFSYTQTVIRRKPVMKVQVAIARKTLVAVWFVLHDGAPYIDPSASDTASAQKQG

SEQ ID NO: 481622 - protein, 315 aa, unidentified
MDEPRPVSTCAGIDVSKDRLDVHLLPSDEAFAVARDGKGLESLVERLAALDVSLIVLEATGGFETKVAAALAGAGLPLAVVNPRQIRDFARALGKLAKTDAIDAQVIALFAERIRPQPRPVASHEARMLGELVARRRQVVEMIGMESNRRRRAAGKRLAKKIDRHLAFLEKELVDIDVDIDNGVRASPAWRETEDLLTSVPGVGPVTARTLIAELPELGALDRRKLAALVGVAPFNRDSGAWRGHRMIGGGRSCVRNVLYMAALVAIRHNPLVKATYQRLVQRGRPKKVAIIACLRQLLTILNAIVRTKSEWQNA

SEQ ID NO: 481623 - protein, 362 aa, unidentified
MRTITIGVDLAKQVFSVCSVDAAGRVQERRELRRDVFIQWLPSIPAGTTVAMEACSGAHHWARRCQDYDLQPRLMAAQFVAPFRKSRTAKNDRNDAEAIATAARQGNMRFVPIKTVDQQVRLSWHRVREGYKAEALATSNRLRGLLAEFGVTMAQSDGALRRTLADLDALSLPTSLVELLREVDAHWQQLQARIVQADRRIQAHAKADEACTRLRAIIGVGPITADAVVATIGSAQWFANARQFAAWLGLVPMQRSSGGRSRLGRISCRGDGYLRTLLIQGARSSLQRAKAVAWEKATPEQRWIQDLERRLPFGKVLVAIANKHARQLWAMLARGEHYDAQAWLKHPMVQRQASRRAHRATN

SEQ ID NO: 481624 - protein, 343 aa, unidentified
MQMITTIGLDIAKSVFQVHGVDAAGQVVVRRQLKRRYVLAFFQKLPPCLIGIEACASSHYWSRELRALGHTVRLMPPAYVKPYVKRQKNDATDAEAICEAVTRANMRFVPTKTPEQQSCLMLHRTRHLFIRQQTAVINAIRAHLAEFGIVAPVGRKGVTELLHVVADPSDGRVPEVARACLAALGTQLLGLKEQIVEFDRLIMAWYRSNETSKRLHYIPGVGPLLATALAASVADPQTFRSGRNFSAWIGLVPKQHSSGGKDRLGSISKQGDRYLRSLFVAGALSVIRYAKIHGTKHRPWLTALLARRPTKVAAIALANKLARMAWAMMARGERYRNPVALAA

SEQ ID NO: 481625 - protein, 335 aa, unidentified
MEFTFFIGTDVSKNELDFAVMQGKQLLFHREIENRPKPINTFLKELLKHPGFDLSKAVFCMEHTGIYNNHLLVCLHKMKANICLEAATLIKNSLGNIRGKNDKIDAIRIAEYARKNRENLHLWAPRREVVVKLAQFASTRSRLIQVKKMLTVPIKENNGFLDKEIARKNEKLCAGSIKSIREDLIKTEKAIDRLVEDDPELKRLFGLITSVSGIGKVTAIQILISTNEFIDINEPKKLACYSGVAPFTKESGIFKGKVRVSHMANKHVKKLLHMSALSAIQYNKDLKTYYERKVNEEKKNKMSVINAIRNKLVLRIFACVKHNKNYEINYHKLVA

SEQ ID NO: 481626 - protein, 354 aa, unidentified
MIIIGVDFHPAYQEIAAVNTDTGEYQEKRLAHPQEAEEFYGSLAWVGQAVGVGMEASGQAQWFERLLEGLRWELWRGDAAVIRAKRGRKQKTDREDARHILKLLLKDAFPRIWVASWENRDLRQLLWHRHRMVQARTRVMNQLQAVALKEGLHCKKRLWRASGRQQLECLQLVPWSSRRRGELLELLDRLNPTIAELSQAVEREAEKCPEAQRLMTHPGVGALTALAFVLIIGNAERFGCGKQVASYLSLVPLEKSSGNRRRLGHITKPGSSLVRFLLVEAAQVTVRSVPEWRSKYHHLVLRRGRKTAKVAMARKLAVRLYWMWRKGWDYEQWKKFGSYVGQPGHRDGVQSITE

SEQ ID NO: 481627 - protein, 366 aa, unidentified
MKKISTVQVFGNEVFKEQKLTIGVDLGDRWSFYCVLDEAGKIILEQKVSTTPEAMKQIFEKIPRSLIAMETGTHSPWVSRLLTELGHELLVAHAQKVELITKSNRKDDRHDARTLARLARIDPELLGPVRHRSAKAQIHLTVIRARAELVSARTALVNAARGLVKSYGQRLPKCGTQQVSRELGAGLPAELREVLEPLLKEIESLNERIQEYDERMEKIAKEEYPEVSLLQQVKGVGTQISLTYVLTIEDPYRFPKSRTVGCFLGLRPGRRNSGESEPQKGISKEGDRYLRTMMVQGAHYILGPFGEDSDLRRWGLKLAERGGKNAKKRAVVAVARKLAVLLHRLWVSGEVYEPLRNSQKAMRAVA

SEQ ID NO: 481628 - protein, 354 aa, unidentified
MFETVKTAVTVIGIDIGKNSFHVVGLDQRGAIVLRQKWSRGQIESRFANMPPCLIGMEACVGAHHLSRRLKALGHDARLMPAKYVRPYSKGQKNDFRDAEATAEAVQRPTMKFVATKTVEQLDLQALHRVRERLVGQRTGIVNQIRAFLLDRGIAVRQGPRFLRTELPRILAAPSDVVSPRMVRIIEDLASDWRRLDERIEGLSGEIEAIARQDVGCGRLMSVPGIGPIISSATVAAIGTGDTFSKGRDFAAWLGLVPRQISTGDRTILGKISKRGNRYLRVLFVQAAWVVLIRSKSWERHGLKAWLETARKRLHRNVLAIALANKLARIAWSVLARDRAFEARRIDQATVQPA

SEQ ID NO: 481629 - protein, 336 aa, unidentified
MNIKRIGLDLAKQVFQLHAVDHQERVVLRKTLHRARMLTFFTRLEPCLIGIEACGSSHYWARELTRLGHTVRIIPPQFVKPYLKGNKNDANDAEAICEAVSRPGMRYVAIKSEAQQSMQAEHRVRARLIHDRTALSNEIRGMLGEFGFGLPAGLSALRKALPEILSQQEKWDNRFIRLLSELTEELQALDERLNRYDRRLKQLAQEDERIRRLQEIGGIGPVTASALVAAVGDAKQFKSGREMAAWLGLVPRQHSSGGKTKMGHISKRGDSYLRTLLIHGARAVLNACDHKEDRRSRWLQSVAERRNRNIATVAMANKNARIAWSVLSRGEEYRVM

SEQ ID NO: 481630 - protein, 424 aa, unidentified
MKVTYQTCCGVDVHKSFLVATIVKTTGGIEPSYQKKRFSTFNNSILEFKQWLLDNDCHDVCMESTGKYWVPVFNLLEDEINVVIANPKWVKAVKGNKDDAKDSKWIGDLFRLGLVKGSYVPCKKVRILREYTRYRYKLVSCRSSEKNRYQNALTVCNVALDSVVSDIFGKSSTSIIDYLLEQSGSSINHEEIASKLLRSLKSKEDAVIESVEGYQMTDTKKYRMRLVRAHMDYITAEINDVDKMIENMISSNPDFENAVRFLCTIPGVKRDSAITIISEIGTDMSQFSGSKRLCCWAGLTPDSNESAGKKKSVRITRAGVYLKPALVQCAHAAVKSDKSPYYKKKYEALVKRRGKKRAIIAIARMILTAIYQMLSTGEEWNPSNLYKIDMPVALVEKQKAKAIRQAKKLLQREGTLPPDKPLAS

SEQ ID NO: 481631 - protein, 377 aa, unidentified
MKRIKFVGLDVHADTIAVAVAAKEGEARSLGIIPNRAESIRKMVGKLGPIEQLRFCYEAGPTGYALYWQLTQMGAQCEVVAPTLVPVKAGDRVKTDRRDALKLARNYRAEELTAVWVPDAAHEALRDLVRAREAAKKDQLRARHRLSKFLLRHGRRPPVGINSWTVKYLEWVQREVHFTERAQEVTLLDYLHEVQHAAARIERLEQAIDEAAQSVPPQMRAVIAALQALRGIAKISAVTVVAELGNVTRFTGARQLMAYGGIVASEDSSGARIHRGKITKTGNAHLRRVVVEAAWAYRHRPAIGATLRKRQEPVSEKVKEISWKAQQRLHARYMKLILKGKNKGVVITAVARELLGFLWAIGIQAEAEHQESLSRVA

SEQ ID NO: 481632 - protein, 424 aa, unidentified
MFKIFRKNCCGLDIHKTWIYGCIGITDENGRTAYHQARFSSFTRGLRELAGWLASHDCVEVCMESASKYWIPVFNILEKTCLVTLSHPKYTKPQKGSKTDRKDAKWICDLFMCDMIKPSFIPPPDIRHLRDLLRYRFKLTNMITGEKNRAQNCLTVSNLKLDDVFADVFGKSSMSITKHILDNPGEQFDVKPFVHWRCKKPIEEIQAAVDGSISLEQAAKLREILNHIDELEIHKLNIESEILRLAEPYIHQLDLIHSVPGFFANPMTAIALISEIGVDMSVFPTAKNLSSWAGCCPRNDQSAGKRKSNRISRAGVYLKPLLVQVANAIVKSDKYPEFRDRYRRIKSRRGHKKAIIAICRMLLTAIWNILSKKEPYSPEGYLVNRIIPKGDTFITKAQALNYMRARGFVITNDFDVEIAAESPA

SEQ ID NO: 481633 - protein, 334 aa, unidentified
MNFVGIDLHKHYSHFAVLDQNGRVVARARVPTEREALVRFISGLEGSTKAALEASRSWYWVYDLLEGMVEELKLVAPHRMRVIAESTVKTDKVDARVIAELLRVNYLPTCYVPPAEIRELREIVRQRAFVVELRTAVKNRIHSLLDKLGVEHPFDNLFSGRGLDFLKSLQLGGMYQQELEECLGLLEVFTRLEKQSSKLIRRLAEESPDCRLLMTIPGIGFHHAFLIMAEVGDISRFASAEKYASYCGLVPTVRISEKMMRYGHLKRQCNSWLRWAYIEAAHIACRKSIRFSALYSRVVRKRGVQKAIGAVARKLATISYTLLITRNEYVDRLQ

SEQ ID NO: 481634 - protein, 386 aa, unidentified
MTQVSDLSRSLVALKQDSTLVAVVELSASSWLVAGLVPGVDGKPLKKLEPEPEALLGLVDRWRAAALKAGRVIERVVLAYEAGRDGFWLARWLRARGIEVYVIHPTSVAVSREHKRAKTDRLDAAMLLRVFVGWLRGERGHCGMVAIPTADEEDAKRPSRERESLVGESTRIINRMKSSLARLGIRGFKPHLRKAAQRLAALRTPDGLAIPPNTLDELRRDLARLALLREQIAAIEAARVERLTQAPERGPHAMVLLLARIVGVGVETADMLVQEILSRKLRDERAVARYAGLTGSPDESGAKRREKGLARSGNARVRRGLIQLAWRFLVFQKDSALVQWYRARTAAPGVRKTTMIVALARKLLVALWRMVMTGQAPQGFVLRPAA

SEQ ID NO: 481635 - protein, 354 aa, unidentified
MLVIGCDYHPSFQQIAFVDTETGELREERLEHREGAEKFYRGLAVAGQRVRVGMEASGHAGWFERLLAELQFELRIGDAAEIRRKRGRKQKTDRQDAQHILSLLLKDDFPPIWVPNWENRDLRQLLWHRHRMVQARTRIMNQLQAMAMNEGLLWRKKLWRERGRKQLEGFQLAPWASRRRRDLLELLDRLNPTIAELSQEIEREVEKCPAAQRLMTHPGVGSLTALAFVLIIGDADRFQCGKQVASYLGLVPLEDSSGNRRRLGHITKQGSSILRFLLVEAAQVTAGSLPEWRSKYHHLMLRRGRKTAKVAMARRLAVRLYWMMRQGWDYQQWSRFGSHAGQPGNRDGVRSNIE

SEQ ID NO: 481636 - protein, 379 aa, unidentified
MRDYSECFVGLDVAKARNAVAIAEPGRSGEVRYLGEIDSAPEAMQRLVRRLGKRHGRLHFCYEAGCTGYGLYRQIKALGHQCTVVAPSLIPTKAGERRKTNRIDATKLARLMRAGELSAVWVPDEAHEAMRDLVRTRHAAAKSLRAKRQHVTSFLLRHGRWYPRKAWGSTHARWLAAQSFAHTAQTAAFHDMVEAVRCAEQRLARLEALIGEFVPQWSLAPVAKALQAVRGVDFIAAVAFLAEVGDLSRFANPRQLMAYLGMTPSEASTGDDVKRGPITKTGNSQARRILVESAWTYRFAPKVGARKLVKVSAAPDKVQAIAWKAQMRLTQRYRMLARRGKKANVVAVAVARELAGFLWAIAREMTGDSGDHAQATNKR

SEQ ID NO: 481637 - protein, 343 aa, unidentified
MQIRTIGVDLAKNVFQVHGVDSAGKVVITRQLRRKQVIEFFSKIPPCLVGMEACGTAHHWAREVSKLGHTVRLMPPSYVKGYVKRSKNDAADAAAICEAVTRPSMRFVAVKSTDQQASLMLHRTRDLLIRQRTQLINALRAHLAEFGLVAETGREGVAQLAALITDESDREALPFAMKQALQAIVDQLAALELQLGTLDRAIHAHHRANDMSSRLETVPGIGVIGATAIASAVTDPSNFKSGRDFAAWIGLVPRQHSTGGKERLGGISKQGDRYLRRLLVVGATAVVRHARQHPQKHPWVMRLLAKKPAKLVAVAVANKMARIAWAIMAKGGYYRAPELAAAA

SEQ ID NO: 481638 - protein, 405 aa, unidentified
MSELEKDLVFAGVDTHKDTHTLCLLDHMGRAIGTFRFAADAKGYDALAGKIGGPATCVGVGIEGTGSYGAGLTRRLLELGYCVYEVMVPGRARRKPGRPKSDPADAEVAARQVLARANLSKPKDQSGWTEELRQLMIARDRLVQATSAMINAAKSLIVTAPEDLRRSLEGLSRKNLKSALSTLDPAAGGIILALGSLGKAWDLQDREADAIEERMKRVLEANAPALLTIYGCGTVSAAALAVAGGGNPERLKSEAEFASLCGVAPLLASSGKTERHRLNRGGDRRANRALYQIAVTRMSYDQRTKDYVGKRKRDGKSKKEAIRCLKRYIAREVFRALRNPLEIKGPSWKDLRPARQALGITLVEAGKALNVGFQRVSYAETGRLMNVRFLEEYDAWLKSQAKRES

SEQ ID NO: 481639 - protein, 319 aa, unidentified
MEQNNYEVYIGIDVSKAKLDIKYDDSDSLLTIDNKLGDFKQLNRCCPKDKKSVLVILEATGGYETKVVKWLLSRNIPVVVANAKRVRDYAKATGQFAKNDKLDAGIIREFGMKVGHKLYLQQKKNRVEEQIDDLTHRRKQMISVRNKEKQHLAMIQNIEGQRSIKRAIKFYNSEIDNIEKKLAATLKQDKQLQAKAELLQTIKGVGDVTTYTMIGELPELGHVSNKQISALAGVAPFCRDSGTMKGKRTIWGGRSQVRTALYMAALSASKYNPAIKVFYDRLIAKGKCKKLALVACMRKLVIVMNTMVKNNEPWHAEMV

SEQ ID NO: 481640 - protein, 349 aa, unidentified
MTQQRISYAGERVYVGVDVHKETYTVTCVCHKQIVKTATVPAEPASLAASVLQWFPGAMLASAYEAGFAAFVLHRALTQVGITNIVVNPASMAVAANDKVKTDRRDSKRLAIDLADGRVRGIYVPTEGEELARLLPRTRAQIVDHRATIARQIKAKLHQFGLIAPASRRMISNRYLREIAAWSLPPELRVSLTLLAEQWRFGTRQLIEIRRLLRTQAAAQAELAHVYRSVPGIGAVVARTLATERGDMPRLANERALFSYTGLTPSEDSSGPAVRRGHSSRQGSGRVRHLLIETAWRALPRDKVLQEIFDRIAATRGKKRAIVAIARRLTGRMRACFRQGTTYAVGTYA

SEQ ID NO: 481641 - protein, 322 aa, unidentified
MATVSFCGIDVAKDRLDVVVLPEQRCWSVCNDAAGWAELAKQLGSFSIAAIGLEASGGYERGVMRVLLAADMPVHQINPFKLRQFAKASGVLAKSDRLDARVIASFIAIMPTRRAQRPSPAIERLTEILSVRRQLTDQKIAAQNASAMLQDAMLLRLSRRRIGRLAADIEMLDRSLVEIVRTDAALAHRYRLLTSMPGVGPVLACTLIALLPELGSMSRKQVAALVGVAPYTFESGKLKGKRCIWGGRAPVRHVLYLAAMSASNWNPVLKAFHSRLKIAGKLHKVAIVAVMRKMITMLNAMVRDDVAWAGHLGGRQILPTAR

SEQ ID NO: 481642 - protein, 433 aa, unidentified
MHEVEDEPLFADRAAGIDIAKAGIEVTIRVPSEARVGRRQQETRSFATTRRELLALADWLRSWGVTRVGMEATGDYWKPVYFVLESQGLDCELYHAAAVKALPGRPKTDRADSVWLARITERGSLPSSFVPPAPIRALRTHTRYRRHLTQARTAEKQRVEKLLEDAHLKLSSVISDIHGVSGRAMLEAVIGGQRSPAALAQLARGTMRGKIRRLEEALDCSFLTDAHVAILGMMLAAIDSFTAQIEELTARIDVLAAPYLRQIEQLDAVHGAGKISAQDMIAEIGVDMTIFPTAAHLVSWARWCPQVAQSGGKRKGANASGRGNPYLSAALGEITISAARTQSFLGAKYRRLVKRMPKKKALIATGNSVLTIVHALLSDPDATYDDLGPDYYEQRANIRRQARNHVRGLERLGYHVTIQAINPDTGELATATA

SEQ ID NO: 481643 - protein, 485 aa, unidentified
MVQSVGIDFHEGQHQVRCLDERAQLCDGFSFRTTPQGLAALEERICRDGSSPIVVFEPMGLAWLIVAAYLRARHPGCRLVKAKGQKVAALRRYLRGSAKSDRIDALTLAKMPFIDPEQLGEVYLPPAEVHALQRLTRQRQRLEREVVARKNRIGRIVDGYLPGVREAFSSPWSLQARAFLRSQLDPFAVVHAGEEALHTFLTKARSRSRGDRAETHPVYQACQNVAGLYELSRPSGGVDEGFFADLQEEIARELRLMEAEEAESEAISLRVEELYQKLHPQDNLRTIPGVGEHTAPVFLAVVGDPTRFRCQAAFANWTGVMPGASQSSDVEAKGLRMTKAGPPIIRWALYQAGQIGRRYDPQLAWIYYREMVHHGKNHKQAMGAVMSHLAARVLIVLREGRPYELRDTEGKPVSREEARGLLSRYRVPEEIRREKRRRNPSKGNAPARRKRAEGMAPHRTSEAASAPQPAVATAIPHEPVYRGSA

SEQ ID NO: 481644 - protein, 404 aa, unidentified
MNDSMIGYAGVDWAMDGHAVCVVNGHGAAVIEFDVEHSAEGLSEMCRRIAGTGARRVAIERPDGPVVDALLGAGLEVVVVSSRSVKALRERYGTSGNKSDRSDAFVLADCLRTDGHRWRSLEPDSPATVTLRGHVRARKDLVETRVAVANQLRAHLRIVFPGAVGLFSAIDRPIALRFLERFPSATSAGWLSEKRLATWLRANSYSGSKDPAELYTRLSAAPAGVIGVDGDARGAITLAYVNVLKTLRTQIDELNTRLDELLDAHPDAPIFRSLPRCATVRAATLLAEIGDCRARFPDPESLCCLAGVAPSTRASGRHRTVTFRWSADKKLRDAICDFAGDSWRGNEWAAHRYHELRASGKTHPHAERILARSWTHIIWRCWQDNTTYDPTRHGAHQRLTTQTA

SEQ ID NO: 481645 - protein, 445 aa, unidentified
MLRIVYRRVAGLDVHKKTVVATRMWVTEDDRIEWESKTFGTTTPDLLELLDWLYEWDLTHVAMESTGDYWKPVFNVLEDTFELWLVNAQHVKHVSGRKTDVKDSEWLAELMLHGLLKPSFIPPKPQRALREMTRYRTTLVQERARIVNRVQKLLEGANIKLASVATDIMGVSGRAMLAEIAAGQTDAELMADLARGRMRNKIPELEKALTGIVQDHHRFVLAQQLDHIDYLDGKIETISAQIGKQLESMSWPDALSQPGVSQGGEEGPRAADESELPLAWDAAVALLDTIPGVDRRIAEVILAETGLDMSQFPTDDHLASWAGLAPGNHQSGGKRYSGRTTKGNRALASTMVQAAWGASRTKDTFLKSRYHRLAARRGKKRAIVAVAHSMLISVWHMLTYQQPYQELGGDYHDERKKESKVNYLVRRLEKLTGGAVSIELQPAAA

SEQ ID NO: 481646 - protein, 341 aa, unidentified
MEPTVVGVDIAKRVFQLHWIAADTGEVFDRQLRRDHFLEHFANRERCLIGMEACGGSQHWARRLVELGHEVKLMPGKLVKAFVTGNKNDVADARAIWAAAKHPGVRAVPVKTEAQQAVLALHRIRQQLVIFRRSQSNCLRGLLGEYGEVMGVGRAAMNRAMPEVLLRLDSRLPRVLLDSLREQWQRLVDIDGQIAVIEQRLRAWLRENPACRAIAEIPGVGFLTATAAVASMGDPKAFRSGREFAAWLGLVPAQFGTGGKVRLLGISKRGDRYLRTLMIHGARSVMKHAKDPGSWAVQLSMRRPLNVVVVAMANKIARTIWALLAHGRAYSASYPPQAEAA

SEQ ID NO: 481647 - protein, 370 aa, unidentified
MQKRVLYIGLDVDDNKFHGYCICEETGEAFPFTSRPNASKLISILKKIESKGFSLKLYYEACYLGFALYRELEAAGIHCDVVGSNMIPSKPGDRVKTDRKDAEKLALLYMKDMLTPVHVPTKEDENDRDLVRSREFLREQLNSFQRHLISLCRRSALHFKDETGKLCHWTKTHVRWIQDKVSALPAGSLKNNLNLFMMQITELKETIASYDAEIEKLSRDKKYKKKVQALTCFKGLSELSAMTVITEVQDIRRFPHPKKLVSYLGFDIAEYSSGGKEKKYGITKMGNSRIRKRLVESCQKCHMPTFAYTKKFRDRSLVPKNILSVADKCSKRLFKKSTRLLAREKNRNKVKVACAREMSTFIWESLMMVA

SEQ ID NO: 481648 - protein, 432 aa, unidentified
MIADRESCRKYFNGGSLMEKVYDKCCGVDIHKKLIVACFKQGRRQEIREFGATTRELLELTGWLAEGGCEQVAMESTASYWKPLYNILESTGLGAMVVNAQHMRAVPGRKTDATDAEWIADLLQHGLLKASFIPDKARRELRELVGYRKSLLKEQTAELNRLQKVLEGANIKLSGTVSAINGKSGRNFLETLLTGEKIDLAKITEMRRDKLIAANLKATDEQLVDDLNGVLSMLQKKMIRTMLTHIDELTKHIKSLDDEIEQTMKDEEKIAAATIQEIPGIGNTSAEAVISVIGTDMSRFPTDGHISSWAGLCPGNNESAKKRKSGKIRKGNALLRSTLIVCAHTAVKVKNSYFYAQFQRISAHRGKKRAYVAVAHSMLIAIYHMLKDGTHFQDLGAEYYNQFNKERKINAYLKKLKALGWQSPVAAVAQPV

SEQ ID NO: 481649 - protein, 367 aa, unidentified
MTHAVAGIDPHKHSATVAVVSLVGEVVARLSFTVTRTGIEELLSLLRDTGLVIDRIGIEGSGGLGRPVMLALAAAGYDVREVPATRTAERRKRRRRAKTDIEDAEAIARETLSDPGLPPAGKHAAPSPAWEALVVIRDWRESLVLQRVRLLTEAEPVLVSLPVSVREQLPATSRVRAALRRLAALAPVLPGVTGADQIKLARLAAIQTAVSTIDGQVKDIDRQVPALLADLGCTLTEIHGVGVVTAMTLTTEIGDPHRFATEGQFARWCGAAPVALSSGEGDGPAIRHRLDLGGNRVVNSALHIVHVTQARCHPPARAYLAQRAPGKTKRELRRAHKRQLANVIIRHMWRDADRLAAAAPVPLNAAA

SEQ ID NO: 481650 - protein, 346 aa, unidentified
MKHSVGLDVSVKETAICIVDEAGKVVREGKVATEPQAIIAFLSSAGVEYARIGLEAGPLSQWLVNGLSEAGLPVICVETRHMKAVLKAQQVNKSDRNDARGIAQMMRVGLYKPVHVKTLASQQARMLLTSRKLLRDKLQDMENELRGTLRNFGLKVGVVSPGHFEARIKELVAGQPPLEMIVVPLLTVRRVVREQLAKLDKMVLDQVRDDKLCRRLMTVPGVGPIVALTFRATVDQAQRFARSKTVGAHFGLAPRRFQSGERDYDGRVSKCGDAMMRTALYEAAQVLLTRTQTWSWLKAWGKQVARRRGAKKAIVALARRLAIVMHRMWVDGTEFLWRKEADTAAT

SEQ ID NO: 481651 - protein, 389 aa, unidentified
MANNQPGAIELAQHLLEFLDSRPDLRKLVVALESTSFYGVHIANFLSSHETLASFRTAVYCLNPKTVANYKKSFIDLGKNDFVDAFVLADFARVGRITNKPWHGSQFLALQRLTRHRLHLAKSLTKEKAYMLSNIFLKFSEFSLLDGEQQPFSDRFGKAAVSVLTDFLSTEELVDMPLDALIRHICEKGRNRFQDPETTASLLQKAARDSYRLDKCLYAPLTISIASSFNLISTYTAEIKAVNKAIEKTLKGLDPAAYQCLLSIPGIGPVMAARILSEIGWIDAFKSQESLAKYAGLVWRENQSGNYRADDTLMSKAGNAYLRYYLLEATSHVKNHCQEFAAFYQKKYAEVKTHQHKRALALTARKFIRLIFGFLAKHQLYSSNRVVQA

SEQ ID NO: 481652 - protein, 419 aa, unidentified
MIGPLQFLLGGTYMLNAVGIDISKGKSTVAVLRPFGEVVRKPFNISHTTKELSSLVSYVKSLDGDTRVVMESTGHYHEAVLKAFIDADVFVSAVNPQLIKMHDSSDNPLRHVKSDPADAKKIAQYALDKWTILRQHSAMDTAREQLKTLNTQYCFLVQQKVALKSNLISLLDLTYPGANELFDSPVRPDGSEKWVDYVRSFWHVDCVRKIGLKTFTERYQHFCRHHGYCYQKSKPKELFDEAKELIAVVPKDQTYKQMIISDAELLEACSANIEKLRSQMDEVASSLPEYQTVLLMNGVGHTLGPQLIAEIGDISRFDHRTAITAFAGVDPGVDGSGKVVHESNQSSKHGSPRLRKILFEVMQSLLKNAPEDDAVYRFMMKKKREGKLYQVYMTAGANKFLRIYYGKVKECIAAKSEDK

SEQ ID NO: 481653 - protein, 341 aa, unidentified
MEEYIGLDVSMKETAVSIRRDGKRIWRGKCASDPKLIAELIRKRAPAVRRVVFETGPLSVWFYHALCAEGVPAICIDARHAKAALDMAPNKTDANDADGLAHLAEVGFFREVRVKGFDSMLTRTLVAARTRLVRITVELSNQIRGVMKTFGLVVPAGKGSMFERNVRSLLVDHEQLAAIILPLLDAWRSVRIRAADLGRQLIRDARESQACCLLMSIPGVGAITATSFVTAVEEPDNFRKSRNVGAWIGLTTRRYQSGEVDYDGHISRRGDNHLRGLLYEAASVILARSKKESALRTWGLRLRERLGFKRAAVAVARKLAVIMHAMLKTGELFDPNAGAAA

SEQ ID NO: 481654 - protein, 352 aa, unidentified
MKEIATVGVDLAKDVIVVCAADADGHSIFYRQFSFHGFGQWAAKLAPCTFGMEACGSSHHWARTLTSYGHTARLMAAEFVVPFRKSKGAKNDRNDAQAILSAVRQPDMRFVSVKSIDDQAVLAWHRMRKGWSDERTALISRIRGLMAEFGRWIGRSPESLMRALPILQEDERIPARLRPLLIATREELRRLEERIESCEIVIRDHAKQSDDAQRIQKIIGIGPITASAMVGTVTHATDFKNGRQMAAWLGLVPKQSSSGGKTVLGRITKRGDTYLRGLLFNGSRSALVSALRKAPEKRTRLQRWMIDLRVRLGYIKALVAIANKHARMIWAVLAKGEAYDPEAWQQHMPRPT

SEQ ID NO: 481655 - protein, 448 aa, unidentified
MQNRNVKMEVVNPNAAGIDVGSRSHFAAIGQGKEEIKEYGVYNEDHQQLIKWFLENEIETVAMESTGTYWQNLYSALIAAGFQVILCNGKFTKNIKGKKTDVKDAQWIQKLHTIGLLTGSFLPDEATEQLRTYCRHRTNLVRQSADTTRKMQKYLRLLNLRLDVVVKDVTGLTGLAIIDAVCKGEKSPEKLAELRHGNCKKSEEEIAKALQGNGRKDYLFGLKQEYQLYVNFQQKMKECDVEIEKLLNEQIDSDNEKKQHFIDKKVYKKINKNTPKNLDINLLSYQYFGAVDLLAIEGVSHATALSLMSEVGNGIHKFETAKQFASWLRLAPNNKISGGKMLSSRIPKGSNRLKIALRNAANAIGNLKDTALSNFFNRIAYRKGRPAAISATARKLAVIIWNMIVKGVPYKPQSDYEFLDQKRKRKVQEMKKLIHKFDININDLGLQA

SEQ ID NO: 481656 - protein, 380 aa, unidentified
MREFTIARLRALARGRKSQRLTGRTVGLDVGDRASRYCTLDEAGAKLKEDKLPTTKAGLDAAFGKMAPCRIALEVGPHSPWMSRHLAALGHEVIVANPRKVRLITQSVKKNDRMDAELLARLARMDPQLLSPIRHRGEEAQADLAVIRARAGLVDARTALINCARGLAKPMGERLKACDADQVKASLAEGLGERVRKVIGPLLQGVEAISQQIEVCDQAIAEIATRYPEVKLLQQVWGVGPLIALTYILTIEDAQRFEHSRDVGPYLGLTRKQRDSGDSQPELGISKAGDELLRRLLVQGAHCILRRDAPDSDLKAWGMARLQARPGQKSSKRAKKKVVVAIARKLAVLLHRLWVTGEVYDPHYNRKAAAAAKRKTRPAA

SEQ ID NO: 481657 - protein, 397 aa, unidentified
MNRLLYIGMDVHKQSFTLSTYHVTLDENELTQDFIGDPLKITDATASGVEKYIKNLKKMLNIKATDNVWIQCGYEAGCLGFDLHFQLKAKGIECVILAPSTIQKSANAKKKKNDPLDSKAIAIALANKTYKSVHVPDKDDLNVREYLRMRNAHRDAVKKVKQQLLAFLLRQGIKYSATNWTKAHVTWLHGLKFDHALLKETLDEYITSLENYVAKLERLDKRIEEFAQGDKYQEKVAELGCLLGIKTQAAMTMMSEISDFSRFRTASEFASFLGLVPGENSSGEKTQRTSITKSGNSQCRKTLIEAAAGICRGKVGHKSKELLRRQALCNNPIAISYADRANERLRSKFYRLNLRNKKPANVAKTAVARELACFIWGIMTDTYDGKVPRSDEYALGK

SEQ ID NO: 481658 - protein, 317 aa, unidentified
MTAPEIFVGIDISKKRLDVAVTPGEQTFICPNTETGIRKLVCRLKELNPQIILLEATGGYEFLLIAALREAELPACFINPKLVRNFARGAGIAAKTDRLDAQVLALYACRMRPQPRILPSQQQQELKLLLTRRRQLLEMIQMENNRLDPAPLPRIAQSIQQTIQLLEAQLAALNREIDDFFRLHPLWLGLEKTLTSVLGVGHLSALILIAYLPELGRLNRKEIAALAGVAPYNRDSGQWRGQRHIEGGRRLLRHGLYMATLVATRFNPVIRACYQRLLAKGKAKKVALIACMRKLLIILNAMVRKQQLWCPAAPLNT

SEQ ID NO: 481659 - protein, 411 aa, unidentified
MDVYCGIDWAEDHHDIAVVDRDGKLLARRRISDDAGGLATLLALLAEHGDTAGDPVPVAIETPRGLLVACLRATGRAVYPVNPMAVARYRDRHSVSGKKSDHGDAVVLANVLRTDMGMHRPLPADSELAQAIAVLARAQQDAVWDRTAAHNKLRSCLREYFPGFLAAFADARGGITRPEARAILAAAPTPAAAAVLTVAQLRSLLAKAGRSRGIDTEAARLRDAFRIQQMRQLPLVEQAMGQQALALLRQLDAACASADDLEQAAVASFNQHPDAGIITSFPGLGPLTGARVLAEIGDDRSRFQDAKGLKAYAGAAPITRASGKTKSVTRRKVKNNRLSAVGYTWAFSALTASPGARAHYDRRRDAGDKHAGGLRNLFSRLLGCLHHCLTTGQHYDEATAFPAPAKQPAAA

SEQ ID NO: 481660 - protein, 349 aa, unidentified
MFCGVDSHKDTLAACLVDQTGRHLAAASVPNTPAGYRRLAGWLAEHGPVTRVGIEGSANLGAALASFLYDLGVQVCEVPGALTVRERRRLRRPGKSDPTDALAIARITARDPDLPPARQPGPATDLKVLSDYRDQLLVWRNAEANRLHADLAIVCPGYGRVCRRLTAERSLAAAEQLLTDQPSARAQVARCRIGRLRELDAEIGDLASQLARLVAARRTRLTDIVGIGPILAARILGEVGEISRFPDADHFAAANGTAPIPVASGRTDRHRLNRGGNRRLNRAVHYVALTQATWEPRAVAYLARKQAEGKTRREALRCLKRRLSTVIFNALVAGPKPPPAPHPTADLAA

SEQ ID NO: 481661 - protein, 419 aa, unidentified
MSFKILKFNCCGLDVHKTWIYACIGITDSNNRTEYKQSRFSSFSKGLHELCNWLAKYNCKDVCMESTGKYWIPVFNILEQHDIWVTLSHPKYTKPMKGNKTDRKDAKWICDLYMCGMVKPSFIPPADIRDLRDLVRYRFKLTCMITGEKNRAQNCLTVSNLKLDDVFSDVFGKSSRSITEQILQHPGEKFDVSPYVDSRCKTPIAEIQAAVDGAISKEQAVKLRQCLDHIDELQKHISEVEQEILRLSDKYEAALNLIRTVPGFDKNPMTSIQVLSEIGGDMSVFPTAKHLVSWAGCCPRNDKSDRKIKSTRISRAGSYFKPVLVQVANALIKSKKHLEFTTRYKRIKARRGHKKAIIAICRMILTAIWHILTDLKPYTPEGFLDSRPVNKEKVLTTSQALNLLKQRGYFIKDDPLSVS

SEQ ID NO: 481662 - protein, 339 aa, unidentified
MELYCGMDLHSSNTVIGIIDEKRKHLIDRKLPNDPELIRNFLKPYQPELKGIVVESTYNWYWLADLLQEDGYRVHLSHPVANEQYKGLKHSNDKHEAFWLAELLSLGILKEGYIYPRQVRSLRDVLRKRAHLVRLRSGLLVSLQHMISRNYAVTVKTGDMKRLREDVISPLLSRDEALLLAGQSSKEVIDSLTRQIDKIERWALKRLGREGVFIGLVTLPGVGDILGMTILLETGPISRFREVGNYASYCRKVSSQWTSNDKVKGRGNIRNGNKYLAWAFSEAAEHARRTNEACRRFYDRKLRQTNTKVAHNALAHKLARAAYYILKDHVSYQEEKMFS

SEQ ID NO: 481663 - protein, 348 aa, unidentified
MDNNITIGMDLGDLEHVVVVMDEKGKEIEMKTIRNTELSLRKFFSRYKDATVAIEAGTHSPWISRLLKEIGCTVYVGNPRKLRIIWDCNDKSDLRDARILAMVCRVEPRLLWPIKHRDRQAYADLGIIKARDTLVQNRVRMINHIRSVTKTCGCRVPKCSTPSFSRRAPDHIPKELKDSLEPLIIAIDLLTQQVKEMDRQISKLCKKYSETEKLLQVLGVGPVTALAFVLTIEDPHRFTKSRQVGAFLGLTPKRDQSGRCDKQLRISKAGNTYLRSLLVSCGHYIIGPFGPECDLRNYGLSIVVRGCKNAKKRAAVALARKLAVLLHRLWISDQKYNPFYKNMDKAVA

SEQ ID NO: 481664 - protein, 369 aa, unidentified
MNETTTRYLGLDAHAATVTVAVAEETGPPALYGTVPNQPAAIRKLVASLSRSSQLVAAYEAGPTGYDLYRLLLELGVQTIVVAPSLTPTRPGDRVKTDARDALSLARLLRSGDLTPVWVPDREHEALRDLVRAREDAKVHLLQTRHHLSKFLLRHGIRPPAGCSNWTLRYYTWLRQLRFELVAERLAFEDYLSAEQAARDRMGRLEAAIRECISESRLLPLVTGLQCLRGIAFLSAVIIAVEVGDFRRFRAAPSFMAYTGLVPSEHSSGEARRRAHITHTGNAHLRHVLIQAAHNARYRPSGRAEFRRRLEGGPPDLIELALRAQARLHDRYWHLQRRLGSAKAVTAVARELAGFAWAVGCRMEISACA

SEQ ID NO: 481665 - protein, 343 aa, unidentified
MEQYIGLDVSQKETAISIRQGGSRIWRGKCASDPTVLAAIIRKQAPNVKRVVFETGPLSTWFYHALSSEGLPVICIEARHAQKILNETLNKTDANDADGLAQLAEAGFYKAVRVKGFDAMLTRTLIGVRKQVAGMSIQLSNQIRGVMKTFGLIVPRSKGQVFEGHVRELLAGNDNLAKVILPLVDAWRDIRKHVANLDRQLLAAARNSKAAKLLMTIPGIGAITSLSFSSAIEDPDNFKRSRSVGAWLGLTTRRYQSGEIDYDGHISRRGDSHLRSLLYEAAMVMLTRTKSRNDSNLKDWGLRLRERLGIKRAAVAVARKLAVIMHRMLKMGEPFNRLVVVPA

SEQ ID NO: 481666 - protein, 340 aa, unidentified
MKDITVGLDLAKHVFQVHGVDNAGGVILRRRLRRSEVLAFFERLPSALIGIEACAGAHYWAHQLKALGHEVRLMPPSYVKPYVKRGKSDAADAEAICEAVTRPTMRFVPVKSAEQQSVLMLHRTRDLLIRQRTMLANAFRAHLAEFGIVAAQGLSNLATLAAIANNHDDRRVPPLARSCLLAIIGQLADLQTRIVGIDQAILVWHRANEASRRLQTIPGIGPITASAIAATITDPTLFSSGRHLAAWFGLVPRQRSSGGKERLGRISKQGDPYIRRLLVVGAHSVLRYARGKNASSKPWLVGLLARRPYKVAAVALANKMARIAWAILATGEVYQRPAAV

SEQ ID NO: 481667 - protein, 321 aa, unidentified
MTYIGIDVSKATFVVAYSSAKTGRTKTFKNTVKGVREFIRTISATEHHCVLEATGNYSALLVYLLSEARITVSLENPLKIKNFARAMLSVTKTDEIDARLIALYGERMQPVPYKLRSDSILILKQKRTVLRQLKKQLVATRNLKGSLEVLPSFDPECKKTIEKTIVFLEKQIKAMEEKITSLAQGEYKKQMDLLTSIKGIGLTLAAALIVATGGFTYFDNAKQLTRYLGLSPTYQQSGTSVNVKGHINRNGDSNLRSQLYVAAFSSLRYNTECKACFERLRSNGKPGKVAVVAVANKLVRQAFAVVTQGKPYVDGFKSERQ

SEQ ID NO: 481668 - protein, 407 aa, unidentified
MTRYYMGVDWADQTHAVWVGDEHGTPVFERTVPHTADGFSDWSRWLYECQAAGIKVWAAIERPDGRVVEFLLDHGVSVYPINPKALDRARDRFRMSGSKSDPFDARVLAEFLRTDQGHLRPLQPNTEAAQELKLLTRDYHRMVRQQTRLLNQLTATLKEYYPQPLHVFEDVTTQLALDFLRTYPTPTALAALRPREWARFARVHRLGEARKAAVWEALQQPTIPVPAHVIRAKACLVQALVAQLDTVVSAIARYQAEIDRFFAALPAAEWMNSLPVGHHGMMVPTIWAELGDAPDRWQSVTHVQAHAGMVPVTERSGKQQVVRFRFACNSHLRYALDRLAFCSLQRSEWARAYYRRQRRRGHSHHRALRALGAKWAKIIFVMWRQHKPYEEQYHLATMAKQHLRQVA

SEQ ID NO: 481669 - protein, 413 aa, unidentified
MQVLYSHCAGLDVHKKAVSVCVWITSAEGRGQTHHQQFGTTTPDLLELAQWLQSLGVTHVAMESTGVYWRPIYEVLEGGFTLVVVNARHAHVLPGRKTDTGDAQWLGDLLRHGLLKASYVPPRWQRELRELVRYRRNLSQRRTQVVNELHKTLELANLKLASVVSDVTGASATDMLQHLVAGQGDPQLLSELSRGSLRKKKEALCRALTGRVRDHHRFMISQHLAEISGVEEDIRVISEEIERRTAEQQELIDRLDAIPGINRRVAEVIIAEMGTDPSVFGNNVERAMAWAGVCPGNNETGGKRHQARIRQGNRTLTTAAVEAALAAIRSRKTYFHFLYRRLAGRRGHKRAVVAVAHAILKTVFMMILRGTTYQDLGADDYDRLRPQVVIKKLTRRIRQLGFEVQLNPKPAPA

SEQ ID NO: 481670 - protein, 363 aa, unidentified
MSEITRGQAVRVGADLAKRVIQVHAVDAAGHVLTSRALARDKFLLWCAQLPAGCIVAMETSSSAHHWARKLIALGLDARIIAAQLVSPYRKQGASGKNDANDAAAICEAASRPQMHYVPVKSVEQQSMLCVHRLREGFKAERTACINRIRGLLAEFGLVFAQSPARLAPVLADVLEDASNEMNTLARLVLQRAQTHWGELDAHIAWCDERVAAHAKDNAAVKKAATLIGIGPLGASAAVATVGEFKQFRHGAQFGAWIGLVPRQHSSGGKNNLGGITKRGDTYLRSLLIQGAKSAVMTAHKRNDPISQWAAALRDRVGWQKAAVALANKNARILWAVMTKGEAFDARHVSIKPGAPAPASASE

SEQ ID NO: 481671 - protein, 367 aa, unidentified
MTSLAHRGFIHLGMDVSRDSISVSVLPADSDVAEVDKITSDAESVRRLIKRLGRPGGLWACYEAGPTGYDLYRLLVSMGVRCDVVAPSLVPKGRGDMIKTDKRDARRLAGLHRAGELTAIAVPSPDQEAVRDLCRTRGDMVQDLTRARNRLGKFLLRHSLVYRGGSTWTDRHRRWLAGLSFEDKALQSTFMHYRATVHLRETTLDAVEADLVGYFHTEPFGDAVRRLGAYRGVTHMGALCLGAEVFDWARFPKARSFMNFTGLTCSEHSSGLSTHRGWITRAGNSHVRGQLTEAAWSYNHVANVGHGLRERQDGVPAGTIARSWSAQTRLSKRFRTLAARKNVKSVVATAVARELAGFLWAEMTAVD

SEQ ID NO: 481672 - protein, 331 aa, unidentified
MAKIEKIIGTDISKSTFSVAYRKGESVETRTWDYSQEQMVAFAETLDKGCTVVMEATGVYHTRLAYYLYSKGISISVVNPLASKNFARTLMRRTKTDKADSRLLMEYGETMDLEPWAPRDTWCVEVQQTYALLESKGKELTAARNRMEALSHSVIASGVCMKMVKADIKRLERDITCLEKEIERLVKDNAGDDMKRIEEIPGIGRRTACVLIALTGSMKRFDNHRQVASYLGLCPRVYESGTSIRGKAKICRMGLESVRRMLYLCALSAKKYNKACRELYERLLEKGKAKKLALVAVANKLIKQAFAILRSGMNYDENHISEKKVQKMLAY

SEQ ID NO: 481673 - protein, 342 aa, unidentified
MLIIGCDYHPSVQQIAWVDTDTGECGERRLTHSGGEAEKFYRELKKKGVSVRLGMEATGHARWFERLLGELNYELWVGDPAQIRAKRVRKQKNDRRDAEHLLKLMLENNFPRIWVPTPENRDVRQLVLHRHRLVGMRTRVMNQLQAIAMNEGVRRKRGLWTEKGRAQLESLRLPPWTTRRRQELLELVDRFDPSIDQLSQAIEQEAARVPEVQRLQTHPGVGPITALAFVLVLGTPVRFSCGKQVASYLGLIPCEDSSADSWRLGHITKQGNSMLRFLLGQAAQSVARSDQQWRHQYAHIAMRRNQAIAKVAMARKLAVRLFWMWRRGWDYQQLKKFGSHVG

SEQ ID NO: 481674 - protein, 340 aa, unidentified
MDTIGLDLHKRESQLCVLTEAGEIVERRIVTSRERFTVVLGGRPPARILLEASTESEWVARHLETLGHEVIIADPNFAPMYATRRRGVKTDRRDARTLAEACRLGAYRRAHRASDEQRHVRAELAVRDALIRTRTRTVALAKALIRRDGLRLPSGGPAHTEAKLTALPLPPALAAELAPLRALWAPVNTQIAAADARLAHVAAADPVVAQLMTTPGIGPVTAVAFVATLDVVTRFASAHQVEAYLGLTPREYSSGEQQRRGRISKTGNARMRYLLVEAAWRVLRTKDPAAAALRAWAEGIAQRRGRSIAAVALARRLAGILYAMWRDGKDYRAPQPAAVA

SEQ ID NO: 481675 - protein, 343 aa, unidentified
MDYFAGLDVSVKDTSVCIVNGTGKIVREVKVASEPDALLWVLRNPAYRFKRIGLEAGPLSQWLFSALGEANLPVICVETRHMRAVLKAQINKTDRNDARGIAQMMRVGLYRPVHVKTLRSQKLRMLLTHRKLLQSKAIAIENDLRGTLRNFGLKVGIAGQTKFEARIEELVEDIPDLAVLVEPLLVVRRVVREQIAVLHRRLLAIVRDDEVCRRLMTIPGVGPVVALTYRASVDVPARFRKSKSVGAVFGLTCSRDQSGERDRPGAISRCGDEMMRTMLYEAAQSMLVRSTRWSWLKAWAMQIAKRRGMKRAIVALARRLAVIMHRIWVDRTEFRWTREAAGA

SEQ ID NO: 481676 - protein, 265 aa, unidentified
MSESTVEKFVGVDVSKATLDICITPPGQAMHVTYDDAGVSQIIALLKETCPTLIVLEATGGLEVRLASELAAVNLPVAIINPRQARDFAKATGRLAKTDEVDAAMLADFARAIRPQVHPLKDADTRALDDMVNRRRQLIAMRVQETLRLGTAASKALQKSLKKHIVWLDKQIVEVDGDLNQRLRESDVWRAKDDLLRAIPGVGTVTSLTMLAKCPELGALNRREIAALTGVAPLANDSGKHRERHGVAKGVHPGTGPWQLGRQRR

SEQ ID NO: 481677 - protein, 381 aa, unidentified
MTTAATYHEPGNTPAGTLFVAFELSEKTWKLGFTTGHGQKPRERTVTARQQERVLDEIAQAKRRLRLPDTAPVVSCYEAGREGFWLHRFLQGHGITNHVVDSSAIEVNRRRRRAKSDGLDVRKLLSMLMRYAQGERQVWQVVKVPSVEAADHRHLHRDLETLKQERASTTTRILGLLSSQGLRVTSLTKLPEQLEALRLWDGSPVPPGLRRRVLRVYAHHTFLSEQIAAVEAERRAQLQVSTDARIDKVRQLMLLKGIGINGAWLLVMEFFGWRAFKNRREVGGLAGFTPTPYQSGESAREQGITKSGNRHVRWMTTELAWSWLRFQPDSTLSVWFRERFGGGGKRLRRIGIVAVARKLLIALWRFLETGVVPEGAILKAA

SEQ ID NO: 481678 - protein, 332 aa, unidentified
MVDSIQHIIGVDVSQQKWDIAYLKDIRKRSIRSKILDNNPDGCLKFIEWIEKNITTDLSTVHVIMEATGVYHELLAYFLHDKGIKVSIVNPKYILDFAKSLGTVHKTDKSDSKVIALYGATPTIDIELWQPEATHIRQLKAKLARLDALKADLQRENNRLHSAQIANTPEKVLLSLNQMIAALEQNIADLQNDVDNHIDQHPDLKNDIKLLQSIPAVGKATALDMAVLYRSRQFTGAAQMAVFWGLIPKEKQSGQFKGKVMLSKRGNSRMRALLYMPAIVAKRYNPDIQAHYERLLARGKTKMQAIGASMRRLVHICFGVLKHQTVYQAQTV

SEQ ID NO: 481679 - protein, 387 aa, unidentified
MVLVNDLGRSIVSFEQSTTLVAVIEMGANSWLVAATVPGIERQPLKKLDPDAPTLLRLIERWRNEALKVGRTIGRVVVAFEAGRDGFWLARWLIARGIEAHVIHSASVAVSRERKRAKTDRLDATMLMRVLLGWLRGERGHCGMVAIPTLEEEDARRPSRERESLVGERSRITNRMKSALARLGIRGFKAHLRKAPQRLEALRTPEGTGLPPNILEEFRRDMRRLALVREQIDAIEKSRIERFKRAPNTGPHMMVRLLASVIGIAIETADMLVREVLSRKLRDRRAVARYAGLTGSPDESGTKRRQKGLSKAGNARVRRGLIQLAWRFLQFQKESALSIWFRLRTEGPSGARKTTMIVALARKILIALWRMVTTGEVPQGVMLRPAT

SEQ ID NO: 481680 - protein, 352 aa, unidentified
MEIVSGLDLHRSQITFRTADLRTGEVERGKIYPGTREAVREWLDRFEPGTDAHFALEGTTGWRFVVEEIQRRGFAAHLADPAELSERRGPKRRAKTDHADCELMVNLLIEGRLPESFIPPAHILELRTLVRLRKTLVDQRTEWQQRLQAQLFHQGVVPGLKLCRAEDRRRLADVEISQAGRQMIETGIVMLDGFDAKLKPLSAQLVALAKAQPGCRALQRGLYGVGWLTAVAIVAELGDCRRFHSADQAVRASGLDVTVYESNGKRPGGHLARQGPQVLRWALFEAAQCAARKSSPDHADYRSVRDRIDHNRACLSVSRKICRRACHILKELGDAAMAPPEPASASRRPKAA

SEQ ID NO: 481681 - protein, 277 aa, unidentified
MRFYTKQHQFYCGIDLHARAMYVCILNQSGEILVHRNRKTSPETFLNVIAPYREGLVVAVECMFTWYWLADLCTHEGIPFVLGHALYLKAIHGGQATNDKIDSHKMAVLLRGGMLPQADVYPAQRRATRDLLRRRMHLAHKRAERLAHVQQTNSQYHLPAIGQTIAYKANRDGVAERFADPAVHKSIAVDLTRIGHDDDLLRDVELTLVNAAKHQDANTLYLLQTVPGIGKMLSLVRLDEISDINRFPRVQAFASYGRLVKCAKESHGQRSGSLGGV

SEQ ID NO: 481682 - protein, 317 aa, unidentified
MYVGIDVSKDHLDVGSEDGAFTGRFPNDEQGFGELTKRLREVQPTLVVLESTAQYQLEVSLVLAAAQIPLAVVNPRQVRDYAKAVGILAKTDKLDAVAIARFGAAVKPAAQTLPDEQTLELEALLTRRRQLVGMIASEKNRLQAIFGPAKQGAAAQSVRDTLSYLTKQLKQLEKDLQKRLERSPAWKAKEDLLKSVPGIGKVTALTLAIDLPELGQLDRKQIASLAGIAPFNCDSGKHQGKRRIRGGRASVRTALYMACLASLKHLSEPTASRYHRLRNNAKKPHGVAIVACMRKLLTILNAVIRDGKPWNPALAGT

SEQ ID NO: 481683 - protein, 372 aa, unidentified
MADCSEVFVGLDTSKLRNAVAIAEGGRNGEVRYLGEIENAEVATRKLVRRLAASHQRLTFCYEAGPTGYGLYRQIKALGHECVVVAPSLIPKKPGDRVKTNRRDALNLAKLLRAGELTAVWVPDARHEAMRDLVRAREAAVDDLKSKRQQVLSLLLRLGLHYTGKRTWTRTHMRWLAGQKLAHREQRIAFEELLLAVRQAEERVIRLEQAISAAVPEWSLAEVVTALMAVRGLNLISAVIFLAEIGDLSRFASPRQLMAYLGLVPGEESTGDRVWRGGITKAGNHRARRILVECSWSYRHPPRVGKKKLAKVEAAPPAAQAIAWKAEARLTARYRALARRGKRPTLVVTAIARELSGFIWAVSRAVGAPATM

SEQ ID NO: 481684 - protein, 414 aa, unidentified
MKTCLFVGIDTHKDSHTAAVLDSYFNTVCIITFANSYSGFDKLMEKIGSIAVDRPISFGLEDSQGLGFFLADYLVQKGFSPMDVNPIYTDRARKATIHRDHSDAGDAVLIAKALIRDKDKLSTVKIDKVSIEIREIVRYRQMLIEESTKLKNRLHCLLFSQYMGVTSVFSDLFSKVALAFFYKYPSPHLLKGVGEDTLATFLKANSKGRYGIKKARAILSHLPISIDRNLSDTRAYIIVSHIKRFTDLRKELASAEESIEALVEKSSYACLTSIPGIEAVTAAKIISQVIDISRFSSASKLAKFAGIAPREKSSGRKKKYEKSKYGKKFLRSTIYFMALTHISRTRNGKDKNSVSRAYHLKKIAEGKTKKESLTCLSRRLIDLIYAVMRDRSIYNFSKSKFLDQHTQILDTVAG

SEQ ID NO: 481685 - protein, 427 aa, unidentified
MEEVTDEPLYRDRVCGIDIGKAGMAATIRVPSDANPARRAQETRSFGTTKREVLALADWLRSWQVPAVVMEATGDYWKPVFYRLEAEGFECVLADAKQVKHLPGRPKRDPSDSRWLAACFERGAITSCFVATPEFRIIREHTRYRRDLTAERTREKQRAEKLLESAAIKLSSVVTDLHGVTGRDIMDHLIAGERNPKVLAQLARARARRKISELEAALEGAEFFTPRLAALLARMLARIDQLNASIGELTAVVETLLEPYEEQLQQAESMPGWGRRSAQDAVAETGAGMTRFRTGGHLASRAGRTPLDNQSGSRSGRAKSKKGNRYLAAITGETAVAAGKTQTREGARYRRIARRRGKPKAAVALGNTQLKVYHALLSSPGTRYQDLGVDYYDNRASTRRQVRALQKRASELGYTLVPDLTGCPEIA

SEQ ID NO: 481686 - protein, 403 aa, unidentified
MAKVFIGVDPHKPSATIEVVDGRERVLATGRFGTDKAGYAAMRKQVASYPDRVWAVEGSNGTGRPLAQRLLADGEHVVDVPAKLSARARLLDTGHNRKTDAHDAHAVAVVAVRTKNLRVLSYDADLEVLRMLVDRRDELSKSKVQAVNRLHRLLSELVPGQSKKDITALQAKAILASVRPRDSVGKTRKRLALEQLAEMVAIEKKMKASSKELKTLVIARGSHLMDLTGVGPVVAARILADVGDVARFTDRNRFASWTGTAPLDASSGEQIRHRLSRAGNRKANHVIHIAAVNQIRLDTPGRAYYRRKLAAGKTPLEALRCLKRRISDALYRQLRADARTAATTDANAGPGGHRGASHVSSAAGSIPHTDTSDQPLPGPAPTTLPASTPTRKTTILRPLEPAS

SEQ ID NO: 481687 - protein, 424 aa, unidentified
MKVTYQTCCGVDVHKSFLVATIIKTTAGIEPSYQKKRFSTFNNSILDFKSWLLENECHDVCMESTGKYWVPVFNLLEDQINVTIANPKWVKAVKGNKDDTKDSKWIGDLFRLGLVKSSYIPCRLIRILREYTRYRYKLVSCRSSEKNRYQNALTVCNIALDSVVSDIFGKSSSSIIDYLLEQSGTTINHEEIASKLLKSLKSKEDAVIESIEGYQMTDAQKYRMRLIRAHMDYITAEINDVDKQIESLISSVPDYVKAIRFLTTIPGVKHDSAITIISEIGIDMSQFCNSKRLCCWAGLTPSNNESAGKKKSVRITRAGVYLKPALVQCAHAAVKSDKSPYYKTKYESLVKRRGKKRAVIAIARMILIAIYRMLSTGEVWNPSDLYKIDMPAPLAEKQKAKAIKQAKKLLQKEGLLPPDEPLAS

SEQ ID NO: 481688 - protein, 424 aa, unidentified
MKFKMQNKQNQLIERISVKHLIIGVDIAQQFHVARAVNFRGIVVGDPLTFKNNDEGFSSLLIWIKNLQRLNNLDEAIVGMEPTGHYWINLSKWLFKQNIEVVTVNPYLVKRNKENRDNTQSKSDKKDALVIADMVKNGYYSEVRYTSESFEKLRVLMSNRDVVVKRLVSSINQLNRWVDIVFPELRQVFKDIKAKGAIATLRLFPSPVELETLQPHDVIAGWKTIMKRQPGLKKAILLLQVARKSVGTRQALDAYKFHLEQLLEEYDLAVTQLERVEKQVTEVLNKIPFAKKLLTIKGISEISLAGILGEAGDLSNFSHGNSLLRHAGLHLAEASSGKWKGQIVISKRGRSRLRRFLFLATLSLVANNPEFKALHTHNVKVKKMKKMKSIMKLVGKLARIFVGISRRNESYCREKLQLLSPIAA

SEQ ID NO: 481689 - protein, 400 aa, unidentified
MKGFLHMKLIGIDIGKNKHFFCIMDQQTGEIISQPVSFSNDKEGFDFLIQKIKSYPKDSILIGMEDTGHYHFALLKYLLDLQYTVALINPKTTDFNRKMQGGITKNDKLDTINICDVLDTPERKKQYRITKVNSFDLYEQKQLTRHHHSLKEEENVYKNRLQKCIDIVFPEFNKLFNSKYGTVYMNILKTFGSAENIANTDIRTIRKCFEIEGRGNRISLTPERLKECAGSSIGISSSAEVIQIKHLTAQIELIEEQLTEIDKKIEEFSIQNNSPILSIPGISHFSGTSILAELGDISNYSKPSQIIKFAGVAPLHYESSQFNAQHTAITKKGSKYLRKTLYQIILPVIRHNPVFNKYYQLKISQGKGHRCAQGHCVRKLLRIIYHLLKTNQQFDPQLLR

SEQ ID NO: 481690 - protein, 344 aa, unidentified
MHIATIGLDLAKNVFQIHGIDADGDAVVRRRLRRSQVFEFFAGLEPCLIGMEACGTAHFWARVLMSLGHEVKIIPPSYVKAYVRRGKNDAVDAAAICEAVTRPNMRFVPIKSEEQQAALMLHKSRALLVRQQTMLVNALRAHMAELGMIAPQGRARIKELIAVIEDDAQDSIPALAKAALKPLVLQLRAGEAAISALDDEIKAWHLSDEASQRLASIPGVGILTATAISATMGDPAYFKSGREFAAWLGLVPRQNSSGGKDRLGRISRQGNRYIRRLLVIGATSMLRRAKDRSAPGGEWVNSLLERRPARLVTVAMANKTARIAWALLAHGETYRAPSAPAMAR

SEQ ID NO: 481691 - protein, 384 aa, unidentified
MENDSTLYVGLDVHKDSIAVAYALGMGEVEQLGKIGTTKTDVDRLCKRLQSKGRQVRVVYEAGPCGYGLYRELVQKGFDCMVCAPSLIPKKPGDRVKTDRRDAIKLVRGLRAGDLSAVYVPGVEDEAFRDLARAWAAAKADLGHARQRLKSFLLAHGVGYTGTANWGSAHRRWISSYSFPSHWQQLAFDEHRRTIEDRLAQCARLEGALREAVLEWRFYPAVLGLQAMRGIQFTTAIGMLSELGDLSRFEHPRQLMAWLGVTPSEYSSGERRRQGSITKTGNSYARKLLVEAAWSYRFPARVSTDIQRRQEGIPKPITDRAWDAQLRLCRRYRKLAERGKNANIAVVAVARELAGFIWDIGRLSMSQAVPCGAQPTHQLHPAGH

SEQ ID NO: 481692 - protein, 429 aa, unidentified
MPRNKKTRGKSSGRLSTINPEAAGIDVGSTFHVVAVPGDRDDTPVRTFRTFSGDLYRLTDWLEETGIKTVAMESTGVYWIPVFEILEARGFEVLLVNARDVKNVPGRKTDVNDAQWLQQLHQHGLLRGSFRPRDGVVRLRAYLRHRERMVDYAASHIQHMQKALMQMNVQLHHVVSDITGATGMRIIRAIVSGTQTPDTLAEFRDVRCAASEETIREALTGNYRPEHVFALRQSLELYDFHQAKIAECDTEIEAVLQTLNEERATPEQPLPAVRHAKGRNEPDFDVRPALYTLLGGDLTQIHGFGPYTVLRLVAECGDDMRKWPTAKHFTSWLCLAPGNKISGGRLLSSKTRRSSNRAAALLRIAAVNVGKTQTALGAFYRRLAARTGKAKAVTATARKLAILFYKALRFGMTYVDSGASYYESATGSA

SEQ ID NO: 481693 - protein, 355 aa, unidentified
MNLKERGMKKILKEVLGVDVAQKELVVSLGRMDTDLSTEIYAHKVFKNTQVGMMTLLKWVKLLADKDVRVGFVMEATGVYHERFAYYLDEKGYDVSIVLPNKMSNYFRTLDIKTITDKTCSEGIARFGLERKLDLWSRPKKVYRELKQLTRERDQVVEERVMVKNQLHAEKTEAVPNKRSVGRLNERIKFLNRQEREIKNDIDKTINGEEELRQAVEKACSIPGVGRLTAVTVLAETNGFELIRNKKQLASYAGLDVKEKLSGTSVKGKAKISKRGNRHLRKALYLPSLSSVKYNSAHKDLYIRIVTKCGIKMKGLVAVQRKMLELIYVIHKNKTTYQDDYEQKRANDTMMADAL

SEQ ID NO: 481694 - protein, 332 aa, unidentified
MVFNHYLGIDISKKTLDAALLLREGVVEGQTKVSNDKKGFKDLLSWLKKLKISPTEVLVCAEHTGIYGYDLQVWLDEKAIKYAMVPALEIKKSLGIRRGKNDVVDALRIAEYAYIRRESIVLTHRPSETIFQLKALITERKLYVRSRAGLLSRKDAMEKYESLEGRKRREDAIKKFSSYIESLEGQIEDVISNDPDVLRNYQLVRSVKGIGLINAVNTIVYTNNFTSFQTARQYACYIGIAPFEHSSGTSIKGKTMVSSLGNHQLKCELTMAARNAVCTDPWLKGYYKRKMAEKGNMRGAYGIVLNAVKFKLVVRMFAVIKSGTPYKTLTYC

SEQ ID NO: 481695 - protein, 367 aa, unidentified
MKKQENKRDKITIGLDLGDRRHRFCVLGEKGEVLEEGSVGNNRAALSELGGRYPEALVVMEAGCHSPWVSRHLEQAGCEVVVSNPRKTRAIYQHERKSDRRDALMLARIARMEPALLYPVRHGSEEAQQDLLRIKLRDSLVRARVALINSLRFTLKSLGYSIANPSTERFHKVIQSALPQSLAQVIAPSVQALEELTLRIKLLEREICDQARSKYPDTAWLEQIPGVGPITALYFVLKIEDPARFKRARDVGAFLGLCPRRDQSGENDPQLRISKRGDAYLRRLLVSSAQYILGPFAPPTALRQYGLALASGATARAKKRAVVAVARKLAVLLLTLWKNKSSYEAFPQRSSKEKMRTNDLERLRCIA

SEQ ID NO: 481696 - protein, 314 aa, unidentified
MSDQMYKFYIGIDVSKHKLDVAISDDDCLQVENSEIGFKELIKKLPNKKRTLITLEASGGYEKLVANYLRHKKFDVAVVNAKRVRDFAKASGKLAKTDHIDANAIRAFAKAFNPKPQSLTTPIEEERVDALNRRGQLIKMITTEKNHLEQASKNYHRSIKKHIQFLEEEVAKIDRSLEEKISEDTELKERVEKLDAIKGVGKITAMNVLLHMPELGQLSAKEASALAGVAPYNHDSGQMKGKRQIRGGRAPVRTALYMAILSARKFNPAIKKFYDRLIQKGKLKKVAMVACMRKLIIIMNAMMRDGSEWKPSMN

SEQ ID NO: 481697 - protein, 466 aa, unidentified
MKKAEHLSNKAQLPKHLQQLNLFAAGIDIGSKSHFVAVPEGSDEQPVREFHCFTADLHRLVDWLISCLVTTVVMESTGAYWIPLFEILESRGLEVKLVNARHVKNVPGRKTDVLDCQWLQQLHTYGLLEGAFRPPEQICALRAYIRHRMNQVRYGAAHIQHMQKALTQMNLLLHNVVSDLTGVTGMRIIKALLAGERDPQVLAGMRDQRCKNSIATIAKSLEGNYRPEHLFSLKQAVESFEFYQTQIAQCDREIESLLTTFDAKVMTTPPTNSDPEDGASAKAQDRAPKFNLKDELHRVTGVDLTKIDGIDATTALKVISEIGIDTSRWKSEKQFASWLGLSPGSKVTGGKRLSGKTKPVVNRAAAALRMAASSLYRSQCALGAYYRRMKARLGAPKAITATAHKLARLIYSMLKHGTEYTDVGQDYYEQQYKTRAIKNLKARARQLGFDLVETVIENTSKNGVLA

SEQ ID NO: 481698 - protein, 407 aa, unidentified
MKKKNVIEFEQVVERGCGMDVHKDLIGATIQGKDIKMQTKSYNAFTSSLIKLKEWLLKNGITHVAMESTGIYWKPVFNILGDDFKILLVNARHVKNVPGHKTDKRDSRWLSKLLLSGLLKGSFIPERPIRELRDLTRYKTKLTNQVSAEKNRFQKILEDANIKLSSVLNDVFGATGTKIINHILGHESYRPEELLQYVHGKVKSSREDIKEALTGYITPHHRFMLKTIMRNISRIEDTIAEVDTQIEVCIEPYKVERELLKSIPGVGKEGSTCIIAEVGIDMGQFPDQNQLASWAGVCPGSNRTANKNKSGRITYGNKYLRSLLVECGWAASRTKNTYMSAKYKSLVGRRGKKKAIIAVGHKILIATYFIIRDKIEFKELGPDHLSNFKRDRLIAYYRQQLEKLTAA

SEQ ID NO: 481699 - protein, 319 aa, unidentified
MSNPSMSMPVAGIDVSKRTLDVALTGSTARFTQANQAHGHRWIAEELKRHGVRRVGMESSGHYEAALAAFLRKAGFEVAILDPGQVHGFRRFRLKRAKTDAIDAALIAAATAALEESRAPPDERLAALAEHLTFIEQITADIARHKTRRDRFADPAITRFLEAEIKRLTARREKELARLRTRLHPHADLAAKLDLLLSIPGIGLITALALVIRMPELGRTTRAEAAALVGVAPFNTDSGAFAGERHVAGGRARLRRSLYLAAFSASQRWNPILMALYRRLIAAGKHHKIAVVACARKLIEIANAVLARQTPWTDKPLPA

SEQ ID NO: 481700 - protein, 429 aa, unidentified
MNSTQNKKLEQVKNTTLVIGIDVGSETHYARAFDWRGYEYSKKAFKFSNTEQGFVELMAWMQHIKKEQGKEEILAGMEPTGHYWFCMGVFLKDNGIKPVLVNPHHVKKSKELDDNSQSKNDRKDPKVIAGLVKDGRFTEPYIPEGVYAELRTASNLRFRVEAELTSVKNRLARWFSMYFPEYHEVYGKADAVSGLMVLRVAPLPEDIIELGVDGVNQIWRKAKLRAVGIKRATSLVEAAKRSIGLQSGKEAARLELQILMEDYDAKLRQLNEIMSLIDKLMEDIPEAKKLLDIKGIGIKIVSGFLAEVGDVRRFKDPKQLQKYAGLAIVENSSGKHKGQTTISRRGRKRLRYLLFEAALSLSATNAEFRAIHRYYTTRENNPLKKMQSLTAIGCKLIRVFYALLTKDVTYDADKFLSDIRRTPVQQLAA

SEQ ID NO: 481701 - protein, 390 aa, unidentified
MSRQDGSAGPVVIAIDPHKRSWTAVAVDGSLRLQRSIRVEANREGYRELRRFARRWSETSWAIEGAGGLGAPLCTRLLADGLAVADVPAKLAARVRTLSTGHGRKTDEADAVSVGVAAWTAVRLVSVQFDETAIALRALTEHRDDLVKARTQTVNRLHVLLTHLIPGGAQTGLTAAQAAAMLRPVRPRDVLGRTRRRLAVDLVGEVRRLDQRITAVGEQITAAVRESGTTLTGLFGIGGMLAGKILARVGSIHRFASAAAFASYCGTAPIAVSSGDVVRHRLSRAGDRQLNYALHVMAITQIRHDTPGRVYYQRKRAAGKSHKEALRCVKRRLSDVVYRTLLRDALGAGPEGHPGATPARPAQPRRPALRTSHFPDPPRPSLRPRGSSRC

SEQ ID NO: 481702 - protein, 449 aa, unidentified
MESKNRKTKKKRHSHGMPVINPYAAGIDVGDIDMEVAISDGVTGFEVRTYRSFTDDLKNLVSWLKSKSISTVAMESTGIYWLNLYLMLEEEGIEPYLVNARHVKNVTGRKKDDTDAIWLQKLHCCGLLQKSFQPDGEIRTLRTYVRQRKNLISISSDSVRRMQKALELMNIKIHTVISDILGKTGMNMIEAILSGVRDPDELIKHKISRIKASDEEIRKSLVGIWKEEYLFMLKQAYDEYNFYQAQVADCDCKIQQSLLKQVAKVIDGDISDLDCKKKRKLQKNESIFVIRPLLKIIAGIDLCDVEGFNETTSLYMLSEIGTDMSKWHNKNCFAAWLNVAPNTKITGGKIISSKMQKKKNHAGQVFRIVAHSCKSSKSPMGDYARKMRSRLGKKSGNVATAHKLANIIYSLLKNKCPYDPLIIRSSEQKSKEKRIAYLEKQLKKLKEAS

SEQ ID NO: 481703 - protein, 411 aa, unidentified
MRVHHKVCCGIDVHKRSVTACLMWGPADQEPQSETRRFGTMSSELKQLAEWLKQAHCEVAVMESTGSYWKPVWNILEGHVRLILANAKHVRALPGEKTDNKDGKRLASLLRHGLIRPSFIPPREIRELRDLTRYRRKLLGNGAAERNRIQKILEDANIKLGSVLTDVFGVSGQRMLHALVESESIDVEQVAELAHWSLKPKMDSLKKALEGRLTHHHRFMIEISLDHMEHIERQILRLDEEIAKHLVPYQKEYELLQTIPGIAETGAASVLAEIGADMSAFDDDDHLSSWVGICPGNNESAGKRFSGKTRKGNLHLTSALVECAWGATHKKNCHFKSKYYSLKQRRGAKRAIVAVAHSLLRTVFVVLKSGQPYQEPVRPPLPEAKRLRKAQRLSRQLRSLGYEVTIKTRAA

SEQ ID NO: 481704 - protein, 377 aa, unidentified
MHSENIAAYVGLDVHKETLAVAIAAPERLGEVRYYGTINNEAQAVRRLFQKLQGLYGNILSCYEAGPCGFGLYHQLTAMNIKCQVIAPSRIPKSPTDRIKNDHRDAISLARLLRAGELTPVWIPDLTHEAMRDLIRARAAAKRDSRVARQRILSMLLRTDKHYAGKQWTGKHRTWLANQSFSQPSQQIAFQHYCQSLEQIEDRILQLDQEISRLLPEWSLCNLVCQLQALKGVGQLIAITLVAELGDFSRFSSPKQLMAFLGLVPGEYSSGNSIRPRGITKVGNSELRRLLYEAAWSYRTPAKVGAWLIYYRPDSVTQYSKDIAWKAQQRLCSRYRSLTAKGKKSQVAITAVARELTGFMWDIALAAQSSFSQQKQN

SEQ ID NO: 481705 - protein, 342 aa, unidentified
MEIIKQVIGIDVSKDTLAVRHGTVDVNQNQQISNSLVLDNNLKGFRELMSFARKNRGQSKAPLYFVMEATGVYYENLAYFLNEKHQKVIVVLPNKTKNYSKTLDIKSKTDKLDSQMITQFGLERQMQLWSVPSPLMKAIKALTREYQSKKDMAAQVKNQLHAKEYSHKPLKESLKRSQSILSVFEKQIKEIEKQIKELVKQDDDLNDRINKIDKIEGVGFMTIVSIIAETNGFALIENAKQLASYAGLDVVYNESGLKKHKTTISKKGNKHLRKAVYMPALSATKHNPKLKQLYIRLVIKKGIKKVALIAVARKLLILIYTIFRKNVDYISNYNPAYAENIR

SEQ ID NO: 481706 - protein, 370 aa, unidentified
MNKPATLFVGLDVHKDSIAVAHAPDDRRADVTYVGRIGTRPADVDALIRRLKAKAERPVVAYEAGPCGYVLHRHLTSKKITCMVVAPSLIPRKPGDRVKTDRRDAVTLARLLRSGDLNPVYVPTVDDEALRDLARAREDVVVTLKAAKFRLKSFLLRHGLHYTGRADWNDAHRRYLARVVCPTPAQQIVYQESLHAVDEQVGRLRRLETELRDHVATWRLAPVVRAYQALRGVQDTVAITVAAELGDLTRFDNPRQLAAFLGLVPSEYSSGNSRRLGGITKAGNGHARRVLIEGAWSYRYPAKVSAHIQKRLEGLPQPVRDIAWKAQVRLCRRFRRMVARGKHPNVVVTAIARELAAFMWAIAREVPITA

SEQ ID NO: 481707 - protein, 401 aa, unidentified
MNAVGIDVSKGKSMVCVMRPFGEVVLEPFEVLHTAQNLHDLVEKLKALDGETRVVLEATGNYHKPVAFVLHDAGLFVSVVNPVLIHDYDNNSLRRVKTDKKDAVKIANYTLDKWTRLRQYLPEDDTRLALKNCYRQYQQAVAIRTMLKNNLISSLDLTFPDANKLFSSPVKNNGCEKWVDFIGDFWHSECVSSLSANAFAKKYLKWCQKHGYVFTRSKSDEIYACAVNSASLPKSPTSKLLIQQQVAQLKAVSQSVAAFRQEMLRLSQQLPEFDTVMEMYGVGPSLGPQLMAEIGDVRRFSSKKSLIAFAGIEPQPNDSGKVVGNDKGISKVGSAVLRRTLFLIMTVILQTQPQDEPVFQFMNKKRSEGKPYKVYMMASANKFLRIYYAKVKAVMDSERSQ

SEQ ID NO: 481708 - protein, 582 aa, unidentified
MALLNLVYREQLFPRRAYQRAFEALLASDSEKQACRIMVGRLALAHDRACEAELAAAIDGQLDAGRLPDLDTLGRRFAPNPAAIPDITVELAPLHLYDELSTVRLGGTHENDQSRRRCPHRADPRRAAAARRQAGLGLARRPGRQGRLAGRTLLAALAEHEIAERGRPHGSRWYGRAARRWHHRRWKQAMEPAMPQPNDLSRSLTALDQDSTLIAVIEMSQASWLVGAIVPGIERHPLKKLAPEAEELLRRLQRWRDEAAKAGRPVKRLAVAFEAGRDGFWLARWLWARGIEAHVIHASSVAVSREHRRAKTDRLDVELLKRAFLGWLRGERDHCKMAAIPTLELEDARRPSRERETLVSERTRIINRMKSTLARLGIRNFRPNLRKAPERLGALRTPEGVALPANTMAERQRDMARLQLVKEQIGEIEQMRLTRLAQPPADAPHAMLVLLARVVGVGIETADMLVNEVFVRNLRDRRAVARYAGLTGAPDDSGARRREKGLARAGNARVPHGTSPWAKGPRGMLQLAWRLLMFQKDSALAQWFQRRTDDRRPGTRKTMIVALACKRLIAPCSGQGQACGAW

SEQ ID NO: 481709 - protein, 317 aa, unidentified
MTRIICGVDVASKKLDARIGREGPFATFANDAEGVGALAEFCRKHGVSLVVMEATGGYEKLAFAQLWGLGLQAGVVNPRNVRDFAKAVGRLEKTDKIDAGVIAWFAEVKDIRPAPPASPAQQRLTALVVRLGQLTMLRTAQNQQRRDVKDAVILRTISQVLALVARQIRALEAEIVKQIEADPLWKTLDATFRTIKGVGDRTVARIMAQVPEIGRIAGKAVSKLIGVAPLARDSGESKGKRPIRGGRADVRALLFVVGGLVAKHEPEFTAFRDRLLAAGKPKMVVRIALAHKLLVRLNAKARDARAEYARRQEALAA

SEQ ID NO: 481710 - protein, 347 aa, unidentified
MRFYTPQHKHYCGIDLHARSMYVCILDQAGTILVHKNLPATPEAFLRVVAPYRDDLVVAVECIFTWYWLSDLCARQGIAFVLGHALYMKAIHGGKAKNDKIDAHKIAVLLRGGMLPMAYFYTPQMRATRDLLRRRCPLMRKRAELLAHSQTTNSQYNLPEFGKKLAYKGNREGVEEHFPEPSVRKTIELDVALIDHYDKLLGEVELYITRTAKGHDAQSFARLQSVPGIGQILALVILYEIQDIARFPRVQDFVSYCRLVKCAKESAGKRPGLSGKKIGNPQLKWAFSEAAVLFLRQNKPGQEYFAKLERKHGKGKALTVLAQKVARAVYYMLTREQAFALQRFVTA

SEQ ID NO: 481711 - protein, 430 aa, unidentified
MNSNTQNAKIEAITEITLVLGIDVGSETHYARAFDYRGIEYSKKPFKFSNTEAGFVTFKAWILDLEEKHGKDKVVPGMEPTGHYWFNLGKFLQDHEMKPVLVNPHHVKKSKELDDNNPTKNDRKDPKVIAGLVREGRYMIPYLPDGVYADLRTASNIRFQLQAELTRIQNRISRWFNIYFPEYKTVYGKPNAKSGMLILKAAPLPEDILTLGIDGVNQIWRDAKLRAVGKARAKTLIEAAGHSVGSKEGAVSARMEIRMLLEDYGTRNARLQEVMDLIEELVNQIPMAEKLLEIKGVGIKTVSGFLAEVGDISRFNNPKELQKLAGLALVENSSGKHKGETTISRRGRKRLRYLLFEVAMSLVAKNPEFRELHGYYTTRKLNPLKKMQSLMAIAAKLLRVFYAMLTKGVDYDPQKMISDIKRPAAYFQVS

SEQ ID NO: 481712 - protein, 404 aa, unidentified
MVRYIGMDVHREFAQLAVLEDGLVRDAGRIGVTPEALRRWAAELRSDDVVALEATGNSDAIASLLIPIVGRVVVSNPSKTRAIAEAKVKTDKVDARILAQLAADFLPPVWLPDDRTRALRRQVTRRAHLVRQRTRIKNQVHAILARNLAPTPPVSDLFGTAGRLWLSRQLLPADERSTVLALLRQLDFHGTELAVVDKELAIEALTDPQVARLMTIPGVDAIAAISVVAAVGDFARFADADRLVAYVGLNPRVRQSGNSAPVHGRISKAGRAQVRGVLVEAAWSASRAPGPLRAFFQRVKARRGFQTAIVVTARKMTVLAWHLVTTDQDYAFARPSLVTHKRRKLELMAGAPSRRGNHGTPGASYNDKQRRNEEKEIAEQAERSYQVFVAHWQPRKPAGARAQT

SEQ ID NO: 481713 - protein, 408 aa, unidentified
MLNAVGIDVSKGRSTVAVLQPGGIVIHKPFDVSHKSSDLRDLARYLGSLDGETRVVMESTGRYHEPIRNALSKAGLFVCAVNPHLIRNYGNNTLRKVKTDPADAKKIARYTLDNWASLREYSVMDTTRTQLKTLNSQFAFFMKQKTAVKTNLIALLDMTYPGVNKLFTSPVRPDGSEKWVDYADSFWHVDCVLDSGPKVFTERYQSFCKHHGYDYQPARPEKLYAQAKELVPTVPKDPVYKEMIRDSIAQLNLMSKHVEELRRKMDELASSLPEYQTVRSMYGVGPSLGPQIMAEIGDISRFNHREALTAYAGVDPGKNDSGEVVHKSGHASKCGSARLRKSLFQVMEAMLQLGPRDDDPVSRFLFKKKAEGKPYLVYMTAGANKFLRVYYGKVKECIRNLPVSDSAD

SEQ ID NO: 481714 - protein, 420 aa, unidentified
MVRQDVKDEVIYLRSAGVDLGKRFLVACARTPNPKRSGSWSLETEQFGTTQAELRRLLAWLLERQVEVVVMEATSDYWRAVYYLLQPQLNLMLVNPAHLKGIRGRKTDPNDAAFLARAGASGMVMGSFVPPQAIRELRDLTRRRTEITRAAGQEVQRLEKELEDTGFKLSAVLSNIVGASGRAILVALVNGERDPERLADLAVGRARARIADLVGALDGNFTAHHAFMVRHYLDAVDHLNNVVATFDARVAELLAGLERDLDLLDTIPGIGRLAAEIIIAETGGDMAQFATAHNLASWVGVCPGQNESAGVNRSGTTRHGNTNLKRLLGIAAMAAIRNKDSYLAVFFRRIAARRGGKRALVAVMHKLVIAIWHVLHDHAPYRELGADYYTRRDPQRAIRRMTKEANSLGLTVRFDPIEAT

SEQ ID NO: 481715 - protein, 319 aa, unidentified
MAETTNVGIDVSKKWLDIVVTPSGETYRIENTAEQAETVVKKLESLKPERIVLEATGGYEQMITAKLYQAKLPVCRVNPKRVRYFARSVGQLAKTDKLDAKILARFGEVVKPDLTQLPTEDEQLLGALLTRREQLLGMLVAEGNRMNTAPSKVKSSLNEHITWLKQQIKELDQQVDSFINDHPDLKEKDDLLQEVQGIGSKTAAKLIADLPELGSCDRKQIAALVGAAPYSQDSGKKKGQRSISGGRPAVRSILYMATLSATRFNPVIQEFYLRLLKAGKKKKVALIACMRKLLTILNAMIRDRAHWKPVLTSLPSATS

SEQ ID NO: 481716 - protein, 417 aa, unidentified
MQVVRPICCGADIHKDIIVATIATSNQNGIAEYIQRKFCTQNYDLINLKSWLKEHNCFEFAMESTGKYWIPIFNVLEDEIKVYVVHPKYTKSIKGKKTDKKDSKWIAELFRHGILTFSFIPPREIRELREISRYRIKLVAMRTSERNRYQNAMTVSNIGLASILSDPFGKSSKAIMEEVLKSSSLSEGKIRSLLNKSAKKKAKEVFASLEGSRIEPDQRLKMTVSSEHMNQIDSHIDTLELDLVQRCLPYANLINLLIDIPGISYISAIAVIAEIGIDMSVFKSSKQLTCWAGLAPANNESANKKKSVRISRAGTYLKPLLIQCALSAIKSTSNPYYRIKYNIIKKRRGHKKAIVAIARMILVNIYAILSTGEVYNPCDFKEVTSPKPAKKEMTIENALSFLQAQGIDTSALVLNVS

SEQ ID NO: 481717 - protein, 439 aa, unidentified
MITVSQPVTPEKSVFSAFVGLDWADQKHDLVLYDPQSGKPEPQQLPHTPEAIDAWACALRQRFGGGPIALCFEQSPTTAARRCPAIAYALLKYDFLILFPLPPTRLAAYRESFVSSGAKNDASDAALLLDYLLRHRDQLRVWQPDTSATRELQMLAEARRDAVDQRTRLSNQLTAVLKRYFPQALTLVGCDVDTPLACAFLAKWSSLASVQRAASATLRAFYYAHRCRQEERIVERLALVKSAIPLTDDPALIQASSLQVQCLVPQLRALHQAIEKYEHRLSELMDEHPDAPLYFALPGAGDALAPRLLVAFGTDRQRFQAAEELQTLSGVAPVTKRSGKSRIIHRRWACPKFLLQTFHEFAYCSRKKSPWAKAFYLYQRARGKGHHAALRALAFKWIRILFRCWKTNTPYCEDRYLDALRRRNLPLLAFLTIPLPDAH

SEQ ID NO: 481718 - protein, 366 aa, unidentified
MKKYTVFHSVTAAPAVAKSKVMRSGSLLKIGLDIHREKFVAVAQYDHATARPPQHFAPAEFVPWVEARLREGFQVHVVHEACGFGDGLYRALLEAGASCYVIAPQKLDEANTRVKTDGRDSHALCLRLDRYLAGNKNSLAVIRVPSEEEERARHWGRQREQLVHHRQKLEAQGRSLLIDHGLPAPARWWRPQSWSRLDKLLPVWILSHLELYRPMLLALDQQIRTLTAELEKAAPVALPKGMGALSTVVISREICDWQRFNNRRQVSSYTGLCPGEYSSGAKRVGRSITRHGNSRLRAALVELAWRLVRYQPGYHAVQKRLTVLAKGARATRAHRKKAIVAVARQLAVDLWRLHTGRCTPAVLGFK

SEQ ID NO: 481719 - protein, 398 aa, unidentified
MTESSDYESVQVFIGVDVGKDTHHAVAVNRSGNRLFDKALPNDENKLRSLISDLKQHGQILLVVDQPATIGALPVAVARSEGILVGYLPGLAMRRIADLHAGEAKTDARDAAIIAEAARTLPHALRTLKLADEQIAELSMLCGFDDDLAAQTTQASNRIRGLLTQIHPALERVLGPRLDHPAVLDLLQQYPSPEKLASLGEKKLATQLCKLAPRLGKRLAADITQALTEQTVVVPGTNAAVVVLPRLALQLITLRKQRDEVALEVEQRGLAHPLYPVLTSMPGVGVRTAAKLLTEVACRAFASAAHLAAYAGLAPVTRRSGSSIRGEHPSRRGNKTLKRALFLSAFAALRDPISRAYYTRKMSQGKRHNQALIALARRRCDVLFAMMRDGTFYTPTAS

SEQ ID NO: 481720 - protein, 337 aa, unidentified
MKNKKYYIGLDVHKEKTTYVVLDRIGNILLEGETATLYSELFERLKTYLNSSMIGLEACTSYYTLYQNFLENNYSIKVANTIQLRQLIAKNDKLDAKRLSEMLRLGTFPCSYIPDKKIQRMRSLVQVRHSLMEEKVRCNARIQAFLDRNGIVMPSYTAFTKKWRHALMQYMGSGDVSMEIRHEYDHFVFLEKKTEQLDQELQGYARKCWKEEYQIIQSITGFGPVIACYIIAHVLPIERFASNRKLRRYAGVVPTCKESGNKISRGRIPKTSSRKLLRWALIQAANSIGKTDTRLGKYYRMKKKQKKNSGIAKVAVASSLIDILYKVLTTKKSYMPN

SEQ ID NO: 481721 - protein, 344 aa, unidentified
MTQFVGLDVSQKDIAVSVVDEDGRQVWRGKVKTDPNVIADTIASRAPNAKRIGFETGPLSTWLWHALNDLGLPLVCLDARHAKAGLSVQVNKTDENDALGLAQLVRTGWYREVKVKSLGSHLVRGVLGARAQLVSTRIQMTTTICGLLKNVGVFVAVGRRQTFAAAAEEAIGDRAALTVMIAPLIAAWRAITEQIRAYDGLLRRQALNNDRTKRLMTVPGVGPIVALAFTSMIDDPARFAKSKSVGAYLGLTPRRYQSGEKDVTGSISRTGDALVRAYLFEAANVLMTRVQRWTGLKAWGVKLARRIGMNRARAAVARKMGVIMHRMLVTGTDFRWSTEEAVAA

SEQ ID NO: 481722 - protein, 345 aa, unidentified
MNNMYYIGLDVHKKTISYCIKDASGKMHQEGKIGATRGELNSWMRTLPQPWTVAMEATIFTGWIYDHLLPHGAQVKVAHPVMLRAIALAKKKNDCLDASKIADCLRCDLLPECHMVSSEIRERRRTLRYRHLLVRQMVQMKNRVSGLLMETGVSYNKQRLHKVGYFRELLSSNEEIHPSIRPLLKLSRETIVRLQKTEYALVSSLQRDPLLVERVERLKTVPGVGPITALTWALEMGDVSRFRSIKQAISYCGLCGDERSSAEKVLRTPLSKQRNKHIQRVLVEAAKLAPREDHHLALVYESEKQKGNANRATLAVARKMVAYLLAVDRGKREFVSAEEHRGAAA

SEQ ID NO: 481723 - protein, 408 aa, unidentified
MNTLYVGIDVSSKSNVVYLMLPNGDKHSNFSVANSHEGSTLLVKKIYSALTSHSLDTVLIGLEATSVYGDNLVYFLREDATLAPFNRKIHVLNPKQVKKFHDTYNDLPKNDYVDSFVIADCLRFGRINKEVYMGEYHYKALQNLTRARFFAVQNLVKEKQRFMNVLFKKYSTMTQEKVFSDAFSTTALAVYDEFESAEALANMDLHELTDFIIEKGKNRFPDPVAVAKAIQKAARSSYRLPKTVNDSVNQVLSISITSMKALESQIKEFDKAIKALMELLPNVLISIPGIGPVYSAGIMAEIGDINRFDNQASLAKYAGLAWKQHQSGGFEAEVTRLIPSGNRFLKYYLCEAAFSLVRCDKEYSDFYHLKYKEVNRCQHKRALALTARKFVRLVFRLLKDNRLYCPAK

SEQ ID NO: 481724 - protein, 344 aa, unidentified
MDTPNHSPSSAPAPAPAGLFVGIDVAKDKLDLARSDADRVRTFANDLAGITQVVEMFTGSAAGGAGAAKPVTIVVEATGGLERPLVDALLEAGLSVALVHPGRVRHFAKGLGILSKTDRIDARVLLRFGQLAAPRLAERRSANQAELQALVVCRRQLNVTRVQQSNRLDATAASRAAKRSVEAVIKTLDRQIDKLDKQIRALIDADDDFRHLDGLLQSVPGVGPTLSATLAAELRELGDTDRRQVGALVGVAPYNRDSGQSSGKRAIRGGRTAVRCVLYMATQAAIRFNPVIRAFSDGLKARGKANKVRIVACMRKLLTLLNAMVRDGLTWDQLDVVKKLAVHS

SEQ ID NO: 481725 - protein, 381 aa, unidentified
MKRVCGLDVHKDSIFVCILGDEGIIYQNKFGVLTPELEQMAGEMHRYEVQEVAMESTSIYWLPVWRVLDPYFDLKLVNPYFIKQLPGRKSDAKDAEWIATCLYKGLIKGSYVPGELIQQLRQYNRRVYDLTGDIARKLTKLDNALQRCNIRISNYVSRTDSKSYTKVVEMLSQGVTDPETLTKAIHGRTVNKWGREAIKASLTGVVGPVDSDIIRQLREEVALSQRNKEECLSKMEALCRKFFPEQLDNLLTIPGVKLQSATAIIAEVGSDMSSFEDAPHLVSWCGLRPRNEESAGKILYRKITHGNKYIRKTLVECAWAASKTQGCFFNRFSYHQVMVRRKSKMKVIVAVARKILSAVWFVLHDGVPYRDFSNDIAPVSL

SEQ ID NO: 481726 - protein, 366 aa, unidentified
MRKVMAGMDLHGNNVMVGIVDDQGARLQHRRLACELPEIIEFLAPYKAELESIAVESTFNWYWLVDGLRAAGFPVVLANPAKIDQYSGIKHADDKNDAYFLAELQRLKILPTGYVYDPELRPVRDLLRRRMSLMRQRTTLFLSAKSLHQRTTGRGLELRRLKAMEPEEAAALYTHPANQLIAQIQKEHIDSLDQSIRQIEKAVLKVALQQPYYQRLQTIPGIGIILGLTISMEVGNIDRFAGPGQFASYCRTVDAKRISNGKTKGDNNQKCGNKYLAWAFVEAAHGARRFDATCRRWYDRKAGKKCTTVATKALACKLTKAAWYVMAKGTEYQAGKIFPGLTEPKAEEISGEQASASKGVGPNPED

SEQ ID NO: 481727 - protein, 353 aa, unidentified
MKPKTESDTALPMVIGVDIGKEVFHLVGFGGDGKIVFRRKIKRLGFAAVFEKVPPCIVGMEACLSAHFVSRTLRRLGHEPRIIPAIYVKPFVKGQKNDYNDAEAIAEAALRPNLRFVQEKSQDQLDLQACHRVRARLVSRRTATINQIRAFLIEQGIAVRSGPRALRTSLFAILENRKDEISPRMARLILDLYKDWCHLDERIDTVTGEIEELSRVEAKCQRLMTVPGIGPVISTGLVAAIGSGEAFERGRDFGAWLGLVPRQYSTGGRSVLGRISKRGSKYLRTLLIQAAKVLLMRPHNWPRYSFGAWLKTASERLHRNKLAVALANKLARIAWSVLRHDKAFDTHLETAAI

SEQ ID NO: 481728 - protein, 262 aa, unidentified
MYLRILDTEGKIVPHRNMKACPDAFLKAVAPYRDDLVVAVECIFTWYWLADLYANEKIPFVLGHALYMKAIHGSKAKNDKIDAHKIATLLQGGMLPQAYVYPHEMRATRDLLRRRIHLMHKRAKLLAHIQNTNSQYNLDPFEKKIAYKTNRTNIVEQFPGPSVQQSMQMNVSLINHYDRLLTETELFLVRHAKTDDANTFHLLRSVPGIGKILALVILYEIHDIRRFPRVQEFLSYSRLVKCAKESAGKRYGTSGNKIGNAY

SEQ ID NO: 481729 - protein, 338 aa, unidentified
MEVYGGIDLHSNNQVVALVDAAGERVYRRRLRNELEQVVTELAPYRERLAGVAVESTFNWYWLVDGLQAAGYRVHLANPAAMRQYSGLKHGDDDSDAEWLAQMLRLGLLREGYIYPKAERGVRDLLRQRGRLVQQRTAQVLSIQNQVHRSTGRRLSGTSIKAASAEEAAGWVAEREVALSLTANLEVMRCVDQQVTVLERAVLRQVKERPEYAGMQTVPGVGKILALTVVLETGDIRRFAAVGNYSSYCRCVGTQRISNGKRKGKGNAKNGNRYLAWAFIEAAHFAVRYCETIRQFHQRKEARTHPLVALKTVAHKLARASYYILRDGVSFKLAKSFG

SEQ ID NO: 481730 - protein, 450 aa, unidentified
MGSYAGVDWAADKHDVLVCDEAGEELLSATFAHDEAGLRLLCRQLLRLKVALVAIERPDGLLVERLLDAGLRVLALHPNQVAATRARFRVSGGKSDRFDAFVLCELARTDNHRFRVLEPDSDETKALRALTRAREDLVKTRVAVCNQLRSELERFWPGPIGLFADLDSQISLAFLERYPSPVETRTLGEQRMAAFLARQGYTGGKTAAELLAKLRSAPAGRAAEQETKVRRQIVRGLVGALKTLTAELKTLERELEDAVRTHPDGEIFLSLFKSRNSFVTAAELLAEIGDCRARYPNRDALAGDAGQAAVAIESGKRKSASFRWGCNKRLRSAFCTLADTTRHWHPWAQDLYAAARQRGHDHPRALRTVGRAWCRVVWSCWQTRTPYDPARHRALQQHCTVWITDTSGRRRPDLAATQRMLGAAVTEMAARRAEREALDAKPTSANTPGT

SEQ ID NO: 481731 - protein, 341 aa, unidentified
MNATTYGLDIAKSVFQLYWVNPQSGEIFNRRFSRDQLIRFLSQREPGRVVLEACGGAHWWARKIISLGHQAVLLHPKYVRPFVQTNKTDAADARAIWTTAQQPGMRTVAIKTEAQQAILSLHRIRSALVDTRTRLVNQIRGLLAEYGLGFRYGRKAFMNELSVRMPEIEQAVPPLIWRALQHQLAHLRQLEVDITETERENLLWMKANPAAQMLAAINGIGPLTATATVAVMGSPNTFRSGRAFAASLGLVPAQTGTGGKVRLGGITKRGDPYLRKLLIHGARIVVTRSKQRPAWVDALLSRRPVNVAIVALANKMARVAWALLAHGQAYDPKHVSTRPLA

SEQ ID NO: 481732 - protein, 350 aa, unidentified
MPCKTVAIAHTIGIDTGKNTLHMIGLDKKGTIVVREKVSRTRIAARLVNVPQCLIGIEAGMASHHVARELLALGHEVKQVPPAYAKPFRQGHKNDFRDAHAIAEAVQRPSTRCVPIKTADQLELQALHRVRSRLIGNRTAVINQLRGFLLEHGIPVRQGLRFLRQQLPQILAMRTDVLSPRMIRIIEELIGDWKHLDERIESVTDEIETLARTDENCRRLMTVPGIGPIIASAMVAAIGNGAAFAKGRDFAAWLGLVPKQMSTGDRTILGRITKRGNRYLRMLFIQGARAILFRPAGWAKHSFGPWLAAAARRLHRNVLATAFANKLARIALTVLVEGRSYAARVEPRAA

SEQ ID NO: 481733 - protein, 383 aa, unidentified
MATTLSTFVPRDYDIFAGLDVDQRSMAVTFTDHGTMQKSLKLPYSATPLLSYTEKHFPGRRVAFVYEAGPTGFGLYDELTAATQFCLVVSPSMVPRAPRNKVKTNRLDSKKLSEGLRGGQLQGIHVPAQSYRELRHLVQLRDTQVAQMKATKQRIKSLLLYEGIPFPDAAGKWSARVLRQLEQLPCNASVRFKLDQLIDTLQFHYLAAAKVQKQVRHFCNNDPELQQCIRFLASLPGVGTITATHALARLGDWRQITDVRQIAGFLGLVSSEHSTGEKENRGEITRIGDKRLRSKLIQCAWIAIRKDPELRAFYRRVYERQPKKVAARKAIVAVARKLTTRMYAVLKQQRSFVIRTDSSVAPLTTEETVGLRERLDIAQNHQP

SEQ ID NO: 481734 - protein, 386 aa, unidentified
MSISSQSSHLILYVGLDVHKETVVIAVLPAGAEKPTRVDRVPNDPKTLRRYFARLAEEGDIRACYEASGAGYVLQRAMQAWGYACEVIAPSLIPQQPGHRRKHDRYDARQLARYYRNGELTPVRIPTEAEERVRDLVRCRTTFQRELLRARHYVLKFLTRRGVRYTAGKCHWTRAHQAWLGQLPRTGVLVAEDATVFGEYLALLQYAQQRRDALDDEIEHLALTPTLASAVGRLACFRGINTVAAVTLATEMVDWRRFGKPTQLMAYLGLVPCEDSSDGTERRFAITKAGNSHCRHVLVQAAWAYRHAPAVGTALRGRQRGQPPEVITHAWKAQHRLHKLYHHLAYRKGPQVAVVAVARELVGFLWAAMQACPVTETSTSSTKNAA

SEQ ID NO: 481735 - protein, 330 aa, unidentified
MKKWKYTIGIDVSKNTLDIHCSEINQHIQIVNGSQGFKDFMKWCKTHQIELTESFLVMEFTGGYEYKFIQFCEAKQMQYARISGLAIKRSMGITRGKSDQVDAARIAQYGEEKHKAIQPAKPLNMQIIQLKELLAFRKRIVREQAGYKSTINERMHMYPELKKDIICKTLETRIKENEKAISKLDVALLEMASKNETIKTNYALLTSIRGIGMVNALMTIAYTENFISFSNPRSYAVYVGVVPFEHSSGTSIKGRKKISPIANKELKQELNQAARSAIQWDPEMRGYAERKMTNKCYNIVLNNVKFKLILRMFAVVKRQDKYVDNYKKVA

SEQ ID NO: 481736 - protein, 360 aa, unidentified
MAKARTLVGLDVHATKIVAAVLDGETGELQCFRMSGESVAAAAFCAGLPGPVCAAYEAGPTGYGLARDLAKRGVECVVAAPSKIPRAAGDRVKTDRRDAEHLVRLLLAGKLHAVRVPGDEEEALRDLVRAREAVRVDLMRCRHRLSKLLLRHGIRFEDGRAWTDRHRQWLARIALEWPAAQSTLQDAIGAVDALEHRRGQLEREIIALLPDSPWALQVGRLRCLRGVDTLTAVGLCAEIGDFARFAKPAQLMHYLGLTPSEDTTGESRRLGSITKTGSGHARRLLVEAAWHYRPRPSIGRALSDRQGGQPPEAIAIAWSAQRRLHRVWTRLEQRAKRRTIIAVAAARELAGFCWAITQIE

SEQ ID NO: 481737 - protein, 397 aa, unidentified
MKDVIANEVGKQSVTGLHAITGVDRYGAYIGLDVHKETIAVAVALPGRAEPVYQGEIAHEPKAVKKWLVRLQEAYGGEVLLFCYEAGPCGYGLYRQLLAAGHDCQVVAPSLIPKKAGERIKTDRRDALKLARLLRAGELTAVWVPDGEQEAMRDLTRARDDMKSQERKARQQLNAYVLRHGHHWPRGKTRWTVTHYNWLESIRFEQPWLQIVLQEYIDAAKAATRRVDDLTAQLLRVLPEWSLAPVVEALVALRGIDKLSAIVLLAELGDISRFDSPKQLIAYLGLVPSEHSSGGRRRQGAITLTGNSHARRTLVESAWSYRFPARQTMHLKRKAQNASAEAKAIAWRAQKRLCGRYRVLTQAGKNVKLVCVAIARELVGFIWDIVRQEMPRMVAAQ

SEQ ID NO: 481738 - protein, 477 aa, unidentified
MAAGKGKADGGGVPGRDGDGAEVAEDSTQVVECAAAIDVAKGSGMVCTRVPGSRPDRRRQKVWRVEATFAEVTALMDHLRCEGIQRLVLESTSDYWRIWYYLAEAAGLEVWLVNARDVKHLPGRGKSDTADCVWLCKLNERGMLRRSFVPPQPVRDLRALTRTRARLAQDQARHQARVEKILEDALLKISVVISDLFGASGRRFLDALAAGERSPAALAALGDKRLRATRTELAGALTGRFRDIHAFEISTHLHLIDAIDAEIARLDEAIGQQLAAIPRAAPCCTACGLAGGGHVPGCADGGVEVLGLAERLDEITGIGAVNGRAVIAELGTDPSQFPTPGHAAGWARLTPRSQQSGETARPGRTGKGNRYLRGALGQAAMTAARTDTRLGAMYRRIARKRGKQKAIVAVSRVICEIAWILICDPSARYTELGPDYCQPLSPARQTKAKIREIERLNPGKKVILADVGAAAGPPSAA

SEQ ID NO: 481739 - protein, 416 aa, unidentified
MNAVGIDVSSRKSTVAVLRPLGEVVCLPFDVTHDIAGLASLAEKLKAIDGETRVVMEHTGRYYEAVAKALHEAGFFVCAVNPLLIKEYGANSLRRVKTDKADAIKIARYALDNWADLRDFTPMDAIRYDLKTLNRQFQLASKQRTASANNLIALLEQSFPGIRKCFDSPVRSDGTQKWVDFAHSFWHVDCVRKQPFPAFCERYRKWCKRHAYLFKQSNAEEVYALAKRAVVLTPKSKVVKVLVQEAANQLSSISRSVEVYRAEMDRLAAMLPEYPVVMAMYGVGKSYGPQLMAEIGDVRRFERKQALVAFAGIDPMPNQSGDKNVRSNKSSKRGSPYLRKTLFNVIRTYLQCAPQDEPVFQFLNRKRAEGKPFYVYMLAAANKFLRRYYAKLRDYFASLDTLQPVAPIPTILKATL

SEQ ID NO: 481740 - protein, 352 aa, unidentified
MYYIGLDVHKKTISYCVKDASGQVHQEGQIGATRWELDGWMKTLPQPWTVAMEATIFTGWIYDHLLPHAQQVKVAHPLMLRAIAAAKKKNDRIDAGKIADCLRCDFLPECHMASTSIRERRRTLRYRHLLVRQMVQMKNRISGLLMETGVSHNKQRLHKVKYFRELLATNEEVNESIRPLLRVSRDTIVRLRKTEYALVSSLQRDPLLAERIKRLRTVPGIGPITALTWALEMGDVSRSPSIREAISYYGLCGDEKSSADKVTRTPLSKQRNKHIQRVLVEAAKLAPRQDYQLALVYETEKQKENANRATLAVAGKMVAYLLAVDRRERDLVPFEDPRSAAAQKPRPPGEKQ

SEQ ID NO: 481741 - protein, 374 aa, unidentified
MQSIVYVGMDVHVDNYTFACYEENKGVYAQNQIKNADWKSVIKYLEKIQNNRPGEEIHFLCGYEAGCLGYSLYHELMKAETKVSLECIIIAPTTMAVQGNRTKTDRRDACMIAKNLAYGTYSRVYVVDDEDNGVKDFIRMRDDTKDRCKSIKQQLQALCLRHGKRYSEGGAWTIRHREWLKKLDLGEKNSNRALQEYLRQLYIAEEDLERYDREIEEIAIGEKYSEKVGQLKCLRGVQTLTALAAIVEIGDFLRFATAERYAAFLGLVPGEHSSGGTINRTPITKQGNIHLRRMMVEAAQSNARASIYEKSKTLKSKQAGQDQNIIDYCDKQSLYMAKKYQRLCAQGKNKNVAKTAIARQLACSVWGIMTGNIA

SEQ ID NO: 481742 - protein, 387 aa, unidentified
MCAQAPSLVCPPARPVRACPGSWLERKGDTSMPKCTSKRTRVVIGGVDTHGRTHHAAVIDQQGRLLGDREFPADSGGYRQLLGWLGRHGQLEAVGVEGSGSYGAGLTRLLLDRGVNVVEVDRPDRRTRRQRGKSDPIDAEAAARAVLAGVATAPAKRRDGIVEAIRALRAARSGAIKARTAAINQLKGLLVTAPASVREGLDALPRAALVVTCARLRPDEAALDDPVQGVKAALRAVACRIHQLDEELSQADQRLAALVGRAAPRLLKLHAIGVDHAGQLLTTAGQRPERLRGEAAFAHLCGAAPIPASSGKTHRHRLHRGGDRDANRALHLAVVVRMRWCPRTRAYAERRTKQGRSKPEILRCVKRYLAREVYHALVADFEALNAT

SEQ ID NO: 481743 - protein, 379 aa, unidentified
MEQSSTLYVGLDVHKDSIDIAVAEAPRDAEIRHLGSVAGGVTAVSKSMRRLVSAGHRLHIVYEAGPCGFVLQRHFTALGWRCDVVAPSSVPHPSGERIKTDRRDAMKLARLARSNDLAVVRVPDGADEAIRDLVRARDDAVREQRNGRHRLKALLLRNDTPYAGKCSWTAAHLRWLATVKLEHAAQQISFQEYLHSITESGARIGRLEQAMRDALPDWSLRPLVQALQALRGVQLIAAMTLVAELQDFLRFDNARKLMAYVGLVPGEHSSGSKRRQGSITKAGNSAARRMLVEMAWHYQQGARVSASIATRQADLPAAVTAIAWAAQLRLSAKFKRLVARRVMKTKAVVAVARELAGFVWAIGREVQISGWQGVKPATA

SEQ ID NO: 481744 - protein, 322 aa, unidentified
MSGSILGIDIAKQKLDVALLIDGKIKNKSVKNNPEGFEALSLWLRKLGIQKVHACLEATGNYGEALAVYLHDAGHMVSIVNPARIKGFAQSELIRTKNDRIDAGIIARFCLAMRPDAWIPPSLEIRSLRALVRRIDSLNDMLTQEKNRLGTAHKSVIPMIKEHIAYLEKEIDRVRDQIADLIDNNPDLRKKKDLLGSIPGIGKATIAALLAELDTLDKFSHVRELVAFIGLAPRETLSGSSIKGKPLLCKTGNARLRKALYMPALVSIQYNPLMTAFYTRLKERGKNGKVIVCAIMRKLVHVVFGVLKSGKKFDPNYKPVCP

SEQ ID NO: 481745 - protein, 409 aa, unidentified
MDVLFERCCGLDIHKRTVMACLVVPGPTGAPTKEVRSFGTMTDDLVQLADWLLAASCTHVAMESTGVYWKPVWNLLEDQFALLLVNARHVKTVPGRKTDAKDCEWLADLLRHGLLRGSFVPDRGQRELRELTRYRTSLVQERSAEINRLQKTLEGANIKLGDVATDIMGLSSRQMLAALADGETNATAMAQLAQGRLRDKLPALERALAGSIGAHQRFLLARQLAHIDFLDAAIAEVSVEIAERLRSVADELERLASIPGIGRRTAEVLIAEVGTDMDRFPTGAHLASWAGMCPGNDESAGKRRSGKTRKGSPWLRSALIEAARAAGRSKGTYLAAQYHRLAARRGTKRAAVAVGHTILLIVYRLLSEGDIYRDLGERYFDERDRHAVERRLVARLVGLGYKVSLDPAA

SEQ ID NO: 481746 - protein, 450 aa, unidentified
MSCPPRWWREHSFIRSLRILPLAADGIDNCRWERGELLFVGDDWAEDHHDVELMDAAGRRLAAARLPEGVAGITRLHEMIGAHLGEDAGAGEDAGAGEVAIGIETDRGPWVSALVAAGYTVYAVNPLQAARYRERHGVSGAKSDKADAHTLADMVRTDAHQLRPVAADSPQAEAIKVVARAHKTLIWERTRHTLRLRYVLREYFPAALEAFDDLAAPDTLELLAKAPDPASAAKLNRSQIRAALKHARRRDIDMKTTRIQAALRSQQLGRAPVITAAYAATTRSIAAVLATLTEQINTLRGQVETHFGRHPDAEIILSQPGTGVLLGARVLAEFGDAPGRYADAKARKNYAGTSPITRQSGKRKITHARFVHNDRLVDALMSQAQSALLASPGARAYYDKQRARGLDHHAALRQLANRLVGILHGCLKTRTLYDEATAWSHHNQDQRTAA

SEQ ID NO: 481747 - protein, 370 aa, unidentified
MSYRNTTHYVGLDVHKATITIAVAEAGRESPRVVATVPHEMKALGKVLSKFGPRPGVHCCYEAGPTGFGLARWLRAAGWGCDVIAPSLVPKKSGERIKTDRRDAARLAQSHRSGDLVAVFIPDETTEAIRDLERARDDAKKAERVVRHQLSKFLLRQGRHYPGKTAWNDAHRAWVAAQEFVEPAQRYVLADALAAVESASLRVAQLTDRLRELTETWRLAPLVKALQALRGVEFVTAITLAAEVGDFRRFATAGDFMGYVGLIPPEHSSGAQRRGGPITKTGNSHVRRLLVESAWHYRRKPRLSKAVRERSVGLSPKVCAIAWKAQSRLHNRLCRLRGRGKNPAEAVTAVARELAGFVWAIAREEVLLAS

SEQ ID NO: 481748 - protein, 403 aa, unidentified
MSPEHSIDIFLGLDVGKSEHHACALDRDGNKVFDKPLPQLESELAGVFHQLQKLGTVLVIVDQPNTIGALPIAVARDCGCEVGYLPGLAMRKAADLYPGRAKTDKRDAFIIADTARTMPHTLRAVDRNDEVLSALKMLSGFDDDIARDCTRTVNRLRSILTQIYPSLERVFAGSTLTRTPILELLIHYKGPQGLKRAGYQRVLNWMIKRTRKDPTPLVDDIFTALKAQTVTVPGSDAAELVIPQLAANIQALKEQRNTIAEQVEEMLADFPLCEVLMSMPGVGIKTAAQILLAIGDGSDFDSAGHLAAYAGIAPVTRRSGSSIRGEFPARSGNKRLKNALFYSAFAVIRSHEPSRRYYERKRAEGKRHNAAVICLARRRCNVIYAMLKNKEFFREIPPRPVAA

SEQ ID NO: 481749 - protein, 379 aa, unidentified
MAKGITWVGIDDHKLHLTVAVVVGQRHRDAEVSRVMNEDRALRRWVRKLMRNAAGGEIRMCYEAGPNGFALKRRLEAMGPIVVEVVAPSLTPRRSGQRVKTDPIDARKLVLLFRADELTEIATPSEGDEAARDLVRTHARVVVECTRKRHHILKFLVRRGRIYRDGSHWTQRHRRWLEQHQWEDWKDEASFEELQTGLRELEDRRHRLEQLMERLAQEDEYRLAVAVLRCFHGIDTCAAMVLATEIFAIERFRHPRDLASYLGLTPTVRQSAEKEHRGGISKSGNRYVRWSLGQMAQQYRHRPHVGAGLKKRRQGQPAWAVAIADRAHHRLHRRYWALMNRGKPHNKVVTAVARELVSFVWEALREVRTRGLQEMPKAA

SEQ ID NO: 481750 - protein, 350 aa, unidentified
MPSTPNTSMPSVMIAIDPHKRSWTAAAVDARLQPLATIRVPVSRDGYRTLLRFARRWPDTAWAIEGASGLGAPLTVRLRQDGFTVLDVQAKLAARVRLLSTGHGRKSDEADAVSVGVAAHTSSSLTTAEIDSATTALRALVEHRDDLVKTRTQTINRLHTVLTHLIPGGASRDLNADRAAALLRTVRPRDTAGKTLRALAADLISELRGLDRRIDKAVHDIEMAVKACGTTLTELHGIGALMAAKIVSRVGSIHRFNSPAAFASYTGTAPIEVSSGDVVRHRLSRAGDRQLNYCLHVMAITQIRRDTQGRTYYLRKRANGKSHSEAMRCLKRRLSDTVYRQLLNDANTTT

SEQ ID NO: 481751 - protein, 341 aa, unidentified
MEQFIGLDVSLKDTFISVRESGRRLWRGKCPSDPKLIAEVIRRRASNVKRVVFETGSLSVWFYHALKQEGLPAICIDARHAKAALDMAPNKTDANDADGLAHLAEVGFYREVRVKSFDSMLTRTLVAARNQMLRATTQLSNQIRGLMKTFGMVVPKSAGRVFEGHVRSLLANNAGLEQIITPVLEAWRGIRTRAAELSKQLIASARASEQCQLLSSIPGVGAVTASSFVAAIEDPENFRKSRSVGAWIGLTTRRYQSGEVDYDGHISRRGDSHLRGLLYEAAVVILTRTTANSALRIWGLKLKEKIGFKRAAVAVARKLAVIMHTMLRSGELFDRSIAAEV

SEQ ID NO: 481752 - protein, 335 aa, unidentified
MKQNYFIGIDVSKEKLDVSVINSNLELVTEKVITNSSTRINSFFSMLIRKLKVSKDQVLVCCENTGIYGRPLEISCVKLGMNLWVEHPLKIKKASTDMRGKSDQKDAYRIAEYALRYSDKCVLFHESTNEIKELRTLLHAREDLIEKRTMFKNQLRESQSHNKEQYLVLKSYYGPLIKALNKQLAVVEKRIDVLTEQDPAIRKNVELITSIDGIGKQNALQFIMHTDNFQKFTSANQLACYSGVVPFPNQSGTIIKRERISKHANKTLKKLLHMAAMAAVRFNQELKEYYIRKVKEGKNKMSVLNAVRNKLVHRIYSVINRQTLFVASREEFLSI

SEQ ID NO: 481753 - protein, 313 aa, unidentified
MNAETNCWVGIDVAKASLEVCVLPAGARLAESNDRDGVRRLLAALPPVGQCLVTVEATGGYQRLVVAELIAAGHRTAVVNPRQVRDFARGLGLLAKTDRLDAEAIARFGQHASPRLVEPTSPEHQRLEELVARRRQLVELRAAETCRLETVSTRTVLKSVRTVIEQLGKLIRKIEKELADLVESDSQLQCRSCTLQTTPGVGAVTATTLVAELPELGRLSRGQISALVGVAPFNRDSGKFHGRRAIWGGRAQVRSVLYMATLTARRVNPVIRAFGERLQAAGKPFKVVMVACMRKLLVILNALLKNNSAWKAS

SEQ ID NO: 481754 - protein, 492 aa, unidentified
MNNSAASQNRAGGRPASARSRSSIGYPKRITGRLPEEPEASAPTSNRKTPLEGRHISSVDGRAKRRKSQKQHNQSMNDPQQWQQHRAFGALDWAREKHSVIVLNPTGKVIEEFEIEHSALGWKKFREKLQAYGSIPFAIETSQGAAVEQLVEAGMMVYPLNPKSAQAYRDRKAPSGVKDDWLDAWSFADALRVDGQGWKALRPEEALIKELRLLCRDEVSLIEQRTAFIQQLRDALAQYYPAALEAFDDWTRVSAWMFLQRFPTPDALAQAGKRKWQNFLHSRRLWAGQEGTRRMEIFARATEFAGSPPTVKAKSLLALSLVQMLFAIEKQLSLYRQRIEELFARHPDHDLFGSLPGAGPKIAPRLLSEIGDDRERFGGDAQNLQCLGGTAPVTKRSGKRRYCYIRWACNKHLRYAIHLFAEQSLSRCVWAERYYQHHRQKGQSHANALRRLGHRWLKILHKMWIDRNPYDAELHHRNQLNHGSWIFQLEAL

SEQ ID NO: 481755 - protein, 416 aa, unidentified
MNAAGIDVSSRKSTVAVLRPFGEVVRLPFDVAHNTEGLASLAEQLKALDGETRVVLEHTGRYYEPVAKALHEAGLYVSAVNPLLIKEYGANSLRRVKTDKADAVKIARYALDNWADLRDYTPMDTIRYDLKTLNRQFQLASKQRTASANNLIALLEQSFPGIRKCFDSPVRSDGTQKWVDFIHTFWHVECVRKQSLNAFSERYRKWCKRHGYIFKQGNAVEVYSLAKNAVVLVPKSEVTKVLVQEAANQLTSISRSVETYRAEMERLASTLPEYPVVMAMYGVGKSFGPQLMAEIGDVRRFERKQSLVAFAGIDPMPNQSGDKNVRSNKSSKRGSPYLRKTLFNIMGIYLKCSPQDEPVYKFLDHKRSEGKPFYVYMTAASNKFLRRYYAQVRDYLSTLDDLPPVDMDSTGLKPSD

SEQ ID NO: 481756 - protein, 358 aa, unidentified
MATVESAEVLVTLGIDTHLDRHVAVALDQFGRRLGVLMFPTTPDGHSQLESWAYGFGTLTQVGMEGTGSLGAGLARWLGSRGHSVLEVNRPDRQARRRAGKSDPLDAEAAARAAQAGTVVGSPKSGDGQVEMIRALRVARRSAVKARTQAANQLHALVVTAPDELRSSLRKLGIPTLVATASRWRAGNCPNTPLAATRFAMKSIALRHRQLSAEIATLDVQLDRLVAEAAPTLLALKGVGTETAACLLVAAGDNPERLRSEGAFAHLCGVAPIPASSGRTNRHRLNRGGNRAANCALYMLTLSRMAWEPRTREYVARRTAEGKTKPEIIRCLKRHIAREIYRAIKEAPSFSLPAADAA

SEQ ID NO: 481757 - protein, 401 aa, unidentified
MSKKNTRNALDTSLSYAVIGLDLAKADCAVAAVPCADDELGLIDRMDYELLFEQAEKLGPTLFAMEPCCGYSQISLRLQNMGHEVKVISGHAVKNWIATHKSNQKTDLNDATALAKLALYDHDLQPIRVKNVEECRIASVQAIRIQLRTQATKSLVCFKSLCQCWGIVIRRGSLNTKKMAEAVAAVEKLLGAEVASSLMILRDAYKFTMKQINALDKLLDALVEANEQARTMKTVLGIGTQTAARLAVTTGDIKRFPMPRSYVAYFGLAPRNIITGHSGTPSPSKRGALKPVSSRGQGKVSRRGDRVARSFIIQGAATIYMLYCKDMLPECQLRRWLHEQIKRGKPYGKIIVSLAAKLLRIVWALLTYGEKFDSHKAGVPRSVLAAMEKPLKHDAAAESAA

SEQ ID NO: 481758 - protein, 398 aa, unidentified
MTESSDYESVQVFIGVDVGKDTHHAVAINRSGKHLFDKALPNDENKLRSLISDLKQHGQILLVVDQPATIGALPVAVARSEGVLVGYLPGLAMRRIADLHAGEAKTDARDAAIIAEAARTLPHALRTLKLADEQIAELSMLCGFDDDLAAQTTQASNRIRGLLTQIHPALERVLGPRLDHPAVLDLLQRYPSPEKLASLGEKKLAAQLCKLAPRLGKRLAADIAQALAEQTVVVPGTNAAAVVLPRLALQLITLCKQRDEVALEVEQRVLAHPLYPVLTSMPGVGVRTAARLLTEVACRAFASATHLAAYAGLAPVTRRSGSSIRGEHPSRRGNKALKRALFLSAFAALRDPLSRAYYTRKMSQGKRHNQALIALARRRCDVLFAMMRDGTFYTPQAS

SEQ ID NO: 481759 - protein, 391 aa, unidentified
MFLLGIDIAKLNHVASCIDSSTNEVVFSNFKFKNDFKGFSSLLDKIRTFNAENLIIGMESTSHYGENLISFLFKQHFKVALINPLQTSHLRKANIRDAKNDNLDSLNIAKALSFAKLNFISKKNIDCFSLKKLTRFRSNLIKQRSKTKIQLTSLLDLLFPELQYLFKSKIHSRAIYSLLKKYPSAEEIAALKDDEISNLLYASSKGHFKKAKSIELKSLAKTSVGIKDTSISLHVIQLIELIELYDKQIKDIVSKISDTVDKMDTKLLSVPGINIIACAIILGETNNFENFSSSKKLLAFAGLDPKIRQSGNFYASSCRMSKKGSPYLRYALVFTAWNIVRHSEKFNRYYCLKRSQGKSHYNALGHVAHKLVSVIFTLIKKDIIYQEENLR

SEQ ID NO: 481760 - protein, 354 aa, unidentified
MKQKNLSKGCFANKKLFIGIDVHKIRWVVTVRTYDLELKTFSMSPEAEVLEKFLKDNYKDALLHIVYECCFSGFWIYDYFNNKEYDIIVTPTNRILRDGGFVKTDKIDARKLAFQHSRGLLRKVIVPTIQIREYRSLFRFYDKQKEREGVILRQIRCILEQRNHPLKWERWNKVFVEKLKEIKFQEKIFNMKFQSFIEEYEYLKDKIRDSENYIKEIKTNKILGERIARIEKINGIGIISATRFVVFLFDIKDRFVSGEKLVHHLGLTPGEWSSGDEVRKGRTGLTGDKKLRSIIIQLAWIAVRKDGSLLNKFERVFKNGGCKQKAIVAVARKLMVKVHAITVKEEDYVVNKAA

SEQ ID NO: 481761 - protein, 518 aa, unidentified
MRAGYRRFEHADQIRLFPAPSPRAASFLPVLKGKRGGVAAKKNAKTDTDRDSAGAAAEHGGDGAEVAEDRVQVVEYAAAIDVAKGFGMVCTRVPGSRPDRRRQKVWRVEATYAEVTALMDHLRCEGIQRLVLESTSDYWRIFYYLAEAAGLEVWLVNARDVKHLPGRGKSDRQDCVWHCKLNERGMLRRSFVPPQETRDLRALTRTRARLAQDQARHQARVEKILEDALLKISVVISDLFGASGRRFLDALVAGERSPAALAALGDPRLKATRRELEDALTGRFRDIHAFEIKTHLRLIDAINDEITRLDEKIEEQLALVPRTAPACTACGLVGGGHAPGCADEQVPLLRLAGRLDEITGIGECNARVVIAELGTDPSTFPTPGHAAAWARLTPRSRQSGETARPGRTGKGNRYIRGALGQAAMTAAKTDTRLGAMYRRIARKRGKQKAIVAVSRVICEIAWILICDPGARYQELGPDYYRPRSRARQTRDKIREIERLNPGKKVTLAPIDADADTAA

SEQ ID NO: 481762 - protein, 387 aa, unidentified
MYFVGIDISKYKHDCFICTETGEVIESNFSFPNTSDGFEQLLNLLKSIDNFKEIRIGFEATGHYGMNLKLFLEKNNYSFMEFNPKLVKEFISGQTLRKTKTDKKDAYQITKYLISADYKPHPKQFYHKYSLKSLSRMREKLVKQRSYYEVALTNVLDHIFPEYKPFFNNTFSASSIFILSKYKSPDKIKNMKDYDSIRKISRGKFTSAQFFLLKDLAKNTIGTSNEIFELELETLLILRSQIEFEIKKLESNIEEIIKELNPPILSIKGIGYILGAGIVSEYGDVSRFKSADAMVAFAGIEPSICQSGTESHTGHMVKHGSGHLRYYLLNAADCIFLHEPIFTEFYYKKRNEGKSHRVALNHVAKKLIRIIYKLETENITFDSSKVK

SEQ ID NO: 481763 - protein, 338 aa, unidentified
MALYCGIDLHSNNNWVVVLDGAEKVVKEVKLPNDLLRVIGELAPFYDELGGVAVESTWNWYWLVDGLMDAGFPVRLANTSAIKQYEGLKHSDDKHDARWLAHLQALGILPEGYIYPKEDRPVRDLLRRRMFLVQKRTSLLLAMRGAFECRTGTRVKVDDIKKWNEEDILRQIEDPLAALSISCLLEPVAALTREIKLLEKHARSRARLRPELEQLQTVWGIGQTLSLVILGEVGEISRFPRVGDFASYCRLVKSGRFSNGKRKGSGNPKNGNRYLSWAFQEAAHHATRHHPEAKAYVQKKTAKTNGIIAIRALAHKLARATYQVLREKVDFDGSKLFR

SEQ ID NO: 481764 - protein, 327 aa, unidentified
MTRYVGVDLHRRRSVIVVLDADGTELWTKRIDNDPLTLGLEIEKVGPAPEVVLEATWGWYWAADVIAQAGGSVHLAHPLGIAGFENRRVKNDRIDARLLADLLRMGRLPESWIAPEGVRHQRELVRYRRKLSQLRAGLKAQVHAVLGKEGLRPPITHLWGPGGSVWLDETDMADAYETRVRSLRRLIKIYDTEITKLDARIASVFEGNEGYEVIQQLNGVGPVLAAIFCAELGDVTRFGSAKQVTSWAGLTPRHRESDTTVHRGSITKQGPPLVRWAAIEAISKNHGDDPIKEHYRRVSERRGRNKGRVGQFPVQSVDLLIRPGVHK

SEQ ID NO: 481765 - protein, 339 aa, unidentified
MQQQRQYVGIDLHRRRSVMVRMTGDGEVLECVWIDNDPVAMSLELAKAGPDPEVVLEATYGWYWAADLLQAEGANVHLVHPLGLHWDTRRVKNDERDATELAHRLRRDDLPEAWIAPPELRELRELVRYRAKLVSLRTSAKAQVHGVMAKAGILPAYGAMFGPAGQALLDQMPFEGAYAIRVESLRDLLELYERELALVTRELHRRLAEDRGYVAIQAIRGVGPIMAAIFVAEIGDVSRFPTARHLCSWAGMTPSHRESDAKVRRGHITKQGSSLVRWAAVEAVARFHGGDPIAPAMRRISGRRGLMIGRVAAARKLLTLVFYGLRDGEIRCLAEREAG

SEQ ID NO: 481766 - protein, 371 aa, unidentified
MEHTRFVGLDIHKERISIAVAESGRSGAVEYLGEVANDPGAISKLCDRLGRPGRPLAFCYEAGPCGYGVYRQLTSLGHRCDVVAPSLIPMKPGDRVKTDRRDATMLARLHRAGELTPVWVPDADHEAMRDLIRLRSVVRQIVTRTRQHLQGFLLRHGRKHGQGTAWRMAYRRWLSTLAFQHPAQQIAFQDYVDAVMDAERRLQRVEEQISCLLPEWNLCPVVDAVQAMRGIALINAVVLVAEVGDFTRFSNPRQLMAYFGLVPGEHSSGETIRHTGITKTGNSHARRALVEGAWAYRMKPRIGRHKVDRIEALPKIIRDIGWKAQVRLCARYRRLSARGKNANVVNIAIAREMVGFIWSIACTIQSAPRAA

SEQ ID NO: 481767 - protein, 351 aa, unidentified
MRTEYFITMDTHCRTTDVCVKTAGGKLVRREHLSTGIPQLRQFIESVPRPRQVVFEEGPMAGWLYRNLKDSADEVRVCDPRRNALVAKEGDKDDPIDAGKLNDLCRGGYIKVVHQLDSAQKAAVKQVVGMYHDRVVRRVSEGNQLLALAKRWGVMLRRQALVSGQTRQWLATQLKEAGVPPQIVGIADGLWKSFDQALEQEQSLHEQICRLVRQDKMMARVVHLPGYGPVRAATLISYLDTPWRFKSRSALWKYVGIGLQRQKSGDGLDFVRVEQCCNRLLRNMVIGAAQCAIKQKENVFARRYARWIITGVSSRNARRNVAREQVTAIWAMWKSDKAFDAGLIHDPSEKE

SEQ ID NO: 481768 - protein, 495 aa, unidentified
MTAPTTRRKPASSPPAGGRPAPAHRKPQAELKGFARRPSTSAQVAALPVQHPHAAGIDIGSRSHWVCVGFTTGADSHSIREFPAHTDGLRAIAAFLREHRVDTVALESTGIYWIPLYELLQAEGFEVLLVDPSYTHQLRGRPKTDRRDCQWIYRLHSVGLLAAAFRPDEQTCQLRAYLRQRANLVRAATRHVQHMQKALEQMNLKLTEVLSDVTGLTGQAIIRAILRGTRAPEKLAKHRDKQCKASEAEIAQALTGSYREEHLFELKLAHEAWQFTLRQVEEVDAQIALQLGLMRGDRALPPLKPKARPKRRANSPRFDVRAALYYVVGLDLTEIEGVSELTALTVIGEIGPGVSRFPTVKKFCSWLGLCPNWRKTGGRVKSSRTRRGVNRAAQALRVAAQGLHHSKGALGGFLRRMKGRLGAQAALTATAHKLARIVYLALKHGMTYVRQGQEEYEARMKEKQVRALRRKARQLGLEVVEKAVGGVPAGAAAQG

SEQ ID NO: 481769 - protein, 411 aa, unidentified
MIASSTTTQNGTFVAIDVAKLVHEVLVEPPTGRRQRWRIRNCQPDYEALRDRLRAVETPVLIGFEATGNYHRPLAYYRGQCGFELRLISSLAVAQTRDALYNSWDKNDPKDTQVLLHLLKTGVSQRYHDPLVHRMNDLQELAQTHSQISLRKVQVQHSIMTHYLPLYFPEAERYYTNSRAQWFTQLLHRFPCPAAITRYSQDVFEHEAWTVVGRKVNKRGFLADLYATASQSIGLAVAEDSEAIQMFRVMLAEHQHLCATRAAIEHQADQALQSHPDYHRLRTLPGVGPILALTILAEAGDLRRFPHHRQFLKFCGFDLSTQQSGQFRGMSRLSKHGNARLRYAFWMAANGAVRMRQNTFREKYARYIKADPQNPDRKRKALCAVAACVFRPKPATDSDASRPPIPMERGH

SEQ ID NO: 481770 - protein, 352 aa, unidentified
MVYVGIDLHRRSSHVAAFDEQGLELLSRRVTNDPEALRAIFAELGGDARVALEAAFGWEWLADLLEAEGIELHLAHPRHTKAIAAARVKTDAVDARTLAHLLRADLLPEAYVAPRELRELRELLRHHIGLTRLRTALKNRVHALLARQGVQHGRAELFGPRGRAFLGELVLPEPTRRRLESLLALIADFDRELAAAKREIQACAKDDQRVSVLTRIPGVGAFIALLVVAEVGDVSRFPSARHLGSWAGLTPRVRNSGERVRLGSISHQGSAHLRWGLIQAAQTAVQADGPLKATYERIKRRRGSKVAKVAVAREILALCYYGLRDGEIRRLEAAAARANSALAMAPCGGPTG

SEQ ID NO: 481771 - protein, 363 aa, unidentified
MGMLAEHYDYVIGGDPDRDTIDLAVIDTATGGVRAHIVERADGPGYIRLLEWANVHAPGLRVWALEGTGSFAAGLATVLAEAGEDVVEVSGPRRSRGRVKNDRTDAIQAARTALASEHQSQPRARGLREAIRQILVTRQAVLVSRTKAINELKSLIVVAPEHLRAGLRGVSLLKQLDRIEALSSLPTASVEHRITVFTMQSIAARIRFLFDQASQLDPQLLALIKEHPAGPILLSEPGVGPVAAAQLLVSWSHRGRVRSEAAFATLAGVAPLEASSGQRTRHRLNRGGDRDLNRALHTIAITRMRCHQQSRDYETKRAAQGKTHRDVRRSLKRILARQLYRKIQAATQPIPAEIAAEVLASAA

SEQ ID NO: 481772 - protein, 405 aa, unidentified
MPTIYRHRDIEWWARFALPTLVIAQTGIVGVFRKEWPATDVHPAAGRWRSDRVRPEPLWLPRSVIVVSTFIGPGWLPEQLGSLHKAGSRKMTQTNMTTAGIDTSKLKLDIAVHGRTERWKVANALPGWRALAANLAKADVTRVGIEATGGYERGVVEHLRAAGLIVLVLQPVQVKAFGRVHLRRAKNDALDAELIAACAAAIDRLRMVPDARLTELAGHLTFLEQTEEDIARFKTRLEHIDEPGLRRIVNSDIARLKARKAAQIRDIAKRLRAHDDLAERLDLVLSIPGIGERTALALLIRMPELGQVSREEAAALAGLAPFDDDSGQRKGQRRIAGGRGRLRRSLFAAALPAAYRWNRALIALYARLKARGKAHNAALVACARKLLIYANTVVQRGTPWTEKAA

SEQ ID NO: 481773 - protein, 343 aa, unidentified
MQIRSVGIDLGKTTFHLVALSAAGKVLLRKKFTQKQLITFTANMQISLIGMEACSGAHFLARALREQGSDVKLIPAQFVKPFVKSNKNDFLDAEAIAEAVDRQNMRFVPIKTDDQLDLQALHRVRDRLIARRTSVINQLRAFLLERGMTFAKTPAKLKLAMPEILENADANLTPRMRNLVSLLWNEWKDLEQQIVAMNAEVEQIASSDPACQRLRKIPGIGPLVATAIVAAIGNGAAFHKGREFASWLGLVPRQHSTGGKARLFGISKRGNSYLRKILVHGARSAVLRVKRERSPFGAWLDALELRAPINVVITAAANKLARIAWAVLSSGREYRPAVSPMAA

SEQ ID NO: 481774 - protein, 341 aa, unidentified
MHHVAVDLGSRQSQLCVRSPEGQIQQEAKVANAGLGVTLAALPKSRVVLESSSEAFAVADLALGAGHEVNIVPSGLAHNLGVGQRGVKTDKRDARNLSMASCRMETLPTVHLPSMHSRELRRLLTSRGQLVSARTGMVNSVRGWLRSQLLRAPRGTCPENFPKRIRELTLSRPEGLPEHIERLLKVVETLNDQLKMADKELESLTEADLVCQRLMTVPGVGPVTSATFRATVDEVSRFKTAHAVESYVGLTPGENSSGETVQKLGISRAGSTRARAVLVQAAWSAWRTRPSDPMVCWARGLARRRPIQVAVVALARKISGILFALWRDEANYDPKHGSQQQ

SEQ ID NO: 481775 - protein, 346 aa, unidentified
MKITAQLPVVGMDIAKNVFQIHAVDPETGEIERIKLKRAKVAEFFANRQPCLVALEACGGAHHWGRTLAAQGHQVKLLPARQVKAFVLRDKTDARDAQAIWVAAQQPHIHEVPVKSEPQQACLALHRMRAQLMKMRIMQTNALRGLLCEFGIVLPEGHRILLQRIPGELAQAQDKLPGVLIESMQEQLSRIERLQQDIDHIDRRLAALGKQDQHMLALQAVPGIGPLTATALAATATDISGFHSGRQFAAWLGLTPRQSGTGGKIRQLGISKRGDPYVRTLLMHGARAIIARTQRTGWITALLARRPYSVVVAALANKLARTAWAVLTKGKAFDQLRWNPAAAVAA

SEQ ID NO: 481776 - protein, 352 aa, unidentified
MRHPKHQVTGEEDLFVGIDLHKDRWHVTIRTMDLELFSASIPGTWEALQRVLARYHGHPLQAVYEAGYFGFRLHDRLVEHGIPCIVTPPSLVPQEYGNRVKTDRRDSSKLAHLLAKKMLKRVWVPSEEELFHRQVIRRRRQLVRDRVRTQSRIKAELRFYGIHLQEPRGRWTQIYFETLRDVRFGNRWMQESFNRLLEQYEFLSAQIDKQTQLLRELSETALYRERVEILQSIPGIGMISAMELLLELQDVSRFRRAEQLAAYVGLTPSQYSSADKVRMGRITGIGKNTLRAILVEASWKLITKDQVMREKYDRIKIRSGGKRAIVAIARTLLLRMRRMLLDKQAYALQLAA

SEQ ID NO: 481777 - protein, 320 aa, unidentified
MAKNSTRTAGIDTGKTHLDIALYPAGERLRVTNTAAGHQELAAWLAARRIGRVGIEASGGYERAVVAYLRQHGIEVALLQPRQVRAFALYKLRRAKNDRIDAALIAECAASIDSLPAPPDSRLVPFAEALLFIEQLEADVVRLKTRREHYTDKRILKQIDQHIAALQRRCDGELARLQCAVRRYDDLSRRLDLVVSVDGIGLRTALTLVILLPELGTVSREQISALVGVAPFDDDSAERHGERHIAGGRSRVRKALFNAALPASHRWNAALVAKYAHLKACGKVHKVALIACLRKLLIYANAVVERGSPWTKTAPDKLAT

SEQ ID NO: 481778 - protein, 388 aa, unidentified
MKQSKERVVGLDVHPDSFAGALLEGRDPVRARVVSTSTRVALSALEGWTERHTTTQDTLVLEASGNAFAVAERLRALGRKVAILDSHQAGRIGKVYCANDRVDAVKVARIYLSGLSALVWQPDPRTRERREVFSAYQGVVKEATRLQQQIKAMLNEHCVRLPAGFRLCHPTALVRLAKVKEWSPVQRLLLSQLHAGLIAARQRRQQLRRHMASEVLSEEAGLLRLARLCGLSLVTIYGLTAAIGDITRFPQSKKLVAYLGLNPSVCQSGNWEGSTSLRRHGKGPLRALLIQSAKKLLQVDNPLQKWGLAVAARRGRNKAAVAVARKLTVAIWHVLQGHAIGALERVDRLYLKLFKLATEVGVSAIQAQGYESKEAFIQKKLYVLRSYS

SEQ ID NO: 481779 - protein, 355 aa, unidentified
MERYRTIVGMDIGKDWSHLEALDTRTGEFIRGKRVDNSEESLKKFVEELPGKIRVVMEATGNFGYLHDLLDDWVDDVQVAHPLMVKAIASARIKTDKIDARVLAELGSANLVPEAYCPPKAVRALREVLRHRAFLVGLRTRVKNRIHALLWKLGVTVPEDTDLFGKKGLRWLEEITLEAPNDVLLRQDLRLVEALNEEIDVSTQEIKGLAQEDDRVAFLTPVRGIGEYTAMLVLAEIGDISRFNDPKKLVSYAGLCPSTYQSGHTMRHGSITKQGSKWLRWALIEASQRYAKAEGRLGDFFRRMARKKGTKTARVAVARELLSGIYHCLKKGVPFEESPKVKKVLAGHTRNFPGR

SEQ ID NO: 481780 - protein, 344 aa, unidentified
MLYVGLDLSRKRLDWQALLPDGERAAIGAVPPDRDGLSKLAGGLGDVPVLGVIESMSGARFVHDELELHGWDVRIADAVKARGIAPLACKTDTIDTWVLAELARLELVPEIWLPDPQVRAERERARFRLHLVKHRSALKNRIHAILFQHGVPSPGSDLFGAGGRALLEGLQLPEPWTSTVAASLELIDLLDERIWSCESELRALGAEHRYIPLLMTCPGIGWVLAFTIASEIGEIGRFQSPAKLVGYTGLCPRVEQSGERDRRGALRKNGPTYLRWALVEAAHSAARHPAYQPVRERMRARHGRKRGTKIAAIEIGRRLSEAIWHMLTTNQPFAPAGAPASLAA

SEQ ID NO: 481781 - protein, 330 aa, unidentified
MEYAGLDLHKSFCQVLVCEKEGELIKEGRIKTEAKDIEEFFSGLEDLTIAFEASSNYEYFYDLLEGLGHKVILAHPLKTKMIAEAKIKTDKIDAKTLAELLRGDFLPTSYVPPKEIRELRHLVRHRIFLGKYRGIIKNQIKTELRRKNIKYPDGAGIFMGKGKKWLRSLKNPVIDSYLMIYETVEKELKEAERKIGKAGKEYEEVKLMTGIVGIGVYSALIIYSEIEDCSRFSNEEKAFSYAGLVPRVHQSGNTSYYGRITKEGSKYLRWILVEAVRVHVRWCPESKITNHYNKIKKKKGANVAATAAARKLLQVIYHMLKNKEEFRIEG

SEQ ID NO: 481782 - protein, 402 aa, unidentified
MNSVGIDISKGRSTIAVMRPFGEVVISPFEVRHTDSELSELARQLKSLDGETRVVMEATGNYHAPVAKLLHDAGLYVSVVNAKLVHGYGNNDLRRVKTDRKDAIKLANYGLDRWLTLPRYVPEEDTRLLLKNCYRQYRQYSKVQTVLKNNLISLLDTVFPNVNRLFSSPIREDGSEKWVDFVAEFWHCRCVSEKSQKAFTNKYQRWCRKHGYNFSEEKAHTIYVEASGHIGVMPKSETTKLLVEQAVAQLRATSAALAALKHEMQSLASMLPEYPVVMDMFGVGPTLGPQLIAEIGDVRRFYSKKALVAYAGLDAPPNDSGDVTGKHKSMSKIGASSLRRTLFLVMSVYLQNAPLDEPVYQFMDRKRAEGKPYRVYMMASANKFLRIYYATVKAYLELLERT

SEQ ID NO: 481783 - protein, 456 aa, unidentified
MVVDEEIFILFVQEKKKSFLATMTLINFVAANQKNYAFNLLSVFIMVFWSVQYLLQHLLVQTQLSDQLLQPLILILQLPQTPQFRHARPGKFFLPVNGMDYLLPLRLTVRNVLTRRITMNIVFLGIDLAKNVFQLCGLSQASKPVYTKRTGRKELLQTLANIPACLIGIEAPTGAFYWQREFEKLGHKVKVISPQYVNPFVRGQKNDGNDAQAIAVALMQPTMQFVPPKSPEQQNIQALHRARQRIVNHRTATVCQIRGLLLDRGIPIGSAVSRARRAIPLILEDAENGLSSRMRRTIAELYDLFNDLGRRIHFFDKEIETVFRQSEACQRIAKVKGIGPKTATAVVAAIGKGTEFKNGRHFAAWLGLVPRQHSSGDRQVLMNMTKKGDKHLRTLFIHGARAVVRVATNNNDSHMNQRVNQLKERRGFNKTTVAVANKNARIIWSMLRNETEYQVV

SEQ ID NO: 481784 - protein, 327 aa, unidentified
MGSTVQTNSTVAGWAGIDVSKEWVDVAVWRGERRIDVGRFARDKKGLGKMAKQLLQYAPEAVALEATGGYEVAVMAALTEACIAVVRLNPRRVRDFARAQGLLAKTDKIDAYVLALFGVRMRPAIRALPEPERVQLANWETRRQQVVEMRATERTRLQQVKHPELRKSLERTIAFLGKELARLDAQIDKCLQESQQLVEQAALLDTAPGVGPRTACVLTARVPELGAANRREIAALAGLAPIAQDSGKYQGKRRIQGGRAPVRAALYIAAWSATRVAGKLRDYYHHLIAQGKPRQLALIAVARKLLISLNEMMRKRQPWTENAVFPA

SEQ ID NO: 481785 - protein, 343 aa, unidentified
MQAITTVGLDIAKSVFQVHAIDARGSVVVRRQLKRRYVLAFFKKLPPCLVGIEACATSHHWSRELRALGHTVRLIPPAYVKPYVKRQKNDAADAEAICEAVQRPSMRFVPTKTPEQQSCLTLHRTRHLFIRQQTAVINTIRAHLAEFGIVAPVGRNGVEDLLYAVADQRDKRIPEVARACLEALGALLGRLKAQILEFDRQINALHRSNETSRRLDELPGVGPALATALVASVADPKAFRSGRDFSAWIGLVPKQSSSGGREKLGSITKQGDRYLRSLFTAGALAVIRYAKIHGTRHRPWLAKLLERRPTKVAAIALANKLARMAWAMMAKGERYREPLALAR

SEQ ID NO: 481786 - protein, 341 aa, unidentified
MDKIASQPVAWCGIDVSAQQLVVALQRGDRAVQHRTFPNRSVGHQALIRWLARNTGTVRVCLEATGLYSLDLALSVHAVPGIELAVLNPKAVCRFAETLRRSKTDPADALVLLDYARRMPWQSWQPPSATALVLRSITRRFAALTKQHTMEVNRLHAAEASKTVPRCVRQDLKQSLRQIECRLQRLQSEARELVARDAELEQRYTLLRSIPGIGESSALQIMGELEVLAPDLDVRQWVAHSGLDPMQHTSGSSVHRAARISRAGNRHLRRVLYMPAVVGVRFDPYLRTFYERLLERHKTKLQAIIAAARKILHAIYGMFRSRSRYDGSKLFPLLQPTAQAA

SEQ ID NO: 481787 - protein, 347 aa, unidentified
MTIKSKKIVPELKSLFAGIDVGAEELILVIRKNGTPYKPQKFASTPADRARLVKKLVNLPGIIVCLEATGVYHFDLSIALHDAGVALMVVNPKSSHNFAKALMKNSKPVLSLVEGTDAVDADTLAQYAERMDFVAWARPSDEKIALRSFSRRIDALTRQKAAAKNNCHALSASQETPKAVLRDVKLAISQLEKRIARLTKESLALIGKHPELERVFLLLTSVKGIAQTSAIALMGELLLLPQGLSHREWVKFAGLDPRAFDSGKSVHKKTRISKAGNRHIRSALYMPALSAKQHDPHVKAYFQHLLDNGKLPLQALCAVMRKLLHAIHGMLKHDKPFDNTRFYAIPA

SEQ ID NO: 481788 - protein, 391 aa, unidentified
MIYVGIDIAKDKHDCFIMSSEGEVLYNVFTIPNNMDGFCDLLQKIQSTSENPDKVKVGLEATGHYSYNILGFLLDKGLTTFVLNPLHMNLYRKSLSLRKTKTDKVDARMIATMLASDVNLKSYTDTAYHNEELKSLTRYRFDKVKERATLKSSISRLVSILFPELEKLVPTIHLISVYTLLSEYPGAHQIAAAHLTTLTNLLSDASKGRYGRDKADAIRDMARYSIGSRMPAKSLELRHTIKLIGELDAEIDEIETEIKTIMDEMNSPILTIPGISYRMGAMVLAEIGDFSRFDSPDKILAYAGLSPSTYQSGQLTSSYAHMEKRGSRYLRYAIFNATKFVCRWDPTFATYLAKKRAEGKHYNVAVSHAAKKLVRLIYALEKTGQPYMIAA

SEQ ID NO: 481789 - protein, 417 aa, unidentified
MEYARLSLPAAPPGGVTAGIDWASADHAVCVVDAAGKVMARFVVEHTAAGLAELIRRLRAAGACEAAIERGDGPVVDALLDAGVTVVVISPGQVKNLRSRYGSAGNKDDRFDSFVLADTLRTDRARLRSLEPDSPATLTLRAAVRARRDLVAHRVAVCNQLRAHLQAAFPGAVGLFRDLDSPISLAFLARFGCQDRADWLSPRRLAAWLKSQGYPGRKDPAALHARLTAAPRGATGDDGAARAGITGALLAVLTALATQIKALDAQIAEQLALHADGHIFTSLPRAGTVRAARLLAETGDCRARFPTPESMICAAGVAPSTRQSGKHKTVTFRWAADKQFRDAVCDFAGDSRHASPWAARLYDDAIARGKDHPHAVRILARAWLYIIWHCWQDGLAYDPARHKALQRILAEEKPTAA

SEQ ID NO: 481790 - protein, 325 aa, unidentified
MDEKGKVHINCRMVNEKVSFDALKRRLNGNEPLKAVIEAGRNWGMMYDLFEEIGIDTTVAHPLKVRAIADAKIKHDSIDARTLAHLLRADLVPEVHVPPKDIREQKNLLRHRFWLVKLQTMTKNRIRQIIDKSHVRTPDVTDLFGKTGTKFLKALKLPGIDGKLLKDHLEILYELSEHIKKTEAWVDEVLNDNLYVTILDTLPGFGKIFSALAALEIDNINRFPTKAKFASYCGLIPSTFASGGKVYHGNLIPTGNRWLKYVFIEASWPAIRTSNYCRAYFNRIKYRKDGNVAIVALARRLSEIAYKCLKEKRYYEERLYIPYTR

SEQ ID NO: 481791 - protein, 320 aa, unidentified
MLSFCGIDVSKDRLDVMVLPEQQCSSVGNNVAGWSELIERLRGFSIAVIGLEASGGYERGVMRALLAAGMSVRQINPFKLRQFAKASGVLAKNDRLDARMIASFVAIMPTHPAQRRAPAVERLAEMVTVRRQLSNEKIAAENASRMLENAMLQRLSRRRIARLATDIAVIDQHLVEIVASDAALAHRYRLLTSMPGVGAVLACSLIAFLPELGQLSRTKIAALVGVAPYDFDSGKLRGMRCIWGGRTPVRNVLYMAAMSASNWNPRLKAFHDRLAATGKKPKVVIVAVMRKMITMLNAMVRDDILWADRYCGRHSVPTAR

SEQ ID NO: 481792 - protein, 398 aa, unidentified
MSECYVGIDVSKDASTAHGIDRGGKKLFYVEFTMDTEGFSKLLSAIRAHCIDFSMASAAMESTGCYHSNLLCYLVTEGIQCFVINPLLIANFAKLSLRKTKTDKKDSMVIAQFLLLHKDTLVKAAPSESLQDLKDLARERESLTVLMSGLKNDIKRMLQITFPELESLCNVFSESMRNIIKQYPSARLIRTANARVIKKALMPSDARRTPPFYPEDFIAAAQRSVATDSIAKELILPEKYATLEHLMKQRERITEALVEACQAMMIQDIEIITSIGGISDTTASAFLAEVGDFKVFPSYKHLIAFAGLDPSIHQSGNFEGRGKISKRGNRHLRHLSYLMTTCVVRLDNIFREYYLRRRAEGLPYKKAIIATTHKLLRVIFTMLINRTTFQVKEVIHNS

SEQ ID NO: 481793 - protein, 355 aa, unidentified
MNTLNENSIVVGVDVHKYSHTAVAMNAWGEEKGKLDFSNNNLETYTEWLNHLGFKENIVIGLEDVNSYGIHLVERLRREDYHIRYVPAILTERERKSSTKRHKSDEVDAKRVGKVILTKYEDTLPAKESIADEKELETAKSLDLLLMERRDLTRNKTIIKNQLHCLIHQYYTESYRLHCPRSFSKKAIKWFLDDLKDNKTILATSIVRRLERLLFVEDQIYTISKEVAVIGETSKEVMSLTTIHGCGMVTACSIVSEVITIKRFKDKHHFSMYAGIAPTPHSSGRKNKMHTNPFGNRQLNRAIHSIALSQIAIKGDPTGKEYYQKKLKEGKTKLWALRCLKHQLAKVVFQKLEYC

SEQ ID NO: 481794 - protein, 391 aa, unidentified
MVCVGIDVAKDKHDCCILASDGTVRADCFTIPNNMDGFKRPLQTIQGCTKKSDKIKVGLEATGHYSYNILGFLLDNDLTVYVMNPLHTNLYRKSLSLRKTKTDRVDARTIATMLLSDVDLKSYTDTAYHNEELKSLTRYRFEKVRERAKLKQSVSRLVTILFPELEKLVSSLHGASVYALLSEYPGAKQISEVHLTKLTNLLKTASKGRHGKENAIQIRDAVRASIGSVMPAKSLELKHTIKLIQELDSEINEIEDSIQKIMDELNPPILSILGMGVNSAALILAEIGDFSNFSSPDKILAYAACSPSTYQSGKLTNCYAHMEKRGSRYLRYALYNATKYVCQWNPVFAEYLAKKRAEGKHYNVALSHATKKLVRLIYALQKSGKVYLAAA

SEQ ID NO: 481795 - protein, 388 aa, unidentified
MPAAEAPVAYLGIDVGKSSHSACALDAGGGVAFRAELANRPDDIDRLLERAGSGALVVVDQKRNIGALVLARAHAHGNPCAYLPGYAEKQARGMFPGTAKTDAIDAEVIARTALGVPRALRPAPEEPEGTASLRILSSQREFASSARTRAKNRLRATLLEADPALEGAVDPSSRWQVSMLAEFGGAAGCSAAGWRRFSSAARRAGAPAAGARRLWEALLASSRSGRRLPAGEDVAVRMLAREIASLDADIEELDSLVADSLAGDEVYECLLTVPGIGPKTAAALVTSIDISAFRGHDELASYCGVAPSDRRSGSSIRSTSPQHGGNRQLKNLLIFSCNSLIGTDNRFGRYYGECRARGMRHSKALKAVARKRLKVIYAIMRDAVPYAA

SEQ ID NO: 481796 - protein, 348 aa, unidentified
MTVTTVDRARPVTGGVDTHLDVNVAAALDPIGGLLGVEQFATTTRGHARLLQWLSGFGPIARVGIEGTGSYGTGLARFLRSAHVEVVEVDRPNRQSRRRTGKSDPADAVEAARAALSGRAQGQGKTRDGNVEAIRALVVAKRSARSSKVQALNQIRQLSFTASEELRERLKDVSRHELAREAARLRPRVGTDQVTFATKTAISMLGHRVLALDAEKQRLDGLLEDLVYETAPSLLGVFGVGVDTAATLLATAGDNPERIRSEPAWAHLCGVSPISASSGKVTRYRLDPGGDRQANSALWRIVITRMRSDPRTQSYVERRLKEGRSKPEIIRVLKRYVAREVYRHLPRG

SEQ ID NO: 481797 - protein, 338 aa, unidentified
MTVVTVGIDLAKNVFAVHGVNAAGKAILVKPLVRRAKLLELIATLPACLIGMEACSAAHYWAREFQKMGHTVRIMVPQLVSPYRMGGRHGKNDAADAAAICEAVARPNMRFVPVKSIEQQGQLFVHRAHQSYVSERTTLINRIRGLLSELGIVLPQAFKAFLSGVAQVLEDLPGYCNQVIGDLLNELFHIEEKIKNSEKLIPQLARDNSAAQLLMQFRGVGPMTATAIVASIGNGHDFRNGCQFSAWLGLTPRQQSSGGKARLGRITKAGDSYLRTLLVLGAKSVLLGAAKNDDPVSKWALQLKERQGYGRALVAIVAKNARMCWAMLHLKDEFRFPS

SEQ ID NO: 481798 - protein, 412 aa, unidentified
MNIRVEKACGIDIHEAFLVATMLDMAGTKDTRRFSTCIEDLLNLREWLLNSKCQRVAIESTGVYWIPTYTLLEGKVETIVANPLQIKNIPGRKNDDIDSEWIAEVCLNGQIKPSYIPPKEIREIRELTRSHVKLTQARTSFKNRVHKVLSRSGIHISGVLSDIFGKSGMIILNGILNGKTIDQTFTEIKNKQIKIKKTEIKESLKGELSQNDIFVIKECLDSIGFLDQKIKEFDSKININLKGMRKEMEILTSIPGVGFTTAAAIMAEIGNIEEFSKPKELVSWSGLAPSINESAGKSSNGHITKRGNKFLRTILVLAANSIVISRPNKLRFFYQRIKAKKGHKKAIVALARKLVSIIHHLLKFKEMYLEEEGKQKNFKLPKFIPVPDFSIDDMIGILCEAGYSVNKSAAKS

SEQ ID NO: 481799 - protein, 414 aa, unidentified
MGSFKVAGIDVHKKMLAVVITDAAVEGEFRFERRKFGTMDSDLRELSKWLAGHGVQEAVMESTAQYWKPVWRQLEPQCKLYLAQAQSNRAPRGRKRDFADAERLVRRQVAGELILSFVPDPEQRMWRTVTRTKYQLTGERVRLHSQLEALLEDARIKLSSCVSDLLGVSSRRMMKALAEGETDPTALAKLADPSLRATPEELADALAAAITLSSLHRKILGLFLSRLELIERQIETLDQSIATALQKHNDAVVRLAEVPGYGPDSAQQIIAEVGPGALTFPSAAELASWVGCCPGREESAEVSKTNRSPKGNRQVRRVLAQVAHAAVQTKGSTFQALFRRLVGRLGYNKAMWAVVHRLCRLTWKILHQGVRYEERGAVPDPKLVKQRKKKLVRQLQDLGYDVQLIARGWTPATA

SEQ ID NO: 481800 - protein, 429 aa, unidentified
MNFRPIAGIDVGKFFSEMAILSPSNEVIARMKIHHDSSSDVERVVELLKKTEKDFDSRPFVVMESTGHYHKILFHSLCKAGLEVSIINPIQTDSIKNIGIRKVKNDKADARKIALLYRFQELKTTNIPDEDIECLRSLCRQYYKLSDELTAYKNRLTGIVDQLMLNFKDVFPNIFSKAALAVLEKYPTPAHILKANRNKLIALIQKNSRRSLKWSTAKYNLLVSKAREFAPLTVHNSSNIAMLGVYISMIRTLEDNLAKVLKTIHLLIAEDMAKDMPMLALTLELFQSLPGIGLLTAATILAEIGDFSAFSKPGKLVAYFGIDPSVMQSGEFTGTRNKMSKRGSRLLRRVLFTTALANIRTKRNKEACNPVLLEFYKQKCQSKPKKVALGAVMRKIIIYIFAVLRDRKPYQLRSPQEHAQILAAKHIAA

SEQ ID NO: 481801 - protein, 365 aa, unidentified
MLHRLNSAATLIQRTTTEAPRGHMYYIGLDVHKKTISYCVKDVSGRIQQEGKVGSTRRELDCWMKTLPRPWTVAMEATIFSGWIYDHLLPHATQIKVAHPLMLRAIAAAKKKNDRIDAGKIADCLRCDFLPECHMMPAEIRDRRRTLRYRHLLVRQMVQMKNRVSGLLMETGVEYNKQRLHKVSYFRELLSANEEVHPSIRPLLKLSRETIERCQKTEYALISSLERDPLLADRIKRLRTVPGVGPITALTWALETGDVSRFRTIKQAISYCGLCGDERSSADKAMRMPLSKQRNKHIQRALVEAAKLAPRQSHELAVIYDRERQKGNGNRATLAVARKMVAYLLAVDRQQRDFTPAEERRTAAA

SEQ ID NO: 481802 - protein, 387 aa, unidentified
MPQPNDLSRSLVALDQDSTIIAVVEMSQSSWLVGGVLPGIERQPCKKLEPSAERLLGLLHRWRDEAVRAGKKITRIALAFEAGRDGFWLARWLRAHGVEAHVIHPSSVAVSREHRRAKTDRLDTELLKRGFLGWLRGERGHCSMARVLTMAEEDAKRPNRERECLVGERTRIVNRIKATLARLGIRNFKPTLRKAAERLATVRTPEGMPLPPNVSGELQRDMARLGFVVSQIREIEEAREKRLEQEPETGPHAMVRRVARVVGIGIETADMLVHEVLSRPMRDRRAVARYAGLTGAPDESGAKRREQGLARAGNARVRRGMIQLAWRFLLFQKQSALAQWYRARTADSRAGTRKTMIVALARKLLIALWRFVTTGETLEGVILRPAG

SEQ ID NO: 481803 - protein, 338 aa, unidentified
MFAESVDVVIGVDTHRDSHALALVDAGLGVLIAEERIEANREGYRRALKVASGCGQRRLWAVEGTGSYGACLARYLQQRGERVLELERPARSGSRGRAKSDALDALRAARAALTGEPLAELRSGGRREALRVLLVSREASVAVRRRGLNQLRALVLTAPAELRERLLGLPKGELVKRCIALRPRPGQQPQLRGTLLALRSCGRQVKLASREAATLERELAALVQQLSPQLLSHYGVGPITAAQLLVSWSHPGRLRSEAAFARLAGAAPIPCSSGKTIRHRLDRGGDRQLNRALHTIVLARRRGDQRTIAYVQRRISEGKTEREAIRSLSATTPAASTD

SEQ ID NO: 481804 - protein, 400 aa, unidentified
MLSIGIDVSKGKSTVCGMKPGGEIVYTPFEIQHTREGMSELVSLLHNSGEEVRAVLESTGSYHCPVVAALLENGIFVSVVNSLRMKRFCSQSIRKVKTDRIDAMQIALYGLAYWQELQPTRLPEDTYRELQLLARQYYQMTSMLIKAKVDFNALCDQVLPGMQELMNDHAGRHKLSDFVLRYRHTTHILEMGETRFRKDYCKWAEKKGYRNCERMAALIFATAQNGIPVLPNAPSTQIVITEAIRVLHTVEASRDAILTQMQALAKTLPEYSLVREMPCIGDTLAPRLIAEIGDVRRFHSKRALIAYAGIDAPPYQSGKFRANNRHISKRGNRYLRKTGYEVMQSYVMHKPANDPIFTFIEKKRGEGKSGKLAMVAGLNKFLRIYYGKVTELYRSLPAIE

SEQ ID NO: 481805 - protein, 384 aa, unidentified
MQASTVDTPTAGHYGTIFVTIELSQKTWLVTLHSPDRDRISRHKLEGGDHAGLLMLIERMRERAARTLGAVPAVVSCYEAGYDGFWLHRLLLAAGITNYVFDPSSIAVDQRARRVKTDRIDGERMLRTLMAYLRGEPRVVRIVRVPSVEQEDARRASRERARLTKEQTAHTTRIKALLRLLGMAVGNPRRRDWLSWLVKQRDWQGRAVPPQIMAEIKREHARLMLVREQLDAPALAAADLTPAAAQMAQRSELLLRLKSLGPAFATTLTNEVFYKDFRNRREVASYFGLTPSPWQSGGIDRDQGISKAGNPRARCAAIEMAWLWLRHQPDSNLTQEYRRRTLNASKRIKRVAIVALARKLIVALWRYLTTGLVPEGAMLKTAEV

SEQ ID NO: 481806 - protein, 412 aa, unidentified
MEVLYPCCCGLDVHKKSITACVLWAGEKGKSRLEKRRFGTFTQDLLRLADWLRQCGVTHVAMESTGVCWKPVWNILEGQFEVLLANAQHIKAVPGRKTDQKDSAWIADLLQHGLLRGSFVPPRPTRELRDLTRYRVSLTQEINRIANRVQKVLEDANIKLASVATDALGASGRAMLEAMLAGEEDSSRLAEMSKGLLRNKKPELQLALEGRMNEHHRFLLRQLYDHLLFTEGKLREIEQEIARRMRPFEEEVARLCTIPGVDRVTAHGLLAEIGLNMDQFPSAAHLASWACLCPGNFESAGKRLSGKMRKGNVSLRRCLAQAAWAVSMKKDNYLSALYRRIAARRGAKRAVMAVAHALLVIAFHMLKRGENYRELGADHFDRIDVSRIRRSLVRRLERLGHKVTLEPLAQTA

SEQ ID NO: 481807 - protein, 396 aa, unidentified
MQVIADRPKTPSTIRSDLGAIFISLELSRSTWLITSLSPGGGEKMSKHSVPAGDICMLLARFSELRRKAFARTGKSPPIIVIQEAGLDGFWVHRLLQNDGIESHVVDPASIATSRRRRRAKTDRIDGEALLRTLLAYKRGEPRVCAMVKAPTPEEEDRRRLCRERKVLTNERVLHVNRIKGLLFSQGVSGYEPLRRDRRQRLDELRTGDGRPLPKHLKAQISRELDRLELLIEQIKAVETERNALLAAQRVAAPAPAAMLLDIEGIGPEFAAVLWSEGLFRHFDNRRQVASYAGLAPTPWQSGSVAREQGVSKAGNPRLRTTLIQLAWLWLRHQPQSALALWFEERVRRNGGRLKKTTIVALARKLLAALWKYVTAGVVVEGAAMKTDRTLKSSRT

SEQ ID NO: 481808 - protein, 347 aa, unidentified
MRFYNQQHKYYCGIDLHARKMYVCILNQAGKTKVHKNIDTDPGAFFELIFPFLDDVAVAVECVFSWYWLADVCAQHKIPFVLGHALYMKAIHGGKTKNDKIDSYKIAALLRGGNLPVAYAYPAKMRATRDLLRRRMYLMRRRAELLTHIQNTNTQYNLPEIGKNLSKKCHRKHIAERFDDPAVKMTVEADLALIGFYDQLLPKIEQYIDQCAKQHDPNALYRLRTMPGIGYILALAILYEVGDIERFKSVQDFSSYARLIRPQKQSDGKWAGKSNKKIGNAHLKYAIGEAAKLLLRRSKRAVGYREKLEGKHGKAKSYGIFTHKVGRAVYFMLKNKKAFDKNRFFET

SEQ ID NO: 481809 - protein, 427 aa, unidentified
MKKTINSASGKKQESEKRNTQTAKGEIAVAQRSDRRLAKAEKMGTKESIQPQQRWGVRNLLQKLETAKHQARELVESQVEYHIGIDLGDKKSYYCFLDKNADIAADGDLATTVAEFKLYFKEIPRSRIALEVGTHSPWVSALLEELGHEIYVANPRKMGGGKKKNRRKNDKLDAESLARQLKADPRLLYPIRHRGEKARNALVLLRARHSVVCARTKLICGVRGMVKSSGHRLPRCSADSFHKMPVMYVPEALRATLAPLFEQIGLMTKQIKKYDMDVKRMCRHAYPETEILKQVNGVGEITSLAFVLTIDRPNRFVKSRDVGPYMGLIPKQYDSGDSSPQLRITKTGDRMMRQLLVQSAQYILGRFGKDSDLRRHGLKLAERGGKNAKKRAIVAVARKLAVLLHRLWVTGEVYEPLRNSEPKKKAA

SEQ ID NO: 481810 - protein, 388 aa, unidentified
MFFLGIDIGKNFHVASLIDDKKKVIFKAFSFSNSTEGANSLINKLEPFCDSLDIAMEATGHYWINLFSFLLQKNFSVHLINPIQTDGWRNSTEIRKRKNDTIDSILIADLLRYGDFVESTLSNEDYLSLKNLTRFRSYLISSTGDLKRKTIALLDQVFPEYERCFSDVFGKTSKEILLSFTTPQEFENISSSKLTKALENITLKKFAKKKIEELSEKAKTTIGVKFCLDSFSLQIKMLIEQISFIETQVESIEEEISTIMSKLDSPITTIPGIGPVIGATILGELGDISRFSNASKVVAYAGLDSVVSQSGNYEAKSMSISKRGSSYLRKVLFQAALRAEFCDPVFSDYYQKKIAQGKHHLVATNAVARKLCYTIFAVLTKNEAYKIQ

SEQ ID NO: 481811 - protein, 352 aa, unidentified
MDRQRLEDSEIVGGVDTHKQAHVAAAVDGVGRLLGTSEFPATSRGYRDLLRWLRGHGVVSLIGVEGTGSYGAGLARYLAREGVPVVEVIRPNRQLRRRRGKSDPVDAEAAARAALAKEADVTPKSADGPVESMRMIRLARTSAVKARTQAANQIDALVTCAPQSLRSQLKDLSLRRLVERARRWRPGDIQDPLSACRATIKGLARRWSQLGAEIAGYDEQLLRLTRRVCPELLARTGVGFEVASSLLVAAGDNPDRLRSEASFAALCGVSPLDASSGQQRRHRLNRGGNRDANRALWVVAMTRLRVDERTQAYAARRTKQGRTKREILRCLKRYIARELYSILRCNTLLTPP

SEQ ID NO: 481812 - protein, 387 aa, unidentified
MQDVADQSAAPTTIGADLCAIFVSLELSRSTWLATSLSPGRGEKMSKHSVSAGDIAGLLARFSELRRKACTRTGKSFPIVVIQEAGLDGFWIHRVLLSEGIESHVVDAASIATSRRRRRAKTDRIDGETLLRALLAHKRGEPRVCSMVRAPTPEDEDRRRICRERKVLIMERVQHVNRIKGLLFSQGASGYEPLRRDRRARLEALQTGDGRRLPQHLKAQVCRELDRLELLLEQIKAVEAERDTLLTQQTKASGPPPMLLAVHGVGPEFASVLWSEGLSRQFDNRRQVAAYAGLAPTPWQSGLVNREQGISQSGNRRLRTMMIQLAWLWLRHQPRSALTLWFKDRMERNGSRRRKTTIVALARKLLVALWKYVSAGVVIEGAMIRAA

SEQ ID NO: 481813 - protein, 369 aa, unidentified
MGDGIRYVGLDVHKDGIVVAVAEGGLRSEVRDYGRIANTPAALRRLAHKLDREGVTLRLCYEAGPCGYGIQRQLSALGQECIVVAPSLIPKRMGDRVKTDRRDAANLARLHRAGELTAVWVPDPGHEAMRDLVRARLDAVRALRRARQQLSGFLLRQGCHYGRPAWTKLHRRWLAGLKFEQAVHHIVLEDYIAAVEAAQDRRDRLTAQIAAMLSDWTLAPVVAALQTMRGMALVNAATLVAELGDLARFANPRQLMAYLGLMPSEHSSGASVKRCSLTKAGNSAARRLLIEAAWTYRFPARISRELRLRQEAQSRAIREIAWKAQLRLCARYRKLARSGKPANVVTAAIARELAGFVWAIARRVPPAVS

SEQ ID NO: 481814 - protein, 390 aa, unidentified
MDVMHPICCGIDVHQKSIVCCILDGPLTSNEPKKYQTSFGTTTKELKAALDWILEHQVTHVFFESTGQYWIPLFNIFSDSALELVLANPQHIKNVPGRKTDVKDAEWIAQLGRCGLINQSYIPSQEVLQLRYLTRYRLSVKQRLTQIKNHIHVILQRGNIKITSYLADIFCKTGQALLTLFINGEVINEDNVESCIHGRIKASTRQLIEAMEGKLSTVDRFLIKECMEEYQLQKKISDELNKEINEYILEHFSEEYQLLLTIPGISDNCCATILAEIGPNVDSFKTDKKLASWAGMCPGSNESAGVKKSSHTTQGNKYLKQALVMSVLSVQRAKEETFSLFYQRISSRGSKMKAIIACGHKMLRIIYKILQSHQPYNSQKALGLRQQTNA

SEQ ID NO: 481815 - protein, 317 aa, unidentified
MTSEIVIGIDVAKDELVIDSAFGLLSIANTPEAIDAWLKTLPAGSYIGLEATSDYHQLMAERAVSMGMVVYVLNPRDMRHYALGLGRRGKTDRVDAHMIRRFITAERSHLRPYQPASAIQQQLAILQRRRATVVKHRQALQKALRSVNELEAPLIDTLAALDVLLKHIDQQLDDLLTLQPALKAEARRLESIPGIGRQTSTQLAVLFDRVPLSRSDAVVAFVGLDPRACDSGQKRGRRRVSKRGPAELRRLLYNCAQAAAKTAVWKPYYQILRAREFSATQALVIIARKLLRIAFSLWQQADARFDAQKIGCLNNAA

SEQ ID NO: 481816 - protein, 343 aa, unidentified
MKVTTIGFDLAKNVFQVHGVDERGHVVVRKQLRREQVAVFFAKLPACLIGMEACGSAHHWARKLQGFGHCVRLISPQFVKPYVKSNENDAADAEAICEAVARPNMRFVPIKTMEQQAVLSVHRVRQGFVKARTAQANQIRGLLTEFGLVLPQGITNVMRGVPQLIDAAHDLPASMRQLIARLLENMKVLDRQVKELEAQIKAWYQGSELSRKLEKIPGVGALAASALVASIADARNFKNGRQLAAWLGLVPKQDSSGGKPKLLGMSKRGDTYLRTLLIHGARSAIVAAQRKGKPNVWLSGLLARRHRNVAAVALANKNARTIWALLAYEREFRPDYMPRPATA

SEQ ID NO: 481817 - protein, 344 aa, unidentified
MDHFAGLDVSVKQTSICIVDDTGRIVREVKVASEPEALLKVLTNPAYRFKRIGLEAGPLSQWLFSALAEAELPVICVETRHMRAVLKAQINKTDRNDARGIAQMMRVGLYRPVHVKTLRSQKLRMLLTHRKLLQSKAIAIDNDLRGTLRNFGLKVGIVGTVRFEARIRELVENLPDLAVLIEPLLIVRRTLREQFCILHRRVLAIVRDDEVCRRLMTTPGVGPVVSLTYRATVDVPARFRKSKSVGAVFGLTSSKYQSGEVDWSGKISRCGDEMMRTMLYEAAQSMLHSKKWSWLKAWAMQIARRRGMKKAVVALARRLAVIMHRMWVDGTKFRWTREQAAAAA

SEQ ID NO: 481818 - protein, 422 aa, unidentified
MNTDWTKHTHFAALDWASDHHDVVVVDRSGALVAEFRFAHTADGWAEFTQKMQPFAGCPLALETSSGPAVDQLLQRGWTLYPVNPKAAERYRERKAPSGTKTDRHDAWSLVDALRTDGHGWRMLRAQDEATATLRALCRDEMSLIEQRTALVNQLQAALYEYYPAALQAFDDWTMPCAWALVQQFPTPVALQNAGKRRWEKFLHTHRLWRRDTAPARLELFAHAHALPASAPICTAKSLLATSLVKVLQALQSQLDEYRRRITEVFTQHPDHEIFGSLPGAGEKLAPRLLGELGAVREIYPDADALCCQAGVSPVSFQSGKIDKARIRWACDVTLRHTVHLWADCSRKKSPWARAYYARKREQGQDHASALRCLGKRWLKILWRLWTDRQTYDEARHQQDQKQHGSWVSALLTATPPKTTPV

SEQ ID NO: 481819 - protein, 403 aa, unidentified
MGLYIGLDWASTTHAVCVLDDQGQIRARFDVPHSAAGMATLRMRLGRVGDPATLPIAIERPSGLVVDTLVAAGFPVIPIHPNVVKASRPRYRAAASKSDPQDAFLLADLLRTDGHRFRPLRPPSDATRALRALVRGRDDLVATRVALANQLRALLESFWPGAAAIFAEIDSPIALAFLTRYPTPQSAAHLGEKRLAAFLARHGYCGRRSAATLLARLRTAPVGQTGESEAEAKGDLVRSLAATLEPLVAQLQRLTAAVAHAVATHPDGPLVMAFPRAGHVNAAQILAELGDERTRFPSDAQLAAEAGVAPVTYASGKHRGVGFRWACNKRLRLALTCFANNSRHSSPWAAAVYQRARARGCAHPHAVRILARAWVRVLWRCWQSHTPYDPCRHRAAKAMLDAA

SEQ ID NO: 481820 - protein, 312 aa, unidentified
MDATVVVGIDVSKDRLDVHVRPSAETFFVARDGEGIASLAIRLAALAPAAVAVEATGGFETVVAAGLAGAGLPVVVVNPAQVRAFAKALGQRAKSDPIDAAVIARFAEATKPAIRPLPDEETQLLADLVARRRQIVAMIGAERQREKRAPVRVRRSIARLIKALEKELSSLDGDIDDSVRGSPAWRDKEDLLASVPGVGKTVARTLIAELPELGSLERRQVAALVGLAPFTRQSGQWRGKSFIGGGRASVRAALFIAAMVAARHNPALKAFRDKLVAAGKPKLVALVATARKLVTILNAILRDRQPWRDQTA

SEQ ID NO: 481821 - protein, 332 aa, unidentified
MENFYFIGVDVSKKKLDFCVMFEGKVVHEEETANHQNAIMALLHQFEEDYGIAGGQMLVCAEHTGQYTFPLACACKAVECKLWLENPAEIKYSSGVQRGKNDKVDAKRIAIYAKRFQDRVQYYERPTEDIERLKQLESERTLYVTDLAKYKGQMKDQKDYMPRKPYERKMKRLQTLMDDLEKAIQAITYEMDEVIASCPVLCRQRELLMSIDGVGRVVATNMIITTEAFTRFDDPRKFNCYAGVAPFSYSSGSSQHSKARVSHRADKVMKRLLHLAAVAVTHRIGGELKKYYERKVAEGKNKMSVINALRAKIVARMFAVIKRNEKYKPILS

SEQ ID NO: 481822 - protein, 410 aa, unidentified
MEIVREDSAGLDVHKKTVVVAVRTPRVREVRTFATTTGALLEMVDYLEAHGVRHLAMESTGVYWKPVFNLLEGTDMEVLLVNARHMKQVPGRKTDVKDAEWIAELLQYGLLEGSFVPKREHRELRDLLRYRRKVIQQRGHEVQRVEKTLQTANIKLSSVASDILGVSGRAMLEALIRGEQDPAALAELARGRMKSKKAALAEALEGSIGAHQRFMLRQHLDLIDTYDRQVQRLDEEVEKRMDPFEVAVTFICEIHGLGRRTAEELIGEIGTDMSQWKSERHLSSWAKVSPGNNESGSRKRSGGTGKGGPVREILIQAALNVSKNPNTYYGALYRRLCKRGSKERALVAVAHALLVAIYHMLRDGTIHRDLGPNHFDERRRQQSARNALRHLQRLGYNFTLEELEARRVAA

SEQ ID NO: 481823 - protein, 313 aa, unidentified
MSEFVGIDVSKATLDVYSHGARSGFTIANDEAGLKGLAERLAGVAPELIVLEATGGYERLCAASLARSGFAVAIVNPRQVRSFAIATGVLAKSDKVDARVLAHFAAAVRPEVRALPDEQREALDELLGRRRQLMGMLVQEKNRLQQARAPLVKKDIKTLIAVLEKRIGGCDGELQQLIHASPVWKAQEDLLRSFTGIGPVSACTLVAELPELGKLNRKQIASLVGLAPIARDSGTWRGKRAIYGGRAQIRSVLYMATVSAIRANELIRVFYQRLCAAGKPHKVALIACMRKVLTILNAMMRTQTHWHDPFKTA

SEQ ID NO: 481824 - protein, 400 aa, unidentified
MASMTAQISAAQPVRVVFGGIDTHKDIHVAALLDSAGMVLGSAEFPTTRAGYRQLAGWLGSAGHLGRVGVEGTGSYGAGICRQLSAAGVEVVEVNRPDRSQRRRRGKSDVLDAAAAAEAARTGNRTAIPKSRSGQVEAVRALRLPRASAVKARVVAFQELDQLLVTGPAQLRDQIRDLPKMKLIRSCAEWRPNPSNAADPLTATRIAMRRLARRYLALSEEIAEFDELLTPLVVELAPQLVATVGVGTETAGQLLITAGDNPDRVHSEAAFAMLCGVAPLPASSGKTQRHRLNRGGDRQANRAIHLIATTRKRCDPRTQAYLEKKTAEKHTDREATRSLKRLIAREVYYLLNPAPHTPPVPPSRPASRRAGAVKVEPPTRGTTLTAPSTGTPSKMEEPAP

SEQ ID NO: 481825 - protein, 352 aa, unidentified
MVTVGIDPHKHVHVAVAIDAAGRPVGKPLTFMNSALQLTALLTWIRAIAGGEPVTWAIEDGRGFARRLADGLLLSGQEVVWVPARLTAAHRRLHAATGSKSDPADAAAAARAAMAVPELDRHRIDERVRELRVLVDYRDDVVKRRTTAINQLKAQAHLWLDHTPGDLTRAKALSALTALADGAPLGRHVRRVLADMAEEIAGMNRRVRDLDAAIRDLVTPLAPNLLAITGISHTSAAVLVAEIGDITRFPTSAKLARYTGCAPIPVYSSDKERHRLHRGGNRRLNSVLYTAAIVQKRRLPEAQDLLARNEPAKGARGARRILQRHLIDVIYRAMTADRESWQHDIIRHPLTA

SEQ ID NO: 481826 - protein, 343 aa, unidentified
MEYYAGIDVSLESSSLCVVDATGRIVREAKVASEPETLTAWFNSLGFALSRIGLEAGPMSQWLYAAMKQAGLTVELLETRHVRNAFKIMPVKTDRKDARGIAQLMRLGWFRPVHCKSLPAQEIRSLLGARKLLQGKLHDIELSLRGTLRGFGLKVGKTTPKTFEGRVRSLVTNHPTLTLIAEALLRARAVLLGEFLNLDQKVHTLARHDPRARLLTTAPGVGSMVALTYAAAIDDPARFKSSKTVGALFGLTPKRYQSGETDVTGRISKIGDAAVRTALYEAANIILERPVKGGWLKAWALGVAKRAGMRKAKVALARKLAVVLHRMLVDGTPFNMEKAAAKA

SEQ ID NO: 481827 - protein, 335 aa, unidentified
MEASKNNVAGIDVSAETLDLVVRKKGKNQKVKKFKNTSDGHTSLIEWLRKKNVSHVCLEATGIYHLDLAVTLDQTSDISVMVLNPRVARKFAEATMTRGKTDAIDAGVLAQYADCMDFIVWTAPRPIVLQIKAYSRRLSALAKLKVKTKNQLHALQATIHTPRQVIDDAVLTIAQLENQIVNLEAGALKLIISDEEINNVMILLISVKGIAQTTAIQLIGELLVLPKDMTSKQWVAYAGLDPRANESGKSVSKKRRISKAGNRNLRRALYMPALSASRHEVNVSAYYQHLINNRGITKLQAICAVMRKLLHAIHGMLKSGKSFDGTRFYVIPVES

SEQ ID NO: 481828 - protein, 320 aa, unidentified
MMAQNDLVVVGIDVAKDKVDACIRRFTLRQSFPNTAQGHRKLVAWLRKYQVGKAVMEASGGYEREWRNLLHNAGIEVRIVDPRRVRSFAQSAGRLAKNDPIDAEMIAWFAETFSQAPGQIPDAAREELAALAKARKALVDVKIRLLAQNEHAAPEPARKAYACVLKRLAAEIDKLGAVISAKVKATPEFAERAEIIESVPGLARATSAILIAGMPELGQVSDEVAAALIGVAPYDDDSGKRRGERYIKGGRRWVRNAIYMPCLGAATQYNPVLKAFYQRLLAKGKEPKVALVACMRKLIIILNTMLARRQKWNPGRHAVA

SEQ ID NO: 481829 - protein, 364 aa, unidentified
MNKCHSNTESSSHEGTRCQFNGGRCAIKLGIDVHQDFYVVVEQVGGTNPKPPQRFAKQAFLYWAAKLKQSGAEVHAVYEACGFGFTLQRQLAAVGIVCHVVCPQKLDERNKRMKTDGLDAKALCLKLDRFMQGNRDALAIVRVPTEEEERSRAIHRQREQLVGARKRLEAQGRSLMVNHGLEPVQNWWKPRTFAALQLPQWMRELLLNSQPILLALQEKIAALTLQLQSAAAPNQPRGVGKMTSVVIDREIGDWHRFNNRRQIASYTGLCPGEYSSGNTRLQSCVTKHGNPRLRAALVELAWRLVRFQPHYKPILKWRSTLAKAALATGAARKKAIVAVARQLAVDLWRVRTGRCKPEVLGLEI

SEQ ID NO: 481830 - protein, 414 aa, unidentified
MDIVHTHCAGLDVHKKTVVAAIIVPEPNRGLYKETRSFGTMTADLLTLSDWLMEHNVTHVAMESAGEYWKPIFNILENNFEVLLVNAQHIKAVPGHKTDVKDSEWIAELLRHGLLKASFVPPLGQRELRELTRYRSTFVKERATLVNRIHKALESANIKLASVATDVTGVSGRAILQALLEGKSTPNEMAGLAKGRMREKREELTKALEGHVKAHHRFVLTELLCQIDSLDEAIGRFDEQIVEHCRPFEESVALLDTIPGIARETAEIIVAEIGTDMSRFPSANHLASWAGVAPGNNESAGKRRSGKTTKGNHALGVALNQAANAASHTKNTYLSAQYHRIAARRGKKKAIVAVEHSILIIAYHIIQDKTPYRELGSDYFDKRRPETTAKRLVKRLEHLGFQVALQQRQVPLAT

SEQ ID NO: 481831 - protein, 409 aa, unidentified
MDLVIARCAGLDVHQATVVATVRTPDDRGGRRRTTETFGTMTPDLLALREWLQAHGVTHVALESTGVYWKPVYYVLEDAFTLLLINMQDLKRVPGRKTDVRDSEWLAQLLECGLLKSSFVPPPPIRELRDLTRYRLQQVRDRAQEVNRLCKVLEDAGLKLTTVITDVMGVSGRAMLRALVEGTTDPGVLADLARGKLRQKLPALQRALQGRFRAHHAFLLQQILTKIDFLDETVERVTAEIDRRLAPFEATLAALDTIPGIDRVGAISIVAETGGDMSRFPSAEHLCSWAAICPGQNESAGKRRSGKTRQGNRYLRGTLVQAGLAASRSNGTALQARYHRVKRHRGHKKAVIAVGHSILAIAYYIMRDGCTYHELGADYFDKRHAERAVRRHVRQLEALGFQVTIEKAA

SEQ ID NO: 481832 - protein, 528 aa, unidentified
MGKCTRRRVRGGTLVLKKTDASLRQRVQELGGGKVGVVPVDVSKERICAMVADFYGNVLTAPEVFPITTAGLDLLERRITEAQAKHGLKLMVVGLEQTGRLHEPVRRVLARRWELKLVHPLVTSHLRQGINRNIKTDGADVDALLQAVTGCYGSPCRPLPVAYEHWRALHRVRQQLVDERARRKDQMHERLQAAMPGLSKQFDSVWISPLAAALLCDFDSPAALRHAGETGLRQRLRERGVRCTPTRAEQLVAWAADAVPPGAAATTEMAILRADLEHLSFLGRRLEHVEREMLAFLVQSPFVLLLSIPGISHVLASGLGAEAGPMEFYPTARNLTGRAGLYPRRYQSDQTDLQGTGMACGQPFLRHVLMNSGRCLILPGGAFFAWGESRRALGWKQKEIVAAMANRFCRVVHAMLLTGQTFHHPEAKPGVSVLGKLLNVAADLGIDAPQATAMARQATAKIPACALPVEISDLTSGAWKDDNRPREHGASPCTTRQIARETVPALLKWLTHQENHHDVTPAADFRSP

SEQ ID NO: 481833 - protein, 345 aa, unidentified
MTNRPLNTTAESVHRLFAGVDVGADELVLVIRKNGKPFDPQKYANTRSDRTRLVNKLIKLPGIKVCLEATGIYHFDLAIALHDTGIPVMVVNPKASHNFAKVLMKNSKTDAVDANTLAEYVERMNFVAWTRPSNQSLALRYYARRIDALTGQKAAAKNHLHALSATEETPKALLRDAKLAISQLEKRINTLASEALALIDKHPELQRIFELLTGIKGIAQTSAIALMGELLLLPPNLSHREWVKFAGLDPKAFESGKSIHKKMRLSKAGNRHIRSALYMPALSAKQHDPHVRAYFQHLIDNGKKPLQAVCAVMRKLLHAIHGMLKHDQPFDNTQFYAIPESIIAE

SEQ ID NO: 481834 - protein, 314 aa, unidentified
MTPNEGIVHAAVDVSKARLDLFCPQMGHASFANTAKGIEGLLQAIQEHGVTRIEMEATGGYEKALEKSAREKGLPVCLLNALRVRQFARSQGLLAKTDAIDAQVIHRYAEGCPDRLRARGKASETEELMAAYVLRRQQVSRSLVAEKNRLEKAAHPQIAKLIRAEIGHLEAKIEELEAKLRELIRKDESLCAKAAQVRKIDGVGEVVGTTLLALMPELGRMNRRQAAALAGVAPMNHDSGQMRGERHIQAGRQDVRRCLYMAALTALRRPGKYRALYLRLRARGKAAKVAITACMRLLIVEINASMRIFYASTA

SEQ ID NO: 481835 - protein, 455 aa, unidentified
MKANRVSALRSKRGLHRVNGAEPQVVGLTPQTTDERKTDTMKTYILRDPKPVEPQKSIRSPRHQLVITAIPITVVGRPSVTVKDPVLFIGLDVHNDSIAVSLAPSDSTEVRRYGIIGGEHDDVLKLAHKLQAAHPGMILKFCYEAGPRGFALCRCLQMHNWNCILVCPSKIPRKPGERVKTDRRDADDLARLYRAGELTGLYVPEPVDEAMRDLIRARFQVGRQQHRSRQQLKMYLLRHNLRYGGQTSWTPAHLRYLAKLKMPFPTQQIVFQEMLDVISEATARLERYDQEIERAVPGWRWEPAVRALMSLRDMALLHAATLVAELGDFNRFEHPGQLMGYLGLVPSEHTTGKDRQQGGITKMGNAPARRALVEAAWQYRVPARLSPHLKKRQEGLPKAITDIAWEAQRRLHHRYTHLTRVGKKKSQVAVTAVARELTGFVWAIARQVKPVTAQP

SEQ ID NO: 481836 - protein, 407 aa, unidentified
MDVVHLKCAGLDVHAQTVVACARLGSGKAVAYDRRTFGTTTPELLALSDWLTAHGCTHVAMESSGIYWKPVWHVLDGHFELVLANAMHIRNIPGRKSDVNDATWIADLLAHGLIRSSFVPPPSVQELRDLTRTRKQLVREIAQHTLRIQKTLETANVKLTSVLADILGVSGRAILTALIAGETQPERLAALASDQVKASRAELVAALHGRLTDHHRFMLRLHLDQIASLDVAVRDVEARLGETLAPFRAAVDHLITMPGVSETVARVIVAEIGFDMTRFPSAAHLVSWAGLCPRLHESAGKRLSNRTRSSNPWLKTTLVQAAWAAARKKDSYFRAQFLRIKSRRGPKKAVLAVAASMLTAAYHMLRNGAVYRDLGADHFDRHDKAKLAKRLIARLHDLGLVVDVRAA

SEQ ID NO: 481837 - protein, 387 aa, unidentified
MAQVEDLSRSLVTFDQQSTLVVIVEMSQTSWLVAGTVPGLDRRPLKKLEPNAPTLLRLVKRWVDEATKAGRTITRIVLAYEAGRDGFWLARWLRARGIEAYVIHSTSVAVSREHRRAKTDRLDTEMLMRVFLGWLRGERRHCSMVAIPTLEEEDAKRPSRERESLVGECTRIINRMKATLARLGIRGFKPDLRQAPLRLDALRTPEGVPVPPNTCDEIRRAMARLAWIREPISAIELARVKRLEQAPAQGPDAMVRLLARVIGVGLETADMLVREVLSRNLRDRRAIARYAGLTGSPNESGSKRRERGLAKTGNARVRRGLIQLAWRFLRFQKDSAVVQWYRARTQAPEGARKTTMITALARKLLMALWRMVITGPVPEGIVLRSAA

SEQ ID NO: 481838 - protein, 357 aa, unidentified
MLSSNVKYIGLDVHKEAIAIAVLNGAGKLVMESIVETKASTLLDFLHGLRGELHVTLEEGTWAAWLYDVLKPHVQKIVVCNPRRNALLKEGSKSDKVDARKLAELLRTGMLRAVYHGENGLRTLREFARSYLTISKDQRRVMSRLKALYRSWGIPCAGRQVYAPRHRELWLSKIAHAGVRRRAELLYQQLDGLLVLRHTVRGELLAESRKHQAVKILRQIPSIGPLRATLLLALMQTPHRFRSKRQLWTYSGLGVETHDSAQHRYVDGQLQRSKKPQQIRGLNQNHNHEMKEIFKSTALSASRCTGPLQEFYAGLLAKGMKPDMARLTLARKIAAITLTLWKRGGHFDAEHLKSQAA

SEQ ID NO: 481839 - protein, 331 aa, unidentified
MFPVGIDVSKNTLDLCMLYDGIKGRIKTRNIQNNRHSVENILRWLRLQHCSPEDVHVVMEATGVYHERLATELHDAGFRVSLANPHRSREFARGMGIMTKTDRVDAYMLACYAFLKKPHRWEPPAPEIRYLGALLRRRDVLLGDALREENRLEKYLSTDTPADIISSCRRMAQLLREEVSNIERQIKAHIKASPALRRDYTLLTSIKSVGPLLGMHMLVVLRSHNFVSAEQAAAFLGVVPIEKRSGTSVRRRPRMSKIGPPQLRAKLYMSALCGKIYNKRMRNIYDEMCLRGKPKMVAIGALMRKLVHWCYGVLKTGTVFNDEDLKPVLST

SEQ ID NO: 481840 - protein, 346 aa, unidentified
MNYVGIDIHKRYSVLVALDERGRELKRCRINGNTAFGFDQFFSGLDGKSKVVVEACWNWGRIYDLLSEIEQVEEVVLAHPLKTRLIADAQIKTDGLDAHGLATLLRGDLVARAYVPSKPTRQRKEVLRQRLYWARLRTRVRNRIHALIDRQGELSMPQCSDLFGRKGLNALNKLCLNEPDATLLREELALLELIQSQIKAQEARIVEFNSKDETTLRLQSIPGMGKILAAVAAVEIDCVERFSSAAKLCAYAGLVPRTHASGGRVYQGPLVKSRNKWLQWAFIEAAWVAIGCSAYFGGLYRQHRARGKNANIAITSIARRSAKSALHCSKKGEILLKLSPVAPQLD

SEQ ID NO: 481841 - protein, 340 aa, unidentified
MRGLYAGDDLHGNNNLLGIIDEQGKRIFKKRLPNDPDLIKDVLKPYKEEMVGIVVESTYNWYWIVDALMEEGYKVHLANPSAIQQYSGLKHEDDKHDAFWLAEMLRLGILPEGYIYPKEERPVRDLLRKRGHLVKLRTSLIISLENIISRNFGRKLPVNKVKGLREDHVTPLFEGKEDLGLAGRVSKETIDFLTHQIRQIEGAVEKRITLKEQYRNLLTIHGVGKILGLTIMLETGPIGRFETVGDYTSYCRKVPSQWISNGKRKGSGNRKNGNKYLSWAYAEASDFARRLHPESRAYYNRKMQKSNPAVAHSALSHKLARAAYYIMRDQVAFRPEKLFG

SEQ ID NO: 481842 - protein, 356 aa, unidentified
MTNVKTNFADQTIYVGLEVHKCSWNAALYLNDQYLRNVHQPPSPQALWKFLQTNYPGADYVCAYEGGKFGYWIQRQLSGNGIRCIVVNPADIPSTHKDEVSKTDTRDARAIAMALQCGQLRGIYIPTQQQEADRSLVRHRKKIWRDLVRCKNRIKGFLDYTGVELPDKFSNSNWSRNFLQWLSAIKFDYVSNRVTLDYMIREAELLRKELLHISNDIRKLMRSSAYKKMYYLLRTITGIGPLTAALLITEIGDMKRFSSFYQLNSFIGLLPSEHSSGEKELKGRLTIRRHRQLRSDLVECAWTAKRTDPALSLFYSDQLKRGKESKLIIVKIARKLLSRIRCVWLTEKPYERGIMK

SEQ ID NO: 481843 - protein, 416 aa, unidentified
MSTTDPLTSPVDPCGFTYVVGIDVGSEHLLYTICQPDKRAVVKPSQINNDRVGFGQLDQALHALGSEPSRILIGLEATSRYNENLYQFLAEQGYTLCLLHPRQTHQFAQQRGLRAKTDRLDASTIARLLLSGEARVGYVPDELIASSRELERLHSQLTAESARYQNEIHALLTVLFPEFTQVFADPCGATALGVLKRYPGAAAIATAGVEALTATLRELARRRYGRPTAVELVRLAERSAASGVATSARALSLKVLCDQLEHTLVNLAHREQELDRVLGGDEGASRLSSVPEFGRQTIAVLRAELGDVTRFSRIDQAVAYVGLDLEVRQSGKWKGQVKLSKRGSGRVRRVLSMAALRSLTLPDSPFAAYYHRLVARGLKGRKALMAVMRKMLLVACHLLRSNESYDPAKVCAVTGP

SEQ ID NO: 481844 - protein, 405 aa, unidentified
MTENVTTPQHFIGLDVHKHYLVAVGVTPDRQPVFGPQRVELSRLEAWISKTLTPQDALVLEMTGNSYQLYDELLPHVHSVTVVHPPHVKLITSMPVMNDKIAAAQLAELHAAGLLSGIWVPPQEVRELRALIAQRAKMVKLATQAKNRLHAVLHRYHLAPPDGDPFSAAQRDWWTRLDLAATEQVRIQCDLTTLDCAQTQCAYIETLLQALAAQDERLPFLVQLPGVGLLTAMILLAAIGEISRFPSAKQLVGYAGLGARLHDSGQTTRRGRLTKAGRRDLRCALVEAAHSAASTHPHWRAELARLEPRLGYNKAIVAIARKLLVCVWHVLSEQCVDRFAEPEALARKFFAFAETLTLANRPDGQTAAAYTHQLLVRLGCGAELPAFQRGARTIRLLPPDADTAQ

SEQ ID NO: 481845 - protein, 403 aa, unidentified
MNSVGIDISKGRSTVAVMRPFGEVVISPFEVRHTDSELSELARQLKSLNGETRVVMEATGNYHAPVAKLLHDAGLYVSVVNAKLVHVYGNNDLRRVKTDRKDAVKLANYGLDRWLTLPRYVPEEDTRLLLKNCYRQYRQYSKVQTVLKNNLISLLDTVFPNANRLFSSPIRGDGSEKWVDFVAEFWHCRCVSEKSERAFTSKYLRWCRKHGYNFREAKAHTIYAEASGHIGVMPKSETTKLLVEQAVAQLRATSTALAALKHEMQSLASQLPEYPVVMDLFGVGPTLGPQLIAEIGDVRRFYSKKALVAYAGLDAPPNDSGDVTGRHKSMSKIGASSLRRTLFLVMSVYLQTAPLDEPVYQFMDRKRAEGKPYRVYMMASANKFLRIYYATVKAYLESLEHTA

SEQ ID NO: 481846 - protein, 362 aa, unidentified
MKIVGCDLHAKQQTIAMVDTDTGEFIERTLSQEGSAVREFYGGLEGPVVVGIEATGSMRWFLELLDELGIECRVGHPAEIRAAETQKQKHDRRDAQLILDLLTMEGRFPVIWMPSTEQQDLRTLLRDRHQWVQIRSRVQHTLQAIALNHALRQGRGLWSQAGQRALRALPLPPYTRQRRDELLSLYGQLQKRIEQLDRQVEELAKQRSQARRLLTHPGVGPVTALATEVFLGDPKRFDHGNQVASYIGMIPCEHTSGKRQRLGKMTKQGNSLLRYLWTEAVMHAVQKDAELKRFYRRKLIQKGMGKARIAAARKLGIRLWIRCATRLITKSSAAEESCGRKGKPMRGCSISTVVLRRSDRVN

SEQ ID NO: 481847 - protein, 358 aa, unidentified
MAKLSLSRLAAFVLGFEATEFRVGIDVHKKSYSLALLRVDNASITWTGPARAETLLEPVKRFGLRISAVVYEAGPTGFSLARRLERAGLRVIVVAPSRVPRPVRAGAKCDRLDCLKLAEYADHRRVRAIAVPSEREEAERSLLRRRHALADGRRRCKQRIKAHLLYLGVDAPEGLDRWSQASVASLGGLSLKPSARLTLESLMRELAFHNEELRRVEDQLLELMSSGSQGKPLRFLRTVPGVGFLTATSYLLELYRPARFRNARQVASYLGLAPMVHHSGGRTPRGRIAPVGQGRLRSLLIEASWVWKSRDPYAAKLYNLFLSRMGIAQKAIVAVARRLAIILWRLCVEQRAYRVNPV

SEQ ID NO: 481848 - protein, 382 aa, unidentified
MQTIAPVNPTILLAIELSTSTWLVAARLPGLDKPRLSRIDGGDTAALLALISSLRARAACGLDATMGVVCCFEAGRDGFWLHRLLTAHGVVSYVLEPTSILVNRRARRAKTDRLDAEGMLRVLAAYLRGDHQACSMVRVPTPDQEDAKRTHREREHLVQERLRIENRIEALLFTQGIRKRPSLRSWERDLTVLRTGDGRKIPRHLRAELDRLRRRLVLTLELIREVEAERDQVTKTKPQDQAHHKITALCRIRGIGENFAAVLTREVFYRSFDNRRQIASYVGITPMPYQSGGMDRDRRIGRAGNPRARTTMIQLAWLWLRYQPDSELAEWFRERVGTLAGRTRRIAIVAMARKLLIALWRYVETGVIPTGAEIRAETTVAA

SEQ ID NO: 481849 - protein, 321 aa, unidentified
MNTTMPLGIDVSKAKLDCALWLGSKYRTKTFANTPEGFSRLSEWLHQHGADQVHACMEATGIYWEAAALYLADAGQRVSVINPALAKAHGQSLGLRSKTDAVDAKLLADFCREKQPPAWTPPSGAERRLRALVLRHQSLVEMQTQEKNRCESLREEVRTSVETHLAWLAAELERIEQAIAKLLDDDDHLRGQRELLASIPGLGERTIAVLLAYGVSGERFQSARQFVAFAGLSPRLHESGSSVRGKPRLSKIGHACLRRALYMPAMVTLYKTAWGQRFRQRLATHGKPPKLIIGAMMRKLAQVAFGVIKSGRPFNPAFHGA

SEQ ID NO: 481850 - protein, 355 aa, unidentified
MKIAVGMDLHAKSTTAFAVSVNASIELKMDEHTLLEDFNRKFSGFPSDRSGMTEMTDFLKGHEVHILIENSTKTHEIYWMLTEMGMSVTVAFAADLFRITKSKKKTDRHDAVELAGYMRRRLNGETEFKVSFMPTREWLMKRELCRTLYDESSALSDVRRQVRSHMLMHGIVHKATDIVGVSSLRYLTSLNDPVLNSLALRADDANKRIRALEKTIHGMYENDTNYRILQTIPGVGKVIAAYISGMTVDVERFDKAGEFSAFFGLVPGMRESAESSPHCHITRRGDDVAREMIYQAALVHVFKGNDGTSSITCAFNRLYGDGKRMPFKKAMTAAARKMAVLMFTIMKSGRPYERR

SEQ ID NO: 481851 - protein, 331 aa, unidentified
MDHCAIDVGGKKSQICVRNSGGTIQFEGAWETPALGDHLRQLPRCRVILETAAESFRIADQARAAGHEVRVVPATLVRTLGVGARRTKTDKRDARALSEVSTRIDLPSVHIPSARSREWKTMAGVHDALVSCRTKLINNVRGWLRGQARKPRSGVAETFAERVRRLGELPVYITSELKMIDALSEEIAASAKRFASVTNSDPVCKRLMTVPGVGPSTALRFVAAIDVVTRFASAHKVEAYLGLSPGEKSSSERQLRLGITKAGSASVRWVLIQAAWILKTCCRAPAARKLQLWAAEVEKRRGKGVATVALARKLAGILFALWRDGTEFKSR

SEQ ID NO: 481852 - protein, 328 aa, unidentified
MSKHSTVCAGIDTGKHKLDVALEGRSQELQVPNTSEGHRQLANWLRKHRVTRVGIEASGGYEQPVVCHLRQDGFIVVVFQPAQVRAFAAFHLQKAKNDKIDAGLIADCTAAVKEIQAPPDPRLAPFAEVATFIDQIVEDIAHLKTRRASFRNERINAHYDSEIRRLTVFMRSELKKLAAEIRQYDDLGARLDLILSVDGIGLRTALAILVRMPEIGRIPREQAAALVGLAPYDDDSSDRIGPRHISGGRQRLRGNLYNAALPASMRWNPQLIALYKRLTTNGKPHKLALVACARKLLIFVNTVVERGTPWTKEMPVPPTVKRTPMRRR

SEQ ID NO: 481853 - protein, 350 aa, unidentified
MKYIGLDCHKKYDHATMIDTETGEVKAKRLTHLKEEFAEFIGERGDTRLVMESCWNWCKTYELVKDLVEEVTLAHPLKVRAIASAKIKTDAIDSRTLAELLMADLVPQAHLRKAENRIKQRVIRHRAFLVVMRTRLKCRIHDLVDSQLLSQDVIHAKPINIFSKKGMKWLCSLELTTEEERKMSDSYLRLLEVINQEIASSNDMIKEIYDKDEDAQLLVTIPGIGVTLATLISTEIDGIDRFSSSSKLCSYAGLVPSTHSSGGKTYHGRITSEGNRWLRWGLIEAAVPASYGDDEIRPQLDDLRKIKSGNVAKTIMARRLLKIVYHVLKERRAYVSNYPGRLLFALASSH

SEQ ID NO: 481854 - protein, 436 aa, unidentified
MPPMRNLSLGRCDVKPLYTQTFTAYVGIDWADTKHDVCLQAVGSDQREFACIPHQMHRIDAWAKLLHQRFGGTIAVALELAKGPIVYALQKYDFIVLFPINPLTLAKYRQAFKPSRAKDDPTDAELALDLLLRHPERFAPIQPQSVAMRSLISLTEHRRELVGDKTRLTNRLTNTLKQYYPQALDWFEQRDTVLFIDFLTRWPTLAQAKRARIDSLKAFFNAHNSRRAKVIDARLESIKSALPLTEDLGVITPCRLHALMLVKQLRVTLQAIEQFDHEIAELAPTLPDYSLFQRLPGAGEHFAPRLLAAFGEDRQRFQHADELQKYSGVAPVTERSGKKSWVHWRWQCPTFLRQTFIEWAGQTINKSFWAGAYYRQQRVKGSSYQAAVRALAFKWIRILHQCWKTRTPYNETTYLNALRKRGSPLLKNLMPDATNT

SEQ ID NO: 481855 - protein, 340 aa, unidentified
MNRIGLDAHSASFTLAVVNEAGKVTRCLSRPMSAEKLIEVVGEVRGPKELAVEESAVAQWVKETLEPYVDKLVVCDPRRNRWIAKEDFNDDRTSAIKLAQLLRGGYLKEVAHLQERPAQLRRAFYHYADLNEQVVRFKNKLKGTYRQALVRVDGEAIYSERRREEWLARLHDAPALRRQAGQLFVLIDLLEAMKQDCLKVLVAQARKDPGYRHLETIPGIGPVLASGYIALIATPHRFSRKNKLWRYAGLGNALHISDETVYQDRPSQSGNRLLKWVTTQHFMAAVERAEKDNLFKRRYERLLREGHSRKVARRQVCRSLLSVVRAVWMKGEAYRETPLS

SEQ ID NO: 481856 - protein, 406 aa, unidentified
MPYKVAGIDVHKKVLMVVAWEVSEQWEPERKRFGTTTSELQRLSAWLREQQVEEVVMESTAQYWKPVWYELEPHMRVQLAQAHSNRAPRGRKHDFKDAERLVRRLVAQELILSFVPTGEQRTWRTMTRMKVQLTEEASRIQNQLESLLEEMRIKLSSVISDLLGVSGYRILQALAKGETDLRKLASLGDPHLRCSEEQLIDALNGNPQPEHRKLLALHLGRYQLIRQQIDKLNRMIAKAMKPHQAAVGRLAEVPGLGVDSAQQVIAEVGAQASTFASPANLASWVGVCPGKQESAQHNHSSRSAKGNKYMRRILNQAAQAAVKKKGSHLQAVFRRFVPRLGYNGAIWAIAHRLCKLVWKILHDGVRFVEQGNEPDPRAKRQRAQRLLRSLRRLGYEVSIKQAVAEG

SEQ ID NO: 481857 - protein, 313 aa, unidentified
MDGSKQHPKTTAGLDIGDRYSYLCLIDTLSGEVIEEGRLPTSPETFRRRFASEQPMRIAVETGTHSPWVSRLLRECGHEVLVANARKLRLIYANRRKTDEVDAENLARLARLDPKLLYPVAHRGEDSQAHLAIIRSRQALLDCRTQLVNHVRGAVKSFGHRLPKCPARSFHKKAPEHIPEALSPALEPILEQIASLTERIRDYDRQLETVSEEHYPQTELLRQVEGIGPLTALCFVLTLEDPHRFERSRPVGAYLGLVPASDRERDPQRRISKEGDEMLRKLLVSGAHYILGPFGSDSDLRRHGQKIATRGAK

SEQ ID NO: 481858 - protein, 466 aa, unidentified
MENNYILYVGMDSSKGKADAAILKVSDRRSVKPKFLRKKLSFKFVKSEVTSFLETVRSYSDDNCTSICFALEVTGIYSTNVYNFIKDNLNDNESIKFLNTDFVNQWRNAHNIAKSDPLDAQTISTIIGTDSDVQYVNDNVFKNKNGYQDLKALVHRHYQIKKIYSQEINRLIAQCDCLFPELQYVFEPKSAAFIAVLSSYPTTHDIINASRLEVFNVVYEATKHRCSMDKIDKLFDLCHDTLVPDNISSYGRSIILDLVENIKNIKGQLKMIERYIRDVASLNPAYKLLLTITGCGPLTAATVIAETGDIKRFKNADCFVSYSGTSPRNKRSGTSVETMGKISKRGSRYLRHAIYMIAEFARRHNPVLKQQFERIKNGNKKRHKLANIAIANKIARYIYSIMKNESGFVIFHEHIIRLPEETQNTFFNSISLDFPENTRKQIYQYSDIDGEVHKFVYTKLEETMII

SEQ ID NO: 481859 - protein, 367 aa, unidentified
MNNSSTVVGLDVHKDSIVAAVLPARADNISETINIGNSSLEIKRLVERITRRGTAEFVYEAGPCGYEIWRQITGMGVACSVIAPGLTPRKPGDRVKTDRRDAENLARYHRAGELTEVNVPTRQEESVRDLLRAREDLLQDRLRARHRARNFLQRQARQYGKKLWGVNHEIWLKAQKFEYPALTQTFETYLWKLDEANAGLEEIDRLILGWAEGEEYKGAVKCLRCFKGIDTLGAITILAEAQDLMRFGNARGFMSYTGLVGSEYSSGERIIRGSITKAGNAHIRRVLVESAWAYRHRNVSSPALLDRRKGCPVEVVKIARKAQDRLTGKFWRMVSKGKKQPVIVVAIARELAGFIWSMSKHFPVKAA

SEQ ID NO: 481860 - protein, 386 aa, unidentified
MTAKVIDLPTAMHIETARCLFAIELSKQSWVIGFIRPFSSKISRRILNGGDWKGLLELIDEVQTRASRETGRAVEVMSCYEAGYDGFWLHRLLEAHGIRNYVIDPASLQVDRRARSVKTDRIDTERLLRSLMAYLRGEPKVWSVVRAPSIAEEDARRLHRERDRLISERVQHVNRIKGLCALHGIYDYQPLRPQAMARLEQLRTAQGVSLPPRLKSEIKRELQRLELVVEMIAILEAERDAIVEDAASTHTNAKKIRELHKLKAIGPEFAAVLVGEIFHRRFNNRRQLASYVGYAPSPFQSGNVAHDQGISKAGNSKGRTTGIELAWLWLRYQPGSDLSAWFRARVGATKGRIRRIAIVALARKLLVALWRYLETGLVPRGAVLKG

SEQ ID NO: 481861 - protein, 338 aa, unidentified
MKKYSGIDLHSNNSVVAIIDEMGRTLYCKRLPNELAKVREALEPHRGELAAIAVESTYNWYWLVDGLQAAGYEVKLAHVAAMARYSGLKRRDDETDALELAQRLRLGNLPTGYICPRAEREVRDLGRRRLQLVRDRTRHVLAVENVQARETGTRMGANEVKRLDADAVEHFGLGADVTLGMQANVAVIQALNAEIAKLERRILKRVRPRPEYRLLKTVPGIGRVLAPIIMLEAGSMERFKAVGNFASYARCVDSQYTSNNKKKGEGNRRNGNKHLAWAFIEAANIAKRSCPQAKRFHERKRAKTNAVVATKALAHKLARASYHVLKRRKRFDAKRCFR

SEQ ID NO: 481862 - protein, 432 aa, unidentified
MPGYPLPLEDGVPVTWVAIDVAKDAHVVVVEAQGARRQFRVPNRLEDLLALVAFLREQPQPVRVAFEPTGDYHRPLAYQLVTAGVDVVLVASLACTRYREARYTSWDKNDPKDASVVLELLKQGLTMRYVDPLVAGWHDVQEIAKTYWHVTLARTRVQHSLLTHFLPLYWPEFARFWRTSRSAQLVQLLLAYPIPATVRAVDLEAFVVAAGPTVGRKVNKRAWLTEIYDLAGRTAGLPVAPTSPAVATFRLRLRSFLDLTRQRAELERWADTLLAAHPDYQLLQTIPGIGPVFALTILAEAGDLRRFAHHRQFLKYCGLDLAKSQSGTLRGHERLSKRGNGRLRCAFWFAGRVAVRLRESSIRDKYERYTAAEPKSSDRRRKAYTAIAAKMARITFAVIKTGRPYRSYYEHDLPGGSIPFNRAVEARPAATS

SEQ ID NO: 481863 - protein, 370 aa, unidentified
MGEYSEAYVAFDTSKTKHAVAIADGGRRGEVRFLGDVASSPARVERLTRKLAERYDKLHFCYEAGPTGYGLYRQIRELGHDCTVVAPSLIPKKPGERIKTNRRDAVTLARLLRAGELTAVWVPDAIHEAVRDLVRAREAAAQDLRRKRQQLLSFLLRHGRIFDGRQHWTLAHRRWLAGQSFAHPAQQIVFQDAIEAIEEALARLRRLEQQLVAIVPSWSMAPVVEAYQAMRGASFLVAVTVAAEIGDLRRFDQPRQLMAFLGLVPRERSTGDTVRRAGLTLAGNRRARRVLVEAAWSYRHPARVSETLRARLEGLPKPVRDIAWKAQIRLCARYRRLSAAGKKLPVVIAAIAREMAAFLWAIARQVAPVA

SEQ ID NO: 481864 - protein, 449 aa, unidentified
MTTLRSLVFAHKEYTTMTRYVGIDLHKHLIVGHVVDPAGKTLDTFRYESVCAVTLEHIGRYRLKPEDHVVMEATTHCWAVVRALEPFAARVTVSNPMATKAIAKAKVKTDKVDAAVLAHLLRLGYLPEVWQPDQTTQVLREWTARRTRLIGQRTAVINRLRSTLAQRLLDCPHDMTSQAARDWIAGQIVDVDTRWLLESDLRLMASLQLELDAMEKLLAKRGYIDPRVKLLMTLPGVSQHTAQALLAAIGDISRFPDADSLASYLGLVPTTRQSASHCYHGHITKQGRGHTRAMLIQASHSMRTNPGPLGYFFRRLQKRKPYNVAAVAVAHKLALLAWHLLTKGEPYRYALPLATKTKLQKLRVRATGQKHRTGPVPGTKPRMKVLGGSHTTKPLGTVYEIEGVPAASPAPTGERRHLAALKLESFVENLQQEHVIPRRTGKKAPARDA

SEQ ID NO: 481865 - protein, 299 aa, unidentified
MNATTVAVDLAKNVFELALADARWKVLERARLTRAQFERWFDNRKMDLVVMEACGSAHHWARTLRARGIEVRLLPAQYVRAYVKRNKTDAADCLALLEAARAQDIKPVAVKSIEQQGLQALHRTRSGWMSTRTRRINTLRGFCREFGLVVPEGAATGLAQIARYLADERSGLPAMLRPSMRLVLEEIRLMEARIGQLEQQLAALAKQSPACQVLLSVPGIGLLTSTAMVAAVADPRSFDSGRRYSSFFGLHPAGIFLGQHSLPRAHLQARGPLHPHAVDPWGTLDPARGHRGAPRRTTD

SEQ ID NO: 481866 - protein, 424 aa, unidentified
MSAEQPSSAAAWIERHCHFAGFDWGKQQHVVVVVDRAGTVVAELQFAEDADGWRRFAERIASMSDLAVTVETSSGPVVERLLELGCEIYPVNPKSAKDYRTRKSPAGVKDDRFDAWTLGDALRTDGHGWRRLHPDDPITCELRMLCRDEIGLIGQRTALVNQLQSTLAEYYRSALDAFDDWTMQAAWEFVERFPTPEELRRKGRRQWEKFLHAHRLARPETYEKRLAIFARVSGREGSEAATRAKSCLALALCAQLRLVEAQLRSYRKRIDELFAKHPDSDIFGSLPGAAAKLAPRLLGECGDRRDRFDSPEALQCIAGTAPVTRRSGSMRFVKQRCACNKVLKATMHLFANCSRASCAWAQAYYRSKREQGKTHACALRCLAQRWLKIIWKMWQTRQPYDEAMHTRNQVRRGSWVVAPPASAR

SEQ ID NO: 481867 - protein, 344 aa, unidentified
MGRVMIGMDPHKRSATIEVIDEREQVLAQGRYGTDTGGYQAMLAAGRQFRDRVWAVEGCAGCGRHIAQRLVADGEPVLDVPAKLSARARVFDTGQGRKTDPVDAHSVAVAGLRTPGLRTVVADDATVALRLLVYRRDELGRTRTEVVSRLHHLLLELIPGGAKKFLTRSRGSYLLRTAPPPVGIVGQTRHQLARELIDELAVIDAKIRAADKQLRQLVKASGSSLTELNGIGPSGPARLIGDIADIGRFRTAAHYASWNGTAPIEASSGDQHRHRLSRLGNRRINRVLHIMAIVPLRHYTPGRAYWRCCTTAATTSCASPSTSAYRLRPTRPIMPSSALCGRVG

SEQ ID NO: 481868 - protein, 475 aa, unidentified
MARTRKKPVPAPAPDGESVEVTDIPVQVVDRAAAIDVAKGSGMVCTRLPSDTRAGRRTQRVWEVTATFAAVVTLMDHLRSQGIQRLVLESTSDYWRIWYYLAEAAGLEVWLVNARDVKHLPGRSKSDKLDCVWLCKLNEWGMLRRSFVPPGQIRDLRALTRLRTRLAQDCVRHQNRVEKILEDALLKISSVISDLMGASGRRILDALVDGERNPKTLAALGDYRLRATPAQLEAALTGRFRDIHAFEIGMLLELTDDLTAKITRLDQQITGLLEQIPGISAACTSCGVIGGGHAPACASDQAKVLSVIERLDEITGVGIPTAQVIIAELGTDMTQFPTPGHAAAWARLTSRTIQSGTTTKNGRTGKGNPYLRGALGAAVMSAASTDTFLGERYRRIARRRGKQKAIVAVARTICEIAYLIISDPGFRYIELGAGYYARLDPRRQTRNKIRELEKLNPGMTVRLTPRAPATEAPAA

SEQ ID NO: 481869 - protein, 431 aa, unidentified
MTKFPREVTHMNFTNPRAEKSRSLRKNNQEPQFRISYTATGQELIYGYVPVGIDLAGRKFQVCFYNEDNKLVNTTLDIHELRQFIAGSQQKLLISMEGCTGSSYWANYAITHGHKAVVLDARAIKNRKAQKDDFNDAFFIREALFTHYQTCRIRTQEEIDLKSFYAQKEQYIKSLNAVCSNVRQRLIAAGAYEKVVKDADSALVAIKRYKEQINNKSKVGFSSLTLKTLDCFVEDINYLTKKIDHINQDIIDVKARESQGAKLLMTIPGIGSQLAVLLSLDIDDIERFKTARALQAYFGLFTAHSGSGGKIEMGKMARNGDPVVKRMLYQAVLTLLHCGNKIQIAPRSEYIQRMYSRHTVAFKRGVISMCAKIIRVVFGVLHHGTAYDPQIDSSLGNKKTRVHAYSNRCLNKVSADALIQEQYCYTEAALD

SEQ ID NO: 481870 - protein, 317 aa, unidentified
MGKPNYVGIDIAKSSMEVVMHENKDHWTYANDESGLTKLLAKMKRLAPVLIVMEATGGYEVVVASELQSQGYPVAVVNPRHIRDFARSVGILAKTDILDAKVIARYAATVQPACRQLPGKDTQKLGVILMRRRQVIAMLTAEKNRLHQADPAVKDRIREHITFLEHELDDTNRELKQLVEDNPEWKEKSDIIQSIPGVGPALAVTLLADFPELGKLNRKQIAALGGLAPFNRDSGTLRGKRTIWGGRASVRAALYMGTLVATRYNPVIRRFYTRLISAGKAKKVALTACMRKLLTILNVMIKHHSTWQHTPEVVLIS

SEQ ID NO: 481871 - protein, 413 aa, unidentified
MDIIHHRCAGIDISKADAKVAVRIAQSGVNAKEEVRTFGSMTRQVLMLRDWLIDEQVTCVVMEATGDYWRTFYYLLEDAGFELLLANPRDVRNRPGRKSDVSDCKWLADLGAHGLVGGSFVPPPPIRDLRALTRLRTCIARDRGIAAQRLEKVLEGAGIKLSIVTDPTNVSSRRMLKGLAEGMAVEDLAEMAYGALRRKKAELAEALTGQFSEHHTLMVNILLDRIDSCNCDIEQLSERIDVLMQPYQRAHDLLVTIPGVSDIVADVIIAETGADMSVFPTAKHLASWAGVAPGLNQSGARTKPSKKRPGNTHLQAALGIVAFAATKTRKTYLSAQYRRITAHRGPMKAMVAVENSAITAVWHMLTNDKEYVDLGPDYFAQRRPDTTRNKAIQQLENLGYQVTLTTPKEPETS

SEQ ID NO: 481872 - protein, 324 aa, unidentified
MADIHVGIDVAKGKFDVALLRRDGRYRHRTFGNNSTGFAGLQAWLKRQDASSAHTCMEATGTYGNALASHLHASETPVSMVNPACIKAFAQSELLRTKTDRVDAALIARFCRAMKPGLWQPPAPEIAELQALVRRLESVQQMLVQEKNRLSAPEISASVRSSLTRVVEALEAEMEEIRQLIADHVEEHPELEHKRDLLASITGIGKATANVILSEMAGTSFTNARQLAAHAGLAPQARESGSSVRGKSRISKRGNARLRKALYWPAIVAMRTNPVLRSFADRLREAGKPTMVIIIAVMRKLLHLAFGVLKTQQPFDPNYEACKA

SEQ ID NO: 481873 - protein, 310 aa, unidentified
MANKLLFHYQSTNDKAGIEGFIKLLKLHCPDANFSNSLYCMEHTGIYNNHILNFLHLKKTKIWLEHPIHIKDSLGMIRGKNDKVDAQRIATYAYKNRDEVRLWIPKRDIIQKLDRLTATRSRLVKVRKILKSPLTDSKDFLSQKDHKEAKKACEKSIDALKKDIQKIENQIHDTIQGDSYLKELFELIESVKGIGPVIATEILIITNEFKDINDAKKFACHAGVVPFEHQSGKYKGRSKTSNKANKQLKALLHNGAASAIQHSKEIKEYYVRKTAQGKNEMLVRNNICNKLIHRVFSCVHRNGAARAGKI

SEQ ID NO: 481874 - protein, 473 aa, unidentified
MPAGQQVEVEVDEHEQIVERVAAIDVAKASGMVCTRVPHPDVAGKRVTTVWQVGAATNQILELAEQLAGQGIQRVVVESTSDYWRPFVYLLEARGLVVWLVNAHQVKHLPGRPKTDKLDAVWLAKLNERGMLRPSFVPPAEIRQLRDYTRLRADLTHERSRHKQRLEKLLEDALIKLSSVATDIFGVSGRAMLEALIQGERDPEALAGLARGRLRVKHAALVAALTGRFDEHHAFVARMLLDQIDALGGQIERLTTRIEQTIAAIPAASPPAPDPGGGHGAAAGDAIGPARSVPGPIEQVDPQTGEVLAAALPVVDRLDEVAGIGRHAAQVIIAEVGLDMAQFPTPGQLVSWARLSPRTIQSGATRRAGATGHGNPYLKAALGEAATAAAKTDTFLGERYRRLVKRIGKLKALVAIARSILVIVWHLLADPTARFHDLGADYYASRIDTTRKTRNLVRQLEALGHKVTLQPAA

SEQ ID NO: 481875 - protein, 391 aa, unidentified
MVCVGIDVAKDKHDCCILDSDGMVRADCFTIPNNMDGFKQLLQTIRNCTKKSDKIKVGLEATGHYSYNILGFLLDNDLAVYVMNPLHTNLYRKSLSLRKTKTDRVDARTIATMLLSDVDLKSYTDIAYHNEELKSLTRYRFDKVRERAKLKQSVSRLVTILFPELEKLVPSLHIASVYALLSEYPGAKQISEIHLTKLTNLLATASKGRYGKDKAIQIRDAARTSIGSVMPAKFLELKHTIKLIRELTSEIDEIEVSIQKIMDELNPPILSIPGVGIQSAAMILAEIGDFSNFESPDKILAYAGCSPSTYQSGKLTNCYAHMEKRGSRYLRHALYNATKYVCYWNPVFAEYLAKKRAEGKHYNVALSHAMKKLVRLIYALQKSGKAYLAAA

SEQ ID NO: 481876 - protein, 401 aa, unidentified
MKTVLSVDVAKNKSMIMLMNSEGEIFIDTKEINHNLEDFEKVKEEIKEINPQNLTVFMESTGTYHLPVERYFKENGFNTLVINSLTTKNNYDTIRKTKTDKKDCYRLAKLFFVNEVEYHDLSKKDLYANLKAMTRQYFYLLQNNVSCKNRYKRLINICFPELEKIFKSTRIYDDTALNFIKEFPHAEIVKEKRIDALYNNLYKTNGRNLNFYKKLATTIKTASINSYPGVDKEHEDVKNLSYMAKIVQNNNNIINELREKMIETAKQSPYYKIINSFYGIGDTLTAKILGELGDITRFDSPKEIIAFCGLDPTIKQSGKSINVKGAISKRGNKYARYILFNCSQMVVKLGASNYPEHPVYIYYQNKKAEGKHYYESLTACSTKILRMLYSMCKNNKQFLEN

SEQ ID NO: 481877 - protein, 412 aa, unidentified
MRIVGLDVSRSVAEIAYLEDGVLHAGGRAGLRRDELERFAASLRSTDHVVLEATGNTAAIVNVLRPHVARVAIANPLLVRLIAEARVKTDKIDAAVLAQLYASHFLPEVWMPDESTLALRRQVSRRSQLVRQRTRLKNEVHAVLAAHLIERCPATDLFGRKGRVWLKAQPLPMDERLGVEQRLRELDRLGEDLHEVDKALAQASIGDERLRSLLTITGVNTTVAIGLLSAIGAVERFPNPEKLVSYFGLNPSVYQSGPTPARHGHITKRGRSYARALLVEAAWGAAQAPGPLRAFFLRVRDHRGQQVAIVATARKLAVIVWYVLTRNEPFAWDRPALTAHKLRALELQSGMPAQHGSRKGTAAAYSLKSVRDQERAVAEQAERTYQRLFSRWKQARPKGHEAPLLWPGAGTS

SEQ ID NO: 481878 - protein, 461 aa, unidentified
MPDGGGENSSPRRTKQIEGLPVIRRNVAGIDLGSERHWVCAPVAGSISREVADFGATTPELIRMTKWLQACGVESVAMESTGVYWIAPHEVLEAAGLEVLLVDTRQLARVPGRDKKTDPSDCEWIQRLHSCGLLRGSFRPREEVCMLRTLVRDKANLVAECSDWLRRMQKSLDQMNVRVHRAVSHMDGITGMAILRAIAEGERDARKLAKLRDTRCHKSEEEIAEQLSGHWREDHLFSLRQSLKMYDAIQQRLADYDREILQRLAAMQREEFRQQPPPPVKNPHKAKNMKKRGEEPMREALFRMSGVDLTGIDAIGVETVQVVLSEYGPDLSRFPTEKQFVSHVTLIPHKPMSGGKPVRKKRRSSASTRVAAALRMAALSLRNSATALGAYYRKIARRLNGDVAVFATARKLATLIYRLLRWGQPYVDEGAEAFERRYQETRLKNLKAKAKDLGYQLVASN

SEQ ID NO: 481879 - protein, 341 aa, unidentified
MDQVTTIGLDIAKHVFQVHGADAAGHVLFRKRIGRPRLIAFLATQPPCIVAMEACAGAHHWAREIAKLGHEVRLIPPAYVRPFVKRQKNDAADAEAICEAAQRPSMRFVPVKSEEQQANGIVFRARDLLVRQRTQCVNALRGHLFEYGYIFPQGINHVADLVTVVEDRQSCLPESMRSILQLLVDTFTALEAQITALDTEINRRSKADPMARRLMTIPGVGPIVSTAITALVPAAQGFRAGRDFAAWLGLTPVQKSTGGKQKLGAVSKRGERTIRRLLIIGASAVVRHARRGRVPEGSWLAQMLARKPKMLVIVALANKIARIVWALLVKGGVYRAPVSAA

SEQ ID NO: 481880 - protein, 406 aa, unidentified
MEVLHARCCGIDVHKETLVACLRVQDGRRARKEVQTFGTTSAEVLRLQTWLTNAACTHVAMESTGVYWQPVFTVLEATVTVVLANAHHIKAVPGRKTDVRDCEWLADLLAHGLIRSSFIPPADIRTLRDLTRHRKRLIRDRVTTTNRIHKLLETAHLKLASVISDILGVTGRAILRALAAGETDPARLAALGRARLARKADVLTEALRGRFTPHHAFLLSQLLAQLDQLTTLIDACDAEVARVSHPMAAHLERLQTIVGVGTRSAQVIISEIGTDMARFASSAHLASWARLCPGTHQSAGKRRPTGTGPGNNWLRTTLLESAWAASHSRASYLQAQYRRIAKRRGPKRAAIAVAHTILVIAFHILRDQVPFRDLGADYFDRLDVGRQKQYHLRRLAALGCDVSRVA

SEQ ID NO: 481881 - protein, 316 aa, unidentified
MISYFVGLDVSKATLDVGFLPESIPQFQVRNDSEGFAQLIACLNELEVERVLLEATGGYERAVFKALRLEGLNVVRVNPRRCRDYASAMGKIAKTDKIDAQMLARFARDFEDLPQIEPNQDRDELGELIKLRGNLVQHRDDDKRRMKQTTSATAITVYTEHVAYLNDQIKALDKAIERASNVLDRTTAMRLRSVKGIGVISCGTFMAYLPELGSVTGREIAALAGLAPYNKDSGKKSGPRKIEGGRYRVRKAAYMSIWSMIQHVPEVRTRYEALIARGKRAKVAAVACMRVLLVRLNAMLRDGTEWKELKPQVPAP

SEQ ID NO: 481882 - protein, 350 aa, unidentified
MLIIGCDFHSRFQQIAMLDPQTGEVIERRLEHENGEARKFYAALTTPAGVGMEATGYAQWFERMLAEQGHQLWVGDAAEIRAAMVRKQKSDSRDACHILDLLLRDKFPRIWIPSTEERDVRQLLRHRYKLVCLRTSLKNQLHAMAMGQGICRKKKLWTAVGRKELQGLSLGPWASRRRQHLLNLLDQLEPVLDELDRAVIQEVEKRPAAVRLMTQPGVGPVTALAFVLTIGPVSRFQRSKQVVSYLGFNPREESSGGRQRLGSISKQGNSMVRFLLVEAAQTASIYDPELRRDYQRLKFRRGRGVAKVAIARKLAVRLYWKLREAAQPVPPAPMQGSPAHSVVGESLSSF

SEQ ID NO: 481883 - protein, 445 aa, unidentified
MHCKRLLTFIDGISSYLSVGLDVGADFTWMSIALPNGSFVGKPFKIIHSDPRSRELAVTKIKEAQETYSLKSRCFLESTGIYHIPLLCFLRDKGFDCSVINPIITKNSTNINIRKLHNDKFDSKKAALVGLNVSLKTSILPDDSVVDLRNLVRDYYYFKDLQSAVALKLTAELKVSFPAYAKVFSKVTTQSSLKLLSSYPLPADMLAASKEDIVDIIRSTARFGEAYALRKYDAIIAAAQDASVFGRVLPSNAVRIRLYIDTYQEYQKHLDALLKALHETVEKLQDTLIYDQICLLQSLRGIRFLSAVVLIAEMGDFKLFSSPKKLYAYFGLDPAVKQSGKLNGDKVHMSKRGSSLARRVLHMAALNNVKVDKGSGTPVNPVIYDYYTRKCSGKKKPVAMGAVMHKICNIIFAMLRDNKPFEIITPEEHCRRFAIEHPDKIRKAA

SEQ ID NO: 481884 - protein, 371 aa, unidentified
MEKYYLKLFTISNNQDGFNVLYQRIESVMEDVTKVKVGLEATGHYNYNLLGYLIDKGLTTYVINPLHTTLYRKSLSLRLTKTDKVDARTIAYMLMSDVNLKSYSDTSYHNEELKSLTRYRFNKVKERAKLKTSVSRLVCILFPELEKLVPTLHMASVYALLSEFPGAKHVAGAHLTRLTNLLSDASKGRYGKDTAITFREAARASIGSNMPAKSLELKHTIKLILELGSEIEEIENEIKIIIDEINSPILSIPGINYRMGAMIIAEIGDFSRFDSPDKILAYAGFSPSTYQSGQLDSAYSHMEKRGSKYLRYALYNAAKYVCHWDVTFAEYLAKKRAEGKHYNVAISHAVKKLVRVIYHLVKSNQQYIKVA

SEQ ID NO: 481885 - protein, 316 aa, unidentified
MIDGILGIDVCKNTLDVSISSHTKVRTKSFTNSPDGWRHLLDWLIAQKIQRVHACLESTGRYSLGIACALYEADHVVSIINPAQIRDFVRTKLGRNKTDGVDASHIREYCELFKPSPWAPPSEAHRRLGELQTIRSGIVAGLTEWKNRKNSGIVDGEAQALADATISHFTSQLGAVDKAIALTIDNDCDLQSKRDLLLSISGVGETLAGVVLAELPGPDVLRSSAEVVAYAGLNPRQHQSGTSIDRATRISKIGNAVLRAALYMPALSAMRYNSAIVALVARLNSRGGSGGAYGRLRARARLPRCRCCCRRLAGCR

SEQ ID NO: 481886 - protein, 336 aa, unidentified
MEYKVFVGIDISKGTIDVALRSKTLKEPIHEQFENNVAGFKRMLTWIKKQTGVSGTELFFCMEHTGVYVLPLACFLTEKLLPFRLENPYHLKHSMGIQRGKNDKADAKMIARYAYMHHEELMLTAFSGTILIKLQNLLSHRERLVKSRKMYTVAPKELSEFSGKEVSAFISEESKEIVELLDSKIKKAESEIESLIAQDEPLKKNFELARSVKGVGLVIASYMLVYTQNFTTISEARCFASYSGVAPFGERSGTSINKSPHVSHLANKRMKSLLNNGAWVAVKYDKELKTYYNRKIEEGKHELVVINAVRNKLLGRIFATVKRGTPYVELLQHCKN

SEQ ID NO: 481887 - protein, 382 aa, unidentified
MQRVARKQTRFVGLDVHAQTIAVAVATKDGDVHAMGSISNRPESIKRLVMKLDAGGAWTACYEAGPTGYALYWQLTRLGKSCEVIAPTLVPTKAGDRVKTDRRDAERLARSYRAGELTAVWVPDAAHEALRDLVRAREAAKQDQLRARHRLGKFLLRHGKRPPQNMRAWTQQYLEWIKREVQFEQCPQQATLEDYVNEVEHCALRIVRLEKTIDTAVEQAPESMREVIEALQALRGVAKVTAVTVVAEVGTLSRFAHARQLMGYCGAVASEYSSGEKTRRGGITKTGNAHLRRVIVEAAWSQRYKPLISRAARIRQEGLSAEVQEIAAKARQRLHSRYVRLLGRGKSKQQVVTAVAREMLGFIWAIGVSVERSRGQSVAGAA

SEQ ID NO: 481888 - protein, 313 aa, unidentified
MIISLRCVGIDVSKHHLDVFDETIGAPERIANVPHAITELVARWRCDAFVVFEATGVYDRELREALHRAGIRFSRINPARARDFARASGQLAKTDPIDACMLAAFARAMRPATEQVSTAARNALARLAKRRDQLVLMRAQEKNRRSEVDDCAMAERISRLIEVLDHEIAGIEAEISVLIKAEPELSEDAQLMRSLPGVGPVTCTQLITQMPELGHVGPKQAAALAGLAPFNVDSGAHRGKRKIGGGRKRVRDALYMAALNAVRRAHPFKAFYAKLRQAGKPAKLALIAVARKLLTILNAMLRDRKAYTITQAT

SEQ ID NO: 481889 - protein, 418 aa, unidentified
MSRTLAKKLAKIEPGTLYVGVDLALDRNVAVVLDEGAKQLARFAFPHSRDGYDYFYRRLEAVRARQQAPAVLVGMEPTNYFWKLLAADLEVHGIEYRLVNPYTVKKNREGGQLDRSKDDQRDAFTIGDLLRTGKFTETRLLHGRYAELRQYVTLYERLRHDVRRQKTLIRNTAGQLFPELSSVYKDFTGGTALAMLRRHAAAVSIQALSQEAFFAGVRADFQGKRLQVAKLRRAHALAVTSVGLKDGTQALQLALRLHIEALETLECQLEQVCTALIDTFLALPEAPYLLSVHGLGLISAAIILAEIGDPSHYSRGCQLVKLAGTQPVTNISGRKTRSRTPMSHKGRPRLRTVLFFAVMRLVQVDDAFARQYQQLQTREKNPLVKMQALGALMNKLLRILWALMRDRTFYNPDFQATA

SEQ ID NO: 481890 - protein, 350 aa, unidentified
MMIIGCDFHPRFQQIAFVDRETGEYGERRLNHPEEAEQFYRSLVGRPVRIGVEATGNFRWFRHLMEELGHEFLLGDATAIRAACPRRQKTDKRDARHILNLLVEDRFPVIWQPSAENDEMRQLLLHRCRLVRMRTRVQNQLDSVAKNEGLLSSRVWSAKRRSQIEALPLPGWYGHRRADLLGLLEELNKRIKPLDEAVCKAAEGNPEACLLMTHPGVGPIVSLAYVLTIGDWKRFPRGKQVGSYLGLIPTEESSGNMRRLGQVSKQGSVLVRWLLVEAAVHAQRHDPSWHRQYVRLSINKHHGVAKVAIAHKLAVRLYWMLRSGDDYSKVMERSSHAGSPCSAVASGPRG

SEQ ID NO: 481891 - protein, 420 aa, unidentified
MSPLSDQPFTAYVGIDWADLKHDICLQAAGGTRREFDCIAHQVAHIDEWANRLYRRFGGPIAVALELASGPIVAALQKYDFFVLFPINPLTLARYREAFQPSGAKDDPTDAELALDLLLRHPERFSRLRPQSAGMRSLMSLVVQRRQLVGDKTRFANRLCDTLKQYYPQALEWFDDRDTVLFCDFLARWPTLAAVRHASRKTLETFFHAHNCRRARLIGTRLESIHAATPLTEDPGIVAPCRLHVLALVEQLRTVLTAIGRFDREIAALACTLPDYALFHSLPGAGPQLAPRLLAAFGEQRDRFHGADEVQKYSGIAPVTQRSGKKSWVHWRWQCPKFLRQTFVEWAAQTINKSFWAGAYYRQQRAKGSSHQVAVRALAFKWIRIVYRCWQTRTPYDETTYLNALRKRGSPLLENVGLPG

SEQ ID NO: 481892 - protein, 338 aa, unidentified
MGEVSTIGLDLGKNVFQIHGVDAAGRVVVRRQLRRGEVLGFFARLRPCLVGMEACATAHHWGRELIRLGHAVRLMPPAYVKPYVKRGKTDAADAEAIAEAVTRPTMRFVAVKSMDQQSVLMLHKVRDLLVRQRTMLINALRGHLAEFGVVTARGPAGAKAAIAELHGMQDSLPPLARMALHGLIDRLGAVGLEIRKVEKEIVAWCCHDDASRRLMTIPGIGPIIASAIAATVPDASLFRSGRQFAAWLGLTPRANSSGGKERLGRISKQGDGYIRRLLVTGATAVIRLARQGNPSKVWAARLLQRKPARLVSVALANKTARIAWAVLARNQSYVAPAM

SEQ ID NO: 481893 - protein, 349 aa, unidentified
MTSMTDRITGGVDTHLDVHVAAALNERGGLLGTHSFPATSSGYRRLLRWLQSFGVVELVGVEGTGSYGAGLTRHLLSHGVRVVEVDRPNRQNRRRRGKSDTVDAVAAARAAQSGDATGAAKTRDGNVEMMRVLRLVKLSARRGRTVALNQMRAIIATGPEELRDRFRDVSAVTLVAEAAGLRPNGRNDVVGATKIALRHLARRAQSFQAEIDDINTILEPLVAATAPELLACEGVGTDVASALLVAAGDNPQRLRSERTFAKLCGVAPMDASSGKQQRHRLSRAGDRQANSALWRIVMTRIVYDPRTKTYIERRMKEGLTKREAMRCLKRYIAREIYTNLPRQSLVDSP

SEQ ID NO: 481894 - protein, 344 aa, unidentified
MTYYAALDVGLRAVALCIVDDTGAVRLEKSLPSEVSDIVACLCGFGEEIACVGLEAGSLTQWLTYGLRAAGFKPVVLEARHVQAALAAMRNKTDRNDARGIAQILRTGWYRPVHVKSLESHYTRTLLAARKALLRKCIDLENEVRGLLKVFGIKLMPGLRHGAFDQVVREPIQANAELRHALAPLLDVRLELHKAFLEMDRRVKTLAHSDQICRLLMTAPGVGYIAALTFKAAVDDPSRFKRSKTVAAHFGLTPRRYQSGDRDNPGHISKAGDTEVRSALYAAANIIMTRSSKTSALKAWGHRLARSKGRKRALVAVARKLAVILHTMWIDGTEFCMKPQEAAA

SEQ ID NO: 481895 - protein, 400 aa, unidentified
MSERRARVWAGIDAGKGHHWAAAVDETGATLWSKKVDNDESAILTAMGEILDLADKVHWAVDISGTSSALLLALLAAHGQQAVYVPGGTVNRMSGAHRGEAKTDARDAYVIAETARTRRDFAAIDVPAQLAADLALLTAHRSDLVADRVRMINRLRDTLTGVFPALERAFDYSSQKGALVLLTGYQTPAAIRRRGRARLTAWLANRSVRGADAVAATALEAAQAQQTALPGEDVAAQIVADLAEQILALDDRLKRIDQQIRETFRSHPQAEIIESLPGMGPILGAEFVVAAGDLTAYADAGHLASAAGLVPVPRDSGRRTGNMHRPKRYSRRLRRVFYMSAQTGMMREGPNRDFYLKKRGEGCKHVQAVIALARRRASVLWALLRDNRVVTPEPPVAQAA

SEQ ID NO: 481896 - protein, 487 aa, unidentified
MGRYPLGETGCMSVKKAAPCQEESMEKDLISVVFERCCGLDIHKKMIVACLLLRGANGHLKKETRTFSTMTTGLLELLDWLKGARCTHVAMESTGVFWKPIYNVLEGEMEVLLVNAQHIKAVPGRKTDVKDAEWIASLLQHGLLNASFIPPRPQRELRELTRTRKTLIEERARIVNRMQKVLEDANIKLSSVVTDITGKTARQILHAMLEGEQDQETLAGMARGKLRSKQPQLAQAVQGTLRAHHRFVLSQHLAHLDFLSQQIEAFDQQIAEQLGLGNGPEDPEPSPSSKQAAKAASQDVQSEEIVEEEEGQTRLLGEHRQDLRRAIERLDAITGISLRTAEVVVAEIGIQMERFPTEEQLASWAGLCPGNKVSAGKRLSGKTTKGNRWLRTALIEAAQGAASSKGTFLGAYYRRLCQRMGRKKAIVAVAHRILLIIYHVLKEDEPFRELGEQYASEKERETTKRRALRRLEQLGYQVQLQQAAETA

SEQ ID NO: 481897 - protein, 390 aa, unidentified
MSQSFDASRSLTAFEQDSTLVAVIEMSQSKWLVAAVVPGIARQPLKKLDADAGALLKLLQRWREEARKAGREVKRIVCAYEAGRDGFWLVRWLQARTIEAYVIHAASIAVSREHRRAKTDRIDTELLMRSFLGWLRGEKRHCSMVAIPTMAEEDARRPSRERESLVGEQTRIVNRVKAVLALFGIGGFNPRLRKAMQKLETLHTAEGTPLPENTHAELRHDMERLRLVHDQICTIESERLRRLAQAPAAATGPHAMVRLIARVLGIGIETADMLVNEVLTRNLRDRRAVARYAGLTGAPDESGKRRREKGLARAGNGRVRRGMIQLAWRFLIFQKDSRLVQWFRERTADGRRTTRKTMIVALARKLLIALWRLVTTGEMTEGIKLRPAAT

SEQ ID NO: 481898 - protein, 346 aa, unidentified
MTIVGCDFHPSWQQVAVFDTETGEIRELKLENGNGEAERFYCELSSPALIGFEACGNTQWFEDLLDRLGHEVWMGDAAAIRASYVRKQKTDRRDAAHILKLLIEKRFPRLWRPSAEERDLRQLLIHRHKLVGIRARVKNGLQHLMLNRGVQMKRKLWSEAGQKALRALPLEGWAAQRRQDLLNLLSGLDPQIRQLEEAIKRAAQENPRARLLMTQPGVGAITALAYVLTMGDVNRFKRGKQVASYLGLIPSECSSSKRRRLGSISKQGNSFMRMLLVESAQTVNRLDEGFRKQYQHRCHRMAKGVAKVAAARRLAVRLFWMLRTNTAYPEIAHIESSPRDGVVGES

SEQ ID NO: 481899 - protein, 366 aa, unidentified
MKKNSTVAKNRNEIFKQPKRTIGLDLGDRSSYYCMLDQAGNVVLEDHLPTTAKGMQHVFRKIPRSRIALETGTHSPWVSRQLTELGHEVIVAHARNVRLIGESSRKDDQLDARTLARLARIDPGLLGPVRHRSAQAQIHLTVIRARAALVATRTALVNAARGLTKSYGQRLRKCGSGQVNREIAKGLSQELRDALDPLLAEIESLNERIAEYDRRIEQIATQVHPEVARLKQVKGVGTLIALTYVLTLDDPHRFRRSRDAGCFLGLRPGRRNSGQSEPQLHISKEGDRYLRTLMVQGAHYILGPFGQDSDLRRWGLKLAERGGKNAKKRAVVAVARKLAVLLHKLWVSGEVYEPLRNNHKVVSAVA

SEQ ID NO: 481900 - protein, 334 aa, unidentified
MNRMTHLLDSSSSAADGLYVGIDVAKQKLDLARSDSKDVEQFDNSKAGIARIVKMMIDAKPIVIVIESTGGLERPLLEALLEAGLPAALVHPGRVRNLARALGILAKTDRIDAHVLVLFGQKAGPRITERASKNRSELSDLVTCRRQLGVTMVQQSNRLHSTFSTSARKSIGVVITALEKQIEKLDRQIHGLIDADDDFRDLHRLLREVPGVGPTLAATLIADVPELGKTQRQQVSAVVGVAPVPDDSGTIHGQRSISGGRANVRGVLYMATLAAMRFNPVIKIFAQRLKAKGKRNKVVIVACMRKLLTLLNAMARNRLSWKELSVVKNLATNP

SEQ ID NO: 481901 - protein, 352 aa, unidentified
MTVTTLPRCITGGVDTHLDVHVAAALDERGALLGVQSFPTTESGYKKLLGWLNDFGPVELVGIEGTGSYGAGLTRHLQAERVRVVEVDRPNRQRRRRKGKSDPQDAVSAARAALSGDAAGEAKTRDGNVESMRVLRVARFSARKGRTQALNQMRALISTAPEPIRAELRGLNVFHLLERASTYRPGAKRDVISLTKYSLRMLARRAITLEEEISEIDAIIKPLVKETAPALVSTLGVGTDAASALLVTAGDNPERLRSEAAFAHLCGASPLDASSGKNERHRLNRSGDRQANSALWHIVITRMVYDPRTSEYLARRRTEGLTKKEAVRCLKRYVAREVFSLLPHDKLGLDSP

SEQ ID NO: 481902 - protein, 334 aa, unidentified
MEQITTVGIDLAKNVFSLHGVDGAGRTVLRRTVRRDRLVQTVAVLSPCVIGMEACSGAHEWGRRFQQHGHQVRLMAPKFVVPYRKSGKNDGNDAEAICEAVSRPNMRFVPVKSVEQQALLAMHRVRQGFVVERTAVINRLRGLMTEFGVVLPLRSVTVRRQAAQAAEALPELARVAIGDLLEQLRLLDERIQAYDDRIHAQAKLSEAARRLMQIRGIGATTALAIVASVGNAREFKNGRQFAAWIGLVPGQYSTGGKTRLGHISKRGDAYLRNLLVQGARSVLQTASQHSDRLSRWALELQARRGYYRTLVAIANKNARIAWALLARDQTLKQS

SEQ ID NO: 481903 - protein, 483 aa, unidentified
MNDAKLYVGIDLARRASHKAVALKGEEAASPQAARSKPVSFSHDREGFLALRDRLLEQAGATTLDGVTVNLEPTSGVWETVAGFLRAQGADVFFTRTDVVSALRKVHSKFAKTDRIDARTLAGIPRSFPERLVPVVEVEERIGTLRQLSAQRQRLVEDQTAWKNRLVAKLETAWGPLMCSLNKEQRFSQLACAFFNRFARPAQVVALGRERFLAWCKTQAHAHTHPDTFETFWQGAVESAALWTLLDEHKAIAVNWDVLHELVRQDLRMIAVFDKEIQKADAHIRQARKSVFECNVVQQLPGVGKVVSVTLAATLLPVTRFANTKKCGAYTGFTSRKKSSAGHEIEGLKITKTGNRRLKRDLALAADVAMHQDPQLAAFAIRLLRAGKHYNKVRVAVGRKLAVCAFSLLKRYAAGQTHVAYLWRDLQGRPLAKRQAQELARSLWEAYEAQQKNKGSSPIPALPWSSEDSTTQTLDELPGGNHV

SEQ ID NO: 481904 - protein, 353 aa, unidentified
MTIVANTTAYVIGVDTHARTHTLAVLDGGTGARGPSATFPTTPAGLSRSVTWIGRSTGGDADVLVVIEGIGSYGAGLARRCQEANYRTVEPFPTPRALRRGRGKSDDLDAELIARSVLHVDAAEPREPRGDSGPRAALRVLVAARDLINTERTRMINALTALLRTVDLGIDARRSLQRRQITTVAGWRRRDEDLSTAVARKEAIRLARRILGCDVELAENVAELAAMVAASDGSALLTEPGIGPVNAAVLLTAWSHPGRVRSEAAFAALAGVSPVPASSGNTQRHRLNRGGDRRLNRALASIALTRMSHHPATRDYVARRRAEGRTTKEIRRCLKRYIARQVYRRLATIPVGA

SEQ ID NO: 481905 - protein, 347 aa, unidentified
MDTIGLDLHKRESQLCVLAPDGTAKEQRILTTRERFTAVLGPLAPATVLLEASTESEWVARHLETLGLTVIVADPNYAPMYATRARRVKTDRRDARTLAEACRLGAYRRAHRLSDARRHVRAELAVREALVRTRTRYIAIAKSFVRRDGLRVAGSESERVAERIAALELSPTLAAELAPLFALLAPLNAEIAAADARIAQLTAADPVVALLTTAPGIGPITASALVATIDDITRFRSAHEFEAYLGVVPGERSSGEKRRVGRITKAGNARVRWLLVEAGWRIVRSRSEETAALRAWAVGIAVRRGKRVAVVALARRLAGILYAMWREGVAYDGRKVRAPRPRAVPAA

SEQ ID NO: 481906 - protein, 450 aa, unidentified
MRASFVLGIDHGKSFFAATLMHMSGERVWKEKKVDMSRDGFDGLRSSLPDGDLTVGIEASGRIDDNLLAWFGRWKSCCRDRKIKVIRVNPGQSARFGGPKPRRDQTDGSDSDHVGEFTRVYANRLEAFEHDPQAQAMTRLINERQHLVEELVATKNRIHEQLLICFPEFTQMFVDPFAKLARAVLRQVPTARHVAKRRPLSLARVKTGRKERSLGVEQAQKLIQLAKRSIGSAGEDNDAAAMIFLLDQLDLLEKRLADIEETLAAYAAQAKHEAGPAGEHGVSAARQIELLDSIPGIATIAASTLVLGTRGLARFDSGSALSAQWASCPERSQTGTSLDKTRLTARGDHKRRAMLYLATQIACVYDPAFAFHKWRMIQRGHCPQQAVCAAMNRMARVAWTLVSKNQAYDVNLMIAQIQIHHAELWKTFVRLHQNNGTLWKKVELKYKKIA

SEQ ID NO: 481907 - protein, 339 aa, unidentified
METFVGVDLHKKVSQLAALREPKPASQLRFPNNTVTVEKVLKKLPQGSKIALEATGSWWWFVELAQKTGHEVVMSHPKQTKAIASARLKSDKVDALMLAKLLKADLLPTVWIPPATQRYVRELLTHRARLVRQRTAVINEVHALYAKRNIDPGMIFHRVRPPAFMAKELSGYGPRIVEEDAELLAFFNRQLPGLDNELQKIAEEDVESKRLMTIPGVGPLSAVAVNCWIGTIERFSKAKKLSSYFGLAPKVRQSGDRERHGHITKEGNRMVRSLLIQAALWHIRLGKGASRKHYLGVLKRRGKQIARVAAANKLLGIMFHMMKGRIDYQEFLRRGSSAQ

SEQ ID NO: 481908 - protein, 353 aa, unidentified
MSKVKYVGMDVHKSITVIAVLNELGQFESRSQVKTNAENICDLFRGMSGKVEVVFEEGTHSAWLHKLLTPLVESVTVCDPRHNKLIEDGNKSDDEDAVTLAQLLRLGAVKTVYKGDEQQQQLKEICRTYDNLVEDSTRVQNRLKAIYRGRGISCSGHALYRADQRSDWLAKLGEDAARFRAQSLLEQLESLSQLRKQAKQRLLAQARAHADYRILIELPGFGPVRVAQLIAAVGTPHRFRTKRQFWPYCGYAVVTRSSADYQIVEGKIVKQRKNVSTRGLNRNHNPQLKQVFNGAALTALRHEAIKAYYQRLIDHGTRPELARLSVARKLSSIALTIWQRREEFDAKKAFAQD

SEQ ID NO: 481909 - protein, 390 aa, unidentified
MIYVGIDVAKDKHDCCILDAEGRKIYPVFTISNDKVGFDELFSRIEKVTSDKTEIKVGLEATGHYSNNLLVSLVDKGFPTVVINPLHTNLYRKGLSLRKTKTDKVDASAIAMMLMTDRTLKPYSEISYHNEELKSLTRYRFDKVHERSKLKSSLSRLVNILFPELEKLVSSLHMNSVYALLEELPGATYIAGCHLTHLKNLLDDASRGRYGRDKALEIRNAAVNSIGSPMAAKSMELVHTIRLIRMLSEEIEEIEESIKSIMDNLDSPIMTIPGISYRMGAMILAEVGDFRRFDNADKILAYAGLSPTTYQSGQLDSSHSHMEKRGSRYLRYALFNAAKFVCKWDESFASYLGRKISEGKHYNIAVSHATKKLIRTIYRMELTGEAYSLR

SEQ ID NO: 481910 - protein, 405 aa, unidentified
MTDIEQHDSVQVFVGVDVGKGVHHAVALDRKGKRLLDSALPNDETKLRALLGKLKEHGRVLLVVDQPATVGALPVAVARDEGVLVAYLPGLAMRRIADLHAGEAKTDARDAYIIAEAARSLPHTLRSLKLADSQVAELTMLCGFDEDLAGQITQVSNRIRGLLTQIHPALERVVGPHLDHPAMLDLLERYPSPAQLAAASQKQLTNRLTKLAPRMGKTWAAEIVQALTEQTVVVLGTQAASIVLPRLAQQLATLRIQRDEVAKEVERLVLAHPLHRVLTSMPGVGVRTAARLLIDVASRAFASAAHLAAYAGLAPVTRRSGSSIRGELPSRRGNKQLKRAMFLSAFAALRDPVSRAYYSRKISQGKRHNQALIALARRRCDVLFAMLRDGTFYCPPAHTKPLTTT

SEQ ID NO: 481911 - protein, 632 aa, unidentified
MPWTGQPIRMADGEFMIENYDSVDVFIGVDVGKSEHHAVALDRTGKRLYDKALPNDEARLRAVIQKLKLRGQVLLVVDQPETVGALPVAVAYAEGILVGYLPGLAMRRIADLHAGEAKTDARDAAIIAEAARTLPHALRPIRLEDEQVAELSMLCGFDDDIVGQMTATSNRIRGLLMQIHPALERVLGPHLDHPAVLDLLQKYPTPTALKIAGKVRVGNRLLKLAPRMGRRLAEEIFQALSEQTVIVGGTHATRAVLPRLAEQLGTLHRQRAEIAVEVAELVDANPLEPIITSMPGVGVRTAARVITEISGKEFATAAHLASYAGLAPVTRRSGSSIRGEHPSRRGNKVLKRTLFLSAFAALSDPVSRAYYDRKIDLLRHGESTANAAGLFTGVLDAPLSEQGIREAQAATALLNLALAGELLPGPGAGADPPPVTLFTSTLARARQTAAIVAAGLAIPPVHCDADWRLNERNYGALTGRSKNDVRAEFGEEQFVAWRRSVDAAPPPMSDALHDEFARSALFRGLPPAALTRTEALSEVIERVGAVLEERVDPLLARGQTVLVIAHGNSLRALCAVLDGLDDQQIRDLNLPTGHPLVYRFDSADRPNPAGGRYLDAVTALAAAVRLASEGGT

SEQ ID NO: 481912 - protein, 331 aa, unidentified
MEHCAIDLGGRESQVCVRRGDGHLLYEGRWPTASLPDYLRQLPPSRVILETAAEAFRIADAAKSAGHEVRVVPATLVRTLGVGARKTKTDKRDARTLSEVSCRIDLPSVHIPSARSREWKTICGMHDTLVSSRSKLINNLRGWLRGQGLRLTRGTAETFAQRITRLQPLPEHVTSQVEALAALTSNVRQSDRRIEQIAQSDEVCRRLMTVPGIGPSTAVRFVAAIDDVSRFESADKVAAYFGLTPGENSSSEHQQRLGITKAGPASVRWVLIQAAWVLQRRCRGSAARPLQLWAAEIAKRRGPQIATVALARKLTAISYALWRDGTTYQPR

SEQ ID NO: 481913 - protein, 351 aa, unidentified
MVIIGCDYHPSMQQIAWCDNRSGAQGERRLEHASGEAEKFYRELKQRGVQVRVGLEASGHTRWFERLLAELEMELWIGHPAKIAAQRVRKQKTDRGDAQLLLQLLQEDRFPRLWIPSPENRDLRQLLWHRHRLVQMRTRVKNQLQSIAMNEGVRRQSRLWSKPGRAQLESFVLAPWTARRRHDLLQLLDQLNPQIAELSRAIEQEAERRPEVLRLMTHPGVGPITALAFVLVLGTPQRFRCGKQVGSYLGLIPCEDSSAGKQRLGHLSKQGNTLLRYLLVEAAQAAVRCDAQWRRRFVHLAMRRQRNIAIAAMARRLAVSLYWLWRKAEDPPAAPSSGSHAGPLDLPHGVG

SEQ ID NO: 481914 - protein, 399 aa, unidentified
MEQIRVGIDVGSGEHCVGIASADGEILDEFRIAHTRAGFEEFFDRVGGWSSRLGCSVAVAMEGYNGHARPLDREILRRGWRLYNVNNLKLARYKEIFPGPAKTDRLDVVKILELFRLRETLPMAKDVLQEVLEVPCVNERLKRLTRRRRQLVEEKVRVVNRLHSDLQAVCPGLVGITGRVDNLWFLRFLVSRRDLRQLARMRRSSLLKIEGVGRRYAEAIVRWQAEAEFSGEVEYVGPMIISDARRVLGLLEEISGLEVQIVELSRESEIASLLRTIPGFGRITSAELAGEIGVLERFEREGSLALYLGMCPVSHESGRYRGSRSPRQVNWRAKLAMMTAVARHLEQVAESRAYYERKRSEGKRHNQAVRSLGRHLVRVIWAMLRDRRHYWLREEVCSS

SEQ ID NO: 481915 - protein, 387 aa, unidentified
MIKTRGRVIGLDVHPDSFAGAVVEGTDPAQARVLSSSTRVELEQLEQWALRHTSTEDRLVLEASGNAFAVATRLRTIGRKVEILDSHRAGKVGKVYCANDRVDAVKIARIYLSALSPIVWQPDAKTLERREIFSAYQAVVKESTRAKQQLRSMLNEHCVRLEKGFRLCHPNAIRRLVALREWTAARTMLLQQLHGTLVAARARRTLLRRHMAQEIVAEEALLRLTRLCGINLITLYGVVAAVGDVRRFSHSKKLVAYLGLNPSVSQSGNFEGSGALKRHGRGALRALLIQSAKKLLEVNNPLQKWGLAVAARRGRNKAAVAVARKLCVALWHVLMGHTIGVLERLDTLETKLSKFATEMGPAALRAFGYHNKAEFVEKKLYVLRSYP

SEQ ID NO: 481916 - protein, 439 aa, unidentified
MKMETTFEVVNPHSAGVDMGAGDIFVSTDGKAVKIYETFTSDYHQCIAYLKEQKIERVAMEATGVYWIAFYELLEQNGFEVCLVNPKETKQVKGRKSDVSDCQWIQKLFAAGLLRQSYIPSGRLKELRMLMREREDIIDMGSAYVNKMQKALELMNIKLTNVISQIHGVSGIKMIEAILAGERDAEVLLELCDKRIIKNKSDEIKKALEGNYNPSWLFLLAQNLKMWKIHETQVLCIDKKIDEVLKDLNRGRDKIKHSGKEKPIRHHKPEIEDLQQKLVNLYGTDVSSISGLTNYSLLKLVGETGIDLKQFPTAKHFVSWCQLSPRNSKSGKMNRKVRTKNKSKAGQIFREAAQSLMQSKNIAIGAFMRKVRSKKGGIVAVKAGARKIAVAYFNMITKGIEYVEEGVRNYEARIKQRELKLLTLLANKHQFKLVDYQAV

SEQ ID NO: 481917 - protein, 343 aa, unidentified
MVISRIGLDLAKNVFQVHGVDEHGKTVLRKTLRRSDVSRFFANLPPCIVGMEACSGAHYWAREVAGFGHDARLISPQFVKPYVKSNKSDRNDAEAICEATGRPSMRFVPIKSSEQLTIQATHRIRSRLVGSRTALVNQIRGILAEFGVVVARNITALRRRLPEILDSEAGSLDAMTRSLIIDLREELADIDKRISAYDRRIKQLCSLNEACQRLCRIEGIGPVTATALVAAAGNAQVFKNGRQFAAWLGLVPRQHSSGGRVRLLGISKRGDRYLRTLLIHGARSALVRCGRKRDARSLWLQKLRERRHPNVAAVALANKNARIAWVLLRRGEVYDQQLGVATA

SEQ ID NO: 481918 - protein, 339 aa, unidentified
MKLYTGLDLHSSNTYLGIIDETGKRVYKQKLPNDHERILAALNPYKNDIADVAVESTYNWYWLVDLLMGEGYHVHLANPAAIKKYTGLKFADDQHDAFWLAEMLRLGILPEGYIYPKEDRPVRDLLRKRMHLVRLRTSLIVSLQNILSRNNGFKLKTSDVKALTEDRVAPYLAGSEDLALAGLVSKESIDFLTRQIKKIEAVIENKVELKPPYEKLQSVFGIGKILALTIMLETGPISRFAKVGNYVSYCRKVSSRWLSNDKVKGKGNKKSGNKYLAWAYSEAAEHARRSYTQARTYYNRKMQKTNFMAAHNALAHKLARAAYYVMRDEVLFMPEKIFV

SEQ ID NO: 481919 - protein, 373 aa, unidentified
MPKYSTAFGMDVHLRSTTVCALDADTGEAVTRRFPGNPWGEIAGWMDGFPGPSLAAYESGYLGFAPQRELAGLGVECVVAAVSKIPRSAADSASKNDRNDAARMAKAILAHDISPVWVPSPEVEGIRDLAGAYDGATARLATAKQRLLAFLARRGFVYGGTTPAGNPRKYWTYDFLRWLDKVRPEDDGGVRTLAALRNEVGAAAEARADLLSEYRAAVDASPIAAEVAALQSIKGCAFALAAAFSAEVGDFTRYRSGRQVTAYFGLAPSQRSSGDSVRLGGISGAGNALVRKLAVEGSWCYAAARHQPKLMPRDTGVPLEIRMHGRKGSERLLRRREEMLARGMPAAKANAATAAELVRWLWALGMMCREGAE

SEQ ID NO: 481920 - protein, 387 aa, unidentified
MTTHANDMSRSLAAFDEHSTLVIVVEMGQKSWLVAGLIPGVERHPKKKMDPDPEKLLSLLERWRGEAVKARRPITRIAVAYEAGRDGFWLARWLESRSIETHVIHSTSVAVSREKRRAKTDRVDAEMLLRVFLGWLRGERDHCSMVAVPTIEAEDDRRPGREREALVAERTRITHRMKADMARLGVRGFKPYLRSAPKKLAAVQTPEGVAVPPNTKAELERDMARLAVLREQIAAIEKTRLKRIEAAPDKGPHAMIRLLARVVGIGIETADMLVNEVMTRRLRDRRAVARYAGITGSPEESGKRRREKGLSKSGNARVRRGMIQLAWRWLTLQKESSLTVWFNARTEGAPGLRKKMAVALARKLLIALWRMTTTGEIPQGILLRPAA

SEQ ID NO: 481921 - protein, 337 aa, unidentified
MDYKTIVGIDQSKLTVDAGLLHSNNPLQVTVQQFENNPKGFAKMFRWVKQQCGCALTEILICTENTGLYSYPLSVFCQENNIALWMESALQIKKSLGIQRGKNDRIDAKRIANYAFAYRHAVKLYKLPAKTLLALKQMMSYRERLVESRKSFITPQKELKEFGADMSGLIIKEAQSLVKTIDRKIEKVNESMLQLVKSDEQLNQQHKLISTVPGVGDITALYLLIYTGGFSKFSSFKQFACYCGIAPFDFQSGTSIRAKTRVSHLANKKLKSILTLCTLGLIRREGEFKTYYLRKKAEGKNSMSVINVLRNKIISRVFAVIKRGSEYVPAEKYLQAA

SEQ ID NO: 481922 - protein, 343 aa, unidentified
MYFIGIDVSTKESALCILDGNGKIVRETKLPSDSEIIARFIADTGLAIERIGLETGCTAAWLFAGLQRYGWPVICIDARHAAAALQAGFRNKNDRNDARGIADLMRVNKYRPVWVKSPEAQRQGRLLTARATLQSQLVALENTIRGLLRQEGIGLTDRRTAFEAAVREVIAEDHLLHAAVHPLLETRNAVLCQRAALDRQILLIVRADPVCRLLMTAPGVGALVALTFKVAVDDPGRFSRSRNVGAHFGLTPREHSSGELRYQGRISKMGDHEVRRLLYVAASRMLRRDAALWCPLKAWAVRLAQRVGIRRARVALARKLAVVLHAMWSDGQVFQWRRTEASA

SEQ ID NO: 481923 - protein, 388 aa, unidentified
MIYVGIDIAKLNHFAAAISSDSEILIEPFQFSNDYDGFYLLLSHLAPLDQNSLIIDLESTAHYGDNLVRFLICKGFKVCVLNPIQTSSMRKNNVRKTKSDKVDTFVIAKTLMMQDSLRFMSLEDLDYIELKELGKFRQKLVKQRTRLKIQLTSYVDQVFPELQYFFKSDLHQNSVYALLKEAPTPNAIASMHLTHLAHILEVVSHGHFDKQKARDLRVLAQKSVGVSDSSLSIQITHTIEQIELLNSQLLHTELEMANLVTCPHSVVMTIPGIGFVNGGMILGEISDIHRFSEPKKLLAFTGLDPTVYLPGNFQARRTRMSKRGSKVLRYALINAAHNVVKNNTTFKAYYAAKRVEGRSHYNALGNCTGKLVRVIWKMLTDEVEFNLE

SEQ ID NO: 481924 - protein, 506 aa, unidentified
MAQTAKAARQKEKESVPKGRSTPVTAESKAAKPKGKVKRGDRRRRTQKGEAIENRPVFEPNAAGVDSGAREVYGAVPPDRDKQPVRICETFTADLQELANWLTACGITTVAMESTGVYWIPVYEILEAHGIRACVGNARHMKNVPGRRTDWHACQWIQFLHAVGLLRAAFRPEPEVCALRAVIRHRGELVQMAAKHVQHMHKALTQMNLQIQHVITDLTGLTGWAIGDAILKGERNPSRLAQLRDPRVKASPETIEKSLVGHWQPEHLFTLKQSRRLYAEYQREIGECDAEIERLVGTFQPRVDPEVKPLPPDQKKRNRNYAKSRKRRARPQSSTREFDLRTEVYKLYGVDVTQIPGLEFLALQLFSELGRDMSRWASAACFVSWLALCPDNDISGGRVLWRTKRRVHNRAGQLFRMAAYALDRSPTPLGAYLRRMKAKLGPQAAHTATAHKIAVIFYAMIKNQTEYDETIWEQRDAQRHQRHMTGLKRQAQRLGYKLTPIEEEAA

SEQ ID NO: 481925 - protein, 409 aa, unidentified
MRTKRYTRFCGIDVAKRKHVACVINRDDEFVVRSQSFSNDAKGYQGLLNRLKDAGRRTQILVGMEATGHYWYALRDFLVGKGYEVVVLNPIQPKQQARKDIRVRKTDKIEARHIARLLKNSEHKVTIVPGDFAMTCRQLTRLRYKLIGQVARLKQLLWSRLHPVWPEYETLLANPFCKTGRTLLMTAPTPVDVLTLGQQAVTELIRKTSRGKYGPAKAEEIAQAAQQTVGTCRGLDGARISIRSLLTQIEAMTPIRQQLEADIEALADRLPRHIFTLPGINHISAVSLFGETDPIETFDSGAQLVAFAGPDTTVFQTGQYEAPRRRITKRGSPFLRHTLWRMAHRACYQEGDLRDYWLRRRGEGLHHLAAVTATAIKLCHVAWRILTDRRDYLPQSPTTGKSHRRRPTP

SEQ ID NO: 481926 - protein, 334 aa, unidentified
MIIIGVDFHPAYQEIASVETDTGEYQEKRLAHPQEAEEFYRCLSCVGQVVRVGMEASGHGRWFERLLEGLGVELWRGDAEVIRAKRGRKQKTDREDARHILKLLLKDDFPRIWVPNWENRDLRQLLWHRHRMVQARTRVMNQLQAVALNEGLRCKKRLFRADGRQQLESFQLAPWASRRRGELLELLDRLNPTIAELSQAVERAAEKCPEARRLMTHPGVGALTALAFVLIIGETERFQCGKQIAAYLGLVPLEKSSGNRRRLGHITKQGNSLLRFLLVEAGQVTVRSLPEWRSKYVHLTNPALKIRGQPEASSGCPLIFSHRPNTNLCQTRPT

SEQ ID NO: 481927 - protein, 426 aa, unidentified
MSEVELVKPEPQYAAFIAIDWADKKHVWCLQGMGSEKRDSGELEHTPEAVEAWVVQQCQRFGTGPIAVAVEQSRGALVFMLSKYEALHLFPVPPTMAAKMREALYPSGVKDDPRDADLLLDVLRKHREKLRRLMPDTEATRRVQNLVEERRKLVDERTEQSNRLTSHLKIYFPQILNWFEHLDTELVCALLLRWPTLEQLQRVPAAQLRTFFRKHHCRNQELNERRIQEIRQAIPAIRDRAVIEAKSTVVKVTVRMMRSLLEGIAALDEKIEEAAAAHPDFFIFDSLPGAGAVMAPRLLAAFGSQRERYGSAREVQTYSGIAPVIERSGKKKWVHFRRACPKFLRQSFHEWAGHSIAQSVWARSYYQQLRSRGKGHHAAVRALAFKWIRILFRCWKDRVAYDEVKYLVALGRRGSPLAAVDVAISG

SEQ ID NO: 481928 - protein, 479 aa, unidentified
MTPHKDYCLDPGPPAPTPTLPESSILTEALQVCNPHAAGIDIGEAEHWVAVPPGCDPQPVRRFGTFTADLDALADWLIDCGVTTVAMESTGVYWIPLFELLEARGVQVLLIDPRQAKRAPGRPKTDRLDCKWLQRLHAYGLLAGAFRPEDQVCVLRSYLRHRQMLLTSAAHHIQHMPKALQQMNLKLTQVVSDITGVTGMAIIKAIIAGERDPQRLAKLRNPHCHHDADDIAKALQGTWRAEHLFALRQAVELYEVYHQQMAQCDQQIKRHLETFADKSAGQPLPPKARRHKKTNEPRFDARTPLYRMAGVDLTTIEGIEENTALIILSEIGTDMHRWPSVKHFCSWLGLCPQHQISGGKVLSRRVRPGAHRVTVALRLAARSLHHSQSALGAFFRRMKARLGTPKAITATAHKLARLVYSLLQHGSAYVQQGLDAYEAQYRERKVKAMARQAQALGYTLVALAVPEVQEIAAVPAPTP

SEQ ID NO: 481929 - protein, 429 aa, unidentified
MNYTQNEKIAQVKETTLVVGIDVGSEFHYARAFDWRGYEYSKKAFKFSNTQAGFTEFMAWMLNIKNEFGKEEILPGMEPTGHYWFNLGKYLMDNEINPVLVNPHHVKKSKELDDNSQTKNDYKDPKVIAGLINKGRYSYPYLPEGVYADLRTASNMRFQIQSDITRLSNRIQRWLSIYFPEHKAVYGSFDAVSSLMILKEAALPEDIINLGVEGINQIWRDAKVRAVGIKRAKSLVEAAQNTIGDKDGLIAARVEISILVEEYEAKQKKLDIIMDLIGELCDQIPMTKNLLEIKGVGIKTVSGFLAEVGDISRFDNPKQLQKLAGLALVEDSSGKHKGKTRISKRGRKRLRYLLFEVSMSLVSKNPEFKELHHYYTTRSENPLKKMQSLMAIGCKVIRIFYAILTKGVDYDGQKMLSDIKRPVNYTQAA

SEQ ID NO: 481930 - protein, 357 aa, unidentified
MESQEVKYVGVDCGKKSIEVVRINSENSLERRQFSTTESGINNLLQWLTLNDIVGLEAGSQSFRIAKSILNKGVQVIVLNPGNLATIYQSLKKTDKEDSLKIARLIQRHPIEELPTVPISNDEEEDNRRLCTEQENWTRQLTQSKNRLHSLFTQAGLTHITKKHLRTKANREISVALLPSRYQKEAERILKVLDLVELNLKLIEEEIQEALKKNKAYVQTIMSMPGIGMITSLAIMSYMGDCKRFSSAKQAAYYAGLVPRVDISGDTVRYGRIINRGCHSIRRVIVQAAWSLVRCQHGGKVKEFYQRLYLKKGAKKSIIATSRKMIEVLYAMIRTGKLFDSMPENILNRKLTQYGLM

SEQ ID NO: 481931 - protein, 372 aa, unidentified
MTSMIYIGMDVHTTNYTLCCYTVDSDDAFAVVNVKPDYHEILKYMERVRSTRGGNCDFICGYEAGCLGYSLYHQLAKHGVACIILAPSTMPQQKGKSIKTDKRDAKNIAKCLAFNLYSPVYVPTAEDDAIKEYIRMRDDVKADLKRTKQQIISFCTRHGFHYEGKSRWTQAYFKWLDSLVFENALYKETLQEYLALYYTLDEKIAVYDARIEELAHQKRYEENVRKLCCFKGVSTHTALPLLVEVGDFHRFRTAQHFSAYLGLVPGESSSGEKVIHTNITKAGNSHLRTLLVESANSYSRGVVGKKSKVMKDKQGGNSPEIIAYADKANERLHRKFYKIAIRSKKNVAKTAIARELSCFVWGMMTNHISRAV

SEQ ID NO: 481932 - protein, 411 aa, unidentified
MEVMNKRCCGLDVHKESVVACLMVREGGKVHKEVRTFLTMTLDLVVLHDWLKAHQVTHVAMESTGIYWRPVFNLLEEDFTVLLVNAAHIKTVPGRKTDVKDCEWIADLLSHGLLRGSFIPPEPIRDLRDLTRYRKSLTDERVREVNRLQKFLEAANIKLSSVANDVMGASGRAMLEALTAGSTDPQVLSELAKGRLRKKLPELRKALEGRFRPHHRFMVGEILTHIDFLDEAIERISQEVSCRIVPFSKTVEVMDLVPGINQRAAEGILSEIGVDMNCFPTDGHAASWAGLCPGNNESAGKRKSGKTRKGDRWLRRYLIEAAWAASRKKGSYLSALYHRLVVRRGKKKAIVAVAHRLLVIIYHLLKDQGSYRELGPDHFNKVNAAHVQRHHVKRLESLGFKVVLEPVAKAA

SEQ ID NO: 481933 - protein, 353 aa, unidentified
MSDDKYIAFDVHQATTVISALNAGGREVKADVLPTQAPALIGFWEGLRGKLHLTLEEGTYAAWLYDLLEGRVAELVICDPRRNALLKEGNKTDAGDARKLAELLRAGMLRAVYHGSRSMRPLQELAHGYEALRADTTRVMSRIKALYRGRGIDCAGRGVYAKGPRESWLERLPAGASRLRAELLHDELDHLRTLRRKARVALLAESRKHTVAARLRQIPGMGPLRVALLMAYVQTPHRFRSRRSLWTYAGLGLVQRGSSEYRMVEGRAVRRPRALQPRGLNPNHRPELKEIFKSAALSAIRRPGPFKDYYDPRAQQGVDPAILRLIVARKLAALTLSLWKKGGHYRAQGPQQA

SEQ ID NO: 481934 - protein, 482 aa, unidentified
MGLLIPRLKRAKIPRIRDCVIERVWEIIPYQGNIICPYQAEMHMKKRRDRVCGADVHKDLIVATITGDDFQPIRENFGTTKAELGKFRHWLVANKCEQVAFEATGIYWMPIYDALSKTIDTIVANPLQIKTVPNDKSDSKDSTRIATLCLNDQIKRSRAFTDRDRDLRMMTRARSGYVKTRTQFRNRIHKYLSSSGVKLSSTMDDIFCKSGRYILNCLAEEKPIEEILKGIPSGKIRKKQDEIRSALENGLNDTNRMLLIDALEILDNLESKMEKLSLEILKGVQQKSKDLAIVMSIPGIGFTSASVILSEIGNYRDFQTPDQLAKWCGLNPGENESAGKKKKCGITKKGSKHIRVILVQAAQTISNMNKTALSRFFQRLIKKKERNVAIIAVARKLICLIYHLLINQELYQENECRKKRSSQEKSCQAPSFKEEHLTDRVAAIVDAFYHLKEGSRKNALMRELGDISMAKPGKKRPSGGGE

SEQ ID NO: 481935 - protein, 347 aa, unidentified
MNFYTQQHKHYCGIDLHARAMYVCILDEQGTKLVHKNLPTTPEAFLRLIAPYREDLVVGVECMFTWYWLADLCSQEGIAFVLGHALYMKAIHGGKAKNDKIEAHKIAVLLRGGMFPQAYVYPSEMRATRDLLRRRCHLARKRAELLAHIHNPNSQYNLPEIGKRLANKSNREDVAEHFPDPSVRKAIEVDVALIDQYDQLLGEVELYLTRSAKAHDVQPFARLQSVPGIGQILALVILSEIQDIARFPRVQDFVSYCRLVKCAKESNGKRFGTSGKKIGNVHLRWAFAEAAVLFIRQSQPGKEYFAKLEHKHGKAKALTVLAHKLGRAVYYMLSREQAFDLKRFVTA

SEQ ID NO: 481936 - protein, 394 aa, unidentified
MKLVGIDVGKNSHHFCVMDKETGDFNVTPTSFSNNKEGFDFLINSLKPYSKKSILLGMEDTGHYHVALLKFLLSNGYTVALINPKTTDLTRKMEGGITKNDKLDTITICDVLDTPERKKQYRITKVDRFDLYEQRQLTRHHHNLKEELNVYCNRLQKSIDLVFPEFNTLFSSKYSIVYMNLLKTFGSAEAIASTDIRTIRKCFEIKGRGNRISLTPEKLKECAKNSIGISSEVETIQIKHLVSQITLIKEQIAEIDKKIEEFSITNNSPILSIPGISHFSGTSILAELGDIGNYSKPSQIIKFAGVAPYHYESSQYNAQHTAITKKGSKYLRKTLYQIILPVINNNPVFKKYYRLKISQGKGHRCAQGHCIRKLLRIIYHLLETGQSFDPALLR

SEQ ID NO: 481937 - protein, 365 aa, unidentified
MFKNSMLFTGLDLGDRHSLLVSLDQGGELVEQARLPTTQASLARKFSGIPACRVAIEVGAHSRWVSAMLTRLGHEVLVADARKLRLIYSNPRKHDRADAEYLARLTRLDPGLLSPIHHRIPQAQAHLAVIRARDSLVRARTQLINHARGLVKTTGARLPSCAATSFHHKTATAIPQELLPALSPILATIASLTQSIQAYDRQIQQLAQDHYPETCLLRNVPGVGPVTSLAFILTLEDPQRFHKSRELGACLGLVPRTDQSGAQDPQLHITKTGDSYLRRLLVQSAQYILGPFGPDCDLRRWGLKLAERGGKSAKKRAIVAVARKLAVLLHHLWKNGEVYDPFHQSAQPPTQLPQPSAKEAAIAPA

SEQ ID NO: 481938 - protein, 452 aa, unidentified
MSRKKTRLQSVTEPPQVRPDVAGIDISPEVIYVAVDPRHHMPVRRFGTFTGELRRIADWLRECGVRSVAMESTGVYWIPLYQVLEECGIEIYLVNARHYKNVPGRKTDVCDSAWLQYLHAVGLLQGSFRPEQQICAFRMVLRHRQALVQFASQHIQHMQKSLDQMNVQVHRVLSDITGLSGLAIMDAIVAGERDGRRLAALRHGRVQASEETIVAALEGDYRAEHVFTLQLSLESYRHYQSQIATCDRRLRTMLDQLEGRSDCQQAPPPARKKMRTPKDEQLRAKFFRIFGTDLTAIPSVNVGTVEVLLGEVGPDLRRFRSAGAFANWLGLCPNETITGGRVLASKTRKIESRLALSLRMAAESLCRDKSYLGAFYRHMKVRLRGAPQAITAAAHKLARIIYTLVVKHVQYDDSVFAEIEQRNREKQRLRLIKQARTMGYNLVPLPNASIVS

SEQ ID NO: 481939 - protein, 323 aa, unidentified
MNHKVGNDNTVARFIGIDVSKQWLDVACLPERETRRYGNDCAGLEQLCAWIVPLAPELIVMEATGGFETNAATALAAGGLALAVVNPKHVRDFARAFGILAKTDRIDALVLAAFAQKVHPPVRPLPDEERRELIDLVDRRRQLVTMRAEEKTRLTQATPAARQDIKEHIEWLNERLRRLDIDLTAKLRSSSLWKTKEQILTSAPGVGRVTVATLVARLPELGTLNRRAIAALTGVAPFARDSGQHRGRRMIWGGRADVRNVLYMATVTAARINPVIRSFYLRLKQAGKPAKVALTACMRKLLTILNTMVRNNQPWQIPPTQTI

SEQ ID NO: 481940 - protein, 338 aa, unidentified
MSVSLLSIDLAKSIFQLYGVDERGHPVLSRRVSRSKLLEVVVALPCCRIVMEACGGAHYWARRFSAMGHHVQIIAPRFVKPFVKSQKNDRNDAEAIVEAASRPTMRYVAVNSVEQQDIQSMHRVRSLLMRDRIAQINQIRGLLAEYGVVIAQTPLKIRTQLPAIIDDECNELTGLTRSMMRDMYERLVLLDKQIARYDELIHHVHRASPASQRLEKIRGVGPMIATAVIAAAGSASEFSNGRQFAAWLGLTPRQHSSGGKDRLFGITKRGNGYLRMLLVHGARSVVQQAIKHTDTLSRWILEVQARRGTNIAVVALANKIARTIWVLLARGVEYVSPV

SEQ ID NO: 481941 - protein, 436 aa, unidentified
MRVMYERVAGIDVHKDMIKVAIRFPGEKGTRKTEVLEFRTFWGVLQEVARELRRRGVTHVAMEASGVYTEPVYHALCEQDFTEVLVINPKHVKALKGHKTDARDCRRIAELLECGLLRGSYVPSAEQKEMRDLTRYRKKLVQARTSEIQRMQKALESAGIKLGSVLTDITGVSATAMIDALIDGERRPQVMADLARGTLRAAGKQADLKMALAGRFTAHHATLLRMHRDQVRLNNDAIAGLDEQIAAAAGRWQREMDLLMTIPGFGPVAAATWIAEIGPGPHKYFDSHDKLGSFVTLAPGNYVSARKRRHGRTGDAGTYIKPALIEAAWGAIRVRGRLQARYNRLVRRFGGDKNPGAKKKAITAIAHTLLKIAYQVLRSGEPYAEPGADFYTRRNSPASQQAWLLRKLGQLNPGATITITLPGAAPADPPGAALTL

SEQ ID NO: 481942 - protein, 415 aa, unidentified
MDVLYPYCASLDVHKDNVVAGIRLAGDGPVRTEVRTFDTTTPGLLDLSAWLAERGCTHVAMEATGVYWRPVWHVLSDGEFALTLANAAHVKNVPGRKTDVADALWLADLLAHGLIRASFVPEAPTQELRSLLRTRKQLVREQASHVQRIQKTLEDANLKLGSVLSQVMGVSGRAILQALIDGQSDPDMLLTLVQRGVKASPEKLRAALTGRITGRHRFLLRLHLRQFDALAAAMAEIDAEVDRDLDPFRQAVRLLRTIPGVSDLTAQVIVSEIGIDMGRFPTAGHLISWAGLCPRNDESAGKRRSTRLRKGAAWLKTTLVQCAWASSRKKESYLQAQFQRLRHRRGPKKAICAVAASILTAAYHMLRDGTFYQDLGADHFRRISPESHANRLARQIAQLGFVCTITPAIEEAVSF

SEQ ID NO: 481943 - protein, 355 aa, unidentified
MKRRHFIGVDCHCLFCEIAVIDTAGKVVQRDRRDTTIPALLEVMQNVPRPRSLVIEEGPLAGWLWRNLRAAVDEMVVSEPRRNRLIAKDGDKDDDLDAEKLAQLLRGGFVKSVHQVDSLERAVFKQQVALYHHRVRQRVRESLRLTSLFRQHGVMIREKDYVAAEDRPHLLERLPAAETLREMVTHLWCSYDALVEQEEKWRRRLIALAKQEEVVQRFEALPGVGWIRAATLYAYLDTPWRFRSKAALWKYMGIGLERQRSGNGPEHLGIPMQAHRLLKGTILGAAQSAVALGNNPFADLYRRWIAEGLSSKLARRNVARAQSATLWGMWKNGSAYRPEWVGVAAVANPATKVSR

SEQ ID NO: 481944 - protein, 417 aa, unidentified
MIDDVQWFVGIDWATQSHRVCLLDVEGRHVNERDFAHCGAGLTELRDWLLEKTKAAPEQIAVAIETPHGPIVEMLLDHAFLVFAINPKQLDRFRDRFTVAGAKDDSRDARVLGGSLRTDRQAFRQLVVDDPLVIELREWSRIAEELKQERTRLANRVRQQLWRYYPQIIELTDDVADDWFLALWQQVPTPATAAKVSEKTITRILKDHRIRRLDAATVLQTLRQKPLFVAPGTTEAARAHIRTIAARLHLVNQQIKEAHRALDGLCAKLEARESPSGQNREQRDVTIIRSWPGIGIIVLATLLTEAAEPLRARDYHALRALAGTAPVTRRSGKQCFVIRRHACSGRLQTAIYHWSRVAIQHDAVARRRYDALRRRGHGHARALRSVGDRLLYALCTTLKRQTTYDPNCQAAKITASL

SEQ ID NO: 481945 - protein, 348 aa, unidentified
MLIIGCDLHSRYQVIAMLDTETGEVVTRRLQHENGEAKTFYASVPKLSLVGIEATGDTQWFERLLAELGHELWVGDAAEIRARAVRRQKTDTRDAEHLLDLLSTQRFPRLWVPSPQERDGRQLLKHRNKLVRMQTSVRNQLHFLAMSQGVCRKKKLWSARGRAELEGLSLGPWASQRRKELLELLDQLGPRIAELDQAVKTEAERRPEAVELMKHKGVGPVTALAFVLTWGPVERFRHSRQVVSYLGLNPRENSSGGRQRLGAISKQGNSMLRWLLVEAAQSAARFDPELRRQYQRLKFRRGGQIAKVAIARQLAVRLYWRLRSPEAPPVRMPGSPSSGVVPSTGSRE

SEQ ID NO: 481946 - protein, 444 aa, unidentified
MRRCIGLDVHREFAQVAIWEAGVVRQAGRIQTTPEALREFAESLCASDEVVLEATGNTYAIARLLERQVGRVVVSNPQKTRAIAEAKVKTDKVDAAVLAQLLAAGFLPAVWLPDEATFALRRQVARRAHIVRQRTRLKNQVQSILHRNLVPRCPAADLFGRKGRAWLATQDLPRDEQQAVGALLRQLDFHGQELRIVDAELGRVGLEREEVRRLMTIPGVDATVALAIVAAVGDFGRFSSPQRLVGYLGLNPRVRQSGGHPAQHGRITKQGRAHARGMLVEAAWAAAKTPGPLRAFYERVRGRRGMQVAVVATARKLATLCWHLVTTGEDYAFARPSLTDKKLRSLELRAGLPARRGQKGNAAAYSLKEVRRRERALAEQAELAYRQLVAGWQPKPAKQPPSRGVAATTGARRLGPQGGTAARQGFQPQDPALRSGVDHAPHRA

SEQ ID NO: 481947 - protein, 373 aa, unidentified
MAKQLEGTMGMIVIGADTHKDTHTAVAVFEGSGQIAAELTAAARKAGFAKHLDWARGLDPERVWAIEDCRHVSGGLERFLVANGERVVRVPPKLMGQSRKGSRQRGKSDPIDAVNVARAALREGVESLPTAYLDEEAMEIKLLLDHRENLVRARTSDQRRLRWHLHQLWPELQIPAGALDRVIWLERICGRLARAPKSARVRVARELLRSIRSQVRRANDLEHEIAALVKAKAPELLALPGCGALSAAKILAETAGVERFSSDAKLARLAGVAPIPASSGRRDRHRLDRGGNRQLNCALHRIAVTQGRVHAPAREFLVRKQAEGKSRMEALRCLKRHLARRVWRLLIDSEIDKSMTTVDPQRGLLAPQIAVAA

SEQ ID NO: 481948 - protein, 343 aa, unidentified
MTHYVGLDVAQKLTAICVVDDSGRRQWRGQCTSDPEPIERTVRRHGGEDARIGIETGPMTPWLVHEVRGRGLAVTCLDARHARAALKMQINKTDQNDAEGLAQIMRTGWYRSVHVKSFASHRARALLGARAQLVGMTTRLSNHIRGVLKTFGMLPGAGRGLAFDRRVETLLADRAEVAPIVRPMLAAWRQLRQQTAAFDKAVRVLVKSNPICRHLMGVPGIGVLSVLAYVGMVEDPARFGRSRSVGAHLGLTPKQYQSGEIDRSGRISKCGDILARTLMYEAAVVLMTRVRRALGLKDWAQAIARRSGVGKARVALARKLAVILHSMWRSGEPFRWSEQSAAT

SEQ ID NO: 481949 - protein, 257 aa, unidentified
MNGIGIDVSKRQLDVGTTDGEILQVSNSASGFAELDLWLRKHPASQIVLEATSGYEQSVLNFLHNAGHPVVRANALRARRLAQGLGQLAKTDRLDAYALAQMAALVKLPTYQPLEPWQQKMREFVRARRQTMEALAVARQQQEMVTDRELRRLLQANISRLQGIVGRLGKQIAEQVAQQPQLAVLKSMKGVGPGLQAVLASYLPELGRISGKRIASLVGVAPMSHDSGTMRGKRSIHGGRAEIRQVLYMASMSAMRA

SEQ ID NO: 481950 - protein, 403 aa, unidentified
MNMNAVGIDVSKGKSMVAILRPYGEIVSTPFEVKHTVSGIRSLIEHIQAIDGESRIVMEHTGRYYEPIVRELSQADLFVSAVNPKLIKDFGDNSLRKVKSDKADALKIARYTLDSWTELRQYSFMDEIRNQLKIMNRQFDFYMKHKTAMKNNLIGILDQTYPGANTYFDSPAREDGSQKWVDFATTYWHVDCVRKLSLNAFVDHYQKWCKRRKYNFSQSKAVEIYEASKEIVSVLPKDDLTKLIVKQAVEQLNMASQTVEQLRAMMNEAASKLPEYPIVMAMKGVGRSLGPQLMAEIGDVSRFTHKGAITAFAGVDPGVNESGSYEQKSVPASKRGSGTLRKTLFQVMDALIKTKPQDDPVYLFMDKKRSQGKPYYVYMTAGANKFLRIYYGRVKEYLSSLSK

SEQ ID NO: 481951 - protein, 429 aa, unidentified
MNSTQNKKIDQVKETTMIVGIDVGSEKHYFRAFNWRGIELTRKPVAFSNSMEGFNSFYNTIVELMQKSELEEALVGIEPTGHYWFDLGQFMGEKNIKFVMVNPHHVHKTKELDDNSPSKNDRKDPRVIAGLVRDGRYFYSYMPTGAYAELRNASNRRFVLVEEQTRAKNRLQKWIAVYFPEYKGIYTHIDAKGGMLVLKKAPTPEEIVRLGVEGIIKIWKDAKLRGNGHKKAMLILAAAMRSIGLKAGLTEARMEIQDLIEDYELQTKRLERVNDLIKGLCQQVRYADKLLEIKGIGITTVAGFIAEVGDITRFDSTKELQKLAGLELVADSSGKHNGKTKISKRGRKRLRYLLFEAAISVVGKNEEFKEIHRYYTTREKNPLKKMQSLIVVACKLIRVFHAILTKGIRYDASKMLKDIRHPGEQLKAV

SEQ ID NO: 481952 - protein, 406 aa, unidentified
MKQIVSVGIDVSKGKSTVCAMIHPYTIIKESFEVLHTVEEMSMLADYIGSLDGEIRIVMESTGHYHLPVAQFLYQKGFFVCVENAYIIRQFSRIMLHGAKTDPLDAKKLAKYGLAYWSELKPYKFHPSCYTELSLLSKQYQTYIKLLIAAKQNVIHLMDEMLPGFKEALDTASSVQFSKVKYVDFAKEFYHVDMIKSMGKEIFRENYKQWCKEKGYRFQSEKADELFHLAEDGIPTLPTEFPSTRLCMEVATEQVSQLGYALEQILSQMQNLAKTLPEYQTIRQMGGMGEKLCVRFIADIGDVRRFHNGKALVAYAGIDAPPYQSGQYTGTKRRISKRGNSALRKTGYEVMKSLKSHPLKTDTRVYDFIIKKENEGKSKKQAKIAGLNKFLQIYYAKVMEIYKNIA

SEQ ID NO: 481953 - protein, 311 aa, unidentified
MKQSVVYIGIDVAKAHLDVAWGGASRRFANDQKGRAALINWIKQSSDPSAVQLICEASGGYEQALLESLKQNNLKATLVQAMRVRQYARAAGILAKTDKIDAKVLAAFGSAMQPKPTQPPSAEQKRLRELEAQRRHLSRVLLGEENRLGQMSCAELRSLSRSLINKINKQIALLDARIECLIAQERTLCAKAQKLTAISGVGARTAALLLAQMPELGRLNRRQAAALAGLAPFNHDSGSIRGKRAIFGGRPALRSGLYMAALSAARYNPILSNFYRRLRVKGKPHKLALTAVMRKLLLALNSTLKPIARPP

SEQ ID NO: 481954 - protein, 329 aa, unidentified
MKKLFVGIDVSKDVFDFCALNENGEIETSKEVFENSKKGISTFCKSLKRWDDYDVWICLEHTGHYGYLLASEFSERAIKYTFLNPLEIKNSIGMTRGKNDAIDAYRIAYYGLTHVRKLKRHIIPVRDIQKLKTLMSMRDGYVKINVQLKNSYKALEIIHQSINIRPQLNDHHLLIKRHEKAIVKVETQIMEIINGNEELKTTFKKVNTVIGVGMLTAVKCIIETDNFTKFKDGRKFSCHCGLAPFDYQSGSSVRGKTRTSPLSNKGLKSILFKAASTAIQHDPQLKNYYSRKVGEGKHKLSVLNAVANKIVLRIFAVANRDEPFVKLVA

SEQ ID NO: 481955 - protein, 366 aa, unidentified
MTSVASAAERIYLGMDVSRDKIAVAVLRPGEDVPAVEVISHDGEMVRRLIGKFADRSVLAACYEAGPGGYELCRQLAAAGVACDVVAPALIPKAAADRVKTDRRDCVRLALSHRAGLLTAIRVPSEPEEAVRDLVRTRADLVDDRKRMMQRISALLQRHGRVWRAPRWTCEYRAWLGRQSFTEPALQAALRTCLAALDARDAELAVLESQLRGCWASVDPLAPMVRQLGCYRGIAELTALTLAAEVADFRRFASAPAFMGFTGLTPSEYSSGARTRRGAITKAGPQLIRGALIEAAWAYRHRPAIGATLRRRQAGCAAETLARSWKAQQRLHATYAKLTRRGKIPAVAVTATARELAGFVWAEMTS

SEQ ID NO: 481956 - protein, 384 aa, unidentified
MNKHNILFIGLDTHKVFVEVAYIEDQRGAKSVHLGKQPTSKLAITKLARQFESKYPDATLHFVYEAGPCGYWIYRLLTSLGHCCYVVAPSLIPKKPGDKVKTDKRDAMMLAKLLKPEDLTPIYVPEPEDEAVRDLSRAREVAMKDLKDAKYQLKAMLLRNDINCKVQDNWSAPHLRWLTALVLPHPAQQIVLQECIQIITERTQRVERLVNELTHQVQSWRYYPVVKAVQAMRGVRLLVATGVVAELGDLNRFDHPRKLMSYVGLVSSEHSSGGKRKLGGITKCGNGRARRLLIEGAHSYRYNANISTEIQKRQEGLPKAITDIAWQAQLRLCRRYQRLSHKGKHYNVIITAIAREMIAYIWAISREVVLTPVNPKLRLSRVPA

SEQ ID NO: 481957 - protein, 352 aa, unidentified
MRTSQKTQGMITTIGIDIGKNTFHLIGLDKRGAIILQQKVSRSQLERRLANIPRCLIGMEACSGAHHIGRQLIAVGHDVRLIPAQYVKPFLKGHKNDYRDAEAIAEAVQRPTMHFVTIKTPEQMDLLALHRVRSRFVSQRTGVINQIRGFLIERGITVRQGPMPLRKALPEILSADTGVLSPRMVGLITDLVQEWRRLDERIAAVSAEIEALAEQDDGCERLMTVPGVGPIISSAVVAAIGNGTGFKQGRDFGAWLGLVPKQESTGDRTILGKISKRGNKYLRTLFVQAAHVILARRPSAAMRGLWPWIEQASKRLHRNMLAIALANKLARIAWAVLARGGTYQPRITAHAA

SEQ ID NO: 481958 - protein, 312 aa, unidentified
MAPTIFVGIDVSKDTLDIAVRPSALRWQLANDDAGIRDLVSRLAELSATLVVLEATGGYEHPAAAALAGASAGVVIANPRQIRDFARATGQLAKTDAIDAGILALFAERVRPEPRALPDEARQMLEALVTRRRQVTEMLVAEKNRLGHARRPVRRGSTAHIRWLERQLSDVDRDLDEAIRQSPLWRSQDDLLQSVPGVGPITSRTLLAQLPELGLLDRKEIAALVGVAPLARDSGTLRGRRTIWGGRATVRAVLYMATVAAARCNPLIRIFYQRLRAAGKPAKVALIACMRKLLTILNAMARTHTPWRPAHA

SEQ ID NO: 481959 - protein, 344 aa, unidentified
MEYFAGLDVSVKDTSVCIVDDTGRIVREVKVASEPEALLPVLTAPLYRFKRIGLEAGPLSQWLFSALAEAGLPVICVETRHMRAVLQAQINKTDRNDARGIAQMMRAGLYRPVHVKTLRSQKLRMLLTNRKLLQSKAVAIDNDLRGTLRNFGLKVGMVGTVKFEARIKELVENLPDLAVLVEPLLVVRRVLREQIGILHRRLLAIVRDDDVCRRLMTIPGVGPVVALTYRATVDVPARFRNSKAVGAVLGLTPAKYQSGEINRTGAISKCGDEMMRVMLYEAAQVMLTRTKKWSWLKAWAIKIAKHRGMKKAIVALARRLAVIMHRIWVDGTEFRWTRKETAAA

SEQ ID NO: 481960 - protein, 327 aa, unidentified
MARMQGKTTSDISQLFAGIDVSKAHLDLRLSCEGKSRRFPNDPAGFAAIDAHLRAHADAPCLVVLEPTGRYHFAVWRALHEAGHGVAPLNPLHVRRFAESDGELAKTDAVDAAVLARMAAERRPAAKLPPSEEQLRLKALTTSIADRIDRRATLKGQRAEVRDPLIARFDEAEIAQLSEAIDALKAERARLIDANPQTDRVAAILCSMPGIGEASAHRIIAEMPEIGTLDKKQAAALLGTAPRANQSGKRDKRRRTKGGRRRLRAALYMPAIVASNANPDLKAFKLRLKAKGKENAVILTAILRKLIILANALVAQNRMWTPKMPLT

SEQ ID NO: 481961 - protein, 411 aa, unidentified
MRLFAGDDWAEDHHDVEVMDEAGKVLAKRRLPEGVAGIAQLHELIGRLLGEDADQAEVIVGIETGHGPWVTALLAAGYTVFPVNPLQASRYRGRHGVSGAKSDAGDAHMLADMVRTDSHQLRPAAGDSPEAGGIKVLARTHKTLIWERTRAVQRLRHQLREYFPAALEAFEDLDAPDTLELLGRAPDPARAAKLTRAQVSAALKRARRRGIPGKATAILAALRAGQLSQPPALTAAYAATARALIAVIATLNEQVKVLQGQVEENFGRHPDAEIYRSQPGMGAILGARVLGEFGDAPHRYADGKARRNYAATSPITRASGKKKVIAARFVHNDRLVDALNAQAFASLNASPGARAYYDELRARGIEHNDALRRLANRLVGILHGCLKTRTLYDEAIAWGHRQNLPQSSVAA

SEQ ID NO: 481962 - protein, 387 aa, unidentified
MSAVMIGVDPAKRSHAMAVLDGREGQLAGLQVGNDSAGYREMLRLARRWPERTWAVEGAAGIGVQLAQRLVADGETVLDVPPKLSTRARIFDVGHGRKNDPGDARTVAVVAIRTKGLQRVVPDDEMVALRLMSERRRDLVRSRTQTVNHLHQLLMELIPAGAGRNLTAKKAKALLATVRPRDIAGRTRRQLAVDLVEDLVGLDRKITDLDKRLKTAVAATGTTLTDIKGVGTATAAMILGEVGDVRRFPFRHHFATYSGVAPIEVSSGEVERHRLSRAGNRQLNHALHIIALSNKRYDPRGGTYYAKKVAAGKGKKGALRCLKRRLSDSVYRHLVDDQQRRAQGSPGGHLGATLQSSAAGSHPNADTSEQPHTGLHQNPTPGLSAAS

SEQ ID NO: 481963 - protein, 349 aa, unidentified
MVANEVDYVVGVDTHRDEHVLAVVVAPAGAVVARQTVSASGRGYAQALRFAQRYAAGARVWAVEGAGHYGVGLARYLNGRGEAVLEVGRSSRNERRLRGKDDELDAVRAALTAFASEPLALPRSGERREALRLLLVARRSAVDVRREALVQLRSVIVTAPDRLREELRGLPVQRLLERCCRFRLSAAAAPDEQAARLVLRTLARRIEAASAEADELEQKILAHVQALAPQLLDEPGVGPIVAAQLLVAWSHRGRVRSEAAFARLAGVAPVPASSGQTSRQRLSRGGDRQLNRALHTVQLNRALHTVVLHRRQHDPVTKDYIARRIAEGKSRREATRLLKRYLAATSTGC

SEQ ID NO: 481964 - protein, 483 aa, unidentified
MEPKKYRRCCGIDVHKKSVTVCILAPEGKRGVEIRKRNFRTFTRDLKQLRLWLKNCKVTEIAMESTGQYWRPLWNLFEGHFEKLILVNPQHIKGLAGRKTDPKDAQWIAELLETGRLRGSWVPPRDIRELRDLTRQRVHLVEDLTRVKNRIGQLCETGNIKLSSVTTDLLGVSGRRMLRAIVEGKHDPGWMADYAKTSLRSKKKELELALDGSFTQSQRWLLDKELHHLEWLERQIERMEQEIERQVVRYAEPMRRVMTIPGIDHKTAWMIVAELGVEMSVFGDAKHLASWAGLCPGNHESGGKRMSGKTRKSNCYVKRGMCQAAWAATHTKNTYLSAFYRRMQIRKGPQKALIALAHHMITVVFNVLVRGEEYVELGGDYFDRSNKPKVVSRLVARLAKLGFSVDLRPIDPDAPEAAEPVLKEAVPLATEQLTSPLKDSEPATPKRKGRPCKCIERGVVCKHRIGQHPNVNKVQVPTVAEFS

SEQ ID NO: 481965 - protein, 413 aa, unidentified
MTVFCGIDWAEDHHDIALVDQHGTLLAKRRIGDDAAGFATLLQLLAEAGDSADAPIPVAIETSHGLLVASLRATGRPVFPINPMSVSRYRDRHSVARRKSDAGDALVLANILRTDLAAHRALPADSELVQAIAVLARAQQDAVWARTDAHNKLRSLLREFYPAILQAFASKRGGLLRPEARALLAAAPTPRAAARLTMAQLRALLRRAGLQRGIDAEAARLQQVLRGDHLHHPSLVEEAFGQQTLALLRQLDTAYANAEQLAAATAERFAQHPDAAIITSMPGLAELTGARILAEIGDDRARFADARGLKAYAGSAPVTRASGKSTAVLHRRVKNQRLASVGYVWAFAALTASPGARAHYDRRKAAGDRHVAAQRNLFNRLLGCLHHCLHTGQTYNEATAFPAPSNTTQARAA

SEQ ID NO: 481966 - protein, 378 aa, unidentified
MSNHSHYKVGCDAHKRYSVFAIRDGKGKVIDYFRVDHERGAIEGFLSQFPSGTPVALETVGNWYWIVDEIEAAGCVPMLAHAGKAKAMMGHTHKTDKLDADGLATLLHNGTLPTVWIPPGDLRDERELPRTRMAFSKVRTMLKNRIHSTLAKYGLTLDTDSDIFSRKWRPGLMKLLGSLPEETRRCVEQELELLDLVQVHIDRLEARILECVRITPTIQLVMSLPGPAEILSIVIDREVGSIDRFPSPKNFCGYAGTVPKVKGSGGKFHYGRMIKQANNYLKWAFIEAANVVVRQQHHPNWRNKYVVLLYERTRRRKGHAVAVGTIARATWPKQPIGFSRRVSPTGSLFPGVRWRLSHPSRSERGRPAPNMGPERSAS

SEQ ID NO: 481967 - protein, 343 aa, unidentified
MYYIGLDVHKMTISYCVKDAAGQVHREGKIGSTRRELDAWVMTLPQPRTIAMEATIFTGWIYDHLLPHAEKVKVAHPLMLPAIAAAKKKNDKIDARKIADCLRCDFLPECHMASTEIRDRRRVLRYRGLVIKQMVQMKNRVSGLLMETGVDYNKRRLHKVGYFEDMLKTNKEVNQSIRPLLKLSRETIERSQKLDYALVSSLERDPLLAERLRRLRTVPGVGPITALTWALEIGDFTRFPSVKEAISYCGLCGDESSSADKVLRMPLSKQRNKYIQRTLIEASKLAIRYNHELAEVYEKERERGNANRATLAVARKLVAYLLAVDRRKQDFVPAEVFKATAAA

SEQ ID NO: 481968 - protein, 426 aa, unidentified
MNCTQNYKIDQVTEQTLVVGIDIAKRTHYACFVDDRGRVLRKSFPIFQSKEGFQQLYKAIQEAMQAFGKSEVIVAVEPTGHYWLNLAYFLEEHGIPLVMVNPAHVCRSKELDDNLPTKHDAKDALVIARLAKDGRFLVPRLLHEIEADLRVGSTLKEKLRKEQTAVKNAIIRWTDRYFPEFWTVFRDLGKTALSVLEWTPFPADMAGRTAEELIEVYRQSEGLKCPQKAKIQALINAAKDSIGVTEGTTMARFEIAALVRRYCQLEAEIAALDAELKALVQTTMEYQWLKTVDGLGDATIIDLLAEIGSFAHYRDPRQLVKLAGLTLKENSSGQRKGQKHISKRGRKRLRSVLFRAMIPLIRHNEAFRELHEYYTTRSVNPLTGKQSIVALCRKLLNVLFAICTKKQAFDAERMKQDVLSQVQRAA

SEQ ID NO: 481969 - protein, 345 aa, unidentified
MMVTLGTDAHKRSHTIVAVDAAGAEIGSVTVAATTDGHLRAVGWAAQYTNKQWAIEDCRALSRRLEADLLGVGERVVRVPPKMMARARATARQVGKSDPIDALAVARAALREPDLPVAHLDGPSREVRLLVDYRESLVRDRTAAQNRLRWRLHELEPGYDPPAGSLNRYRTLDEIDELITTNDSIVADLARRETARIRQLTREANQLERDITQRVTDLAPTLLAIPGCGALTAAKLIGEAADITRFTNRDAYAMFAGVAPIPVWSANPNRFRLNRGGNRQTNAALHRIAITQMRIHPDAQAFIKRRIETGSTKREAIRLLKRKLANVVYRTLHTDTQTTPLAQAA

SEQ ID NO: 481970 - protein, 475 aa, unidentified
MNVKGTKKKNQVVVSNIFEQQELLKKAEVIRESLTALTWHELETNGKFDKNEKLSFISDDMLILGCDVGSETHYMRAIDTRGRELSKSVYSFNNDSEGFQSAKEWAVQIAAQHNKSQIVLGLEPTGHYWFCLAAWMISNGISVVQVNPYAVKQTKEVEDNSQMKDDRKDPKLIANLVKDGNFGMPYLPEKLYAELRRLSMFRDQLNEDRIRTINRMHREMKIYFPEYKDALGKVDGAFSLELLRQAPFPDDLISLGEDGIRKIWHDARLRGRGYSRAGEILQYAKVSVGIKDGAIAGKAAVKWFVQKILELDAELAVIENQINQKCQEIPHAGNILEISGIGENILSGILAEMGDISRFDDVKEIQKLSGLGLVACSSGKHKGETRISHRGRKRLRYWLFQAAKSAVAHAEEFKELHMYYTTRADNPLKKMQSLIVIACKLLRIIYTILKKGMVYDPKKMLMDIRRVEKKEAIVA

SEQ ID NO: 481971 - protein, 346 aa, unidentified
MRYYTKQHKFYCGIDLHTNKMYLCIINREGDIVLHRNMRTKPDIFLRAIKPFREDLVVAAECMFAWYWLADLCEDEGIPFILGHALYMRAIHGGKSKNDKIDSHKIAALLKGGLIPQAYVYPRKKRATRDLMRRRNHFMRKRAELLAHTQNTASQYNMDPLGRIAKPLNREGLVERFDSPCVQMSIAANLDMVEAYDRVIAVLEQDIIQSAKAHDPGAYALLKTIPGVGRIIALNLLYEIENIDRFPRVQNFASYSRLVKCAKESNGKKYGTAGKKIGNAHLRWAFSEAAQLFLKGNEPARKYMEKIVSKHGKGKALSILAHKLGRAVYFMLKNREGFELNRFLAT

SEQ ID NO: 481972 - protein, 428 aa, unidentified
MQNESTPGARGPVFCGVDTHADSHWLCVLDWRGRKVLSRQFPADAAGYEALAGAIAAAGEPACVAMEGTSSYGAGLTRHLASLGMPVREALSPARMQRRRPGQGKCDESDAERAARAAMSGSKLGTPKSQDGWVDGVRCMLAARSGAVKARTSAINTARSLLTAPEGLRSRFRGMAGPRLMEELPSVRAEGALGAALGALADLWAAARDAALDMERAIEASLEENCPALLAMYGCGPVSAAKLAVAAGDNPGRLRSEASFAAICGACPIPASSGKTVRHRLNRGGDRQANSALHEIARQRVMRDPETAEYAERARARGKSDREVMRCLKRYVAREAYRALMRPHEVRRPEDASGLVAARRAARVSQVRAASILGTSEKYISMLERGQRELKPIRRAYEAWVEAGLPLDWDRQAFEAERKMDSKKHLAK

SEQ ID NO: 481973 - protein, 381 aa, unidentified
MKKHTTAKKKHQALTKVTKTKKKQVVEMAASQRLTIGLDLGDRTSRYCILNEAGEVVSEGQLLTTQTGLNALFEKMPSSRVALEVGTHSPWVSRQIGGLGHEVIVANPHKVKRITQSVRQNDRIDAQKLARLARVDPQLLAPIRHRGAEAPADLAVIRARAELVAARTGLINCARGLAKPMGERLQKCAADQVEEALAQPLSAAAQVVIGPLLKSVEAIREQMGVYDRKIEEIAQRYPEAELLTQVYGVGTLIALTYILTIEDAQRFQHSRDVGAFLGIQPKQRDSGDSQPELGISKTGDRLLRSYLVQAAHCNLRKGAPDSDLRAWGLSKRGGGGKRGKRRAPVGMARKLAVLLHRLWVTGEVYDPVYNRKATQTGRAAA

SEQ ID NO: 481974 - protein, 338 aa, unidentified
MFMIGIDPHKGSHLAAVLDEHETLVEELRVRADRHQRERLLQFAAPYMPRVWAIEGARGLGSLLAQQLVAAGEVVVDVPAKLSARVRSLDNECSDKNDSHDARSAAIVGMHNRRLVKVAPENHAMVLRMLAKRHHDLTARRTQSVCRLHALLATMTPGGLPRLLSADRAARELRKLRAADAVGSARRAACYELLGEVRNADRHLRELHTRIVAAVRAADTTVTNVYGVGPVVAAYLIGYTGDVTRFATKERYARYNATAPLEASSGPKPRHRLNLKGNRQLNHALHLAAVTQISHDTAGHAYYQRKLTETQNPKEAMRALKRRISDVVYARLQADTTR

SEQ ID NO: 481975 - protein, 327 aa, unidentified
MIDSHVGIDISKAKFDVAVLFSHSPSSSRHRSFPNTPDGFQDLIYWLEGELFAFDPHFCMEATGRYGESLAFFLHDSGLPVSVVNPSCIKNYARSKLRRTKTDKVDAAIIAEYCLKESPLLWTPLPKDTRDLQQMTRELDHLKSILADEKSRMKSGSHIPAVRDCMESRVVFFEAQVKLLEDQVNALVESSKLLKKQKKLLLTIPGIGITTANALLSEIPDISKFKSPKQLVAFAGLVPREQSSGTLNGKTRMSKVGSSRLRKLLYMPAVSAKRYNPVIIALCSRIESNGKSKMVAIGASMRKLMHIVFGVLKSGKSFNKRLHMLES

SEQ ID NO: 481976 - protein, 356 aa, unidentified
MKVLRQCCGIDVSMDTLDVALMILQEDFEFKTVSSGQFANTKKDIKKLMNWLKRLQLNNLPLQVVMEATGVYHEQLAYTLYDHDFQLAVVLPNKVANYCRSTDVRRIDDKISARHIAEFGLLKKLDNWIKPDDSLLKLKGLSREREQLLNERTRAKNQQHAKEHMAEVDKFTLKRAKQHIKFLDKLIDQVETQMKEIVGQTPWLKKKINYICSLKGVGFITATIVIAETNGFNLIRNSRQLVCYAGYDINNKQSGTSVNTKARISHKGNKHIRKALYFPALTAVQHDEPLSNFYNRLFDRQKIKMKSYVAVQRKLLILIYTLWKKEERYNPEYYKDKFLLEQPREAALTELDQVRS

SEQ ID NO: 481977 - protein, 416 aa, unidentified
MKKNSKSAMKKEPKAKRTKGQRPVQREPKAVLAELVEKLQGRLEVKTTSARPAEAGARTELGPNLDRLTVGVDLGDQWSHFCILGLHGETLSEGQLQTREAEVAEFFQALPAARVVMEVGTHSPWMQEIIAGEGHEVVVANPRLMEGSKRRKRKNDRIDAKKLARLGRVDPQSLYPIRHRSREVRQDLVMLRAREALVAARTELINAARGLVKSMGTRLPQCSSPSFGHKVKDAIPKKVREALLPLVQLADALSDCIQSYDQKIEELGREKYGHTKLLRQVKGVGPITALAYVLTLENPEQFAKSRDVGPYLGLVPKQEDSGESQPQLGISKTGDTMVRKLLVGSAQYILGPFGPDTDLRRYGLRLCERGGKNAKKRAAVAVARKLAVLLHRLWVSGEVYEPLGYASSRAIVEQAA

SEQ ID NO: 481978 - protein, 407 aa, unidentified
MDVVHLKCAGLDVHAQTVVACARLGSGKAVAYDRRTFGTTTPELLALSDWLTAHGCTHVAMESSGIYWKPVWHVLDGHFELVLANAMHIRNIPGRKSDVNDATWIADLLAHGLIRSSFVPPPSVQELRDLTRTRKQLVREIAQHTLRIQKTLETANVKLTSVLADILGVSGRAILTALIAGETQPERRAALASDQVKASRAELVAALHGRLTDHHRFMLRLHLDQIASLDVAVRDVEARLGETLAPFRAAVDHLITMPGVSETVARVIVAEIGFDMTRFPSAAHLVSWAGLCPRLHESAGKRLSNRTRSSNPWLKTTLVQAAWSAARKKDSYFRAQFLRIKSRRGPKKAVLAVAASMLTAAYHMLRNGAVYRDLGADHFDRHDKAKLAKRLIARLHDLGLVVDVRAA

SEQ ID NO: 481979 - protein, 367 aa, unidentified
MKKNSTVKQSPKRARVRARGPITIGLDLGDKTSRYCVLNEHGEVEAEGSVATTKKGMAAKFGGLGRCRIALEVGTHSPWLSRLLSSLGHEVIVANARQVRLISASSRKDDRMDARTLARLARVDPQLLRPIRHRGEKAQQDLLVIRARAALVEARTGLVNAVRGLVKSAGERLPSCDADSLGVERLEPLPEKLREPLKPLLEQVESLTEKIQEYDRQVEQIARTEYPETQLLRQVSGVGPLIALTFVLTLEDPERFEKSRDVGCYVGLRPKRSDSGESQPQLRITKEGDIYLRKLLVQGAHCILSRRGPDTDLQRWGLKLAERGGKNAKKRAVVAVARKLAVLLHRLWVSGEVYEPLRNSAAKKAAA

SEQ ID NO: 481980 - protein, 332 aa, unidentified
MYIGIDLHKKYSFVTIMDMNGNIINQKRIEHNSKDFDDFISSIDENDQIAMEATTNWYYFYELLESKTKNIVLAHPAKTRVIAEAKVKNDKVDSKMLAHLLRTDLLPKAYIPSRETRDLRELLRYRASLVRFRTQIKNKIYAILSKNGITSPYSDLFGKAGMAFLKHIKLRESYRQSVDGYLNIIQQINTQINDVSKDIDQIAKLDDKAQILMSISGIGAYSALLILSEIGDISRFPRENSIVSYAGLAPSVHSSGGRTYHGHITKQGSRWLRWILIEAVPHVVDSSPSYRCLYNNLVAKKGKGTAKVAIARKLLVAIYYMLQRGERFDKWK

SEQ ID NO: 481981 - protein, 361 aa, unidentified
MTAAATAPTPETSTGPDVVIGVDTHKHTHMAVALSANGGLLGSLKLDAKRSGYQELMRWAAGFGSHPVFAVEGTGCYGAGLCRALQTAGLEVVEVNRPDRSTRRRLGKDDTIDAEAAARSFIAGQATVIPKAGDDLVEMIRMLKVAKDSATDNRTAALNQLHAIVVTAPAALRERLQRLKGKELVECCSGLRSGDISTPLAAAKMTLRTLARRIQQLDQELKDTVAQLDRLTMQHCPELRNTYGIGVDISATLVVAVGDNQERMKSEASFAALCGVNPLPASSGKVVRHRLNRSGNRQANCALHRIVICRLQRHQQTREYVERRTAEGRSMKEIIRCLKRFVAREVFGILRGGPAVRTAAV

SEQ ID NO: 481982 - protein, 348 aa, unidentified
MTIVGGFDVHRAQITFDYVETDSGQVTAGQIRPATRSALRNWLQRFDGREDVAFAVEGCTGWRFVVEEFVRAKVEPHLAEPADTANLRGRKKRAKTDRADARLLRELLAQRRLPESWAPPSHGREVRTLGRLYVTLMDERRAWQQRMHAQLFHQGVPSVRALLTSDGRVALAKAELSPAGVQMLQTALAAVESLTLQILPLRAQLQTIGCNQPAVVALTQQYGLGLLSGTIIWAELGDCRRFSNSDQAVRFAGLDVTVWSSDTKRSAGRLARQGSPELRWALFEAAECAARQTSPDHDYYEAVRDRLGGKRPALSVARKLVRRCYHILRELGDQAWQAPLTHPSQAAA

SEQ ID NO: 481983 - protein, 433 aa, unidentified
MDNEFVAFVAIDWADQKHVWALERSDSAGRECGSLNHSPEAVDLWAAELRLRFSGQPVAVALEQSRGALVFMLTKYQHLVIFPVHPTSLANYRKSFRPSGAKDDPHDAGLLLDILMRHRDKLRRLDPDTPETRTLQFLVEERRKFVHEKTRYSNRLTAYLKMYFPQVLQWFDDMGSIMAADFLLRWPDLESLQRARSSTIERFFVDHNSRNKERIGERLEEIRQAVQATHDQVVVSSCRQAVMAWAGLLRPLLQAIKDYDERIDRLSREHPDYALMNSFPGAGPVLTPRLIAALGSQRDRYQTAHQVQCYSGIAPVVVRSGKQSWVHWRWACPTFLRQTFHEWALHSIAHSEWAREYYQQQRAKGKSRHTAIRALAFKWIRILFRCWKDRKPYDELAYQRALAARRTQPAGAEIVEVEWKKVGGFSKIGIARA

SEQ ID NO: 481984 - protein, 317 aa, unidentified
MQLNNHFFGIDVSSRWLDIASNDSHVIRIDNTLGGVESWLSNLPNKAVIAMEATSQYHLLVAKLAYSKGMIVYVLNPREVHHYARGVGRRHKSDKVDALLIRRYIEKENEYLTVWTPPTKEQEKISILIKRRSHVIVQKQALTLSCKDIRHLSQELDATLNSLQKLADELERMILEEIKSNKEQTHLFALLKSIPGIGKLTAAFFTNLLSHSHFKNADQLVCFMGMDLQFFDSGLKHSKRKLSKRGSSEARRLLFNCARAASQGKLKPLYESYASRMNHTMSTVAVMRKLTKLIYGVWKSGISFEISKFQSPLLNNT

SEQ ID NO: 481985 - protein, 394 aa, unidentified
MPEIWAGLDIGKKHHHAVVIDADGKRLLSRRVLNDETELLQLIADVLEISSDVLWAVDINTGIAALATGLLLNHGQPVAYLTGRTIHQASTTYRGEGKTDARDAFIIADQARIRRDVSMLRPGDDIALDLRLLTARRLDVVHDRTRQINRLRAQLLEFFPALERALDLTKKGPVVLLTAYQTPAAIRRMGVRRLETWLRNRKVQRAGALAAAAVEAAQAQMTALRGEELGAELVGRLARSVAAHNDEAAELDARIEARFRQHRDAEIILSMPGMGPITGAEFIAATGGDLSAFASPDRLAGFAGLAPVPWDSEKVSGNLRRPRRYLRGLQRALYLSTQVSIFFCPVSKAYYDRKRKEGKGHKQAVIALARRRVNVLWAMIRDHTPFQTAPVAGA

SEQ ID NO: 481986 - protein, 342 aa, unidentified
MKELKKVVGIDVAQKELVVTIGRLLEDLSVDLFSYKVFKNNEKGFSALVEWVSKLVENHEEVHYVMEATGVYHQKVAYFLDTNQLKVSIVLPNKISNYFRTLEVKTITDKTCSQVIARFGLERKLDLWKRPKTVYKNLQQLTRERDQIVAERVIVKNQLHAEKVEAEPNSMTLKRISERIKLLNKQENEIKNDISKILKNNAELKEEIDRMMTIPGIGELTAVIILAETNGFELIRNKKQLTSYAGLDVKEKQSGTSIKGKPKISKKGNRSIRKAMHFPSLVAVKWDENFKELYARLVSKHGIKMKALVSIQRKLLEMSYVLYKNQTIYDKEYKNSVKTQMA

SEQ ID NO: 481987 - protein, 339 aa, unidentified
MESFVGVDLHKRISQLAALREPKPASQLRFPNHTVSVEKVLKKLPQGSKIALEATGSWWWFVDLAQRTGHEVVMSHPKQTKAIASARLKSDKVDALMLAKLLKADLLPTVWIPPATQRYVRELLTHRARLVRQRTAVINELHALYAKRNLDPGMIFHRVRPPAFRVEDLSGYGPRIVEEDVALLGFVNRQIGGLDKELKKTAEEDPESKRLMTIPGVGPVGAVAVNCWIGTIERFSNAKKLSSYFGLAPKVRQSGDRERHGHITKEGNRMVRSLLIQAALWHIRIGKGDARKHYLGVLKRRGKQIARVAAANKLLGIMFHMMKERIDYEEFLRRGGNAQ

SEQ ID NO: 481988 - protein, 387 aa, unidentified
MAQVNDLSRSLTAFDPISTLVVVIEMSKASWLVSGVVPGVERQPLKKLEPDATALLRLIERWRSEAMRAGRPIKRIALAYEAGRDGFWLARWLIARGIEVHVIHSASVAVSRERKRAKTDRLDAAMLMRVFLGWLRGERGHCGMVVIPTMEEEAARRPSRERENLVNERSRITNRMKSALARFGIRGFKPHLRKAPERLAGLRTAEGTGLPANVIEEFRRDMARLALVGEQISSIEKTRAERLERAPDTGPHAMVRLLARVIGIGIETADMLVREILSRKLRDRRAVARYAGLTGSPDESGLKRREKGLAKAGNARVRRGLIQLAWRFLTFQKDSALAQWYRTRTEGPSGARRTTMIVALARKLLIALWRLVTTGEVPDGVELRPAA

SEQ ID NO: 481989 - protein, 378 aa, unidentified
MTSTDAAAEAQETVYAAIELSKKTWVLGIAPPDRDRPSIYRVSGGNIAELVSRLRVASRNNRRIVVCYEAGYDGFWLARALAKIDIECRVLDPASIQVNRRARRVKTDRIDVLALLRALIATDRGERHVCAIVRVPSVEEEDARRSHRERQRLVRERTGHINRIKGLLFAQGIRGIKPKLRRTRIDFAALETPEGHPLPDRLRRELEREYARLAMIETQLREVEKERDMADAQDPVVERKRQMLVALQGVGGTSAAILAREVFARPFASRRQLGSYLGLTPSAYDRGSMTRCQGISKAGNSWARRILIEVAWLWQKHQPASPLSHWYFQKTTGQSSRIRRIMLIALARKLAISLWRYVETGLVPEGVAIRAKSQCAAA

SEQ ID NO: 481990 - protein, 360 aa, unidentified
MITTRQLINRYQNRGIIMKITIKWRFILGIDISKLLLDLCLLDRKTGQVLYKQVHNTSEGFARIGEWLEGQIAVPAQTVLVSEHTGRYGEQLLRWSTQAGWPHAVVKTTALDKVSWEHHRKTDKFDANHLAEYGARFSDRLRLATAPKPAVGQLKRLQAERRKMVDRRAALKSKLAEADFHDADMSQLTKMWSQQLQLLTQHIERLEHTMDELIGQDPALCKRHQTMRTAPGIGPVIGRFWLSLFAGKDQLSARKISSRFGFAPHGRSSGSSVKSPDRSTGYGNSEMRKLMHQAARSVANHKPHYREYYEQKIAEGKHELVAINNIINKLIRLYCAMWNNRTEYDPKYIQKMTKKYKKSA

SEQ ID NO: 481991 - protein, 351 aa, unidentified
MLLIGVDYHPSFQQIAFFEEETGECGERQLGHSDGEAERFYRDLQQRGICVRVGMEATGYSRWFERLLAELGFELWIGDPAEIKAKRVKNQKTDRKDAQLLLRLMREDNFPRIWVPSSENRDLRQLLWHRHRLVQMRTRIMNQLQALAMNEGRRWKTKLWSEPGRAELEKLALAPWASRRRQELLELVDRMNPTIEELTRAAEQEARKRPEVLRLMTHPGVGPLTALAYVLIIGTPARFHCGKQIGTYVGMVPSEDSSAGKQRLGHISKQGNSLLRFLLVEAAQAAARSNPEWRRRYIHLAMRRHRSIAKVAMGRRLAVRLYWMWRNGCAYSPSLEFGSYVGQPGTGHGVQ

SEQ ID NO: 481992 - protein, 425 aa, unidentified
MATTTIDAKPRFVALDVHKHYLVVGALTAPQEIVLQPKRVELPAFPTWARTQLRATDQVVLEMSTNTWELVDLLTPLVAKVIVANPLKVRLIATARVKTDAADTLILARLLAAGLVPEVWVPPPAVRELRALIAHRRRLVANRTQARNRLQGMLHRHNLLPPEGGLFAPAQRTWWTELQLDTSERLRVRQDLSLLDSLEPLISEVEAELVRLSQTAPWAEQVPYLIQLPGMGVLTAMVILAAIGEATRFPSAKQLVGYSGLGASVHASGQTYHTGGITKQGRRELRHALVEAAWAAIAHHPHWKSVFTRLSARLGKNKALIAIARKLLVVVWHVLTERQADQHADAHQVALKLVVWGRQLGPRGRQGLKTSVFVRRELMRLGLGADREQIGWPSVQAARLPSEEEVRHLLAAANAPPQEDTVAVA

SEQ ID NO: 481993 - protein, 419 aa, unidentified
MEDIKAKKVKSINEKTLIVAMDIGKGVHHAYFRAPNGREMRTFPFSNSRESFESMWARICQFKTLQGLDEVVVGFESTGPYAEPMCHFLSKKPVRLVQINPMHTKRLKELTGNSPNKSDQKDPRVIADIISLGHALSLVVPEGPAAQLRRLTQARERAMKRRTALSNQLQHLIFLIFPEFLNLMKDISCKTAIYLIKTYPTPESVIGLGLEGLAMQLKRVSRGKVGREKAEALLRAAEHSIGIKEGRQSLLLEIEYVVSQLGADTQFILSLEKQMEHFLEQTPWSRSLLSIKGIGRVTVAGLIGEVGDFKKFHTVSEVMKLAGLDLYEISSGRHKGQRRISKRGRSLMRKLLFFGAINAVKSKGILNKPYHEMLDRGMPKIKALVAMARKLLRVIFALARDGSVYMENHGYQEPLKLAA

SEQ ID NO: 481994 - protein, 372 aa, unidentified
MEERSKVHVGMDVHKDSISVGEAVPGRGPGRVVSKVPHDIGKLTKVLARLGSPDQLHLVYEAGPTGFGLQRKLTALGYTCEVIAPSLMPRRPGDRVKTDSRDCIQLAQCSRAGELRAVWVPDTGDEAIRDLSRAREDAVHARTQARQQLKGFLLRHDMRYTGKTSWCLAHLRWLSTLNFGAGAAQTAFTEYVLSVQAADQRVQRLDQALEQAIKGWRFEPVVAALQALRGVAMISAIGLVSEIGDLSRFEHPRKLMAYLGLVPSEQSSGDRVRHGSITKTGNSHARRLLTEAAWNYRFGARIGKEAQRRQESLSQPVRTMAWKAQLRLTRRFSVLNARGVQTNKICVAVARELAGFVWAVGTQALREKPLTT

SEQ ID NO: 481995 - protein, 326 aa, unidentified
MNIIGFDVSKDTLDCCLLKSSAKTDDALPHVKQENGIVGFEQIRQWIKKHRIRKVAIVMEATGIYYEAAANYFAQFYTVYVVNPLKIKNHAEKVFSRTKTDKADAALIADYGKRFLDKLSPYPYKQPEKAEYRLSKLNGLCLQLKAEIGRHKNQIHASTDAFIIEAHQSVITELTKQLESARQEMQTICQENEKINQHCQRLQTIPCINQQTALWILQNLLGKDFKTANKFIAYAGLSPEIKQSGSSVKDKEKLTRLGNKRLKTALFMPALSAMRSNYFKPFVARLRANGKYPKVIVVALMRKLLKLAYYIYKTKKPFDVNYKASS

SEQ ID NO: 481996 - protein, 412 aa, unidentified
MAMEALVERCAGLDVHQASVVCCILLGPPGCRPRKLLRTFGTTTHELGKLRAWLAEHGVTHVGMESTGVYWKPVYAALEGHFDLTVGNAHHIKNVPGRKTDVKDAEWIARLVRHGLIGKSFVPPPPIRDLRELVRFRRALVEARTAERNRLLKLLEGAGVKLAGVASDVFGVSGTAMLKALAEGAAEPAAVADLARGRMRRKLEALAAALDGQVREHHRFLIAVQLRRLEAIARDLGELDARIEAQLEPFRAQHRLLTQIPGVDRVVAAGIIAEVGVDMDVFATAQRLAAWAGVAPGNHESAGRRKGAATRKGNVFLKATLFAAASAAVRTKGSYYRDKYHRLRARRGPVRALVAVAHKLLIAAFHMLRTGGPFRELGEDFLDRVSRKRSTTKLVRRLAALGYDVLLVPKAA

SEQ ID NO: 481997 - protein, 410 aa, unidentified
MGYETINRRAHVMTRKNTLKSLPTDTEFRVVGLDLAKSDVSVAAIPVDDNTPSLVDRMTYADLLDWAGKISPTLFAMEPCNGYSLLCLQLENLGHEIKVISGSTVSMWINTHLSGQKTDLNDAIALARLAVSDAELTPIRHKSITEIRIQTVQAVRQQLMSQRSKSIVSFKALAQQWGIPCAAGHRNLKKLRESIEAKVDLITRPVANAMLFLLDAVKSLDRQIGQLNQTLQELVMSDERGLLLQSVLGVGTQISARVITVVGNIERFNSPRSLVAYVGVAPRNFITGHKNLTKKKHGNCPDLSHKGQGKISRRGDKLLRSLFIQGAACLYMQFCKDQLPECQLKRWILKQLARQKPYGKLIVSLAAKLIRIVWAVLTYREKFNIQKAGMTRSMWSEMALETPLNKEVPA

SEQ ID NO: 481998 - protein, 450 aa, unidentified
MGKALPLQIVNPHAAGIDVGSRSHFVATDQVRGNVRSFGICTKDHEELIEHLRDSGVTSVAMESTGTYWQTLFNALQKAGFEVLLVGGSQTKNVQGRKTDVLDCMWIQKLHSLGLLSGSFLLSDTLQEMRTYYYHRQHLVEQISRYTHKMQKALRLMNIRLDVAIRDITGKSGLAIIEAILAGSRDPQHLASLVDVRMKKTQQQIAEALHGSWREELLFELKSCLNFYRLYEEALRECDQMIESSLMKHAPQTIISELEEKALKQSKKKSSKNSPEFNVPKIAYQYFKTDLLAISGISYGTVLCLLTTMGKDLHRFPTAKSFASWLRLVPNNKVSGGRIISSHTPSGKSCLAIALRQAANSIGNQKDHELTPFFKRIAFKKGRIAAITATARKLAVIIWNMVTKAEPYKKKEIGESNEKSRRNGLRQVEKRIQALQLNQSELEKLFSSSL

SEQ ID NO: 481999 - protein, 462 aa, unidentified
MSRPRSTPATHRIEGLPTIFANAAGIDIGADEIVVAVPPDRDPEPVRVFRTFTPDLEALAAWLLSCRIDTVAMESTGVYWVPIYELLEQQGMVPYLVNGRHVKTVPGRKSDWNDAQWLQKLHALGLLAASFRPDAEIAVLRTLVRYRAELIQHRAPHILHIQKAMQQMNIQLERVLSDIMGVTGQAIIRAIVAGERDPVVLAQLRNPACKSSEEMIAKALTGTWKEELLFVLQQALVIYDVYTAQIAVSDSELEHYLQQMEARSGDPTAPLPDLPPAKTDSHSKNAPSFNARAHYARLLGVDLVAVMGLSSSSVQTIISEIGTDMSRFPTVKHFGAWLGLAPRNDISGGKVLRSRTRKVTNRATQAFRQAAQSVSRSDSAVGAYYRSMRARKGPEQATVATAHKIARIVYHLLKYGEAYEAESAAAYEQQRQERELRQLTRRAAKLGYTLTPAQEPLADTSP

SEQ ID NO: 482000 - protein, 430 aa, unidentified
MEVIYPKACGVDVHKSFIVAVICDSTSVKPQYLRKRFSTFNNSLIEFRNWLLANDCQNVCMESTGKYYVPVYNALEGHISNVVVANPKWVRCIKGEKDDNKDAKWIADLFKLGIVRSSFIPDKDIRILRELTRYLYKLTNMRTSEKNRFTNALTVGNCKLDMVFSDIFGKTSSAIIDTILSQNEYNDEDILKNIHKNCKSSNEDILNSINGISWETSQKQRMNIIQEHIDYLDKAIKSVREIIDSIIAPYESAINLLCSIPGIDRKSAITIISEIGTDMNQFSSHYRLTSWAGLAPGCNESAGKKKSVKISRAGVYLKPALVEVAHCAVKDKDNAYYANKFNILSKRRGKKRAYIAIARKILVAIYHMLSTGELFNPTDLSKVETSDKDKIKFTKNNFMQSTKQLISLGLTIDELQILIQSKISESTPII

SEQ ID NO: 482001 - protein, 383 aa, unidentified
MKINMPEVSRIIGLDLAKKSFVGCILSGEGFVKKQMFSGKMTQDEKGWEYIQSRINTDDLVLMEAGTSSFSLARYLIAHSAAQQIVVLNPGMLRVIWMSQRKSDKSDAVKIACIARDMAMEAWPTIPIPTEQEQAERSTINSYVFIKKQETQLVNRLYGLFNSLGYPEIKRTILRDDPEGRRLLAKQLLSKHRLALQDAEMMLDQLDLVQQQIEARLESLRKICLAHSRQALSWLSIPGIGLINAATLIAYVGDGSRFSNPHQLLNYAGLVPKQDQSGDLDKHLGITKRGNRAIRRNIVQGAWVVTTLEPTCPITKYAYRKKKEGKQKQKVAVAVANKMLRIGFSLLKSGDLYRPMMENGIGKLKEKLRTYKLQTLMKTVLDD

SEQ ID NO: 482002 - protein, 344 aa, unidentified
MQITTIGLDLAKHWFQVHGVDAAGKVVVKRRLRRAEVVEFFKTLEPCLVGIEACATAHHWARELIALGHEVKLMPPAYVKAYVKRNKNDAADAEAICEAVTRPSMRFVPVKDADQQSVLMMHRARNLLVRQRTMLVNALRAHLAEFGVIAAQGLRHVEQLIAAIEAESTALPELARSILRLIVTQLKDTQAKIQQVEAKLAQWHRNSRLSKLLATIPGVGIMSASAIAATVCDPNLFRSGREFAAWLGMTPRQNSSGGKERLGRTSKRGDKYIRCLLVAGAVAILRHARTRATKDAEWVRGMLARKPAKVVAVALANRTARIIWAVMKRGGAYKATGMIGVQTA

SEQ ID NO: 482003 - protein, 403 aa, unidentified
MTMRRRAWVGIDVGKTSHHACAIDETGKVVWNQKVSNEQRAIEQLVTRACKGAEQVQWAIDLTSPMALMLITVLLCAEQSVVYVPGRTVNTMTHAFRGEGKTDAKDARVIAETARLRNDLSNVVLPDELVVELTQLTGYRADLMADWVRGINRLRALLGSIFPGLEAAFDYSTRTPLILVSGLCTPAEIRAAGIDGMTAFLVDNHAWPTGIVKSAATAAALANEQPLALPGEAGTAALVKRLACRLLELDREIKDIDKTITARFRDHPYARIIESLPGFGPGLGAEFLVVTRGDLASFATAGRLASYAGLVPVPKDSGRITGNLRRPKRYNRRLRRVFYLAALSSLRADGPSRRFYDRKRAERLIHTQALLALARRLIDVLWALLRDDREFTPEKPITATAAA

SEQ ID NO: 482004 - protein, 400 aa, unidentified
MSSRCIGMDVHRDECEIAIWERGVVRRAGRVASRPEALERFAARMLQPTDEVVLEATTGAGRVAAVIGPHVAKVIVANTHRLAAISQSKKKTDREDAKILAQLLAAGMIDGAWLPEEETRALRRRVTRRHGLVVGRTRAKNKVNAVLGRNLHQRPPMSDVFTDRGRRWLGALDLPDDEVETMSAALRQIDFFNVEIETIERELARFGADSAEVRRLMTVPGVAMVTAVTFLAQVGEIARFASPRHLVGYLGLDPRVRQSGERDARMGRISKEGSGLVRHVMVEAATAAIKTPGPLRAFYQRLRAKKGHQIAIVATARKMVTIFWHLLSRGEDYRHGLELPTKKKLRKMELKAGAEARRGGDGKSRGSTREQRRTLEIAELEQVEADYRAMVARRTRADRG

SEQ ID NO: 482005 - protein, 354 aa, unidentified
MIWLGADLHKASHTLAAVASATGELLGDRTIRVGEPGFAAALTWARGLGSERVWALEDCRHVSGSFERFLIAHGERVVRVSTRLMAGERRGSRDRGKSDRIDAIAVARAAIREGVEQLPQARLAGVELDLRLLVDHRDRVIRMRTALQNDVLWHLHDLWPEQRFPRNALVSRKWGQPIARRLARAEQTARVRIAREELRQIRDLTRSADALEVEIAELVSQVAPHLLDEPGFGPLTAAKLIGEIAGADRFSSDAKLARASGIAPIPASSGKTQRHRLDRGGNRQINAAIHRVAVTRARCHPESRAYIERKRAEGKSSKEAIRCLKRHLVRRIWHLLQTPAPNPSPTALTTTSLT

SEQ ID NO: 482006 - protein, 370 aa, unidentified
MDSITYVGLDVHKTTISVAVADGGRSGEVRQLGVFTNRVDVVRKMVERLERPGRRLRFCYEAGPCGYGLHRFLTGLGHGCTVVAPSLIPVKAGDRIKTDRRDAVMLARLHRAGELTGVWVPDAAHEAMRDLVRARATAMKVLSKARQHLGGFLLRHGRIYSGVRTWTQAYRRWLTTVRFDHPAQQIVLQDYIDAVTNAERRVDRLTLQITEHLPSWSMAPVATAIQAMRGVALINAVTIVAEVGDFSRFGNPRQLMAYLGLVPSEHSSGGAVRRGGITKAGNLHARRALIQGAWTYRMQARVSRKLYDRLEAVPQNVRDIAWKVQIRLCSRWRRLAASGKPKVVVTTAIAREIAGFIWAIAREVQPQAIG

SEQ ID NO: 482007 - protein, 400 aa, unidentified
MNERKTQVWAGVDAGKGHHWTAVVDETGATLWSKKVDNDESAILTALGEILDLADEVHWAVDISGTSSALLLALLAAHGQQAVYVPGRTVNRMSGAYRGEAKTDARDAYVIAETARHRNDFTAIDVPAQLAVDLALLTAHRTDLVADRVRMINRLRDVLTGVFPALERAFDYSAHKGALVLLTGYQTPAAIRRRGRARLTAWLANRGVRGADAVAETALAAAQAQQTALPGEDVAAQIVAELAGQLLALDDRMKRIDKQIRETFRSHPQAEIIESLPGMGPILGAEFVVAAGDLSAYADAGHLASAAGLVPVPRDSGRRTGNLHRPKRYSRRLRRVFYMSAQTSMTREGPNRDFYLKKRSEGCKHIQAVIALARRRASGLWALLHDNPGFTPAPPVTQAA

SEQ ID NO: 482008 - protein, 319 aa, unidentified
MAQNDLVVAGIDVAKDKVDVCVRSLSLKRTFASTAEGRRELTSWLRRHKVGKAVMEASGGYEREWAKALRAAKIEVRIVDPKRVRSFAQSAGRLAKNDTIDAEMIAWFAETFDEARGQAYDAMREQLHQMVNARQALKDMQTKLESQGEHALPATVQRIHARIMKTIAVELVKIEAAISAMIQATPRFTELAEIIESVPGIGRTTSAALIAAMPELGQANNKIVAALLGVAPYDDDSGRRRGERHIKGGRRRTRNVFYMACLGAATQHNPVLKAFYDRLVAKGKQKKVALVACMRKLISILNIMIERRQKWDANRYAVS

SEQ ID NO: 482009 - protein, 339 aa, unidentified
MKYIPVGVDIAKHLIQVHFINEHSGEVVDKQLRSKDFLTFFSNREPCLIGMETCGGSQYWARELEKLGHKVRLMQGRFVKAFDMGNKNDVMDARAIWMAVQQPGKEIAVKTEEQQSVLVLHRSRRQLVKFRTTQINALHGTLLEFGETLHKGRAALNRELPAALERMKTRLPPYIITVLEDQYNRLSELDSLIDGIEKQLISVARQNETCKRLMEIPGVGPLIATTAAATMGEASAFKSGREFAAYVGLVPKQTGSGGKVRLPGISKRGDTCLRTLFIHGARAAALLAKESGPWITELKKRRPTSVAIVAMANKLARTVWAITAHDRKYDTEYVSIRPN

SEQ ID NO: 482010 - protein, 362 aa, unidentified
MGEGTFVGLDVHARSVVAGVICERTGQVRVQRVPHALDDLVSWIRGLEGPVRVAYEAGPTGYGLARACEAAGIACTVAAPSHIARSPAARQSKRDQSDAENLARLLRRGELVSVRVPDALDEAARDLVRARDDARADLMRTRHRLSKFLLRHGHVYEARTWTLVHEDWIRSRRGAVGGPVADAVLDAYYGAMIEVRARRDHLDELIAICAKEPRWSALVARLECLRGISTLTAFSLAVDIGDWRRLSGAAMGPYLGLVPCESQSGQRRTRGPITKAGNGHLRRLMVEAAWHQRTPPRPSTVLARRRARCRPEVIARAEAAQVRLHRRWAHLHTRRGLRSTVVATAVARELAGWCWSLAVMED

SEQ ID NO: 482011 - protein, 344 aa, unidentified
MVIIGIDAHKRSHTLVVCDAQGRKLAERTTGTSSRDHLGLLRWAARYGSERLWAVEDCRHLSRRLERDLLSSGEQILRVPPKLMANARAGARSYGKSDAIDALAVARAALREPTLPLARLDGAERELRLLVDHREDLVQERTRVSNRLRWHLHELEPGAEPAPGSLKRRCALERLGAALEGAEGLVARLARDLVARCRELTIEIDQLEAEIGELIHEQAPTLLAIVGCGSLTAAKIVGETAGIERFRSPDAYACHNGTAPLPVSSASRVHHRLSRTGNRQLNAALYRIALTQAQWHPEAKALIARRRAQGDSGREALRVLKRRLSDVVYRALTADAAAALRLAA

SEQ ID NO: 482012 - protein, 321 aa, unidentified
MTYVGIDVSKVTFVVAYSSVKTNKTRTFKNTVNGVHEFVQTISASEHNCVLEATGNYSALLVYLLSEAGITISLENPLKIKNFARVMLTVTKTDEIDARLIALYGEKMQPAPYKLRSDAILVLKQKRTVLRQLKKQLVATRNLKGSMEVLPFFDPKCKKTIEKTITFLEKQIKEMEEELASLAQGEYKKQMDLLTSIKGIGVTLAAPLIVATGRFSYFDNAKQLTRYLGLSPTYQQSGTSVNVKGHINRNGDSSLRSQLYVAVFSSLRCNTECKACFDRLRSNGKPGKVVVIAVANKLVRQAFAVVTQGKPYVDGFKSEKP

SEQ ID NO: 482013 - protein, 406 aa, unidentified
MAVMIGIDPHKGSHTAVAVTATEEPLGKVRVRACPAQAEQLVAWAAAWPERTWAVEGAPGLGRLLAQQLVAAGERVLDVQPKLAARVRLLQTENTGKSDPNDALSVAVAALRSKGQRPVLADDHATVLKVWAKRHRDLSRAHNQVACRLHAVLCDLVPGGVADEITAGHAAKILGQITPADPAAEARKELAAELLADIRHLDAQRREIKKKLATAVKASGTSTTQIFGVGPVIAATVIGDVVTVARFPRRDHFAAYNGTAPVEVFSGEKKIYRLSLRGNRRLNHAIHMAAITQIRYKHSDGRGYYERKIAEGKTHKEALRCLKRRVSDALYARLRADARNAAAASTRDPGGQPGNDSVSSAAGSHPEHRLFGSATPGPAPSLRSATALPQAMRPSEPSAKKTRRDP

SEQ ID NO: 482014 - protein, 354 aa, unidentified
MNIKYIGMDIHKEAISIAVMNGDGKLVMESIIETKASTILQFVQGLRGDLHVTFEEGTWAAWLYDLLKPHVTELVVCDPRKNAVMKQGNKSDKIDARKLADLLRGGYLRSVYHGENGLRTLKELARSYLTISKDLTRVMNRVKALYRSWGILCGGQQVYAPRHRAEWLNKIGEAGVRRRAEFFYQQLDALRALRQAVRRDLLAESRKQSATKLLRQIPSIGPIRAALLIALIQTPHRFRTKRQLWTYSGLAIETRDSAQYRYVAGQLQRSKKPQQLRGLNQNHNHDMKAIFKSAATMASSREGGFQAFYQGLLMKGMEPAMARLTLARKIAAITLILWKKGAHFDAEQVKSQAA

SEQ ID NO: 482015 - protein, 344 aa, unidentified
MANLNQFCDFTKLIGIDIAKSVFQIYSCDTQTGEITNVQIKRDKVLESLANCGKCLIGMEACGSSQYWARKLQALGHTVRLMNPKLVKPFVRHNKSDKADAEGVYHALVSGVRAVAVKTETERDIQTLLTMRALLVKQRTARINHVRGLLAEYGYVMPKSVDQFDKKVDACINSLEGDAVQLVIDMLRDTVKSIRDEHDRIKTLQREISRLANQTRNAKHFLTVPGIGETIMAYMCVLLADTTQFSSGRQFAAYLGLVPMHTGSGGKTVTTKIPGRCDKALRALLVQGAHAVARSKYRTDWVKNILAKKPKKVAMVAISNRMARQCWAVASKGQDWRRMPVTAA

SEQ ID NO: 482016 - protein, 342 aa, unidentified
MNLTQNDRLKQVTSDTLIVGVDVGSQTHFCRAFDWRGFELSRRVFKFSNTGMGFLTFLRWAEELMNKTEMKKVIVGCEPTGCYWLTFQKFLQDHDIQLVTVNPFTVNRSMELDDNSPEKSDLKDPKTIALLVKDGRFSTSYLPSGVYAEIREASVCRDQIMKQHVRLSNQIQGWLQKFFPEYFECYADWDSTSGLMLLREAPLPQDILKIGAGGINQIWRDAKVRAAGIKRAQTLVEAAQNSVGLEAGEAARLEIWVLVNDYILKAEQLKRLDEYLEEKVKEVPNVEKLLAIKGVGMSTVIGFIAEVGDIGRFTDSKQIQKLAGLERVKKSSGKKERSAKNQ

SEQ ID NO: 482017 - protein, 355 aa, unidentified
MLAEQVDHVIGVDTHRDSHTAAVLNTAAALQAQTTLATDAFGYKRLLAFARKHAPGRRCWAIEGTGSYGSGLTSFLLERGEWVVEIDRPKRPARRNGAKSDDLDAARAAREALSREHLAQPRQRGWREALRVLLITREGAMISRTKALVHLKSLLVCAPSSLRDQLRRHRTDELVARCSRLRTSPTQTPEHRATITALRATARRALTLEAEAADLESQLELLLVEVAPDLMDQPGIGPISAAQLLIAYSHTGRLRSEAAFASLAGAAPIPASSGQTVRYRLNRGGDRQLNRALHTIILSRLAHHPPTRAYAQRRTAEGRTAREIKRCLKRYLARQLYRQLQTNPQLTPITANSVT

SEQ ID NO: 482018 - protein, 391 aa, unidentified
MIYIGIDVAKDKHDCFITNSDSEVLFKAFTIANNLDGFNDLYQKIESVMDDVTKVKVGLEATGHYSYNLLGYLIDKGLPTYVINPLHTNLYRKSLSLRQTKTDKVDARTIASMLMSDVNLKSYSDTSYHNEELKSLTRYRFDKVKERAKLKTSVSRLVCILFPELEKLVPTLHMASVYALLSEFPSAKHVATAHLTRLTNLLSESSKGRYGKDTAITFRDSARASIGSNMPAKSLELKHTIKLIQELDSEIDEIENEIKIIMDEINSPILSIPGINYRMGAMIIAEIGDFNRFDSPDKILAYAGFSPSTYQSGQLDGAYAHMEKRGSRYLRYALYNATKYVCHWDPTFAAYLAKKRAEGKHFNVAISHAVKKLVRVIYHLEKTKQQYIKVA

SEQ ID NO: 482019 - protein, 412 aa, unidentified
MASAVVDNTAEQEVVGGVDSHTDTLHVAVISDNGGHLADAEFTTTAAGYAAALAFLSAHGHVIAIGVEGTSSYGAGFTRAAREAGLHVVEVNRPDRAERRRIGKSDPIDAYAAARAALSGRAHAAPKDDTIAGTRALHNAARSAIKARTAALNQISSLLITAPDTIRAKYGRLKGTDRTDALARLRPAGDAVHTAVHTAVHTAVLTALKSLARRVRELTAEHQTLVKALGSLVTLHNPGLRAAHGVGPDTAAQLLVAAGGNPDRMSTEASFAALCGAAPVPASSGRTNRHRLSRGGDRQANAALYRVALVRMSSDSRTREYVASQTAAGRTKKEIIRLLKRAIAREMFRCLTTTVPVPGIADLRPLRQTKNITLTAAARHFGLWPATISALERGIRRDDDLAHSYRNWLQAA

SEQ ID NO: 482020 - protein, 483 aa, unidentified
MKSKPKEKNRKATDHRTQRHWHEMNRKQRRETMRKIQSEDLSLEVVHPDAAGIDIGNESHYAAVPPSRDNQPVRRFGCTTAELKAMAAWLKQCAIRTVAMQSTGVYWIAVYDILEQTGLEVYLVNARDTKNLPGRKSDVQESQWLMKLHTYGLLRNSFRPSQEIRTMRTYWRQRNDLVQAAARHIQRMQKALTQMNIQLANVLTDISGATGQAIIKAILGGERDPHKLAAFRDPRVKASEEQIAQSLEGNWQPDLLFVLKQEQDGYEFCQKQMAECDRQLAQYLQQREDRSQGAMLPVEKRKGRLKKKKGNAPRFDLRERLFCLTGTDLTRIDSIDVQTATTVISETGYDMSKWQTENHFVSWLRLRPDNRISGDKIIGKGRLPTNNRATIALKMAASTLRKSNTYLGAQFRRLRTKLGAPCAIKAMAAKLARLIYRMLRYCMKYADKGAAFYELQYRQLQIKHLKRKAASLGYQVTQIPAAA

SEQ ID NO: 482021 - protein, 374 aa, unidentified
MENIITYVGMDTHKKQHKIALHYPRQEEIVEFTINNTVRDIKKMVNRIKRQAPGQVRFCYEAGVCGFTLKRRIEDMGYECLVIAPSLVPRKPGERVKTDRRDAKKLLMLLKAGLLTEVHAPDEQAEAARELTRLRETARDNLKRVRHQVLKFMTRHGYVYRQGSHWTEKHITWIRNVKFTEPTLTRTFENYFDEMIYCLARLENLDKEVELLAESEEYKETVGILCCFHGIKTLTAITIITEIFEFGRFESPHHLMSYLGLTPSENSSGEKQSKGSITKAGNKRVRRLLNEAAWHYRHRYVPSKMLKKRREGQPQWAIDIADSAGRRLTKRHRHLINNGKMPCKTNIAIARELAGFIWFAVTQYQARKNTKVTA

SEQ ID NO: 482022 - protein, 360 aa, unidentified
MEVEQGATGRFVVGGVDTHKDLHVAAVVDEHDRVLECQCFATTRHGYKLMLAWMRAFGPLRRVGVEATGTYGAGLLRYLQKAGVEVLEVTTPDRQDRRKRGKNDDLDAQNAAHAAFAGKRTVTPKSRDGMIEALRVLKACRKTAVAARRVALQMIHNTVVSAPDELRDTARELTRMELIRTLAAWRPDMTDYRNVTSAYRITLRSLARRYLELHDEIADLDDMIRAIVDELAPDLVERNAIGHESAAQLLLTAGDNVERLHSEAAFAALCGVSPVPASSGKTTRHRLNRGGDRAANSALHIIAIGRLRTDPKTKAYIAKRVAEGHSKLEAIRCLKRYLAREVFSLIRKRSREINQRQIAA

SEQ ID NO: 482023 - protein, 341 aa, unidentified
MEQATTIGLDIAKHVFQLHGADAAGHVLFRKRITRVRLLSFLAAQTRCVVAMEACAGAHYWAREIAKLGHHVRLIAPAYVKPFIKRQKNDAADAEAICEAAQRPSMRFVPVKTEEQQANGIVFRARDLLVRQRTQCVNALRGHLMEYGYVFPKGITHVETLIALVEDLQSSLPDSVRVILKLLIDTFTALEAQIAVLDAEINQRSKSDPTARRLMTIPGVGPIASTAITALVPAAEGFPAGRDFAAWLGLTPLQKSTGGKQKLSAVSKRGERTIRRLLIIGASAVVQQASRRGAPKGSWLAQMLARKPKMLVTVALANKTARIIWALLVKGGTYRTPAAAA

SEQ ID NO: 482024 - protein, 320 aa, unidentified
MRNAVGLDISKTTFDATAIIGGIEKSAKFDNDSKGFEQFKGWLTELGCTDAHICMEATGNYYEGIADYIGSLYKVSVVNPLKISKYAESRFTRTKTDKQDAKLIAEYCQTAKAQDLVIRKPVINDGYKLKRLSALYAQLTADSTAQKNRLEAAKDTFVVKICQSNIKHLQRQIKAVKKELEKLTKQSALKDQTDRLATIPAIGRLTAVMLLNYLSGTDFPTSNKFAAFAGLTPQIKDSGTSVRGKPSLTRYGNRRLRAMLFMPAMVAYRIKAFPDFIARLEAKNKPKKVIIAAIMRKLAVIAYHVHKKGEDYDPTRYKAA

SEQ ID NO: 482025 - protein, 351 aa, unidentified
MDRYLGLDVHAESCTLAVIGPSGKRLKSVVVETNGHALVEAVRSIPGRIHLCMEEGTQSAWLHELLSPHVEELVVAVPEKTRGSKNDERDAWARAEELRTGAIRTRVYKAPVHLAALRNAARAHGMAVQDVVRVKNRLKAVLRSRGILSDSGVYDPEVRGRWLGQLPAAHQQLADWLGRELDRLEPLREEAEAWLLKEAKTHPIIRTLATAPGMGPIRTAQVVAITANPHRFRTRRQFWSYCGLGIVTHSSADWVNRKGRWVRAQVQQTRGLTRKRHPLLKSIFKGAATTVIVKLPDDPLHVAYERTIQAGTKPNLAKLSLARRIAATVLSMWKHQEVYDPKRHQTIGQKS

SEQ ID NO: 482026 - protein, 315 aa, unidentified
MNTTNTKYIGIDISKERLDVCIPDCKASSYPNKPGDIQRLVKAIQAAGSAVHVIMEPTGGYERKLAHALWDAGIPLTLANPRQVRNFARSCGQLAKTDKIDAYILSEFGYVNQPQPSLAPSPEQEQLAHLVTRRSQLLVMQNQEGNHVENETDKAILKQSRQILRLIEKQIEELNALIAKVINDNAQMKAKAARMRELKYVGDVTVSTLLAFMPELGTLTDRQAAALTGVAPMNRDSGGMRGHRFITAGRGKVRNVLYMIAMALSKHNAFMKVRYDRLKANGKPTKVAFVAIMRHLIILINRMLKNPNFVLQETP

SEQ ID NO: 482027 - protein, 363 aa, unidentified
MKEYISFDSHKHYTLAEREDGATGRAVQKRIEHSPGAVREYLQGCEPGTAVAVEATGNWYWIVQEIEEAKMRPLLVHPRKAKLMMGLINKTDQLDVHGLNRLQRNGTLPTVWIPPGELRDLRELTRTRLVLTRQRTQLKNRISATLAKYGLQQSDCSDRYGKKGRRSLEQRVQELPRHTQWATQLLLEQLDFVSDQIQKTEQKLNHLLQETPDMQLVTTAPGIGAILATTMALEIGDISRFAVPERLASYSGTTPRVHASGGKVRYGPSRSDVNRYLKWAFAEAANSVAVNHRRCPQRHVSQLYRRLRKKTNHPKAIGAVARHLAEAVHVMLTRKQPYKERNRPTGLEVEVHARFRHELSVTH

SEQ ID NO: 482028 - protein, 346 aa, unidentified
MPYSTTVGVDLAKNVIQVSVVSGRGKELSNRSLTRKKFAELLGKQKPSLVAFESCATAHYWARAAKRHGHEARIIPAKAVAPFRQGHKTDSNDALAVAEAARRPKIKEAPMKTVEQQGLQAIHRSRDLLNQECTALSNHLRGLLMEFGLVIPKGFASLMKAVPEILEDGENELPDLYRPTLHRMYNRLLELREDIGAMTKEVECLAKAHPICSKLMALEGVGPISALLLYATMGSGVAFSGSREFAAYLGLAPRQYSSGGKTNIVGLSKKIGNSQLRSVLILGARAYVYKFKEPKSAKDKWLKAIIERNGESRAAVALANKNVRTAWAMVTQGTEYQRRQQLEMAA

SEQ ID NO: 482029 - protein, 325 aa, unidentified
MIHQVIGMDVSKEAVDISVYNGKYHKHKILTNTPKSLLTHLKKFDLQSTHLVMESTGIYHLRLAMAATERNYNVSIVNPLIIKRYGEMKMRRAKTDKADAKLIAEYGYEQQPPLFKPASKERSQIQQLLKGLEDLYHSKSQMSNRLEAYDHGLGITPALRESITTIINTINEEIDKLTDELNDHMDKHYPELKEKLTSIPGVGAKTASTIIAYYGEFENFETAKQAVSFAGLNPNPRQSGKSVNKGSNISKKGHSLIRKTLYMCSLSLVRCNPEFKSYYENMVAGGKAKKKALVAVANKILRQIFAILKYDREWIPYYSLKYNKA

SEQ ID NO: 482030 - protein, 353 aa, unidentified
MHTHQNSSNPVATIGIDIGKNTFHLVGLDKRGAIVLRTKVTRNQLERRLANVPCCLVGLEAGCGSHHIARQIRALGHDVRLIPAQYVKAFLKGHKNDYRDAEAIAEAVQRPTMNFVAIKTPEQSDLLSLHRVRSRLVGQRTAVINQIRGFLMERGITVRQGPAPLRKALPAILSSPTEPLSARIVRLIADLSEDWRRLDARIAAVSAEIETLAENDGSCQRLMTVPGVGPIISSAVVAAIGNGGGFRQGRDFGAWLGLVPKQESTGDRTKLGKISKRGNRYLRTLFVQAAHVVLVRRPAAAMRGLWPWIERAAKRLAHRNLLAIALANKLARIAWAVLARGRDYEPRITTNAA

SEQ ID NO: 482031 - protein, 338 aa, unidentified
MTIEILGIDIAKNVFQLHGVNCNGRVVLKRRVMRDQLLEVLAQINRCTVVVEACTGAFYWARKFEALGHQVKIISPQYVKPFVRRQKNDGNDAEAICTAARQPHIPFVPKKTLEQQDIQALHRARQRMVNHRTAVVSQIRGLLLDRGFAMAKSITRARRLVPDILANFDNELTPMARDAIGELYDLFRDLDRRIASFDKKIEQVFRNSETCQRIATIKGVGPKTATAIVAAIGDGAEFKNGRHLAAWVGLVPRQFSSGDRKVLMGISKRGNQHLRSLLVHGARAVVRTAPDKADLNNQWVNQLRERRGFNRATIAVANKNARIIWAVLRTGEPYRAAF

SEQ ID NO: 482032 - protein, 467 aa, unidentified
MGKRSGGNEMTRGDRRRNARRERLRGLLPRDGAVIGIDLAEDKQALAVIDHDVRVLARKTVKVKAFRLGQALDWAAGQARVKGFERVTVACEPTGPRWMQVQRLCAERGLPLVCVQPLVSHIAREQQDYTPHKTDESDCVLIGRLATELHCYVPEELDETWAHLRHLGRRRAQLITAATASVQRIRDFLSVAWPTVTEACAGPFESVTWLAALQVVTARCGGDPARLAALGLEEFTALVRGAVPGWGGKKGWSRICRRVFAALTDTEGVVTWSRRGLLRRCADELGDLQRTRAQLRAVEADMVLVLGELGLSRLGDIPGLTVVGAAAILAETGDPRRYDSSSSLVKHAGLSPSENASGALEGQAHISRRGRPGLRLTAWRAVWPMLQFNPVMAAKYAAMTQAAAAAAADAGSRQARAAAAAARARRAKARVACAASLLRWIYSMVIHGTSWDAAVASGVPACQPEAA

SEQ ID NO: 482033 - protein, 358 aa, unidentified
MKYIGCDFHPSFQQIAMLDKETGELVERRLLHTEEARVFYERLKEPVLVGIEASGNTHWFESLLTRCGHELWIGDAAEIARQDGRKQKHDRRSAALILKLMMENRFPRIWVPTVAERDLRQLLIHRQHLVRTRTQVKNQLQHIALNQGWQKKHKLWSEAGLQLLRSLKLDPWTQQRRDTLLEMLEELEEKIRPLDQAVEKEARAREAVRRLMTHPGVGPVIGLATVLTMGDVKRFPNSRSWVSYLGLNPSEESSGQRRRLGSISKQGNPFLRYLLVEGAISAARGDKDLARMYARLKAKKHHGVAKVAVARKLAVRLYWMARTQKSYPEVVRTQGSLKQAMAEVRAEVVNRPPASYQK

SEQ ID NO: 482034 - protein, 338 aa, unidentified
MKTYVGIDLHSNNNYIGVCDENDKRLYGKYHKNQLKEILNVLKTFKKSIQGIVVESTYNWYWIVDGLQENGYKVHLANPSAIKVYEGLKQTNDKTDSYWLAHLLRLGILPEGYIYPKDERPVRDLLRRRLLFVKQRTAQILSFQSMINRNRGQHMPGNSIKQLKENFAEDYFESPHLNFTAKRQIATIRFLGEQIDSIEKEVLSMAKLKDEFKILLTIPGVGNVLGLTIMFEVGDIGRFPKVGNYTSYCRCVESKRISNGKTKGKNNSKNGNRYLSWAYVEAANFSKRYCQKAQKFFQRKESKTNSILATKALSHKLARASYYMMRDKVPYDVDKLFR

SEQ ID NO: 482035 - protein, 325 aa, unidentified
MPRTATVHAVTAIGIDMGKNTLHMVGLDTRGTIVLREKVSRGRITSRLANLPPCLIGIEAGMATHYVARELAVLGHDVKQVPPAYSKPFRQGQKNDFRDAFVVAEAVQRPTTRFVPAKTNEQLDLQALHRVRSRLVSERTAVINQIRGFLLERGIIVRQGLRFLRQALPDILAKRTDVLSPRMVRIIADLASDWRQLDERIEPVTDEIETLAKSDSSCRRVMTVPGIGPIISSAMVAAIGSGAAFARGRDFSAWIGLVPKQMSTGDRTILGRISKRGNGYLRTLFMQAARVILLRPASWPKHGFGVWLARAAQRLHPQRFGRRSR

SEQ ID NO: 482036 - protein, 436 aa, unidentified
MTLINFVAANQKYYAFNLLSVFIMVFWSVQYLLQHLLVQTQVSHQLLQPLILILQLPQTPQFRHARPGKFFLPVNGMDYFLPLRLTVRNVLTRRITMNIVFLGIDLAKNVFQLCGLNQAGKPVYTKRTGRKELLQTLANIPACLIGIEASTGAFYWQREFEKLGHKVKVISPQYVRPFVRGQKNDGNDAQAIAVALMQPTMQFVPPKSPEQQDIQALYRARQRIVNHRTATVCQIRGLLLDRGIPIGSAVSRARRAIPLILEDAENGLSSRMRRTIAELYDLFNDLGRRIHFFDKEIETVFRQSEACPRIAKVKGIGPKTATAVVAAIGKGTEFKNGRHFAAWLGLVPRQHSSGDRQVLMNMTKKGDKHLRTLFIHGARAVVRVATNNNDGHMNQWVNQLKERRGFNKTTVAVANKNARIIWSMLRNDTGYQVVCN

SEQ ID NO: 482037 - protein, 402 aa, unidentified
MSSLFAGLDWASRAHAVCVVDERGSVVERFEAAHDAAGLADLLRRLRRPGSPSVAIERPSGLLVDTLVEAGLTVIPIHPNAVKATRSRYRSHGGKSDASDAYVLADVLRTDGHRFKALAPQGDEIKALQALVRGRDDLVATRVQLANQLRTLLESFWPGAAAVFADIDSPIALAFIERYPTPESAKLLGPKRIAAFCAQHAYCGRRSAEDLLARLHHAAAAMCAELEMEAKGELARCLARTLRSTVEQIRLLSSRIEHHVASLDDGKLIMSFPRAGRICAAQILSELGSVRERFLSDEHLAAEAGVAPVTYESGKSKAVTFRWACNHRLRAAITCLADNSRHANAWAANVYAKAKARGCDHPHAIRILARAWLRVIWRAWVDRKTYDSSQHRAAQLLKTVGG

SEQ ID NO: 482038 - protein, 412 aa, unidentified
MSYSQKRFVALDTHKLYVMVGAVNATQEVVLPARKVNMSEFETWAKKYLRPTDEVVLEATSNAWYFYDLLEPLVARVVVGHPPHIKLIAAAVVKTDKKDTFTLAKLLSVNMIPAVWVPPQAVRELRALISHRQRLIAQQTRTKNRLRSLLQRQHIGPTGGEVFSQANRAWWLKLELSSSEKLRMRQDLLMLDHLIPLIQEVEAEIERLSLAEPWVEQTPYLLQLPGIGLLTAMTILSAIGDIRRFPSAKKLVGYAGLGAKIHASGQTYRTGGITKHGRKELRAILVEAAWIAIRYNQPWREQFEHLAFRIGRQKAIVAIARKLLVVIWHVLSAKVADRNADPQQVARFFIAWGRQLRVKSSLGLKASEFARLHLDRLQLGQELARVPYGSVTYCLPPAAQTQPATETATTPA

SEQ ID NO: 482039 - protein, 382 aa, unidentified
MNSTQNKKIEQVKETTMIVGIDVGSEKHYFRAFNWRGIELTRKPVAFSNSMEGFNSFYNTIVELMQKSELEEALVGIEPTGHYWFDLGQFMGEKSIKFVMVNPHHVHKTKELDDNSPSKNDRKDPRVIAGLVRDGRYFYSYMPTGVYAELRNASNRRFVLVEEQTRAKNRLQKWIAVYFPEYKGIYTHIDAKGGLLVLKQAPTPEEIVKLGEEGIIKIWKDAKLRRNGNKKALKILNAAMRSIGLRTGLTEARMEIQDLIEDYELQTKRLERVNDLIKELCQQIRYADKLLEIKGIGITTVAGFIAEVGDITRFDSTKELQKLAGLELVADSSGKHNGKTKKAKEGASVSDIFFSRRRYRWWERMKNSKKSTGITPPGKRIH

SEQ ID NO: 482040 - protein, 417 aa, unidentified
MEGITTMDVVYRCCAGLDVHKQTVECAVRRLTQSGTVQVEIRQFGTMTDDLLEMVTWLKAQGVTHVAMESTGVFWKPIYNILEGHCSVLLVNARHVKQVPGRKTDVRDCQWLAQLLQYGLLKGSFIAPRWQRDLRDLTRERTQLTDEQTRVANRIHKVLEDANIKLGSVATDILGVSGRDILERLMAGEEDVEALAERARGRLRGKIPELRRALRGRLSEHHRFQLRLNWDHLQRLQELIERLDQRIRELSQPYHPQIEQLDKVVGIDQTSAESIVAEVGVEMKVFPSDGHLSAWAGMCSGNNESAGKRRSGRTPKGNRWLRRTLTLAAQAAGHAKDSFLASRFRRLAARRGKKRACVAVAHSILKVVYHILKDGRPYQDLGGSYFDRLDPQRLTRYLVRRLERLGLKVTLEPATVA

SEQ ID NO: 482041 - protein, 481 aa, unidentified
MALEPLAGYPPLPLRARVSVSCTDPGPWPPARLVPIGSGLPLQEVADGMKVMYEHVAGIDVHKEMIKVAIRSPGDKPWTRKTEILEYRTFYGVLQEMARELRRRGVAHVVMEASGVYTEPVYYALCEQDFTEVAVINPAHAKALKGHKTDAKDCARLAELFECGLLRGSYIPPAEQKEVRDLTRYRTKTVQARTSETQRLAKALESAGIKLGSVASEITGKGATAMIEALIDGERRGGVLADLAIGRMRSAGKLADLSMALTGRFTGHHATLCRLHLDRIKVFDDAVEGLDGRIAAGAARWQREAGLLKSVPGFADVVTGAWLAEIGPAPHRWFSRHEKLACWVSLCPGNNISARKRKHGRTGDAGTYIKPMLIQAAWSAIRVRGRLQARYNRLVRRFGGQKNPAAKKKAITAIAHTLLKIAYQVLKTGTPYQDLGADFYTRRNSPEEQQKYLERQLQKLHPGCTITITISPPEAALPSGR

SEQ ID NO: 482042 - protein, 373 aa, unidentified
MRYYNQPHSFYCGIDLHASSMYLCILDHAGQIVLHKDLPTQPDAFLEAIAPFRKDLVVCCECLFCWYWLADLCHAEDIDFVLGHVLYMRAIHGAKTKDDKIDSEKIARLLRSGMIPPAYVYPKGLRETRDLLRRRMYLVRKRAELITHVVNTNTQYNLPAFGKKLVYARNRTELNIRKRFSDPSVRMNIELDLRLLDTLDELIGDVELYLTRTVKVDLPQAYYLLNTIPGVGKILALVLLYEIHDIRRFADEGQFLSYSRLIRPLKRSAGKVTGGGGDKIGNAYLKWAFSEAACLLLRCSEQAKRFLARKEKKHGKAKALGILAARLGRTVYHMLHRGEAFDPQRFWNGEPKLKSAAGSAAQAKGGTRRRAKA

SEQ ID NO: 482043 - protein, 364 aa, unidentified
MSTLHYVGMDVHKETIDVSMYKENDSRPYCEKRIPNRDTSIKKLFKGLMKTGSVVACYEAGCMGFTLQRTLEGMGVTAVIAAPGKMPRRSSDRVKTDRRDARTLATYLRNGDIEAIRVPTEDEEVVRDYLRGREDVRLDQARTKQRLQKFLLRHGYVYESVRYWTGPHEKWLRSLEFKNPLMKETFDEYHVGIQELGGKLRMMDKRIDEIALSEPYAAKVKKLRCFKGIDFLTALTLVSEVGDFRRFKSAESFMAFLGLVPSEYSSGGKRRQGGITKAGNTHVRRFLIESSWHYRYSSSPSKRLMERRYGQPTDVIAYADRAMKRLQHKFFKLVLRGKTSQVAVTAVARELAGFVWGMMVGCTA

SEQ ID NO: 482044 - protein, 310 aa, unidentified
MNGVNAAIEVGKHKLEIALGSAGELWSEDNELRAIKRLVKRLVSACCTRVLIEGGSYQNMLVAALRSAELPVVIVNPRRVREFAKSIGQLAKTDRIDARILALYGERVQPPLRELPDKQGQALRALSVRREQLIEMVVMEQNRLEHAPKALHHDLRAHIDYLRKQIKRADDDLDRAVRESSLWDKYELLSSVPGVGPVLSRALVSDLPELGRLNRGEIAALAGVAPFNQDSGTYRSQRKIEGGRPRLRRVLYVATVAAVRCNPVLKPFYQRLRTRGKSPKVALVAAMRRLLLILNAMLKTHSSWRPPCPA

SEQ ID NO: 482045 - protein, 368 aa, unidentified
MLYSTSIGLDVHARSITASALVHETGEVVRASFPGGDARAVAAWAAGLPRPCRAVYESGPTGFALKRELDALGLPTVVGAVTKMLRPSGDRVKTDRRDADFLARMLAVGNVVECWCPTPAEEADRDLSRLREQVRGDLMRARHQLSKLLLRKGLVYPGRTTWTREHRQWLRSIGLPEPEERFVLSELLEAVAQAEERRRRVDAEIARRAAAPEHAPVVAALSGIRGVSTLTAFALDAELGDLSRFRDARSLMSYVGLVPSESSSGESVSRGAITRAGNAHARRLLVEAAWHHERPLSPASEARWRDAAPTASIAGACGRCNERLHARFARLRGRGKPGCVCATAVARELAGFVWAIGSEAQALAGPAS

SEQ ID NO: 482046 - protein, 312 aa, unidentified
MENVVGIDVSKARLDVYWGSDESLTQVANVEEAIEGLVAALKARAPTSIVLEATGGLQRQLVAALVAGGLPVAVVNPRQVRDLAKATGRLAKTDQIDAKVLALFAAAVRPAVRALPDEQSQAFADLLSRRRQLVEMLTMEKVRLKQAHGREVRKDLKKHIEWLENSLRASDDGLRQTVEQSPVWQAKRDLLSEVKGLGQVTVFTLLACLPELGKLDRKAIAALVGVAPLNRDSGTLRGRRRVWGGRANVRAVLYMATLAAIRFNPRIRAFNQQLRERGKGAKVAIVACMRKLLTILNAMIRDNARWDAARTT

SEQ ID NO: 482047 - protein, 389 aa, unidentified
MKIFVGIDIAKLNHFAAAISSDGEILIEPFKFTNDADGFQLLVSKLESFDKNSIIIGLESTAHYGDNLVRYLVAEFYQVCVLNPIKTCQMRKNNVRKTKTDKVDTYVIAKTLMLQDNLRFVSFFDLDMMDLKALGRFRQKTIKQRTRLKIQLTTYVDQVFPEIQYFFKSGLHQHAVYALLKEAPSPKEISSMHMTHLANLLKVNSHGHFTKEQAKELRVLAQKSVGANDSAISIQITQTIQQIELLDSQLEKIEAEMTDIMKFNDSVIMTIPGIGYINGGMILGEIGDIHRFSNPNKLLAFAGLDPSVYQSGNFQAKTTRMSKRGSRVLRYALVNAAWNVVRNNATFKAYYDAKRAEGRSHYNALGHCAGKLVRVIWKMLTDEVEFNLE

SEQ ID NO: 482048 - protein, 390 aa, unidentified
MDVLYQSCAGIDVHQANIVVCILHGPLTSTRPKREMATFDTTTKGLRACHDFLSQFHVEAVGMESTGVYWRPVWHALCDDFELILAQPAHMKAIPGQKTDKKDAHWIAKLTRIGLLPRSFVPDETIQELRELTRQRKHYVESRNRETNRIHKILQSGGIKLTTYIEDIMGLSGRNLLQLLVDGTPITPRIVHQSVYTSLKKKVPQLLEALDGYFSDHHRFMLKQSLEIYDFYQKQIELLEERITVYLSQYENHVETLDSIPGIDVITASVIISEVGVDMSQFPTSGHLASWAGLCPGNNESAGKKRSTKIRHGNSYLKKCLCQAAFAVKRQKGSPLAERYYQIQSRRGSQKATIALAHQLLKIAYILLKEQMTYPEFLAQKKTTRDELVA

SEQ ID NO: 482049 - protein, 523 aa, unidentified
MASTRSSKRSRAAAEFLQKPRGIIHPRVQQVGPDHFGIVSVDCAKARCKWMLTDFYGTILVPPTEVANNRVELDAAVARCRAAMIQHALGDAIVAIERTGRYHHPVKNAFARAGFETRIVHPYATKQFRQPANPDNKTDDTDLAAIARAAVNGFALVENPLPEAWRQLQLCIRHRRDLVRKTSALARQIREHLDAAMPGYAACFADKLWDSNVAFCLVRQFGSATVLLQQRSTGLCHYLRQQKVRFQQRTLDTVLAWAQSAAAPDPAAELHRQIALAYHDDRQRKTEEILVLERNIAHRLAQTPYILLLSFPGINVVSAADYAGEMGPIENYANPRSITGRAGLFPSRYQSDRVDHADGPLVRRANRALRAVIMGIADNLILCNQRFRMLAAAWKAAGKDPRLSHVKVACRFCRMSFHMVAGRQVFRHPSLRERGYILDKLLAFHLEHQTPYQQSLRDLNLAFTQIPAKEHAAEAQPLIDRQRTARRGRARGPQHIGEILAIVLARLGVGALPSTPSGDQDLP

SEQ ID NO: 482050 - protein, 360 aa, unidentified
MEKHIFVGIDLGDKNSVARIGVDREKSERFGFINTRSGRARLFREAKRRSEKIGGARIVMADEASSCGFVLSDEAEAEGISCNVLAPTRMEKSVEQRRQKNDDRDADDVLEKLRGHVLAGNRLPKVWVPDRQIRDDRELVRTRLGLTERQTQVKAQIQMLLKRYGVEKPSETGSTGTKRYRRWLEALLDSQALGVGARQALASLLRQLKAMESEIETVDRQVEQLAHENRHQPIIESVMKEKGVGLLTAMVYRTEIGYAGRFGRGRQVGKFVGLTPTSHESGEQQDRKGHISRQGPPRLRKVLCQASWVHVRHDPQSRQLYQRLVAKNPKKKKIALVAVMRRLAVRLWHRMREAELANGV

SEQ ID NO: 482051 - protein, 417 aa, unidentified
MAMKIVRFNCCGMDVHKNLVVATIGITDSKTNITEYFQRSFSTLNSDLYRLKDWLKSHHCSDVCMESTGKYWIPIFNILEDEINVRLTHPKYVKAIKGKKTDKKDSKWICDLFKHDLIKFSFIPPREIRELREIARYRYKLVCMRSSERNRYQNCMTVSNIGLASVISDPFGKTASNIMKEVMKSNVIDDDKILKLVHRNCKNKDKILDSLHGYRIESDQRFKMEKSLDHMEYLDQLIDSCEVELIKRAYPLRRSFQHITQIKGISALSAILIISEIGIDMSQFESDKQLVSWAGLSPANNESAGKKKSVRISKAGQYLKPLLVQCALSAIKDKASYFGRKYSNIKKRRGHKKAIIAIARMMLVSIYHMILTGEEFQPTDYESLMNPKSNTDQSLTVEKALNFLKRSGIDISSILVN

SEQ ID NO: 482052 - protein, 344 aa, unidentified
MYIGVDTHKTAHVLVALDEQGHVGETRSIPNTSEGWASALRWACAAAGERIWGIENSGALGKGLAQFLVGQGEMRVHEVSPHRTAQYRRRGRTQDKTDETDALAIARLLLAEGEALPCVHADDASTELRLLSDYRDNLVAERTRLINQLHAQMVQINTRYQEQSGRLTQQRGIMYCRDLTLANASAIVQTRPLIVHQLAAQILRLAADIAATTTALRTRVQASQTPLLRLCGVGDLVAARIIGEVGSAPRIASAAAFAALAGAAPVAVSSGRQRSYRLNRGGNRQLNRALHMIALSQRRCDPRGQTYYAKKRAEGETERAAMRCLKRQLANIANDATGCVCRKK

SEQ ID NO: 482053 - protein, 419 aa, unidentified
MTDLSIAHSEPVLAAIDISKARHEVLIAVPGKKRRRRLTVLNQLDEFNRLTATLTGYDRPVRVAFEATGNYHRALAFHLGAAGFEIKLVSSVALARTREALHNSWDKNDPKDAQVILHMMQIGNEQFYHDPLMQGTNDIQELSKTHDIISKSKTELWHRVLTHYLPLYFPEADRFHRSSRSDWFLAFLERYPSPHFIASMGKEAFIADAWETVGRRVSKERLLADVYETASVSVGLPVEPDSDAIRMFRMILGEGRSLIAQRNKIEDRAVELLKDNPDYQLLTTIPGIGPINALTILAEAGNLRRFNHHRQFLKFCGMDLATIQSGTFRGQTKLSKYGNARLRRTLWLAGQVAILQRANSFRDKFERYISKDRQNTHLRRKAYTAIAAKMARTAHAVVKSGEPYRPFFEGASNGRRTFL

SEQ ID NO: 482054 - protein, 348 aa, unidentified
MSEAYDGREVVGMDLHRRRSVLVRMTPDGRKLETTRITNSPAELRRAIARAGKHPKVVLEATYGWYWAADTLAAAGAQVHLAHPLGVKAFSYRRVKNDEKDAADLADLLRMGRLPEAWIAPDEIRELRELTRYRIKLVRLRTSCKDQVHAVLAKLGIPVTCTDIFGVWGSTWLDGLELPQPYAGKVASLRTLAGGLTAEVTVLEAAIADLLEHHDGYHAIRALPGIGPVLAAVIVAEIGDITRFPHPARLCSWAGLTPRHRESDAKVSRGHITKQGSPIVRWALMEAIQDVPAGHPLRQRKEDILARRGKEAKNIAKVATARQLLTWVFYAMRDGQVRALAPALGKAT

SEQ ID NO: 482055 - protein, 428 aa, unidentified
MRFYTTPHRYYCGIDLHARRMYICVLDAEGQIRVHRNGPATPEHFLTTIAAYREDLVVAVECIFTWYWLADLCAQEGIAFVLGHALYMKAIHGGKAKNDKIDAHKIAVLVRGGMLPMAYVYPREMRATRDLLRRRCHFTRKRAELLTHIQNTASQYLLPPLGKIAYPGHRVGVAEQFRDPEVRKSVETNLALVDEYDRLLSELEVHLTQTAKVHDVNACYRLRSVPGIGKILALVLLYEIHDIHRFPRVQDFVSYCRLVKCAKQSDGKHYGYSGTKIGNAHLKWAFSEAAVLCLRKNLVAQRYVARLAHKHGKGKALTILAHKLARAVYYMLHRGQAFEATKFFRLTPRGDGPARPEIDRVTREDGHDASRFGPTGDDLEGGRYLDPPEIKRRASRRGGPDRAGVITERVGGAAARVVGGEMRASLGD

SEQ ID NO: 482056 - protein, 362 aa, unidentified
MAHSVIFAGLDVHAAQTHAAQLEAATGELSVTRLAGGTDPAVAWLRRLGPGVRAVYEAGPTGFGLARAAREVGIDLRVVTPGLIPKRPTDRVKTDRRDAVRLARLLAAGELSFARVPTEAEERFRDLVRAREDVRGDLMRARHRLGKFLLRREVVYPGPGGAWTQAHLTWLARLRFDDAASTVTLADYLAAVQALGQRRATLDAAIAQLVPDSPYAATAPVLRCFRGIDTLSAAGLCAEVGDFGRFAHPRLLAGFLGIVPSEHTSDDKRRQGAITKAGPAHARRLLVEAAHHYRRPPRVGVTLERRQAGADPRVCAVAWRAQQRLYRQWQRLHVRRRKPSGVVVVACARELSAFLWEAATIA

SEQ ID NO: 482057 - protein, 389 aa, unidentified
MKIFVGIDIAKLNHFAAAISSDGEILIEPFKFTNDADGFQLLVSKLESFDKNSIIIGLESTAHYGDNLVRYLVAEFYQVCVLNPIKTCQMRKNNVRKTKTDKVDTFVIAKTLMMQDVLRFITFFDLDMMDLKALGRFRQKTIKQRTRLKIQLTTYVDQVFPEIQYFFKSGLHQHAVYALLKEAPSPKEIASMHMTHLANLLKVNSHGHFTKELAKELRVLAQKSVGANDSAISIQITQTIQQIELLDSQLEKIEAEMTDIMKFNDSVIMTIPGIGYINGGMILGEIGDIHRFSNPNKLLAFAGLDPSVYQSGNFQAKTTRMSKRGSRVLRYALVNAAWNVVRNNATFKAYYDAKRAEGRSHYNALGHCAGKLVRVIWKMLTDEVEFNLE

SEQ ID NO: 482058 - protein, 436 aa, unidentified
MQQALTIGSQFHVVSVPPDRTDKSVQTFKSFTGELHAMAKWLKECRVDTIAMESTSVYWIPAFEILESYGFEVFLVNAREAKTVPGRKTDVNDAQWLQKLHQFGLLRASFQPSKEIAGLRAYIRQREKLIEYRAAHVQHLQKAFMQMNIQLQHVVTDITGKTGIAIIRAIVNGQHNPDELVKLRDSRCKNSVEVMKAALTGNYKAEHLFALTQALELIDIYTEKIEACDRVIESTLEGLHQEADSLHTTLPKPRSKENSKNAPSFDVRQSLFKMIGTDLTQIHGIGSSIALKLVAECGTDMTKWPTAKHFASWLCLAPGNKISGGKVLSSKTRRSASKSATDLRLAAMVVGKTNTALGATYRRYAARIGKAKAITAIARKLATLFYNALRYGMEYVDQGADYYEEQYQKKVFKNLKRTAESFGYTLMKKEQTISAA

SEQ ID NO: 482059 - protein, 487 aa, unidentified
MRSIFRRRNPDVQQLFDNAGDPGKVMCVAFDYAKASHTTIMCNGMGNKLHGRFDVHNDRTGLDYLLGIIAGLCRKHRIKKEHVFFGGEDCGAYVFNFIHALVSRGYLVLGMNTKQVKDERENTHASTDLIDTIGVAGMMIKMKGRTIGIQSKGVHIVKRLRRQRKAMLKAHAASAHRIYGVVDQLLPGFLDNKITGITPFSRASLWLMEDRFSIAEMRARHRPALVRKLREFSLQDPEGCVEKLKALADVSLPPPRAMIGALQRSLGEEHKIYSMLSKNLHVLDMDIAKLLANTPGAMFTTIPGIGMRWAPGLFAELCDPARRRNVDSMSAMGGLVPRVKQTGGPDKPAIIGHRTKKCCSILKHHLFSAAVSVARYGHSEMRAEYQADKDAGRDCRVRMARRVLRICLYINDNQTFFLPPSLHKNGTRDQIRDYYMYMWPKVLIKWRDVGAILEATAEGAPLRVWRDMAQELYDIELSLKSPQTGRK

SEQ ID NO: 482060 - protein, 367 aa, unidentified
MEKSSTVFVGMDVHKESIDITVAEQGGEVRRLGQIGGDRGSLLKMVRRQQSKGHKLVFVYEAGPCGFWIYREITALGHACMVVSPSLIPRRAGDHVKTDRRDSERLASLARAGELEAIHVPDIRDEAIRDLVRGRDDAVVAQRRVRQQLKALLLRNDIRYVGKTSWTGAHRRWLSELKLPEPAQRIVFEEYVDAIAVATARIERLTRAIETEVLTWRFAPVVGALQAMRGIQFVHAVTLVAELGDLTRFASARQLMGYLGLVPREDSSGEHRHQGSITKAGNSYARRALIEAAWAYRYPARVTRIIATRQAGISKAVCDIAWRAQLRLCAKYRRMNARHLNHNKIVVALARELSGFVWAIGQSVKPQ

SEQ ID NO: 482061 - protein, 354 aa, unidentified
MIIIGADYHPGFQQIAFVDSDTGEFQEQRLQHREEAEKFYRDLAAQGMQARVGMEASGQARWFERLLWELHFELWIGDAAVIRTKRVRKQKTDRQDAQLILQLMLEDRFPKIWVPSWENRDLRQLLWHRHRMVQARTRIMNQLQAVALNEGLRCKKRLWRDAGREQLESFALAPWASRRRHDLLELLDRLTPTIAELTQAIEQEVEKCPAAQRLQTHPGVGALTALSFVLIIGQAERFQCGKQIASYLGLVPLEDSSGQRRRLGHITKQGNSLLRFLLVEAAQVTVRSDPEWRSKHFHLAMRRGRKIAKVAMARRLAVRLYWMWRKGWDYEQLKKFGSHAGQPVHRDGVQSITE

SEQ ID NO: 482062 - protein, 315 aa, unidentified
MSPQVWIGIDVAKAHLDIAVRPSGEQWRSGADDAALTALAARLQTLAPTLVVLEATGGLQTRVASVLGAAGLPVAVVNPRQVRDFAKATGRLAKTDALDAQVLAQFAEAVRPAVRPLADAQTQALQALLSRRRQVVEMLTAEKQRLGQAPAPVRRQITEHIHWLERSLAEVDRDLDQAIRTSPVWRAKEQLLRSVPGVGPVLSRTLLASLPELGTLRRRQIAALVGVAPLNRDSGTRRGKRACWGGRAPVRAVLYMATLAATRCNPTLKAFYERLCAAGKLPKVALTACMHKLLGILNAMMQHQTRWQAPAGRAA

SEQ ID NO: 482063 - protein, 344 aa, unidentified
MRIASIGIDLGKTTFHLVALGERNKVLVRKKFSRTQLLAYTVNLPTSLIGLEACAGAHFLGAALREQGHQVQLIPAQFVKPYRKSNKNDFLDAEAIAEAVTKQNMRFAQIKTQDQLDWQAMHRVRDRLVQRRTALINEIRGFLLERGITFAAQPIHLRKNLPGVIEDAEQNLSPRLRWLLDRLWQEWKQIESDVQAISDAIERISDEDVRCRQLRQIPGFGPLVSTATVAAIGNGAAFRRGRDFAAWVGVVPRQYSTGGKQRLYGISKRGNIYLRRMLIHGARAVLFRIKHDTGGFGQWVHRLAQRVPRNKVIVAIANKLARIAWAVLSSGKDYRHQPLQPAGA

SEQ ID NO: 482064 - protein, 322 aa, unidentified
MNEVMAGMDLHRNNVVCGLVDQEGRRLVEKRLPCELDRIVHWLEPYRKRLKRIAVESTYNWYWLVDGLQEQDFDVVLANPARIVQYSGLKHADDTSDAFFLAQLLRLNILSTGHIYDRKLRPVRDLLRRRLLLVRQATAHKLSFKSLYARTTGQTLGLSQLERLTLEEGAKLFGSAAEQLIAREQLRLVGELKQSILAIEKSVVGVVKDWASYRWLQSVPGVGKILGLTIALETGPIERFAGAGDYASYCRCVQSRRLSHGKVKGANNGKNGNRYLAWAWVEAAQYARRYYGPCRRFFDRKAAQVNGALASKALACKLAKAA

SEQ ID NO: 482065 - protein, 373 aa, unidentified
MCGDFRNGVMGWTPPDGIDVPEWRCFTPLEEASVTEVTTIGLDIAKHVFQAHGVDATGRAVFRKKISRAKLLAFFAAQPRCLVALEACGGAHHWARELIKLGHDVRLIAPAYVKPFVKRQKNDAADAEAICEAVQRPAMRFVAVKTEAQQAAALVFRARDLLVRQRTQTINALRGHMTEYGWVAPQGPSHMAKLAELLEDPLAVPGPVQAICRVLLDSLAMLDRQIAVLDKEIARRAQEDEVARRLMTIPGIGPITATAITALAPPPETFTKGRDFAAWVGLTPRQHSSGGKQKLGAISKMGERTLRRLLIIGSSAVVLQASKRGAPKGSWLAHMLARKPRMLVTVALANKTARIVWALLVKQEDYQAPAMTA

SEQ ID NO: 482066 - protein, 360 aa, unidentified
MTIVAHAHPFVIGVDTHARTHTLAVLVAATGELVATEQFPATDAGMDRAVAWAARRTDGELATLWVIEGVATYGAHLASAVKRAGFEVVEAAAMDARAHRGTGKSDPVDARRIAAAVLSLEPEQLRRPRSDDGIRTALRVLVTARAHMTTERTATVNALTALLRVASLGIDARKPLSAKQIGEVARWRTRVEDLATITARAEAVRLAKRVVDLNEELTANQVQMIDLIRASKAAVLLDKTGIGPVTVAVVYTAWSHAGRVRSEAAFAALAGVNPIPASSGNTIRHRLNRGGDRRLNRALHMAVITRMTHDPETRAYVERRRAEGRTIKEIRRCLKRYLARQLYRTLERLHTEHDAYPQAA

SEQ ID NO: 482067 - protein, 392 aa, unidentified
MNLKQSVGLDISSREFKTAFEVMDSQQHIKIKATHSFENGPSGFKELDRWVQKHSDPAVPITFTMEATGVYYENLAWHLHQKGYTVAVVLPNKARKYMQSLGLKSKNDQIDAKGLAQMGAQQQLRPWKPISEHLLQLRYLTRHLESLQRLNTMIGNQAFALEHSRVGSKLVNKHLRQSRKSIQRQVDEVKAAIIALVEKDDQLRLRIKNICKIKGISVLTVAVIVAETNGFAILENQRQLVSYAGYDVVENRSGRHVGKTKISKKGNSHIRRALHLPALSVVRYEQHPFVDLYDRVYERSKIKMKGYVAVQKKLLTIIYALWKKNEAFDENYQPKMTSGNEESNVLFPLGNKESNEVNSKGQKEVVPQQGGTTQDGHRYNESPNVLFPLVQT

SEQ ID NO: 482068 - protein, 387 aa, unidentified
MIYVGIDIAKLNHYASAISSDGEVLLEPFKFSNDNDGFYTLVSKLNQFEKDKVIIGLESTAHYGNNLLAFLVPKGYNVCLINPIETSTMRKNNIRRTKTDKVDTYIICKVLMMQPHRFITLYDIGLMQLKNLGRFRQKTVKQRSRLKIQLTSYVDQVFPELQYFFKSGIHQKGCYALLKEAPSPEAIASMHLTHLTNVLKSSSHGHFKKETAVELRVLAQKSVGTSDNSLSIQITQSIEQIELLDRQLELIESEMEDIVKSLDSVIMTIPGIGYTNGGMILGEIGDVTRFSNPSKLLAFAGLDPSVYQSGNFEAKRTRMSKRGSRALRFALINASHNVVKNNSTFASYYNQKRSEGRTHYSALGHCAGKLVRIIYKMLTDNVAFNLD

SEQ ID NO: 482069 - protein, 412 aa, unidentified
MKQQAERAAGLDVHRDNVVAATRVNEPSGEVAVTKKRFPTTRRGVRELAAFLSEAGVTRVAMEATGVYWKTIYYALEGLFDELWLCNAQHVKNVPGRKTDLGDAEWLADVAAHGMVQPSFVPPPEIRELRELTRYRKTQVDARAREIQRLEKTLQDAGIKLTSVASAVWSVSSRKIIEALIAGERNPAVLASLVLGKLRPKIAQLEEALDGHFGPHHAIVCRQVIEHIDFLDGSIAALSEEITARLIPFEAAVTLVCSITGIAELSAQAIVAEIGVDMSRFPTAGHLCAWAGVAPASHESAGKRRPAGTRHGSTWLKRVLIEVAQAASRTKGSYFSAQYSRIARRRGPNKAAVAVANSILAVIWHVLTNGCIYEDPGADYFERRHDPAVEAKRLQARIEALGFDVTLTLKAA

SEQ ID NO: 482070 - protein, 427 aa, unidentified
MHYTQNDKIRQATEGTIVVGVDIGSEKNYARAFKGNGIEITRKAICFPNTMEGFKFFEETVTKLTVPLAEKKIVVGVEPTGHYWFNFADYCQGKRMTVVTVAPQHVKHSKEMDDNTQRKDDRKDPRVIAKLVIEGRYCIPYRPKGIYAELRVAYNRRCEIVEAETRAKNRIRRWFDLYFPEYRTVYGSVAAITGIEILKQAPLPQDIVSLGVDGILQIWRANKLRAAGLKRAKTLFEAAQRSICPPDAGRAVRMQLWQLLEEYEYIRKQLQEADIMIGIVTADIPEVNELMKIPGIGLITAAGMISEMGDMRRFDDPRQIQKLAGLAIIVNESGKHKGQSEISRRGRKRLRKILFQAALVLVRSNKEFKTIHDYFTTREKNPLKKKQSLMAVAAKLIRVCFGMVKNGTPYDPTKVLKGIRRTEPKAA

SEQ ID NO: 482071 - protein, 343 aa, unidentified
MQTVATVGLDIAKSIFQVHGIDVEGNVIIRRKLKRRYLLAFFQKLPPCLIGIEACASAHHWSRELKALGHTVRLMPPAYVKPYVKRQKNDATDAEAICEAVRRPTMRFVETKTPEQQSCLMLHRTRHLFIRQQTSVINAIRAHLAEFGIVAPVGRKGVEELLGVVADLDDKRVPEVARACLATLGTQLRDLKERILQFDRMINAWHRSNETSKRLDAIPGVGPALATALVASVANPRAFRSGRDFSAWIGLVPKQNSSGGKDKLGSISKQGDRYLRGLFTTGALAVIRYAKLHSTGHRPWLTALLARRPTKVAAIALANKIARMAWAMMAKGERYREPIALVA

SEQ ID NO: 482072 - protein, 419 aa, unidentified
MKTLHKRCAGVDVHKTEVVVCLRLVTHGKVEREVRRFPTTTHGLLELAQWLESARCTHVAMEATGVYWKPVWHILDGRFALILANAAHVKTVPGRKSDVNDASWLADLLAHGLIRPSFVPPAAIQDLRDLTRTRKQLTREIAQHSQRIQAVLEEANVKLCSVITDILGASGRRMLKAMIAGEIHAHKLAALGSERLGCAPETLIDALTGHMREHHRFLLAQHLQTIEQLEKTIAAFDTRIEEKLMPFRDTVERLKEVPGLGSTATGVILAEIGLDMSLFPSAGHLLSWAGFVPRLDESAGKSRSTRIRKGAPWLKPVLVQAAWGATRKKNSYFQAQFLRDLLPSLNSGQVVLPRHDRLVAQICGLERRTGRSGKDSIDHAPNGHDDLANAVAGAAAATRSKYRYDSSLDWVAGPDADAA

SEQ ID NO: 482073 - protein, 429 aa, unidentified
MQESASTAPVEGVAAYVGIDWADQKHDVALRSASEPGKVEHRLIAHEPEALMDWLGELQQRFGEKGKILVCLEQSRGALIYYLMGYEFLELYPVNPSQLASFRETFSPGGAKDDQPDAALLCELLYCHRDRLKAWKPDDELTRKLAFLNEGRRKAVDQRTQLANEIKSQLKVYFPLALQVLDNDTSTALAADLLLQWPTLDSLQKQSAHKLRKFFYAHNCRNEQKLLERLELIKVAKPLTRDPAVIEPAALRVQLLAQQLKSLLPYIARYEKWIAELFDAHPDSFLFRDLPGAGPALGPRLLTAFGTDRGRFEHSINFSSLSGIGPIRRASGKKTGKNASVHFRHACPKFLRQSLHEFGLHSIRSCPWAKALYQSLRARGKGHHAAVRAVTFKWIRILFCCWKNRVPYNPERYLQALQTRGSVYAEAAG

SEQ ID NO: 482074 - protein, 339 aa, unidentified
MARYIGVDLHRNQFTVCVLAENGREYLSEYRLEQLPQFVRKLRPTDQLAVEVTGNTRLFYNAVASHVAKVVVVNPTQFRVIRQSVKKTDPHDARTLAFYLSKDMLPEVRMKDTLHAQLASLTQTRDTLVKQRTALKNKVNNVLSAHGINLRKESLASEVALDNVLGMTFDAIVETELRVIVGQIRALNQSIAELEKTIKTEGAKLPGHRNLKSIKGIGDLGATVLLTAIGNINDFAHPGKLAAYFGIVPRVRNSNETEHSGRITKRGTKLGRTTLVQCALIAMRYSPYLAKFYHKVARRRSTGKAIIALARKFLSVIYHTLKNNWVFEDFPNFVIAGAA

SEQ ID NO: 482075 - protein, 371 aa, unidentified
MLQNSPSIYVGLDVHKESLAIAIASPERGGEIRFYGNIPNQQQSINHLFLKIKKQYSYIMACYEAGPCGYNIYHQLTAMDVECIVVAPSRIPKSPTDRIKNDHRDAVGLARLLRAGELTPVRIPDLTHEAMRDLVRARAASKQDSRIARQRIQSILLRNDRRYDKKPWSYKHRIWLANQTFPLPSQQIAFQHYCQSLEQIESRIIQLDQEIDRLLPEWSLYNLVCQLQALKGVGKTIAISLVSELGDFSRFPNPKQIMAYIGLIPGEYSSGNKTRSRGITKTGNSELRRLLYEAAWAYRSPAKVGSWLITYRPTETTQESKDIAWKAQQRLCARYKALLQRGKRSQIAVTAVARELTGFMWYIALAARQSG

SEQ ID NO: 482076 - protein, 429 aa, unidentified
MICAAVERCAGIDVGKEFLAVCVMTGPLQGEARKQTRRFGTIIGELERLRDWLKQEEVTHVVMESTGSYWKPVFNVLEDAVKVYVANPQEVKVRKGHKTDDKDGWWLAHLLRHAMIHPSFIPPRAIRELRDLTRRRKKLLGAGTGEKNRVQKILEDANVKLGNVLSDVFGVSGQLMLDALLKGEAEPAEIAQFAQRRAKQKIPQIIAALEGHRMSDHHRKMIGYSLEHMRFIEDQIGKLDEDIVAKIKEAGLEREWQLVQSAPGLKETSAANVLAEIGPDMSQFPSVRHISSWGGVCPGNNRSAGKNKSSHTTGGNPWLRAALTECAWAAAAKKECFLKEKFWRITTKSGGKKAPAIVAVAHTVLSLVYEALRTGEPYQERKVANLNPGQRDRMIRHHVKRLGKLGVTVRSNPLKKETKAAKTKNAKRT

SEQ ID NO: 482077 - protein, 437 aa, unidentified
MQSITKVEQFRQVRSEVKKNKDYLLVGIDVSKKSSIACFYNIEKEVLLGKYYINHNLEDFQKFIDKTGQIMEINNLKSVVIGVEPTANYHKPLSEYLKSKGYQVVYVSSVAAKSNRKTIDGGRWGKNDPRDAYNVADLMRQGKIMFYRDENTQSADTRKFLLLRQRLMKTKNSLKTRIQNNIWACHFPELGNIFHNSEDPDVLTLLEHCPSSGHIKNMGFQSFISLFSSTVRKKSKRYLRLAETWQAAKTSIGFAIPSATVMEAKLIVRDIQRTQKDIAQIDKILSDFCAQNDVYRQLLSIPGYGVFTASVFKSAINIDNFISDRQIIKFAGLDIETMTSGKFQGKEKISKKGNSLLRYAVCHAATIAISKNKVIKQMFQDKLKERGNSKIAKAKLKIKFVEKFLRAAFVMLKNNVPFDINQFNVPVDDPVLDYVRA

SEQ ID NO: 482078 - protein, 344 aa, unidentified
MKYFTGIDVSLRSVSICVVDETGEVLHEAKVAAEIDTIVATLRRFSDEIRQVGFEAGALTQYLTYGLSQAGFEVICLEARQVAASLAAMRNKTDRNDARGLAQILRTGWYRTVHVKSIESHQVRALLSSRKMILTKCIDLENELRGLLKVFGVRLPPRLGHGGFDQLVRPKVLALPEVAKCLLPLLDARVVLYRTYLQLDNAVRGLAHHDPICQRLMSVPGVGPVTSLTFKTAVDEPTRFRSSRTVAAHFGLTPRRYQSGEMDNPGRISKCGDTAVRQALYGAAHALMTRSDAWSVLKAWGMRLAKTRGHRRAVIAVARKLAVILHRMWISNTDFRATRLEATA

SEQ ID NO: 482079 - protein, 368 aa, unidentified
MLEETQEREEIIERVAALDIGKAELVCCVRVPGPPGRTRVQEVVTYKTMTRSLLVLVDRLHELEVTRVVMEATSDYWKPVFYVLEGAGFETWLVNAKDVKHLPGRPKTDRLDAVWLCKVAERQMLRPSFVPPPPIRVLRDLTRYRWDQIAVRTAEKQRVEKLLEDAQIKLSVVVSDVFGVSGRDMLAALVAGKREPRTLAQFARGRMRGKITDLEEAFTGRFDDHHAFLLTKMLTRIDQTTADIAEIDELIDAHLIPFADAAERLDEVPGIGHIAAAVIIAEIGVDMTRFPTTAHLCSWARFAPGIKESAGRKKSNAPPATATPTSPGSWARQRWWPARPTPSWANATDASLDDAGRRRPSLPSDAPS

SEQ ID NO: 482080 - protein, 409 aa, unidentified
MAAVMIGVDPHKGSHTAVVIGQAEMALDQVKVRACAAQAERLLAWAAAWPERTWAIEGAGGLGHLLAQQLVAAGERVLDVQPKLAARVRLLAAGDVNKNDPNDARSVAVAALRSPACPLVRADDHAAVLKVWAKRHRDLSRARNQVVCRLHAVLCELVAGGVSRQIRAAAAARLLDQIQPAGAVQAARRELAAEFLADLRRIDAQRRDTRNKLAAAVRACGTTVTEVFGVGPAVAAAVIGDVRDISRFPGPDCFAAYNGTAPAEVSSGNRVIYRLSLRGNRRLNHAIHMAAVTQIRYKHTKGRAYYDKKLAEGKTPKEALRALKRQVSNAIYQRMKADARRAAATAGPGGHPGNGSVASAAGSHPEHRLFGQATPGPEPTLRPRPGRSKATRPPSSRPAKRPVPARTST

SEQ ID NO: 482081 - protein, 425 aa, unidentified
MIGDVMIAIDPHKASNTAAVLDPVTKTVIEVARFASSQEGYGRLTGLARRWDQRRWAVEGCRGAGRSLAQRLVADGEHVLDVPAKLAARVRVYSQGHGRKTDRDDAISIGLAALDGAGITEVTCDDALVSLRLLCDRREELGRLRTQAVCRLHRLLAELTPGGMRGELCASKAEAVLVRVRPADEVGQIRLQLAGDHLAGIKALDAKMKAIGAQIAAAVTATGTTLTSLSGIGPVIAGRLLAETGDVARFATKDHFASYNGTAPIDASSGEQARHRLSRAGNRRINHALHMMAVTQIRYPHTHGRQYYERKPTEGKTPKEALRCLKRRLSDLVYRQLVTDQRGRIGTCGSPTTPRPTPSTSTSPATRSRPAAPPSRPPRRPAQAGSSRWTGKTTAWSASRSSTPAPASTKTSSKRSKSTAKTAAS

SEQ ID NO: 482082 - protein, 313 aa, unidentified
MAQIAPTVGVDVSKERLDVASYPAETRFSVSNDSAGWRELCRRLRPIGARAVGIEPSGGYERGVIAALLDAGLPVRSVNPWKLRQFAKAAGWLAKNDRLDAQAIACFVATLPTRAVQHDPTRQHLAELVTARRQIVDLRLELGNQLEHLSDPELRRMQERRIRQLDADLVRLDRRIAAAIAAVPALAGRHDLLRSMPGVGPVLAATLLALLPELGGITNRAIGALVGVVPYDFDSGRMRGLRCIFGGRAAVRRVLFMAAQAAAMCNPVLKAFKQRLLAAGKKPKVAIIAVMRKLLTTLNAMLRDQQAWRGAGA

SEQ ID NO: 482083 - protein, 543 aa, unidentified
MAEFVNGKAPEPDFAAFVGIDWADQRHCWKLLATGTQASESGELKQTPEELSNWATALHHRFGGCPVAVALEQSSGALVYQLSQYPHLWLYPVHPATAARYRQAFYPSGSKSDPADTGLLLELVVHHRDRLRRLAPDTPETRLLRMLVEQRRQVVDEKTRWNNRLKAALKMYFPQVLDWVDIDTIMGCDLLERWPTLQQLQHAHPGTLRKFFREHNSRSESLITERIAAIYQATPAVKDPALLEGESAIAATCVAQIRTLLASIAKLDHQIQPLASQHPEASLFAELPGAGAALQPRLIAAFGTQRDRYANAAELQAYSGIAPITASSGHSRWVHVRWACPTFLRQTFHEFAGCSISRSEWARVFYDTKIAAGKSHHATVRALAYKWIRVLFRCWKDGRPYDERTYLQTLAERNSPLNWGPGASIKPVWKTVGGFKSCPQKILDGTTQMTCCYQEARGPHHTAQQRRVDPGMSAKSRALASMRRRPRSQRSCRVWVRALRFEISSWMSSAEIAVCSSTRSARDFDAPRFCNCLQRRVGALYVL

SEQ ID NO: 482084 - protein, 322 aa, unidentified
MSESVLGIDIAKQKFDIALLVDEKTKHKTCKNSVEGFETLMLWLEKQGIRKVHACLEATGNYGEDLAIYLHKAGHRVSIVNPARIKGFAQSELIRTKTDKMDAALIARFCLAMKPGAWIPPSPEIRSLRALVRRVDSLIDMRSQEKNRISTAHESVSLLIKEHIAYLDQEIERIRQQIAGLIEQDPNLKRKKELLDSIPALGKATIPHILAELDDLEKFNHVRELVAFIGLAPKETLSGSSMKGKSRLCKIGHAQLRKALYMPALVSIQCNPVMVAFYNRLKDKGKNGKVIVCAIMRKLVHVIFGVLKSGKKYDPNYKPAFA

SEQ ID NO: 482085 - protein, 459 aa, unidentified
MARKKKIEMEIVNHNAAGIDVGSRSHYVAVGQSLEDVKEFGVYAEDLVEICKWLLSYGITTVAIESTGDYWQNLFVELQKHGIEVVLCNGKFTKHAKGKKTDVKDSRWIQKLHSLGLLTGSFLPDETTEILRTYCRQRANWIDLATSTSHKMQKYLKFLNFRLDVVVNDICGLTGLKIIADICNGNLDPYSLAEHRHYNCRKPKEEIAKALHGNNRTDYLFGLKQEFECYNYFQKQINACDKKIEQLIKKEIRNNPEKLKLKTTEKPYKRINKNAVDIKDFNQIAFQYFGGVDLMAIEGVSHATVMAIMSEVGIDGFKKFKSAKEFCSWLRLAPNNKISGGKVLSNRIPKGSGRLKIALRNSANAIGNLKDTHMSDFFKRIAFRKGRQAAVSATARKLGVIIWTMITKKVPYNPPTEYLFLDQKRKMGIAKRIKKQMAKFDIKPEEIGFGNSLTPNYNF

SEQ ID NO: 482086 - protein, 355 aa, unidentified
MKYYVGIDEHSNNVIIGIIDENGKIVFKIKLPNDIVLIIETLKAFKKAITGVVVESTFNWYWLVDALIEAGYKVHLANPAAIKQYEGLKHTNDYDDAFHLANLLRLKILPEGYIYPREQRSIRDLLRKRSMLVRQRTANILSYQNIYNRNTGQKIKSSEIKDMAKNSIETAFQLEHINLSGEATLSIINTFTEKIQAIEKKILQSMKLQSEFKKLLTIPGIGEILALTIALETGDIKRFEQVGNYASYCRCVQSIRYSNGKKKGENNRKNGNKHLGWAFVEGANYAKRFYPEVKRFYQKKAAATNKIVAIKATAHKLARAAFFVMRDKVDFSMDRAFGVTKIKVVAVNRSGIVGH

SEQ ID NO: 482087 - protein, 438 aa, unidentified
MQIIYEYCAGIDIHKKMVVVCLIMLNAAGQRVKEIRSFRTTTAGVLELRDWLQTAGCTHVAMEATGVYWRPIWNLLEGAFELLLVNAQHIKAVPGRKTDVRDAEWIADLLQHGLLTGSFIPPPEQRELRDFTRYRASLVEDRTRVVNRLQKVLEDTNIKLGDVATDITGQSARAMLKALLAGQTDPVKLANLAKGKMRAKLAALEEALVGVIKPHQQFLLTELLGQLDHLDAVITRVGNEIATWLDRETPVEPEQSQLASELPEQDESKQVLTWTGAVALLCTIPGISHRSAEGILAEIGIDMSRFPTAGHLASWSGMCPGNHESAGKRLSGKTRKGSPYLRQLLVEAANAAARTKNTYLSAHYHRIKARRGRKRALIAVGHTILVIIYHLLSQEMSYEELGSNYFDERDRQNMEKRLVRRLEKLGYQVELQLVAQVA

SEQ ID NO: 482088 - protein, 309 aa, unidentified
MSLPIGLDIAKLKIDFYSNSSHCVIANDEKSIKKHFKKLDRTSPIVMEATGKYHRTAHRTLEEMGFDVMVVNPYQSKHFAKAMNLRCKTDKVDAKMLSIYAERMEFKKSPCMEQGEQKRLDLLRHLDDLKKIRIDINARARESSDFIEKSLKRTLMTIDLEIKKTEAKLLSAVRSDDATKRNFELLLTIPGIGDPTAISLLCLLRELGQASKREIASLSGLAPMNFDSGTKRGRRMIQGGRHDVRRHLYMPIVGAATKHNPRLKEFYTRLIASGKPGKVALTACMRKLIVWANAMLATGLPWNENVEKN

SEQ ID NO: 482089 - protein, 371 aa, unidentified
MKKSTSAGKRTRMENNSISEAEVIGIDLGDRISQFVGLNASGEVVAEGRIPTTAAAMTKEFGSMESKVIAIETGTHSPWVSRLLAQLGHRVVVANSRKLRLIYENKRKNDRADAEYLARLVRMDPKLLEPITHRSERDHQHLALLRSRDKLVRTRSGLITHVRGTVKSQGMRVPACSAEAFVKRATPLIPKELNAALDPILRCIEQLNKEIAGYDRKVEQLARTEYPTAQLLMQVAGVGPVTSVAYVVTVGDPGRFTRSRTAGAWIGLTPGQSASGQQDPQMRITKEGDTYLRRLLVGCAQYILGPNRPDSDLRRHGLAIAARGGKNAKKRAVVAVARKLAVLLHVLWRTGAVYEPLYNANANANTMHPAA

SEQ ID NO: 482090 - protein, 474 aa, unidentified
MEPISVPLPWLARENVYIGIDIGKRGHVAGLLSATLLRQHRRFEACPTFPFAESRAGFSALLAELLTYTTRARLCVLVEHTGHYHRPLVEFLQDEGIAVYLIHAQARHSQILKSDSRDALALANLLYNQVEKEVQVSDARATARLLAQPSAAAVFLRALMRHREDLSADLVRRKNQLRAITDELFPEFAECFKDPTGSSARIVRRRYPTGDALAAAAPAAVAEVASQLPASVRPKLSRLAAMAAASIGSRDPERRRALLLEERQLLDELDLLGAHLSALDAEIATALDGSREGAILQSLPMIGPTAAATLLSAIGHVSAFKSAAQLKSYLGWAPRRTQTGTTTDRMALSRGGLRSSRRVLYLITINAVRMDTEWKALYERLVPKKCRYDERTKRYRGKMKVIGRVAGQIIELIYMLLMRDADTVAHTPEGQAPPPPLLYDRAIHRQHRAGGYVPARPATPSPPKASIRRIGPIP

SEQ ID NO: 482091 - protein, 427 aa, unidentified
MPYRISGIDVHKKMLAVVVSDVEIESEYQFERRKFGSNPAELRALATWLLEQEAEEVVMESTAQYWRPVWEALERYWKPIREKREGAGRRAGTLHLAQAQSNRGRRGRKRDFPDAERLVKRLVSRELVLSFVPDPEQRLWRTVRRRKYQLTRDRVRLQNQLEALLEEAHIKLSSLVSDLLGASARRMLKALAEGETNPAALAVLADRQLRATPEQLCDALGACTDLKPVYRRLLNMILEQLQFLEKQIDHLDQEMASLLSQHQDAVQRLAEVPGLGVDSAQQIIAEVGPTAATFPSGKHLSSWVGACPGDDESAGVNYSHRSPQGNRQMRRLLNQSANAAVKAKGSIFEIVYRRTVPRLGHPQTIGAIAHRQCRLIWLILHQGVRYEERGPAVNQKSKQARTARMICQLRKLGYQIEPPKPAPTQRE

SEQ ID NO: 482092 - protein, 381 aa, unidentified
MKKIRFVGLDVHAETIAVAVAEPERNGEVRSLGSIPNRPESVQKLVKKLGPVDQIRACYEAGPTGYVLYWQLTELGVKCEVVAPTLVPVKAGDRVKTDRKDAEKLARSYRAGDLTPVWVPDAAHEALRDLVRARLAAKRDQLRARHRLSKFLLRHGRRPASGVRAWTAAYLNWVKKGVQFDQPAQQATLTDYLHEVEHAQERIIRLEQAIDDAIKTIPEKMRAVVEALQSLRGIAKISAVTIMAELGEVSRFETPRQLMGYSGAVSSEHSSGERTRRGGITKTGNTHLRRIVVEAAWAYRYRPSIGATLKARQKTASQEVKDIAWKAQNRLHRRYYQLTAKGKIPQKVVTAVARELLGFIWAIAVEVEQGYSTSQQKRTAA

SEQ ID NO: 482093 - protein, 460 aa, unidentified
MFEETRKMMELFEEVGSRKVLIAGLDISKNKFTISAVNGIYEIKIRAKDVNLDKESLVNLYKEIDEIVEKEEIKKLIFGCEPSGIYYKPILKELICKYPDAIFKLINPSSTKANREQRMEREKTDPIDSYAITDLLIRGESYDIDFEDNTFNIIKDYVRELDHLVKEMVRFKNKIHAHTDELYPGLESKSNSFLDSIYGMRFLKVLPKPEILPQLSLEGWQNLLSIEGYELPKHLAIKLRDKGNTILVTKHKNFETLREYILFLVEGYEQLVSRKKIIDEKLERLIETLDFGRNLKEIKGIETLTIARIIAYMGNPYRFKSGKEVVSFAGLIPKADQSGKQDKAKILSKKGHKKLRTTLVQAAQQVITSTGYFTAYYNRLVLENRKEPMVAIMATANKLVRVIMKMIHTGERFNPPTVKNIEMARGRISRLTSRELVKLKKIKRLDSLTQDINELYQVRV

SEQ ID NO: 482094 - protein, 344 aa, unidentified
MKIVSLDVHGDASQLTLVSETGEVVLEMKVPTEGVALRAIVGGIPGPKRVVFEEGPLSGMIYDALKDVADEITSCDPSHNALIALAEDASDERDARRLAKLAQLEAVRPVYVAPEPYRTLRSLLVHDHHTQRSLTGVKNRIKGLYRRLGIRGRGKALYRHGQRAEQLKKIGNEALRWQMESLYRQLDSLRRERVGARRVLGQLARKLPVIARLEGISGVGPITARTLVGWIADPRRFKSRSALASYAGLGLGQGWTNWKPVGHARASKRGNREVKRVLFLAAYAAAQSGSALARRYEARRQAGWEQSKAMRDLARTILFIACSIWRTGKNYDDALVTVPKVSSG

SEQ ID NO: 482095 - protein, 358 aa, unidentified
MKYIGCDFHPSFQQIAMLDKETGEMVERRLLHTEEARAFYQGLQGPVVVGVEASGNMHWFESLLGRCQHEMWIGDAAAIARQEGRKQKHDRRAAALILKLMVENRFPKIWVPTVAERDLRQLLIHRQHLVRMRTRIKNQLQHIALNQGWQKKRKLWSQAGLELLRSLKLEPWCCQRRDTLLEMLEELEEKIKPLDHAVAQAAEGSQAARLLDTHPGVGPVISLATVLTMGDVKRFPDSRSWVSYLGLNPSEESSGQRRRLGAISKQGNPFLRYLLVEGAVSATKRDKSLARMYARLKAKKHHGVAKVAVARKLAVRLYWMARTEKSYPEVVRTQGSLSHPVAEVKAVRLNRPPASHQQ

SEQ ID NO: 482096 - protein, 383 aa, unidentified
MPTLTTTPAAPATARSTLHLALDLGNTTWQLAFATTIAHAPRLRTMPARDLAALAREIAAAKARFGLPAGAPVVSVYEAGRDGFWLHRALGAGGVTNVVVDSASIGQNRRARRAKSDRLDATALVRLLLRHTAGERGVWSVCHIPSVEEEDRRHLHRELFTLTRERTRQVNRIKGLLALHGVVLPRLRGLPAQPPAVVSADGAPLPPGVTARLAREWTRLRTVQRDIRALRAARRHLLADDAATTDPLLRMVTQLQQLRGVGEVSAWLYATEFFSWRQFRNRRQVGALAGLTATPRESGDVSRELGISKAGNALIRALAIELAWSWVRRQPTSALARWYRHRFASGGPRQRRIGIVAVARKLLIALWRYLHTGVLPEGALLKV

SEQ ID NO: 482097 - protein, 403 aa, unidentified
MSRITPPSRFVGLDVHKHYLIAAAVDADQNVVLHPRRVQLAHLDDWMRKALTPQDAVVLEMTTNAFQLYDDLVPHVLSVILVHPPYVALITRAQVMTDQIAALTLARLHAAGLLPPVWVPPDDVRDLRALIAQRAKAVRLSTQAKNRLHALLHRHHLPPAEGNLFAPERREWWLTLPVSAMERVRIQNDLDTLAFAQTQIAALEGTLIALAAQDERVSLLIQLPGIGIVTALTILAAIGDIARFPTASKLVGYAGLGARVHNSGLTHRSGRITKAGRRDLRAAMVEAAQTAANTHPHWQAELERLEPRLGRNKAIVAIARKLLVAVWHVLTEGCADRFAEPESVARKMARYAYDLGEKNRPDGQTVGEFVRQQLDRLEIGADLDVIRWGKRTIPMPPHTADKG

SEQ ID NO: 482098 - protein, 417 aa, unidentified
MKAWKEITHYAGFDWARDHHAVVIVDAQGQIVADFEFEHSLEGWQRFVEKTAPWPHLAVAIETNQGAAVDQLLQREYTVYPVNPVASASYRKRKAPSGTKTDHVDGWGLADALRVDGQGWKPLQPIDPLIQQLRLLCRDEVALIEQRTALVNQLQQALVEYYPVALQAFEDWTLPSAWDFLLQFPTPKALVEAGKRRWEKFLHTHKLWRPETAEARLALFAQADRFQGSDPVTRAKSQLALSLAKLLRTLQQQLDEYRKAIEALFKSHPDHDLFGSLPGAGKTLAPRLMAAIGTEPDRYGNANVLQCLAGTAPVSYQSGQISKTKVRWACDKFLRHSVHLWADCFRKGSAWGQTYYKNKRDQGMSHACALRCLGQRLLKIVFKMISDKTPYDAELHARNQLKHGSWVLTLMNEKSAS

SEQ ID NO: 482099 - protein, 291 aa, unidentified
MASVTSPAERIHLGMDTSMNAIVVGVLRPGEEIPTVDRIFNDEPSIRRFVGRFADRRMLSACYEAGPGGYDLYRLLSSMGVDCDVVAPSRVPKGSADRVKTDRRDAIRLTRLHRAGELTTIRVPTPAEEAVRDLVRARGDVLDDRKRTQQRLNALLLRHGRIWRGGSKWTLTHRQWVNGQVFDEAALNQALATYRGGLQAREVELAAVEAELDEWAAKAPLADTVARLGAYRGIGQLTGLTLAAEVVDWRRFASARAFMGFCGLVPSEYSSGERTHRGHITKAGSWGCARR

SEQ ID NO: 482100 - protein, 421 aa, unidentified
MKNSAARKMKQVPERYLIVGIDPHKKKHAAVAITQDFTLRDRFKFDNTHEGLESMINRVRDKMTDLDCRGAMFAIETGGHYWRNIAYFLDEKGIPLRFINQYTLKRRREGKDLNRSKNDYRDSEVAAQLLCTGEFTETRLPQGVYAELRTAHNTYRRLVKERTRVTNLIKSLLDGLFPEFVKVFKDPCGLTAATVLSTCAIPSVIAAMSEQEFVALIKATNRPQLRRNKLRAIHSVAKTSIGITAGAKSLAFEISFLIDKIELIKQQITIIERRLIRLVDGAEEGKYLLSIRGLNYISVGGLLAELGCFKAYRSAKQMIKMAGSNPTESESGGKKKSRTPMSKQGRPVLRYCAWTAVVPMLRFNEDFRAWAKQLRERPVHANPLGGREIVGAALNRLLRLAFTLVKNRTYYRLPVAAPVIR

SEQ ID NO: 482101 - protein, 367 aa, unidentified
MSKSSKLFVGMDVHKDSIDLATGEERGEVRHHGAIGGDLAALSRAVRKLESLGKRLVFVYEAGPCGFVIYRFLRARGHECWVVAPSMTPRQASDRVKTDRRDCLKLCRLARAGELTPIYVPDAADEAMRDLVRTREDAVIMQRQARQRLSALLLRNDIRYAGKSAWTQAHRRWIAHLKLPAQPQQIAFEEYVQAVHEATARIERLEQAIATERGHWRWRPVAQALEAFRGIQAIHATRIVAELGDLRRFAHPRSLMGYLGLVPTENSSGARRRQGAITKAGNSSARRAFIEAAWAYQHHARVSWVIARRQTDLPQPVIELAWKAQLRLCARFRKLAARGLNRNKIVVAIARELAGFIWAAGHSVKPV

SEQ ID NO: 482102 - protein, 337 aa, unidentified
MSDGPPTHPHGRRDARHILGVDTHADAHVAVALDGLGRRLGHTTVPSTEAGYAALVGWAEEFGTLACAGVEGSGSFGVGLARFLRARGVEVFQVNRPNRQHRRRFGKHDTTDAEAAARALQADTATGEPKSADGIAEMVRTLHVARRSALKARTQAANQLRALLVTAPEELRAQLHGLSTAKLVATAARFRPGDPKDLRAMTKLAMRSVARRHQRLSEEIVELDEQITRLVCETVPTLTSLRGVGTDTAASLLVAIGDNPERLGSEASFARLCGVAPMPASSGKTVRYRLNRGGNRDANRALHVLALGRMSWDERTREYVALGVRRRARARGRSCGA

SEQ ID NO: 482103 - protein, 316 aa, unidentified
MSENKTPCFVGIDVSKDKLDICILPERIFWEEANTGDFKELIEKIKSYSPKLVVMEPTGGHEKAVLKALIQANIPSAREHALRIYHHAKSRGKRCKTDPIDAESIAHYAQCYCEQIQVLQEMPEYREELQQLMRRRLDLVELSTQEKNRFQSPQLCERVKSSSETILRALEEELKKIEGELEQRITEDKAMSKKKELLLGVPGLGEVSANMLLIHLPELGKQSHKSIASLVGVAPYARQSGQYRGQQKISGGRAEIRSVLYMAALSAARFNPVLRAFYLRLKERGKKPKVALIACIRKLLHILNAMITKQEAFKAT

SEQ ID NO: 482104 - protein, 312 aa, unidentified
MERTFVGIDIAKDQVDVHVHPTDERFQLSRDDVGLAGLVARLQPLGPQLVVLEATGGYEIPVAAVLASAGVPVAVVNPRQIRDYARATGQLAKTDALDARLMALFAEAVQPEVRPLPTPEAQALGDLVTRRRQLVDMLGAERNRHQQARDLRLQRRIATHIRWLTTALAEIEADLATRIRSSPIWRERDNLLHSVPGVGDITAYTLIADLPELGHLDRRKIAALVGVAPFNRESGHWRGRRMIAGGRPAVRSVLYMATLTAVRFNPAIAQFYQRLVAAGRPKKVALTAAMRKLLTILNAMLRDQRPWQPQTA

SEQ ID NO: 482105 - protein, 369 aa, unidentified
MAKSITYVGLDVHKDTIAVALAAAGLRGEVREHGKIPNAPGALRALAVKLAAAGRELRFCYEAGPCGYGVQRQLTEAGHECAVVAPSLIPRKPGERIKTDRRDAINLAKLHRAGELTPVWVPDQAHEAIRDLVRARQAAVRTLRQARQQLSGFLLRHGRHYHRPAWTQLHRRWLASLKFDQAVHHIVLEDGIAAVEAAMARRDRLETHIEAVLPEWCLAPVVEALQALRGVRLVAAATLVAELGDITRFTNPRQLMAYLGLVPSEHSSGRTRHQGGITKAGNGAARRMLIEAAWSYRFPARISRELLLRQERQVKPIRDIAWKAQERLCRRYRKLARAGQQPTVITAAIARELAGFIWAIAKQVQPMAT

SEQ ID NO: 482106 - protein, 315 aa, unidentified
MTKHLPPVNVGVDVGKNQLDLYLIERDRALTVPNEEQAILVLVRSLSRYRVERIVVEATGRLEQPFVRAALAAGLPVIVVSPLKIRRFADVIGQLAKTDQIDARLIAQFAATVKPLPRPASDANAQAIKDLVVRRRQLTSLRTMEKNRRQVMPNDLKPSFDRILKALDRELKSLEQLINHAIDQHASSRHKRELLTSTPGIGNCVAATLIGDLPELGSLDRRQIASLTGVAPFNRDSGTLRGKRRIRGGRAHSRTALFLSAMVATRFNPDIKRFYQRLLTAGKHKKVALTACIRKIVTALNAMLRDNLPWRSAIA

SEQ ID NO: 482107 - protein, 442 aa, unidentified
MEQNTDVAELEQEREQVERVAALDIAESSAMVCTRLPKDGAPGRRVQRVFPVGATTTAVAELGDHLVAQGVELVVMEATSDYWRPFFYQLEARGLTCRLVNARDVKNVPGRPKTDKLDAVWLAKLAERGMLRASFVPPKPIRQLRDLTRLRTTLVEERSRHRSRIEKILENACIKISGKQDGVTDLFGVSGRAMLDALIAGQREPKALAQLARGRMRAKIPALELGLAGQFEAHHAYLIQTLLELHDHLTAQITDLDARVEAAIAALEPAPPPGGGGTGRMALLDRLDEVPGVGRETAQVIIAEIGTDMSVFPTPGHLASWAKLTPRTIQSGAKATHGPTGRGNRRLKGHLAQAAVGAGKTKTFLGARYKRIIKHAPKKKAVVALSRNILEIAWVLVNDPDARYSDLGPDWHERHLDQARKTRRHVRELERLGYAVTLATAA

SEQ ID NO: 482108 - protein, 347 aa, unidentified
MRFYKQQHQFYCGIDLHARKMYVCVIDQKGKTRLHKNIPTEAEVFFELIFPFLEDIVIGVECVFCWYWIADLCAQHSVPFVLGHALYMKAIHGGKTKNDKIDSFKIAALLRGGNFPLAYTYPAHMRATRDLLRRRMYLSRRCGELVAHIQNTNTQYNLPEFAKKISRKYNREGVAERFENPVVRKSVEVDLTMIDALNQTLRQLEWYIEKTAREHDYQTLYLLRSIPGVGQILALVILYEICDIKRFATVQDFSSYARLIRPVKESDGKWAGKGNKKIGNHHLKWAINEAVILMLRESDQAKHFVERLTKKHNKGKALGILTHKLGRAIFFMLKNNEAFNMKRFFSS

SEQ ID NO: 482109 - protein, 372 aa, unidentified
MHLLGESGRLPVGNILLGGAQMNYLGIDHHRQYSHLTLMDEKGNILQSGNVINSRSELEAFLEGVKDCRAVIEAGRSSYTLVDMLTELGVDVRLAHPKEVKSIARAKVKTDKRDSRILAHLLRTDLVPEVYQRSKENRETQKILRQRAFYVGAMTRVKNRIHAFVVQQKEEIQQEAAREKNIFSERGQKMLLGLACPEPEKKMLGSLVKTVRHLEDRLRETTALVEEVYQGNRNAQLIQTAPGFGTFLSVLAATEVADVGRFADAAHLHAYAGVIPSTHSSGERSYHGKITKEGNRWLRWAAVEAVWPAIRADFDLRIFYERIKKRKGANSAKVATARRLLTIIYRMLKENRPYIPYKRNQSAAFGKFLTGR

SEQ ID NO: 482110 - protein, 405 aa, unidentified
MSTHQGKLFAGIDWASKTHAICVVDQAGAIKVRFEIPNTGKTFTGLVKRLTKLGVEGVAIERCDGPLVEALLDADLRVVVITPRQVKGLRSRYTGSGAKSDAGDAYLLADVLRTDGHRLTPLAQHSDATQVLRSLSRTRKQLVEARVGLVNQLRAELERCFPGAIGLFARLDSDVTIAFLRRYPTQHATAQLTQTRFAAFLRRIAYCGRKPVEQLYGHIAEAPPAGLSTEEAQGHAVCVLALLKAVQTVRNQERELQAEIIERLDAHADAHIFTSLPKAGHGVRAAALLAEIGDVRARFPDEESLAALAGVAPVTRASGKYHAVGFRWAANKKLRNALIDFADDSRQISPWAAKIYHDAINRGKRHPHAVRILARAWVRVIWRCWQNHTAYNPQLHGGAIQLQTA

SEQ ID NO: 482111 - protein, 345 aa, unidentified
MKHYVGLDVSMKETSICVVDETRRVVKEGKVGSEPETIAAWLELTGLGFERVGLEAGSLAPAIYDGLAAAGLPVICLDARHLKAATSAMPVKTDRIDARNIAWALHAGWYRVVHVKSQATHKLRALLRSREMLVKSRVMLDNHLRGILKAFGLKVGKVDPGRLEQRVRELVDGDEVLERVVGSILSVRREVLQRFDDLHRMVLATVKADPVCRLLVSVPGVGPVTALAFRTAVEDPTRFAKSSLVGAHFGLTPRKYASGETDRNGGISRCGDRMVRSLLCEAANVLLTRVQRWSWLKRWGVDIARRRGKVRAQVAVARRLAVIMHRMWIDGTPFRWTRADEAACA

SEQ ID NO: 482112 - protein, 399 aa, unidentified
MGPHMRVGVDVGQKSHQVGIAGPDGTILEEFTIPHSQEGFQEFFRRIERRCQEVALPVAVAMEGYNGHGRPLDRLIQEKGYTLYNVNNLKLARFREIFPGPAKTDSLDVRKILELFHLKDHLPLAKDVLQEVPRIPPVNEKLKRLTRRRRQLVNEKVRVISRMQADLQAICPELLSITGSADNLWFLRFLSSREDLRKLGRMHKSSLLAIPGIGNKYATVIQEWQKGSKFSQEVEYVGPMIVSDAKRILELLKEIAALDKAIEELSQESELARRIDSIPGFGKTSAAELAGEIGTFDRFTSEASLALYLGMCPLDRQSGQFHGTKSPRQVNRRAKVEVSAVARHIERVPESRAYYEKKRAEGKKHNQAVRALGRHLVRVMWSMLSQERDYELREIPCPT

SEQ ID NO: 482113 - protein, 372 aa, unidentified
MGLDVHAETISVAVAEPNGEVVSLGTIPNRGESIAKLMRKLGPPEKLRVCYEAGPTGYALYWQLTKLGIHCEVVAPTLVPVKAGDRVKTDRRDAERLARSYRSGDLTAVWVPDRACEALRDLVRAREAAKQDQLRARHRLGKFLLRHGRRAPAGIRAWSRKHVAWMEQVRFEEVAQQVVVLDYLAEVEHASHRIQRLEGAIEEMVKVMPERMQAVIAGLQCLRGVAKVTAVTVVTETGDLGRFTSPRQLMSYAGIVSSEMSSGSSTRRGGITKTGNAHLRRVIVEAAWSYQYGPAVGAELKKRQQAQSEQVKEIAWKAQHRLCGRYRRLVARGKPHQKVVTAVGRELLAFIWAIGGAIDKARSTSQDTRRAA

SEQ ID NO: 482114 - protein, 433 aa, unidentified
MDSKNQRQACIIRTGQGEDITRHNINVGGNNIEELFVGIDISKDFFDVCIKDVRNNPLFADKRYEQNQNGFNKFDIDLKPFWKLSKGQMVFGMESTGIYHLNLYEHLRRNGIFPHVINPIEIDKKAKNRIRKTRTDKIAADIIAEKLITDARPEQQYILEPNLYGLREHCRILYRLRNEMNKCKVKVTRDLDILCYGYDKLFDNNLSPSSIAVMKLAFRKTRFLDVTETELVKAISPYYGRQRDAVEKAERLTTLFSTSEPPEYLKEPLLLELHLLINQYELLKTQMDRVKRKIEKSTSQLKTRIKSIIGIGDFTGGLILGELGDIRRFESSKKVVAFAGLDPILKESGSSRREGHISKRGSPMLREALFLAAFPASKYNPVCKPLYDRLRAKGKHHNLCLTAVARKLLLIVYSVLKNDRDFYIPEHLNKTEK

SEQ ID NO: 482115 - protein, 526 aa, unidentified
MVTRTRTRKSAGTKKRFIGKPNGQIQERVQAVGPEHFGVVAVDCAKRRSKWMLCNFYGKVIIEPTCVEHTSGGLQVMTRLVAETCRSEGLADTIVAVEMTGIYHKPVYRAFRKAGFDTRIVHPFASNHFRRALHPDEKTDDHDLEAIFHAAVKGYGLATFPVGEVYQSLQAAARHRHNLVKQRARLMIQMRHLLHQTMPGFADLFEEEKLFHKSIAMPIAWKFSSAEAIRRAGVSGISRYLNENKIRFQTRTIERTVAWASTAAESSELAAMYTQQWQQLHEVCQLFDQQVDAVERELAGFLAKTPYILLLSVTGINVVSAARLGGEAGPIEHYASARAINGRAGLYPSRYQSDEVDHADGSLVRQCNRKLRGAAMLVAENLIKCHPYYRGLSALWTQQKVDPRDRRCRIANRAMRMVYQLVGGRQLWRGKGVNREYLLAKLQEFHRVHKTPLDQVIRDLDEAFAWLPKSAYAEEAKPLAGLVRTKHHGPQHISELMIPLLIRLGVSIEGHHEELESNTSEARSSN

SEQ ID NO: 482116 - protein, 412 aa, unidentified
MEHQHHVFIGVDTHKDQHTAVVCNCWHKNLGVIETPNNPVAFPTFLEQVLASTPNGLIPVFGLEDTGGLGHTLAVFLLKAGYVVKEVNSIRSDRQRNRSPHPDKSDPDDAKAVAKVLINDFDELPDARADELPLAIAQLVHHREHLVNEQTRVKNRFHAAIHQQYADYREFFKDPFGHAALAFWHRFPSSEHLKNIGVTRLASFLRKHSNNRVSTRKAERILSLINRDKNPSLPQQTRDFIIRSLVERLWLLEKESLTVEERLALLIKQTGLQLETMDGINTITAAALIADIRDISRFASSAKLARYAGVAPLKKSSGQKKRFKKSKGGRRSLNTVIYQIALNQICLDRKGQPRNHVARNYFLKKVAEGKTKKEALTCLMRRLCDIIFVLMRDKCAYSYPQKPDVDKASPAA

SEQ ID NO: 482117 - protein, 284 aa, unidentified
MLIIGCDYHPGFQQIAYVDTETGELQEQRLPHPEEAERFYRDLAAREARVRVGMEASGHGRWFERLLAELNFELWVGDAAAIRAKRVRKQRTDRQDAQHILNLLVEDRFPRIWVANWENRDLRQLLWHRHRMVQARTRVMNQLPAVALNEGLRCKKRLWREQGRQQLESLTLAPWTSRRRRELLELLDRLNPTIAELNQVIEQEAEKNPEAQQLMTHPGVGALTALAYVLIIGDANRFSRGKQIASYLGLVPTEESGGDRRRLGHISKQGNCLLRFLLVEAAQR

SEQ ID NO: 482118 - protein, 391 aa, unidentified
MSLYFVGIDISKYKHDCCIISATDQKVISKFSIKNDKVGFEELITTFNSLSSPEDIRIGFESTAHYALNLELFLENANHSFMEINPVLIKDFKKSQTLRRTKTDSIDCELIARWLMTVEYKPHSKGFYHAYSLKSLTRLRDRLVRQRSFYLVKITNVLDHTFPEFKPFFHERLSKTALYLLENYGSAEKIARMNSASYEKLRSISRGKFSPQQFIRLKELAANTVGVNNSIFDVELNSLLTLYKSLVDEIKTLESEINRLVDEVHPHYMSIPGIGPISAAIIYAEYGDISNFSSPNQMLAFAGIEPSVHESGTEAYNGKMVKHGSSQLRYVLINCCLPLIRFDVTFATYYARKRSENKPHRVAITHVAKKLVRVIYALESQDIDFDPKKLR

SEQ ID NO: 482119 - protein, 363 aa, unidentified
MGQNRDGAPELTVGLDLGDRHCEICILDEGGAVVERGKVRTEELALRRRFGGMERVRVILEVGTHSPWISRLLSEVGHEVVVANPRKLRLIYENPRKTDRADAEYLARVGRMDPELLAPVAHGGRQVQADRGVLRARERLVRIRGQLVNHVRGTVKSWGVRLPSCGAATFARRVGEEIPEALRPSLDPLVRQIEAISQEIKALDEQIERLCEERYPETRLLRQVPGVGPKMSLCFILTVEDPDRFRRSRDVGPYLGLVPRQDDSGSRERRGRITKTGDKMCRRLLVQSAQYILGPFGPDCDLRRWGERIIERGEARGKKHAAVAVARKLAVLLHRLWVTGEIYEALRAGGPGGIEEEASLAMA

SEQ ID NO: 482120 - protein, 370 aa, unidentified
MDHHNGAFVAIDTSKLRNAIAVAEEGRGGDVRFVGDIDTTEAATRKLVTKLATKYRQLTFCYEAGPTGYGLYRLIRKLGHDCIVVAPSLIPKKPGDRVKTNRRDAVGLAKLLRAGELTAVWVPDERHEAMRDLSRAREAAQKDLQGKRQQVSSFMLRLGRHYPGKKTWGRAHMNWLMQQKLEQREQRIALEELLGAVRQESERVERLEQAIRDATPEWSLAKVVTALQAMRGLDLVAAVTVLAEIGDLSRFQTPRELMGYLGLVPCESSTGDTVNRGGITKAGNGRARRILVEAAWSYRHPARVSLKKQIKVAASPRAVREIAWKAQTRLCGRFRSLTRKGKRPNVIATAIARELSAFIWAINREVMAGR

SEQ ID NO: 482121 - protein, 354 aa, unidentified
MHKLSIVAATLPPTGGQPEVQRIETTRVAIRRFIERLGSPEGLAVCYEAGPGGFDLLRVLTELGVACDVIAPSLIPIRAGDRVKTDRRDAKKLVRLYRAGELVYVQPPTPETEGLRDLMRCRDDLRRARTAARHRVSKQLLRHGRIYRDGKSQWTKMHRGWVARQRLDDEFAQAALEQMLIHLDGLDRQLDALDRDLEQIARTGRWAETVQILTRFRGIATRTALGLISEIGDFHRFGHPRELCAWLGIVPTEYSSGDQRHRGHITKTGNHHARRLLIEAAWSYQHRPRRPDRGPEPDARAWQAQIRLHRRYRHLTTERGKRSTVATVAVARELAGFLWAAATNQPFALEAAAA

SEQ ID NO: 482122 - protein, 424 aa, unidentified
MSKKKTSGAGLAALYGRVCGMDVHKNIVVACVRILNAKDGTVQSTLRRFGTMTADLVELRQWLADEQVTHAAMESTGVYWQPVFNVLEGHLEVWVVNAQHIKKVPGRKTDMKDAEWIAQLLQCGLLRPSFVPDRQQRQLRDLTRQQTKLVQQRNAVDNRIQKVLETANIKLGSVASDVLGVSGRKMIEALIDGEKDPRVLAELAQKRLRDKIPQLQRALEGEINDHHRFLLRQLLDQYDFLEKEIARISERLGAVAPPTFRSAVEQLDAVAGVGERGARALLAETGTDMNRFPSHKHFASWAGSCPGNHESAGKRRSGKTPAANRHLDAVLTEMAHAAVRKKDSYFKSQYHRLAGRRGKKRALGAVKHSLLVTVYFMLRDNKPYKDLGANYFDKLNPQQQIHYHVRKLKELGHKVELTPMADAA

SEQ ID NO: 482123 - protein, 322 aa, unidentified
MGYIGIDVSKATFVVAYSADKGGKIRTFDNTTAGIKQFIGTLPKDGSIHCVMEATGNYSAMLLYLLNVAGITVSMENPLKIKNFAKAMLSTVKTDKSDARLIALYGEKMNPQPFKMQGEAILRLRQKRTVIRQLTKQITAMSNLRGSLVCLPVPDKGATHTVDETIKFLEKRRDRLQSELTELVEVEFSRQLALLTTIKGIGITLATALIITTGGFTYFQNAKQVSRYLGICPTYEQSGTSVNIRGHINRNGDAYTRGLLYVAAWTASRFNTKCGETYTRLRQNGKPGKLAMIAVANKLVRQAFAVVTHDKEYVDGFVSNRP

SEQ ID NO: 482124 - protein, 325 aa, unidentified
MVFENTIGIDVSKETIDVHNHLTGAKKEFTNNNAGFKQLIKWSDPTGKLIFCFEHTGMYSLPLAVFLSTSKQPFAMVPGLEVKRSLGLVRGKNDRIDAQRLARYAYLRREEIAPTTLPSKSINKLKSLLNLRAKMVRQKAGYQATLRELRTFAKIPKKDILYASQDKLIEELNKQIKRVEDEMKDIIKGDKELNRLFSLITSVKGVGLILGTSFLVYTNCFAAFDNWRKFASYSGIAPFEYQSGSSTRAPRRVHHFANKGLKALLSNAATTSIQFNPEMKLYYQRRLQEGKNKMSTINIIRNKIVARVFATVKRGTPYVQTLAYA

SEQ ID NO: 482125 - protein, 627 aa, unidentified
MATTERSDRTAHDYRRFRCRECGRQFNERSGSALNRLQVPTDIVFLIVLWRLRLKLSLRDLAEILLLRGLVFSHEAVREWEAKIAPLLTDALRQRRRGRIGRSWYVDETYLKVDGRWCYLYRASDSDGNLVDVYLSEHRDQVAAERFFRSAMAVTGIMPETITSDKHAAYPLALAEVFGDAVEHRTFKYKNNHLEQDHRGVKGRTRPMRGFQQPNSAHRFCRAHDEVRDFLRPATKRRVPISSRLTVMMAPSSCISPLPADTKPARLPADGSPPISRVIEPVLEHGAPSAGSIRNSNSRSGRKASPHSQGRVMEQPSSSPSFVGIDVSKDRLDVHILPAGQAFAVACNGEGLDQLVAELRMRAPSLIVLEATGGFEVTVAAVLAGASLPLAVDNPRQIRDFARATGRLAKTDALDAQIIALFAERIRPEPRPIADAESLALGELVARRRQVVEMIGMEANRLRQTRNPRVRHTIEATRKTLEAQLVELDKDIDDTVRGSPVWRAADDLLTSVPGIGGITARTLIADLPELGRLDRRRIAALVGVAPVNRDSGQMRGYRAIAGGRTAVRNALYMATLSAVRWNPVIKAHYTRIVAAGRPKKVALVACMRHLLNILNAIIRTASPWKTA

SEQ ID NO: 482126 - protein, 335 aa, unidentified
MKKFDYYIGIDVSKLTLDVSILFECGNATKTEYYKIENKEKSIAQFVKKKLGNYQPEQMLFCFEDTGIYSMPLAYYLSDNKLSYWQVPAIEIKRSKGITRGKNDKIDSGDIAEYAYSKKHKFRPCSMSPKSIQQLRLLFSERERILKSLLAFKKTSENKGFVSKEVYNSVVAINRMVVKQLENALKQIEEKMLAVIISEEKLNQQYSLITSIPGIGMQTAIYLIIATKGFETFNNWRQLACYAGVAPFPYQSGTSIRRRDKVHPLADKKLKTLLNMCALGAIRRDKELKAYYDRKVGEGKSKMLVLNNVRCKLLARVFAVVNRGMPFINTFKFAA

SEQ ID NO: 482127 - protein, 464 aa, unidentified
MGCAIGIDPDSTGVVCALVNGSSVINKSFSATQEGLRQLLKWIGRQDKVLVAIEGFHGQSQPLEKVFRDSGLVFHSFRPADTETFRKAVLGQNKDNQKDAESVARYALALESQGRLERYRRVWFPDMELQLLTRSLDVLSTQITAEVNRLWKFLRYASVDLYLVLGGRNPEVDYSEQKALKNQGILNLLIHQPDIGAWKDLDDQQMLQAMGGGNYKGRQKLIAALRCLGPRLPSLSAPLALILKTAAHRLQRLLDEHTDLKRGLEDLVRERPQIQALTAIKGVGIPTAATILAEIIDIRRFSVEDSLACYSGLGMKLHSTGQTERMMPSRQFNHRLKDAFMTAALNYVRYNPDSLLAGYHRNLIKHGMKATEATKRVARALVRVVYRTLVNVVAQNSESQGAKRGESEVASEQSRSGQSRKSNTSPSTPKSSEAKRLAAVKLRQADAMEPRTRRKRRVIPKQTA

SEQ ID NO: 482128 - protein, 416 aa, unidentified
MQRERCPAIDASKSKSTVAIRRPGGVIVARPFDISHSNYDFEKLVFILKTTGGDICVVMEHTSNYWKPIALTLKNAGFYVSVVNAMLIHDFSDNSIRKLKTDRADSLKIANYALTFWNQLPPFNDEDETRLVLKEQSRMYERLASTATSLRNGLIALADQTFPSIDQAFGHAIKNADGHEKWVDFFSIYWHRDCVLRLSIEKFTESYRKWCLRRNYKFRTNTAHKLYALAQDAVPTLPKNNGTKALVLQACKSLNAVCEAKQSTQEEMNRLASLLPEYEVVMQMEGTGPITGPALMAEIGDVRRFKNKKALVAFAGIDAPPFQSGNFESKSRHVSKRGSPHLRRTVFLVANIILTLSHKDNSVFCFMDKKRAEGKHYYVYTIAGSAKFLRIYYARVSEYLRTQEPPAAAICLDCKD

SEQ ID NO: 482129 - protein, 343 aa, unidentified
MKDTIYDHYIAIDWSIKNMAIARMTKKSNKITAIDVPSDIEDLQAYLKNLRGTKILAIEETTTSQWLYTELKEYVDRLFICDPTRNKLLNEGPKTDKIDATKLVRLLKARLMKEIYHSTDKFLYLRRVVSGYEDLVKAGVRLKNQRYALLRACGKNGNEKIGSTLDFQGEQFVLKCLDRQIDAYEEEKGGYEKEFEKLARKNLEIKHQKSLPGVGTINAVKIVARVVTPHRFPDKGHYLSYTGLIKLDRISGGKSYGKKNPRYSRQLKSVYKSGVLAAIGGNNPINDYYEHLIKEKHYPDYNARQKACRRLAILSLGVFKSGKKFQPFRRNDVKGSKESTSGL

SEQ ID NO: 482130 - protein, 419 aa, unidentified
MKHDVEVLHPYCCGLDIHKKVISACILTPTQKQRKRFGTMTDDLNELVYWLKEHSVSTVAMESTGVYWKPVYNILEEAGFELQVVNAQHVKMVPGRKTDTTDAEWIATLLRIGLLKPSFVPSRRERELRDLSRYRLALVQERSREIQRVQKILESANIKIGSLISDVNNVSGRLMLQAIIEGRLTPEEISTLGHANLKHSPEEYAKALKGRVNEVHQGLLSMQLSHIDWLTQRIVGLDNDLDTLTEQTPNFKEALELVDSIPGVGRQSAMTILIEIGLDMSHFPTDKHLAAWAGVAPGNRESAGKTKPEKSRKGNKYLKAILVQAAHSLHRKKDCHLREQYQRIKARRGSKKAAVAVAHTILRIVFYLLVRKQRYIELGASYVSEKKKSSQIQRYVKELAKLGLVIPNELVNQQLAKSA

SEQ ID NO: 482131 - protein, 306 aa, unidentified
MFIGIDVDKAGFEVAVRPTGAHWRVLRNKAGISLLTRQLLKLKVQRVALESTGGYELELLQALAAAGLVVFQLNPRRVRDLARGLGRLAKTDQIDAGILAEIAEKVQAVPYVPPSAAEQRLHALVRRREQLVGDRVRETNRLEHAQGEILASIRRGIAALQRELKRLDLTIRQVTAASPALVQRISVIRTQCGCGKQVSAIMVAGLPELGRLQRPQITALAGLAAYNCDSGTQRGQRHIYGGREEVRRGLYMASLSASRHDPVLKEFYQRLRARGKAAKVALIAVARKILVRLNARMRDHYKLQTA

SEQ ID NO: 482132 - protein, 320 aa, unidentified
MMAQIDPVVVGIDVAKAKVDACIRAFMLRQTCPSTAQGQRKLVAWLRKHQVTKAVMEASGGYERDWARVLRQAGIEVRIVDPKRVRSFALSAGCLAKNDTIDAEMIAWFAETFSEAPSQTHDAAHEELQALVKARLGLIDLRMRLEGQSEHAAPGLVQKAHAHVLKSLASELAKLEAAISAKVKSTPDFAERAEIIESVPGLAETSSANLVAGMPELGQVSDEIAAALIGVAPYDDDSGKRRGERHIKGGRRWVRNAIYMPCVGAATQNNPVLKAYYRRLIAKGKEPKVALIACMRKLIVILNTMIARRQKWDPNRYALS

SEQ ID NO: 482133 - protein, 343 aa, unidentified
MQIRSVGIDLGKTTFHLVALGDNGKVLLKKKFTQRQLITFTANLQSSLIGLEACSGAHFLGRALREQGHNVKLIPAQFVKPFVKSNKNDFLDAEAIAEAVDRQNMRFVPIKTDDQLDLQALHRVRDRLITRRTSVINQLRAFLLERGLVFAKSPAKLRERMPEILENAEEDLTPRMRNLLALLWNEWKDIEQQVVDLNLEVELIASSDAACLRLRQIPGIGPLVATAIVASIGNGAAFHKGREFAAWMGLVPKQYSTGGKAKLSGISKRGNRYLRKILIHGARAVVLRCKRERVSMGAWMTALEMRAPRNVLIVATANKLARIAWAVLSSGQDYRAGQDPVPA

SEQ ID NO: 482134 - protein, 416 aa, unidentified
MKIYPRTRAIERYIAIDIHKAYVLVGGMNSRQEWVLVPRRIEMSKLGEWAKRNLCASDAVVLETTTNVWEIYDLVQPWAGYTVVAHAGGVRQIAEARVKTDKEDVKCLIRLLIADILPEVWVPSQEVRELRGLISYRQRLVKTGVILRNRLQSLLHSHNLVLPEEGLLQQSWWDAQAKISAVEKLQIRQELSLLEQIEKHKGEVDTELGRQSLGDRWGKQTLHLLQLPGIGVVIAMTILSAIGDVQRFASADKLVGYSGLGAGVHASGQEYIEKPITKSGRKELRWVLVEAAWRAVRSSPYWKAQYEKYLQRMRRPSQAIVVVARKLLVAIWHVLSKAETDVHASEEDLAYKMLVLSWELDESVRQGLTYKQFAKYALMKLGVETDITRFVRKNVPRRIASKDEVLRRMSELGLRV

SEQ ID NO: 482135 - protein, 429 aa, unidentified
MTSKSCTTSPVVRVAIDVATLTHQVLLELPSGTRRVLRVANTKAEIDRFVATLRALELSCEIAFEPTGDYHRPLAYLLGQAGFHLCLVSSIAVARTRDALYNSWDKNDPKDAQVILHLLKNGTTQRYLDPLMTGYQDLQEIAKTYQQISLRKVRLQHSLVTHHLPLYFPEAERYLHSSRAEWFTELLLFTPCPTAVRRYTKTAFVAAAREQIGGRKVDKARWLADFYETACSSVGLPVSEASETMRMFRVVLEEYRALCQLRKRLEADVVTRLANQPDFVRLQTLPGIGPILAMIILAEARDLRRFGCARQFLKYCGFDLCTEQSGQFRRTTHLSKRGNARLRYAFWMAGTVAIRMQQNSFRRKFDDYIRRDPQNTDRRRKGYTAVAAKMARVAYAVVTTGTDYRRFPEATRPGGRIPSPGAVEAHATS

SEQ ID NO: 482136 - protein, 338 aa, unidentified
MAIVTVGIDLAKNVFALHGVNETGHLELRRPSVARAKLNALVGSLPPCTIAMEACTGAHHWARLFSQSGHTVKLMAPKLVAPYRMSGKRGKNDAADAAAICEAVQRPNMRFVPVKSEEQQARLTVHRARQGYVAARTAVINRIRGLLAEFGVVLPQKAEVVRREALTRVEALPGYAKTVIEDLLGELRHLDERVKQYDVHVHAMARECTAAQRLMQLVGIGETTATAMVAMVGNAREFGSGRQFAAWLGLVPGQYSSGGKMRLGRITKAGDAYLRSLLVLGARSLLNAAAAKTDSVSSWAVKLALRRGYWKAVVAIAAKNARMAWAVLTKGEAFKLPA

SEQ ID NO: 482137 - protein, 350 aa, unidentified
MLIVGCDYHPGFQQIAFVDTETGELQERRLAHREEAEKFYRELGASGVQLRVGMEASGHARWFERLLAELHFELWMGDAAAIRAKRVRKQRTDRQDAQHMLNLLLENRFPRIWVASWENRDLRQLLWHRQRMVQMRTRIMNQLQAAAINEGLRCKKRLWRERGRKQLEAFPLAPWASRRRRDLLELLDRLNPTIAELSQAIEQEVEKFPEAQRLMTHPGVGALTALAFVLIIGDAERFRCGKQVASYVGLVPSEESSGERRRLGHISKQGSTLLRFFLVEAAQVTVRSDPEWRSKYFHLAMRRGRKIAKVAMARRLAVRLFWMWRKQWDYQQWKAFGPHVGQPGTGVGVQ

SEQ ID NO: 482138 - protein, 454 aa, unidentified
MVMIMEHGMTQQDKPKKRGPRLEVTNPNAAGIDIGCASHYVSVPADRDDEPVREFKSFTVDVHKLADWLQACGVDTVAMESTGVYWIPVYEILERRGFTVLLVNARHVKNVAGRKSDVLDCQWLQQLHSYGLLRGAFRPADQICVLRSLNRQRAMLLRMQARHIQHMQKALVQMNIQLANVISDVVGETGQKILRAIVAGERDPYALAGMRNVRIKASEEEIVQSLRGNWRDEHVFALKQALELFDEYAQKVADCDELMEQQMVLLHQHDEVPGKARKQSGRNKPKFDLRTRLYQMCGVDLTRIDGIDVGTAMTVLAEVGVDMSKFPTVKHFAAWLGLCPGTKISGGKVLGSKTQKCANKTAQALRQAASCLKKSQSALGAYYRRMCAKMDKPKAITAAAHKLARLIYTMITKGEEYVDQGQAYYEERYRQRVEINLRRKAESLGLRLVPMEVA

SEQ ID NO: 482139 - protein, 371 aa, unidentified
MKTSITYVAMDTHKKQHQVAWVHPDTGEIQQFTVANTPREIERMVKKLRQQTPGEIHVCYEAGICGFVLQRQFQKLGCVAKVIAPSLVLRKPGARVKTDRRDAKKLLSQLVAGQLTEVYAPSAAQEADRELTRCRDSAQMDLKRARQRLNSLLVRHGYLYQDGNLWTGKHQQWLKALSFDQPKLRTVFEEYSSEVEHCLQRVQSLDKQLEQLAQSEPYRAAVAALRCFRGIDTLTALTLLTEIFEFGRFDSPRALMAYLGVTPSEESSGERHRPGGITKTGNRRVRRILTETGWHYRHPPYVSKALKARRQDQPAWAVDLADRAAKRLHRRYRHLTERGKAPAVAVIAVVRELAGFLWALLRQVQTPNPSA

SEQ ID NO: 482140 - protein, 405 aa, unidentified
MSELEKGLVFAGVDTHKDTHTLCLLDHMGRAIGTFRFAADAKGYDALAGKIGGPATCVGVGVEGTGSHGAGLTRRLLELGYRVHEVMVPGRARRKPGRPKSDPADAEVAARQVLARVNLSKPKDQSGWTEELRQLMIARDRLVQATSAMINAAKSLIVTAPEDLRSSLEGLSRKSLRSALSTLDPAAGGIILALGSSGRAWELQDREADAVEERMKRVLEANAPALLAVYGCGTVSAAALAVAGGGNPERLESEAEFASLCGVAPLLASSGKTERHRLNRGGDRRANRALYQIAVTRMSYDQRTKDYVAKRKRDGKSKKETIRCLKRYIAREVFRALRRPLEVKGPSWKDLRPARQALGITLVEVGKALNVGFQKVSYAETGRLMNAKFLEEYDAWLKSQLRIVG

SEQ ID NO: 482141 - protein, 405 aa, unidentified
MFEIEDVGVFLGLDVGKSAHHGHGLTPAGKKVFDKPLPNSEPKLRAVFDKLAAKFGTVLVIVDQPASIGALPLTVARDAGCRVAYLPGLAMRRIADLYPGEAKTDARDAAVIADAARTMPHTLRSLELTDEITAELTVLVGFDQDLAAEATRTSNRIRGLLTQFHPSLERVLGPRLDHQAITWLLERYGSPAALRKAGRRRLVELIRPKAPRMAQRLIDDVFDALDEQTVVVPGTGTLDIVIPSLAASLAAVHTQRRAMEAQINTLLEAHPLSPVLTSMPGVGVRTAAVLLVTVGDGTSFPTAAHLASYAGLAPTTKSSGTSIHGEHAPRGGNRQLKRAMFLSAFACMNADPASRAYYDKQRARGKTHTQALLRLARQRISVLFAMLRDGTFYESRTPKDVELAA

SEQ ID NO: 482142 - protein, 333 aa, unidentified
MKLLQRWRDEAGRTGRQIKRIAVAYEAAGDGFWLARWLRARGIEAYAIHPASVAVSREHRRAKTDRLDTELLMRAFLGWLRGEKRHCSMAPIPTLEEEDARRPNRERETLVGDKTRIINHIKAILARFGIRSFRLSLRQAADRLETIRTAEGTPLPDNTRAELYRFLERLSLVREQIRTIEQERLRRLAAAPAAANGPHAMVRLLARVIGVGVETADMLVHEMLSRKLRDRRAVARYAGLTGSPDESGKRRREKGLARAGNARVRRGMIQLAWRFLRFQKDSGLARWFQARTADGRKTTRKTMIVALARKLLIGLWRLVITGEPPQGVTLRAA

SEQ ID NO: 482143 - protein, 346 aa, unidentified
MEHYAGIDVSLELSSVCVVDAQGKIVKEAKVSSEPEALVSFFKGLGFPMKRIGLEAGPLSQWLHAGLAQAGFETVLLETRHVKAALSAMTVKTDRKDARGIAQLLRMGWFRAVHAKSIGSQEVRALLVARKQLLGRLIDVELSIRGILRGFGLKVGPVTRKEFEARIRELVMGQATLERIADAMLSARAALKAEYEKLHKAVLAIVREDAVCRRLMTVPSVGPLVAITYKSAMDDPNRIVKSKAAGALFGLTPKKYQSGEKDVTGGITRTGDEMVRTALYEAANVLLSRITRFSKLKRWGMDVAKRRGSKRAKVALARKIAVILHRMWVDGTTYRWAAAEPIATQA

SEQ ID NO: 482144 - protein, 387 aa, unidentified
MIYVGIDIAKKKHFAAYMDSNGEVLFKPFSFSNDMSGFKKLLSHLGYFPRDNLLIGLESTAHYGENLICFLYDKGFNVCIINPIQTAAIRKSNIRKTKTDKVDCYMIIKSLIMNRCRLFTKQDFESLKLKNLCRFRQNLMKARTKVKIQLVSYVDLLFPELQYFFKSGIHTKTCYALLKECSNPDEIANMHLTRLTNLLTKSSHGRFKRSTAVSLKELASQSVGTKNNTLSLQILQSIIQIELFTKQLAEVEKSIDDIMNDLDSVIKSIPGIGNVNGAMIIGEIGNINRFKKSSHLLAYAGLDPSVYQSGNFKASNTKMSKRGSKLLRYALINAAWQLTLNNKTFKDYYDFKVSQGRRHYSALGHVAHKFVRVLHKIMTDNVEFDLA

SEQ ID NO: 482145 - protein, 375 aa, unidentified
MKDVRPLARSTFKDACYLNLGGPMYYVGLDLHKKYITGCALDSQGAVVTTERRLPPVLETVLGWLAPVGQPAAVALEATLYWAWLHDRLTAAGYQVAVAHPQQVKLICHARCKTDPVDARKLADLLRTDLLPAIWIPDAETRARRTLLRGRAWVVRTRTRVKARIQAYLAAENERVPVSDLFSRGGRAWLATVALPPEVRAQVDRLLALVEQLDVQIAGQDRTVRELARATPEAERLQTIPGIGPFGALLLLAEIGTITRFGSSHELAAYAGLVPSTRSSGGKTAHGTVGPAGSAWLKWLFVEAVQTLKRQPGPVRQHYERLLRAKGKQKATVAAARKLCCYVYWMMKEGWSYDDWLRQRPQREVRPIQAVASVA

SEQ ID NO: 482146 - protein, 392 aa, unidentified
MQWEVTMKSIVFVGMDVHKSGFTLSCLQPELFIEDRFFGHMTVKPSAGEVKRYLDRIQDRYKKQTGGELRFICGYEAGCMGYALYHDLARLGIDCFILAPTSMPKYPANTIKTDKRDSEHIAKCLAYGNYKSVYVPDLMDEQVRDYIRMRNDHKGALKGLKQQINAFCLRLGASYPSGQSKWTQRHLRWLQQLELELIHREILDEYLITYGSLINRLEVLGRRIEEFAQEERYREEVSKLICLLGVQSLTGLSVLVETGDFARFKSASHYACYLGLTPGEHSSGTRIKRTQITKAGNSQVRRLLIEAAQSICKGRIGYKSKALKVRQAGPSPQVIAYADRANERLRRKYYRMIHSGKKRNVAVTAVARELACFIWGMMTNHLDRRMAGQTCF

SEQ ID NO: 482147 - protein, 506 aa, unidentified
MAKTAKAARQKEKESAPKRRSTPVTAESKAAKPKGKAKRGDRRRRTRKWEAIENRPVLEPNAAGVDIGAREVYVAVPPDRDKQPVRIFETFTADLQELANWLTACGITTVAMESTGVYWIPVYEILEAHGIRACVGNARHMKNVPGRRTDWHACQWIQFLHAVGLLRAAFRPEPEVCALRAVIRHRGELVQMAAKHVQHMHKALTQMHRQIQHVITDLTGLTGWAIGDAILKGERNPSRLAQLRDPRVKASPETIEKSLVGHWQPEHLFTLKQSRRLYAEYQREIGECDAEIERLVGTFQPRVDPEVKPLPPDQKKRNRNYAKSRKRRARPQSSTREFDLRTEVYKLYGVDVTQIPGLEFLALQLFSELGRDMSRWASAACFVSWLALCPDNDISGGRVLWRTKRRVHNRAGQLFRMAAYALDRSPTPLGAYLRRMKAKLGPQAAHTATAHKIAVIFYAMIKNQTEYDETIWEQRDAQRHQRHMTGLKRQAQRLGYKLTPIEEEAA

SEQ ID NO: 482148 - protein, 364 aa, unidentified
MQKAELSCEADSENYLGGSSETMYYIGLDVHKRTISYCVKDAAGRVQMEGKIGSTRRELDAWIKTLPQPRMMAMEATIFTGWIYDHLLPHAEKVKVAHPLMLRAIAAAKRKNDKIDASKIADCLRCDFLPECYMTSTEIRDRRRTLRYRGLLVKQMVQMKNRISGLLMETGVSYNKQRLHKVGYFTELMSGNEEIDCVRPLLKLSRDTINRSQKLDYALVSSLERDPLLAERLKRLRTVPGVGPITALTWVLEIGDVVRFRSIKQAISYCGLCGAERSSADKVMRTPISKQRNKHIQQVLVEAAKLAPRYSHELALIHEKEMQRGNRNRATLAVARKMVAWMVAVERRKQDFVPAEKFGGTAAA

SEQ ID NO: 482149 - protein, 398 aa, unidentified
MTRKNTLKSLPTDTEFRVVGLDLAKSDVSVAAIPVDDNTPSLVDRMTYADLLDWAGKISPTLFAMEPCNGYSLLCLQLENLGHEIKVISGSTVSMWINTHLSGQKTDLNDAIALARLAVSDAELTPIRHKSITEIRIQTVQAVRQQLMSQRSKSIVSFKALAQQWGIPCAAGHRNLKKLRESIEAKVDLITRPVANAILFLLDAVKSLDRQIGQLNQTLQELVMFDERGRLLQSVLGVGTQISARVITVVGNVERFNSPRSLVAYVGVAPRNFITGHKNLTKKKHGNCPDLSHKGQGKISRRGDKLLRSLFIQGAACLYMQFCKDQLPECQLKRWILKQLASQKPYGKLIVSLAAKLIRIVWAVLTYGEKFNIQKAGMTRSMWSEMALETPLNKEVPA

SEQ ID NO: 482150 - protein, 359 aa, unidentified
MIAVAVAYPGRSEPTSLGNIANTKKSVLKLIARLSGHGEALGFCYEAGPCGYEVYRWVKEQNQDCVVVAPSKIPRKAGDRVKTDRRDAVKLASLHRSGELTAVWVPDEEQEAMRDLSRAREEMKRVELGIKQRLGALLLRNGKRYTAGKSKWTQRFNRWLADVKMEQAVQQIVLEEYVDAVKQAEERVRGLDEELRRALESWTLKPVVESLMALRGVKLVTGISLVAELGDISRFDSPRQLMSFVGLVPSEHSSSGKPNRGGITKTGNGRVRRLLVEAAWCYRFPARRSSHLQKKAEKATKEAQAIAWKGQKRLCHRYQVLLRAGKVQGKITTAIARELSGFVWAIACEVMGSQRASGS

SEQ ID NO: 482151 - protein, 323 aa, unidentified
MKEPIILGVDIAKKKFDVALLVNDKQKHKVFTNNQEGFRELLGWLKKKGVEHVHLCLEASSTYGDELATYMHDAGHTVSIVNPARIKGFAQSELMRTKNDKVDAGLIARFCLAMHPEPWAPAPPEMRQLQALVRRVDALINMRTQELHRLGTTQGTVEYSIREHIAYLDRQIEALKQQIADRIKSDPDLTIKRDLLKSIPGVGEATVAAILAELHMFEKCDRVEKVVAFIGLAPREFTSGSSIKGKPRLSKVGNARLRKALFMPALVSIQCNPVIQTFYHRLKGNGKNGKVIVCAIMRKLVHLIFGILKSGRPFDPNYRPHCA

SEQ ID NO: 482152 - protein, 356 aa, unidentified
MPVYLGVDFHARTQTVCWCSTEDGVIRQRTLDHERDNVPAFYAQFAAPAIVGLESSGYALWFHRLLAEQGHHVLVGDAAAIRKFAKRRQKNDRRDAELLLDLLLHGDFPAVHLPPPASRDVLGLLRYRHRLVRMRTMLRNGLQAVALNHQLRLGPSLFTARGQQQLSALPLEGADATQRTHSLALLEALQKKILEVEEILDARAADDPRVTRLRTHPGVGLLTSLAVVHTLEPVTRFDRARRIAAYCGLDPKEHSSGETQRYGHISKQGNRLLRFLLIEAAHHAVAPGQDDDLRRFYYHLLVKKHAAVAAVAVARKLVLRLYRMLRDQIDYDEFRRRGRDARRAREISSLPIHRDG

SEQ ID NO: 482153 - protein, 420 aa, unidentified
MSFKIFKFNCCGLDVHKTWIYACIGITDSNNRTEYKQARFSSFSKGLHQLCVWLAKYNCNDVCMESTGKYWIPVFNILEQHKIWITLSHPKYTKPMKGNKTDRKDAKWICDLYMCGMVKPSFIPPADIRELRDLVRYRFKLTCMITGEKNRAQNCLTVSNLKLDDVFSDVFGKSSRSITEQILQHPGEKFDVSPFVDSRCKTPIEEIQAAVDGNISKEQAVKLRQCLDHIDELNKHISEVEQEILRLSDKYEAALNLIRTVPGFDKNPMTAIQVLSEIGGDMSVFPTAKHLVSWAGCCPRNDQSNKKVKSTRISRAGCYLKPLLVQIANAVIKSDRHPECRERYRRIKARRGHKKAIIAVCRMLLTAIWNVLSKLEPYSAKGYLADKLTEHSVVISKAEGLALLRKRGYIFKDELAVESG

SEQ ID NO: 482154 - protein, 353 aa, unidentified
MNSLHNIGVDFHPYQQTVAFVDQEGEVRTRRFYHSNKSAIRKFYRQFPPGSVVGVEATGSLGWFEKLIFELKLELKIGNPGAIRKLALSPHKNDARDAKHIMELLDSGRFPEVRRRSDEARMILAWLNYRHSLVRTRTAIANQLQAMARSFGLDRFRIKNKSAKARFLSLDLSDDFLSLIDSRFDVHEKLTAEIEMLDQKLHGEAISEEQAKLLQTHSGIGDLTSLCLVHTLGDVGRFSRKEQVTAFVGLDPLDQSSGEKQRIGRISKHGSRLLRYLLGQSAQKTQDKQLKEFYRRVSRRRGTAKAKVATARKLLERCYIMLRDNIDYEEFRRRGEVGVPDNARKEYVVKYSL

SEQ ID NO: 482155 - protein, 392 aa, unidentified
MFYIGIDIAKRSHQAAVTDVSGNIIVKPFNFKNTAAGFTQFLSVLETNSVSKDNCVIGLESTGHYWYPLYFFLVEQKFSVKVFNPIQTAAFREITIRKVKNDNLDSIMIADFTRFGRYSETYIPSENMLALKNLSRFRLSVCDICGSLKKRTIVLLDLVFPEYSTIFCDIFGTTSKQLLEKYSTPDEFSEISTTKLANFILKASRGRNGREKAELIKTAAQNSIGISYAIDTFSFEIKQLIELIEFMENQLSEIDAEMAKLLAESEYSVITTISGVGPTLGSIIVSEIGDIERFETSSKLVAYAGLDASVKQSGEFNSSRNKISKRGSPYLRRALWMAAFMSLQCDPALYDYYSRLRARGKSHRLATTAVARKLCIIVWAIMKSKQPYSPHI

SEQ ID NO: 482156 - protein, 356 aa, unidentified
MRIIGCDLHTRQQTIAMLDDQTGELVEKQLNHEGEGVRQFYSALPRPVLVGVEATGSMFWFLRLLEELAIDFRVGHPAKIRAAEPRKQKNDRRDARLLLRLLVENRFPAIWMPSPILRDLQVLLRHRHRLVRIRTRVQHGLQALALSHGLRRGSSLWTPGGQHQLRTLPLAQHAAAQRETLLTLYPQLQHSIDCLDRQIETQVNERPQASRLMTHPGVGPITALATEVFLGDPQRFANGKAVASYIGMIPEEKSSGGRQRFGKLSKQGNTFLRFLWGQAAMQAVRRDPELLRFYRRKLVQKGLGKAMVAAARKLGIRLWIMLRDEIDYTEFCRRGNLLRQCATAYAGMPEGDSGPR

SEQ ID NO: 482157 - protein, 341 aa, unidentified
MPDAHNPTRWLGLDVAKATFHAALACVDRNARPPTREFARSPDGARECLAWAANLAPGTPLAAVMEATGGYSEPLARWLRGLRPELPVAIVNPRWVKHYGLSLGGRDKTDRVDAIVLATFGQERHPSAHVPMPEPYSVLHAMVREREALLKAALAAENRDELPSGSAVAQEVRGAIIREMKAGIQRLDAAILAHIKADEALHADYRILVSIAGIGPVVASGIMGELGDLRRFEDARKLSSFTGLAPKHRRSGTSVNAPPRMSKQGNPRIRRLLYMSALTVIRGDNDLATIYRSDITRGKPPKVALVGIMRRLMVLMRALLVENRPFERHHIKVRPEEAATD

SEQ ID NO: 482158 - protein, 463 aa, unidentified
MLSVPGLAYKVFACPTRVPLTTTIHFSEISTMTQPHTTSETPLPKPILVIGIDWADKAHAVCCIDPLRPRKTHLATLEQRPQAIVEWAASLRQQYPQHELAVCLEQSRGALFSALLATGHFTLYPLNPKQLARFREALHPTGRKSDPDDAELLARFLLQHRDKLRPARPDSEQTRLLVHLTELRRNLVEQRKSLALQLNSTLKLYFPLILELFPGKLDHPLVTKLLQRWSSLAELRRANPVTLKAFWKEHGLRNDERRTELITSIRTATPLTTDRAIVESYASYAVALAVQLEHLVQSIERFDAQIEAVVAVHEDTPLFRSLPGAGDVLVPRLIAAFGSDRERYESAEQVQNYSGIAPVTQTSGKMHHVQRRRACPKFLRQTFHEFADHSRHWSRWAKAWYDSKRAGGMKHQATVRALAYKWIRIIFQMWKKRETYSEERYLQALTKANSPIAQICKNSQIGA

SEQ ID NO: 482159 - protein, 317 aa, unidentified
MSKHNMVCAGIDTSKRKLDVALDGWKERLQVDNTAEGHERLAVWLRQHGTQRVGIEASGGYEFAVVATLRRCGFVVIVFQPAQVRAYAMFHLQRAKNDEIDAALIASCTREAKKIHAAPDPRLVAFAAPLTAIEQIGDDVTRLKTRRESCREARLRQLWKEEIARLKKLQKAELKALVTAIRQHADLARRLDLIHSVDGIGLPTAVAILVRVPEIGQVTREQVAALAGLAPYDDDSGSYVGVRHIAGGRERLRGALYAAALPAAMRWNPQLIALYGRLTAAGKLHKVALVACARKLLIFANTVVARGTPWVSQPDAA

SEQ ID NO: 482160 - protein, 309 aa, unidentified
MKEEVVYCGVDVAKAYLDAAIGKQKRRVANDATGHWQLINWIKQIEAQVQVICEPSGGYERGLIRALVGAQVKVSLVQANRVRQFARAAGILAKTDSIDAEVLCAFGEAMRPQILTASKVQQGQLRELESQRRHLSRLLVMEQNRGARLSDSSVRRLNRSLSQQIQKQIERIDLLINEHIAESQELSAKAHKMTAICGVGPRTAALLLAQMPELGQLNRREVAALVGVAPFNRDSGKLRGKRTIFGGRRHVRHGLYMAALVAARHNPILRAFYRRLRATGKPAKLALTATMRKLLIVLNSALKPDPAYA

SEQ ID NO: 482161 - protein, 416 aa, unidentified
MTTIYIGGDVSKGYADYYICNQNEAKLASERFDDNSAGHARLESLIGQFEAESIVVGVESTGGLENNWLRFFHLHLGDRAEIYRLNPLSVHKFLEFRDLHRAVDDVKSAEGIAMFLMAEPTGLRQYRPELDEAVRQFRFIKQQQKRQTILKTQLKNLLVITHPELVRFARGKLSCWLLDVLVKFPTTDLLAQADPMALGAIKGLTPKKARIIIEAAQNSVASARTDATATLIRSLATEVERLNELVKHWKLELCQLLQFREMEILCSIPGIGRWTAASLLLEVGDFTRFRSANALVAFCGLDPRPERSGDKVKQRGISRRGRRHVRGALYLPTLTCINFNSEMRAFYERLCSRGKHHYVAITACSAKLLRIAYACVTRDTPYIERTPRRQVEKKGSPQSILAPVSLKEAQKRKRPN

SEQ ID NO: 482162 - protein, 366 aa, unidentified
MNDFTSGTVSVGLDVHAASIRLAAVRADELLAERTLPYDHEAVERELARWSGARVCYEAGPTGFGLYRHLTARGIACDVVAPGLVPVRPGDRVKTDPRDARKLARLHAGGLLEPICVPSVELEAVRDLVRAREAARIDRMRDRHRLGKFLLRHQRRMPFKSWGAGRRKWLGEQNFDQPAQQAAFGTYLHTLDLVDRRVEALDGQLEEAATAGPWAGLVARLRCLRGIDTLTALGLVAEIGDFHRFESAEAFMSFVGLVPSERSSGEKRSQGSITKAGNAHARRLLVEAAWHSRRRPKVSYELSRRQRDQDPAVLERAWAAQHRLHRRFHRMAGRGKPQQKIVVACARELAGFVWAIATDQPLRKGG

SEQ ID NO: 482163 - protein, 409 aa, unidentified
MFLPECPFFVGIDWAAETHAVCVFDAAGKITAEFTIAHTAEGFAELLGQLGRLRPDRMEVPVAIERPDGRLVDALLEAGHPVVPVSPNAIKTWRDGEVLSGAKSDAGDAAVIAEYLRLRAHRLRPVTPYRAETLALRTVVRTRGDIVAARVAATNQLTALLDAHWPGAKAIFADVESPIALAFLTRYPTAAHAAHLGEQRLRGFCVKHGYCGRRHPAQLLARLRAAPAGATDPILVEAIGDAVLALVGVLRALGSARKDLDRSVTAHLGEHPDEKIFTSLPRSGQINAAQVLAEWGDSRQAYDGPEAVAALAGMCPVTTQSGKHRAVHFRWACNKRFRTAISTFADNSRHSSPWAAKIYADAIARGHDHPHAVRVLSRAWIRVIYRCWLDDVPYDPARHGNAAGPPQAA

SEQ ID NO: 482164 - protein, 421 aa, unidentified
MKVLRAKRLRMVRESTLIATVDIGIANNTGYCTTLDGRSIKSFSFDNTKQGFEKFWYMTVASKNRFGCDEVLVGYESTGPYAEPLVHYLAHKQVKIVQVNPMHTKKMKEVNDNSPLKTDDKDPRVIADIIRLGRALTIVVPEGDAASLRRLNNARERHVGEQTALLNQLQQLVFLIFPEFKTVLKNMKGKTAQYILKRYTTPERIGTLSKEALGEEMRKRSMGKFGIKEAESLIGLARETVGIKEGIAGIFVDIRHILMQLEAEGQFISEIEGEMRTTLERIPYSGRLLSIKGLGTVSVAGLIGEVGEFSKFSTQSEIMKLAGLDLYEISSGKRKGQRRISKRGRSLLRKILFYAAIQMIRKNGIMYDYYVRLTGRGMERMRALIAVSRKLLRIIHAIVRDNRDYVGQYQTPERRVLKEAA

SEQ ID NO: 482165 - protein, 369 aa, unidentified
MKESTTVIGCDVHKEKITAAVLPPAAVRPTEILTVENHPKAITRFVKRLAQRGRPLFVYEAGPCGYELQRQITQIGHKTVVIAPALVPRRPGDRVKTNRRDAEKLARLYRAGELTEIRVPTRAEEAARDLVRVREDALKDRLRARHRLSKFLLRQGRAHHETKGWGAVHRAWLRAQRFDSPVLQSTFEAYMHALEDAEGRLETLDHQVLALAQTDSYRVPVQYFRCLKGVDTLGAITLLVETQDFRRFPDPPAYMSYTGLVCSEHSTGADERRGPITKAGNAHLRRILVEAAWSYRHRNTTGPELRKRRQGAPSEVIRIARRAQDRLHRKFWRLVSRNKLSQVAAVAVARELAGFVWAIAQQCPQQMSA

SEQ ID NO: 482166 - protein, 345 aa, unidentified
MRQLNVLAIDLAKNNFQLCKTTPGGSVINNKKVSRSQLATLLVNEPKALVAMEACGGSHYWARYAKAQGHQVKVMPAQKVKAFLQGHKTDPNDAAAIAIAATQPQVKPCRLLTLEDQCQQGIVRIRDLLVKQKTASAKQLRDMLLELGHPIAKGDAALMKAIPEILEDGGNQLPGDFRAVLDEQRQHLKALLARIAEVEQRLKRQINDDEVCQRLQALEGVGPVNAMSLKITLSDTEQFNNGRQAAACIGATPVQHSSGGKERLGSISKKSGHKTLRSTLYEGAMAVIRQLDKREPRTVKEQWLTHLIARRGKKVAAIALVNKTIRTAYAMLKNGTEYQPVRLAA

SEQ ID NO: 482167 - protein, 424 aa, unidentified
MNLTQNDRLKQVTFDTLIVGVDVGSKTHFCRAFDWRGFEISHRVFKFSNTGMGFLTFLRWTEELMNKTEMKKVIVGCEPTGCYWLTFQKFLQDHDIQLVTVNPFTVNRSMELDDNSPEKSDLKDPKTIAHLVKDGRYSTSYLPSGVYAEIREASVCRDQIMKQHIRLSNQIQGWLQKFFPEYLECYADWDSTSGLMLLKEAPLPEDILKIGAGGINQIWRDAKVRAAGIKRAQILIEAAQNSVGLEAGEAARLEIWVLVNDYILKAEQLKRLDEYLEEKVREVPNVEKLLAIKGVGMSTVIGFIAEVGDIGRFTDPKQIQKLAGLEIVKKSSGKKKGQPRISKRGRRKLRRTMYESARALMNWNPAFQDVFLYYRNRTRNPLGGMQAKIAVACKAIRVFYVVLQTGCDFDEEKFRKDIIRPEAS

SEQ ID NO: 482168 - protein, 337 aa, unidentified
MAKEKAVRWVGVDVSARWVDGSRAAADEPVSARQFANTPAGHGELASWLTQGGRRARVVLEATGLYSLDLALRLQRTARIEVMVINPRASKEFAGAWGQRARTDASAAQGLREYAARMPFTPWTPPGPQALALRTIMRRVVALIEARVQERNRLHALSATEALPTVVRTDIRQHIRTLERRIARLEHEARALVEPAPALRAGFRHLCSVKGIGRRSALMILAEVAVLPGELTARQWVAHAGLDPRPIRSGTSVHPPVRMSKHGNVYMRRSLFMPALVAVRRNPAVQRFATELTARGKAPLQVLVAVMRKLLHAIYGMLKTDTDFDGEKFRRSAHAEG

SEQ ID NO: 482169 - protein, 459 aa, unidentified
MSRKHKKAKRAGQGGAVPSLSCIEPNAAGIDVGATEIFVAVPQDRDPGRVRSFETFTEDLHRLKSWLQHCGITTVAMESTGVYWIPLFQILERAGLEVCLVNAQHVKHVPGRKSDVIDCQWLQYLHSVGLLRASFRPEERICAIRSLLRHRDSLVQMAAAHVQHMQKALTQMNLQLHHVLSDITGQSGLAILDAILAGERNPAVLAQLRHARVQASQEVITKSLVGDYQREHLFTLRQSLQAYRYYQSLITTCDQEIAEQLQNLDSRTPPDASPLPPEPYPHRPRKNEFRFDMRSELYRIYGTDLTAIPSINALTGYTVLAEVGTDWSKFRNGDAFASWTCLCPQNKKSGGKILSAHTRRSANRVNRALRLAAQTLERSTSYLGTYYRKMRARHGAPAAITAAAHKLARIIFHLVTTGQAYDESLFAAEEQRQRKRLENKLKRSAQQLGYQLIPLGQTA

SEQ ID NO: 482170 - protein, 344 aa, unidentified
MNITTIGIDLAKNVFQVHGVDARGKAVLKRQLRRDQMASFFANLPACVIGMEACASAHHWARKLQGLGHTVRLMAPQFVKPYVKSNKNDIADAEAICEAVARPNMRFVPVKSLEQQAVLSLHRVRQGFVKARTAQANQIRGLLGEFGLVMPRGIAHVAKRVPELIDKASEQLPATLRELIARLLCHLRELDRQVGELEAQIKAWHRNSPMSQRVAQIPGIGPLGASALVASIADARSFANGRQTSAWLGLVPRQNSSGGKSKLLGMSKRGDTYLRTLLVHGARSAILAAQRKANVDPWLAGLLGRRHTNIAAVALANKNVRTVWALLAHDREFRPDYVPVPPAA

SEQ ID NO: 482171 - protein, 343 aa, unidentified
MNEVITIGVDLAKSVFQVHGVDAAGETVIRRQLRRSQVLPFFERLPSCLVGMEACATAHHWAREVTALGHDVRLMPARYVKPYVKRNKNDMADAEAICEAVTRPTMRFVEVKTPEQQSVLMLHRTRQLFVRQRTTLINAFRAHLAEFGIVAGVGRHGVEKLVTMIEDGDDERVPPAARDCLLALRDQLVLVKRQILDADRRILAWHRSSEMSRRLEGIPGVGPLIATALVASIPDAHAFGSGRDVAAWIGLVPKQNSTGGKERLGHISKAGNRYLRMLLVVGALSVIRRAKQVGYTRRAWLAELMERRPTKVAAIALANKIARTAWAMMAHGTRYKEPAPRAV

SEQ ID NO: 482172 - protein, 338 aa, unidentified
METYAGIDLHSSNNFVGVINDKDKILYGKRHSNRLDDVLRALDPFKDSLNGVVVESTFNWYWLVDGLQEQGYPVHLANPSAIQQYEGLKHTDDQWDSFWLAHMYRLGILPEGYIYPKEHRAVRDLLRRRLLFVRHSTSHILSLQSMISRNLGFKISNNEIRKFKSEDIDGLFACPNLVFMANNSLCAIKFLKKISLDIEKKVKSQVKMRQEFEKLRTIPGIGNILGLTIMLEVGDIGRFAKVGDYSSYSRCVESKRLSNGKKKGENNKRNGNKYLAWAYVEAAQFARRFCVKAQSFYQSKEAKTKPVVAIKALSNKLSKASYYIMRDQVAFDEEKLFG

SEQ ID NO: 482173 - protein, 436 aa, unidentified
MRGCRCSMIMGFTKPIEHFNLQRKKVITMNTLYVGIDVSSKSNVVYLMLPNGDKHSNFSVANSHEGSTQLVKRILSALTSHSLDTVLIGLEATSVYGDNLVYFLREDATLAPFNRKIHVLNPKQVKKFHDAYNDLPKNDYVDSFVIADCLRFGRINKEVYMGDYRYKALQNLTRARFFAVQNLVKEKQRFMNVLFKKYSTMTQEKVFSDAFSTTALAVYDEFESAEALANMDLHELTDFIIEKGKNRFPDPDAVAKAIQKAARSSYRLPKTVNDSVNQVLSISITSMKALESQIKEFDKAIKALMELLPNVLISIPGIGPVYSAGIMAEIGDINRFDNQASLAKYAGLAWKQHQSGGFEAEVTRLIPSGNRFLKYYLCEAAFSLVRCDKEYSDFYHLKYKEVNRCQHKRALALTARKFVRLVFRLLKDNRLYCPAK

SEQ ID NO: 482174 - protein, 456 aa, unidentified
MPASRGTRARSSGQLATINPNAAGLDVGSTFHVVAVPADRDEQPVRTFRTFSGDLHRLADWLEATGITTVAMESTSVYWIPVFEILEARGFEVLLVNARDVKHVPGRKTDVQDAQWLQQLHQHGLLRGSFRPRDGVVRLRAYLRHRERLVEYAASHIQHMQKALMQMNVQLHHVVSDITGATGMRIIRAIVGGNHAPERLAEFRDVRCAASEATIRAALTGNYRAEHVFALRHALELYDFHQAKIAECDVEIERVLRTLNEARATPTEPLPAVRHAKAKNEPEFDARPELYTLLGADLTQIHGFGAYTVLRLVAECGDDMRKWPTAKHFTSWLSLAPRNKISGGRLLSSKTRRSSNRAATLLRIAAVNVGRTQTALGAFYRRLAARTGKAKAVTATARKLAILFYKALRFGMTYVDPGASSYEERYRQRVIQHLQRRARHFGFALVADPAAIGGVS

SEQ ID NO: 482175 - protein, 311 aa, unidentified
MCHQVGAHVQHLEVANTPAGFRQLVRCGGAASLYVLEATGPYYLAVAYHLVAVGAQVAVLNPLVVKRFIQMHLGKGKSDRKDAQWLLRYGQQQATPRWQPEEAVLVECRQVEQVVELLIRQKTMVHNALEALQAQPVISPAALEHLRQTLLCLEEQVQQLETKLLTTIEARYPPEMQLLCSIPGIGRKTAAYLLLFAGGFTRFQNHRQLIAKAGLCPREFSSGTSVRGKARISKMGGALIRSKLFMCSWSARRANGACRALYDRLVAKGKNGKLALIAVSNKLLKQAYAIVTSGVPYQADFTKKVSAPLAF

SEQ ID NO: 482176 - protein, 321 aa, unidentified
MNKYKEIYGIDISKDVFDVYGSETGHNQFKNDEQGFKSFLKHLPEGSIVVMEATGYYHYRLAQFLYKSGVSVSVVNPLSVKRFIQMKLAKVKTDKSDAKAICEYGMVNEVPLYTALTDVQSECLQLFRLLDNYLKKRTQTKNKKHGEEVLGIPSKYVYKSLQRDLKHLDKEIKGIEARLLELVKQDQQAQLTLLKSIPGMGVKTALFLIVVTDGFKKFETASQLCSYVGITPTIRESGSSVRGRSRISKVGNKKLRNLLFLCSFSACKHNKACREIYERIVAKGKSKKLALIAVSNKLLKQAFAIAKSGRPYDENFVSRLV

SEQ ID NO: 482177 - protein, 413 aa, unidentified
MDKREQGHRARGLPAVPSERAGMRFVGIDIGAERHVVAWVDEQGTILQRPTAFREDREGYQQLLTQLGSMAETLIVMEATGHYWQNLFATLAAEGFAIALINPLRTRRFAEEDLVRTKTDAIDALGLARFGQQKRPPATELPDLATRDLRELVRLRVRFLQDFGDRTRQLHRAVDLSFPEFTRFVVELDSPRATAVLHAFPTAAAVRAASERQLAAVRGGQRTVGRELARALKAAAGTSVGQHHTEVYARQVRFFCEDLDLLRRRLAEIERDIEQLLTKHYVGRLLTTIDGIGPQTAARLVAELGDPAKFRSAGALTAYVGAIPGLRHSGKQNWDRAGLARCGHAKLRAALWMPTLVAVRCNPWLRAYYERLRARGKLPKVALMAAMRKLLVAIYAVAKHRRPFVPLVTMRAP

SEQ ID NO: 482178 - protein, 340 aa, unidentified
MPVTRIGLDLAKNVFQAHGVDEHRTVVLRKQLRRREVLSFFAALPPCLIGIEACSASHYWARELTALGHQVRMMPARYVKPYVQRGKSDALDAAAICEAVSRPTMRFAAIKSVEQQSALTLHRAREILVKQETMLANLIRGCLGEFGIVAPLGIRRMAELVGIIRDEADSRIPPHARIAMTAVADQLGDLQRRIKEIEQAIRAWHRNNDASRRLATIPGVGVITASAIAATVATPTEFKSARHFAAFLGLTPKQHSTGGRQRLGRISKQGDGYIRRLLILGGTALVRYARGAGGTAWAKQLLARRPARVVTVALANKAARIIWALLVRGGVYRSAAPQAA

SEQ ID NO: 482179 - protein, 358 aa, unidentified
MITTTERVEPARVVAGVDTHKHLHHVAVLDLTGRVLGNAAFSVNAVGYQEALEWMTEFGVLDRVGIELTGSYGAGLTRHFTAAGITVLEVNTTDKATRARRGKNDTIDAIAAAEKVLSGMATATAKDTTTVVESVRMLTAVRDSAVKARTQALNQIKDLLITAPAQVREQFDGLPLKTVAKNAARLRPDTTRLTDPAQAARLALKRLGNRIADLTAEITDAEKQLDALVQDTVPTLLSRPGIGTLTAAQFLITAGANIDRITSEAAFAHLCAAAPIPASSGMTNRHRLNRFGARQANKALHLVIIGRMKYDDETKTYITKKLAEGKSKKDAIRALKRFVARRVFHDLATDLRPPRLTA

SEQ ID NO: 482180 - protein, 364 aa, unidentified
MLIIGCDYHPGFQQIASVDNETGELVERRLGHREEAEKFYLELKQQNTSVRVGMESSGHSRWFERLLHELGFELWIGDPAEIGTKRVRKQKTDRQDAQLILQLMLENRFPRVWVPDAENRDLRQLLWHRHRLVQMRTRVMNQLHVVPLNEGLRRKKALWRPAGRKELESIALAPWASRRRQDLLDLLDQLTPKIQELTRALEEEVEKRPVTRLLMTHPGVGPLTALAYELVIGTPERFHCGKQLASYIGLVPEEKSSGDRRRLGHISKQGNVLLRFLLVEAAQVTVRSHQEWRNKFFHLAMRRGRKIAKVAMARKLAVHLYWMWRQGCDYGQTQKLGSHAGEPGNPDGVQSNTDVMIGHPAPSK

SEQ ID NO: 482181 - protein, 367 aa, unidentified
MKKHSSKHDPLSSTDVELCTTLCVDLAKQVFQLAGEDATGRVIYEDRIKSRQSFHDFLIKLPVTVTVLMECGPGAQAWARLLQAKGNPVRILPAQRVAEHRSGAKNDRNDTHAILRAGRDTSIASIPIKSITALAIQALHRVRRGNIKRHTALGNQIRGLLLEHGVSMPQGDAAINTHVPRALEDASLPLPGLLRELLDELLTDWLTLGERIATLSRRLEATAQEDEVAQRLITIRGVGPIIATAIVAKQTEPSRFASGRMYSAFFGIVPDQHSSGNKIRLGRMSKRGDGYIRSLMIQGAHAVLSQLRPDSDQPDDHRLLRWLSRLGRKEAAIRLANRNLRIIWALLQSDQVYQRKPNSNSEAAMSL

SEQ ID NO: 482182 - protein, 394 aa, unidentified
MDILVDSCAGIDTHQKIIVACVLKSPSKGTRPKKWIESFDSTTKGLLQMHDWLKSHQCTVVAMESTGVYWKPVWHVLQEDFELILANPRMIKNVPGRKTDMKDAEWIAKLTRVGLVPPSFVPPEPIQDLRDLTRHRKHLTEDLTKEKNRAHKVLQHAGIKLTTYIRDLYGISGRNLLDALVNGEVLTPEKVEKLVYTSLKKKVPELIEALQGFVRKHHRFLLQIHLDKIDFIQEQIHTIEKAIRDALEPHDNTVGILDEIPGINVTTASVILAEIGLDMSAFPSSKHLASWAGLAPGNHESAGKNYNARIRKGNAYLKKVLTQAALALSRGKDNRIKAFFWRIAKYKGSKKAIIATAHLLLRITYRLLKDNSRYIEFGEHYLQKRGDALLSPQS

SEQ ID NO: 482183 - protein, 310 aa, unidentified
MGVCIGVDVAKAHLDWVLGPQGAVERIENTPAAVRRLVRKLRKIDFDRVILESTGQYERLLFEALEDEGIPVVRINPLRARRFGEGMGILAKNDSIDAKMLALFGEKVEPEERPRKTERERLLGDLSARRRQLIANMTAEKNRLEHASGYVAKEIRSLIQILERHIEKLEQKIDEIVAENERQRGDFERLQSVPGVGPKVARTLIIDLPELGQLDRRRICSLAGLAPYAKDSGQKTGKRSIHGGRAAPRTMLYLAAMVGSRCNPELIAMKQRLQAKGKPPKVILIACARKLLTILNAIVRDQTEWKTMTP

SEQ ID NO: 482184 - protein, 342 aa, unidentified
MDHYAGIDVSLECSSVCVVDANGKIVREGKVASEPEALIAWFGWFGASLGRIGLEAGPLSQWLYAALRDAGLAVDLLETRHVRDAFKAMPVKSDRNDARGIAQLMRLGWFRPVHCKSLGAQEMRAMLTARKLVQSKLQDVENSLRGILRGFGLKVGKTTPRSFVGRIRELVAGHPNLATIAQALLSVQAVLLREFNAFEKRVRAIARSDLRAKLLMSTPAVGPIVALTYTSAIDDPARFKSSKQAGPHFGLTPKKYQSGQTDYSGRISKIGDAAVREALYLAAHVVLTRPVKGCSALKSWAMRIARRAGMSKAKVALARRLAVIMHRMLVDGTPFNAAAAAA

SEQ ID NO: 482185 - protein, 356 aa, unidentified
MDTYCVGLDVHKSRTTFVIEGGSGVVVRRGEFATTKEGIAAWVRQNALPNGTPVALETGTLAFFVSDELTGAGLAPHVIDAHEVRLKATRPRQKSDRRDAFELCEGLRREAYRTRVYVPSPALRCIRELLSRRRHFVRLQTAQCNAVKHALRARGQAALARSLRTAAGWQRLGRAVAADSLVGSIMHAHQRVWTAAHAERTALETMLAGHAAAFAGPLARLQTVPGVGPIVALTVIATFADVTRFPGAKQAASYAGLVPSTHQSGACDRHGPITKRGAAELRAMLVEAAHHAARRDHPLHATFTKLCVRRGYKPAVVAIAHRLCRILFAMLRDDSDFRTPHAQRPRPAPSLAFPAE

SEQ ID NO: 482186 - protein, 409 aa, unidentified
MDAILERCAGLDVHQETIVACMMYGPLDKRAKKEIRTFGTTTKELLQLQDWLTEYNCSDVAMESTGVYWKPIWNILEGSFHLWLANPQRIKNVPGRKTDMKDAVWIAQLLRCGLIEASFVPPEDIRDLRDLTRYRRKLLGDATAEKNRVHRILQDANIKLTTYVSDVFGISGRALLDSLVNGEVLDPQQVEQMVKTSLKKKVPQLIEALNGRIRLHHRKMIQKHLNHLAYLEKEIEVLESDIAQLLSPYQEAVDLLVTIPGIQKDAAAGILAEIGCDMSMFPSEGHLASWAGVSPGNNESAGKKKSTRTRSGNKGLKSILCQAAWAAAKAKGSRLSSFYHRLVKRRGPKKANMAVSHLLLRIIYQMLLRNEPYSELGWDYLPQKEKSVDYWVQRIKNLGYSVSLQIETA

SEQ ID NO: 482187 - protein, 320 aa, unidentified
MNQISTDIGVNVSKDELVVATYGQEPVVCLANRPAAIHRWLKELPPGCRIGMEATSTYHVQLAERAYAAGHCVYVFNPRQISRYLGSLRQRGKTDLLDARGIARFVHNETDQAHPFVPPTAEQRGIARLVRRRHLLVKQRAALLQSSHGEPWLQQALQPLLAEYRKLLSTLDVELERLLAQTPRLAEQRRLLQSIMGIGPLVSIALSQHLSQTDYRRSDALVAAFGLDPRPRESGCYQGNRKLSKQGHPEYRRLLYLAAQGACRAGLWQSERAAWLARGLSKTAVNCIIARKLLRIAFAVWRSGIPFDRNRIGQQACGRT

SEQ ID NO: 482188 - protein, 371 aa, unidentified
MKKYIMVGCDLHDKNMLLKIAVGRGKADKRLFGNTLGGRRAMVADLKKRSASAGGAEVIFAYEASCQGFGLYDEVTEAGHECHVLAPTLIARSVRHRRSKTDEKDADRILEILRAHVLAGIDLPSVWVPDLQTREDREVVRARLDVADKLARLKAQVRMLLKRNGVRKPSKLGKGWTGAYGAWLLGLTAARSELSHGARVGLASLLRQMRAVEEEIQSLGMEVAALSRKPRYAKPAFMMTLEKGVGQLTAMVFLTEMGDLSRFSNRKQVGCFLGLAPSANESGETSDRKGHITHQGPYRVRKVLCQAVWARVRTDLAAAEAYDRIVSRNPKHKKIAVVAMMRRLAVRLWHVGLETQRASGCFDQNELDAVA

SEQ ID NO: 482189 - protein, 407 aa, unidentified
MDLLKTVFGIDVSSRKSNVCIMVNGQKVNDYAISNDMVGFNQLLGDLKQVTKPQIIFEATGVYSRRLQAFLDMHELRYVMMNPLEAKRKTKDDLHQNKTDKLDALCLAKLQSEHPQRLAYVQSEEYQELMANNRIYEQASHDLITNKNRLHKAIQLTFPEIEHLMANPRGKNYWSIVLKFPHPNIVLETKEADIIDFLKGLSGIGKKRANDITQSLIRLAKVACPAVKKNSAHIRGLKMAINNILSAEEECQTALQEMAKLAPKRDLEILTSIPGIGENTALRIISELGDIRRFNNPSQLNAFVGVDPQVYESGNLTAHLSISKRGTAIGRKVLYLAINQIQSAKKAGNPCHIADYYEKRKRSSETASHKKAAIASIHKLLRTIFALIKNDQLYSYDVAKHNQRLLS

SEQ ID NO: 482190 - protein, 414 aa, unidentified
MEKERINIYHKRNTCFVGIDMHKDAHCAVVIDCWMNKLGEVNFENRPSRFPAFVEDVRKICGIKEIVFGLEDTRGFGRNLAAYLVGRKFEVKHVNPAYTSAVRLANPIIYKDDSYDAYCVARVLRDMVDTLQDAKHEDIFWTIRQMVKRRDLIVKSNVMNKNQLHSQLSYSYPSYRKFFAMIDSKSALCFWENYPSPEYIWNTTPEEIYHTIKPVHQALKIQRIHEIISMIERDGDTRKDYQSERDFIVRNIVKDIRHNKELIAEIDDELRKLIPLTGYKLHTMPGIDLVTEVQIISEIGDINRFPDSDKLARFMGLAPVQFSSAGKGKDQRCRNGNRALNAIFHFLAIQMVAVSASGKPRHPVFREYFEQKVKEGKNKPQALVCVARRLVRIIYGMMKTRTEYRPFEKTDDKN

SEQ ID NO: 482191 - protein, 424 aa, unidentified
MAEQNLAACPEPKFAAYVGIDWADQKHDWAWQPTDGGPKRMGQLAHTPDAIHTWVGQVSAAFGDQPVAVALEQSRGPLLYQLMKYPNLVLYPVHPSTLASYRQSWRPSGAKNDPSDTGLLLDLLQRHRDKLRSLQPDTVATRTLQFLVEERRQWVDDRTCFGHRLTACLKLYYPQVLDWFDDVTAPITLDWLERWPTLEQLQRARPATIEQFLKEHGRRDADKVHQQLQQIQQARPAVTDAAVIDSCRLNLQTLVGQLKPLREAIAGYDRQIESVVQAHPDFVIIDSFPGAGLAMAPRLIAALGTQRDRFDSASSLQCFSGIAPVTSQSGRQCWIHWRWACPKFVRQTFHEWAQHSMKKCEWARSFYQRQRDAGKSHHAAVRALAFKWLRILFRCWKDRVPYDEAKYLRSVRDRLVPKNLLKTI

SEQ ID NO: 482192 - protein, 323 aa, unidentified
MPPSIGIDVSKKKFDVALITAQGKYRCKVFDNNASGFKAFLDWIQAHVPEGQAQACMEATGVYHEALANFLFDNQVTVFVVNPLRVKRFVESEGLRNKTDEGDAKALARFASKNELDAWEAPSKSVRELQALVVRLESLQTMRQAELNRLDIAHTSVRGSIEAVVAALDKEIEAVRSLIRKTIDDDPELRQRNDLLDTIPGLGDRTIPSLLAYIGRPERFKTVKALIAYAGLTPAIRQSGTSLDKKKGLHPAGHRDLRQALFYPAMAAGRFNPIVAAFWQRLKAQNKPGKVIVVACMHKLLAIAYGVLKSRQPFNPDLALKGT

SEQ ID NO: 482193 - protein, 345 aa, unidentified
MKLLYVGMDLGSKVCVWVAVNSDGKQVLWSEFKTSEKGMIDSFKDIPGEVHLMFEECELSSWAFRVLKPLVKEVVVCDPVRNAWIAKASNKNDRVDAGKLAEMLRVNSYKPVYNTTDDWMCGFKRAVKQEMELTGKIKKLKSQIKSQYRREGLHFAGKTPFYKSKIEECLGQVTDDVVQDLLAQNYRILIVLEKERTLGRKRVQSLSQKITVIQAMEKVPGVGNVLASRFVAYVQTPHRFPTKRGLWRYSRLGIVNRSSDGNPIGRKRLERRANGTLKDVSRKIFQAAMKCKEDNLFKRSYMSSLSRTKDNTHARLNTQRKILAVLRAMWRDKTEYRDDIDLMRA

SEQ ID NO: 482194 - protein, 386 aa, unidentified
MDKIGMDLGKKKSDVAVMATVDRVSERFKLATSRESLQRHFGNRPPAHIAIESCRDSGWVRLELLALGHEVVVVDTTRARAIGIGQGRRKTDRRDAEALARALWTGTIPEAHVLSERAAGIREALHARQTLVRERTKLVTQLRGLWQAHGWPVRSCAAKDFIKRLRETEQPLLETVHVQCLLRVLEQLQQEIGTLDQHLAALAAQEEAYPRLSSVCGVKVIVALSFIAAVDTPKRFARSKQVAAYLGLVPSEWSTGGRQHLGRLTRAGNPMARWTLIQAAQTLLRSRKCAQDPLVLWAQQVAQRRGKRVAVAGLARRLAQLLYRLWRDGTYYDPVGLGRASAAGLAQQARTTQQHAARLERAAVAAEVQQNSEWAQSQAAAPLGLD

SEQ ID NO: 482195 - protein, 405 aa, unidentified
MDGPIITVDVSKGSCHYQPFLEKGKPLRKPKVLYDTIEGFEELQKSIDQTEEKSGSKVSVVFEATGVYHRCLQKYLDDHDIPYFIISPLLSATYRKTNLHANKTDALDCAHIAKAYYGDERLHVFEKQEDRFISLQRLNRMYEDELQHLRKRKVSFRSTLDIIYPRLDKCFNGKASLYDPVVMEILKKYPHPKLLLKRKEETIAKAIERRTDHGFLFISKIVHKVYECAMKCYSGCDINDIEVKKLPDMIEELQDQMERCGSLLSELVNEASRIEYFNNVASIIGIGVNLASRIIAEIGDISRFRNHRTLSAYAGLNPFIKQSGDEDGLHLKISKKGNRHLRCLLYLGATCNYRLKKGDPLYEFNQKKRQQSQSPLKSKAANIAAAHKLLVIIYVLCKNGEQYRF

SEQ ID NO: 482196 - protein, 343 aa, unidentified
MKLHVIGVDLGKTVFHLVGLDSTGRAVIRKKCSRKQLLAFTANLEVQLIGMESCSGSHFLGRALREQGHEVRLMPAQYVKPYVQTNKSDFLDAEAIAEAVQRPRMRFVTIKTEEQLDLQALHRVRERWVMRRTAVVNQIRSLLLERGLTLPKGRRYVDQQLPRILEDAELRLSGCFRVLLAQLQLELEQLGARIEEMDRVIQKMAKENEDCQRLTEIPGVGPVTATALIAAVGKASAFSKGRKLAAWMGIVPGEYTTGGKQRLLGISKRGNKYLRTLFIQGARSVLQQRDKQAPGLSSWLAQLLARAHQNVVIVALANKLVRMAWAVLCKNERYRAPILAVTT

SEQ ID NO: 482197 - protein, 460 aa, unidentified
MTKKSKKQSTKQSRGTKQSLPLINPNAAGIDVGATAHYVAVPADRDEQPVRRFGAFTEDLHALAKWLKQCGVQTVAMESTGVYWIPLYQILQDYGLVVKLVNARAVKHVPGRKSDVCDCQWLQQLESYGLLNGSFRPEARICVLRSYMRQRETLVQDAASQVLHMQKAMTQMNLQLHHVISDLVGVTGLAIVRAILAGERDRLKLAALTDWRIKSDENTIAKALEGDYRAEHLFALRQALELYDYYQQKIAECDQEILGEMRSMETRVSEPAPTKRKKRSSPNPFDFDSPAELYRIMGIDLTRIDGINEGTAQLILSELGLDIHQKWPTEAQFASWLGLCPNNEISGGKVLRRGTRKVVNRLAHALRMCAQSLLKSKSALGAFARRLRARPDKQIAITATAHKLARLIYRMLKFGGEYVDIGQEKYDEKYRATIIKSLERKARYLGYQLVANQTATSVVP

SEQ ID NO: 482198 - protein, 340 aa, unidentified
MQAITIGLDIAKSVFQVHGIDADGQVVIRRQLKRRYVLAFFEKLAPCLIGIEACASSHHWARQLQALGHTVRLMPPAYVKPYVKRQKNDATDAEAICEAVGRANMRFVPTKTPEQQSGLVLHRTRHLFIRQQTSVINVIRAHCAEFGIVAPVGRRGVEELLNVIANEKQVPGIARACLLALGAQLRRIKEQILEFDRMIAAWHRSCETSRRLDEIPGVGPALATALVASIADPRAFRSGRDFSAWIGLVPKQNSSGGKPKLGSISKQGDRYLRGLFTAGALAIIRYAKIHGPGHRPWLTALLTRRPIKVAAIALANKIARMAWAMMARGERYREPVALTA

SEQ ID NO: 482199 - protein, 341 aa, unidentified
MNKITTVGFDLAKNIFHVVCCDQRGKIVKKKMLKRYQVLAYFAQLPVCLIGMEACASAHYWGRELKRLGHQVKLIPPQYVKPYVRGNKNDYNDALGIAEAVVRPEMRFVEIKTIEQQDIQALHRLRERRLQDRTALCNQLRGLLAEYGIILPHVHTLRRHIPQFLEDPENGLTAFFRTLLAQGYEQLLQLDEHIDAYTQQLKVYSQQNDACQRLQTIPGYGPIVSSAFYMVIGNGAAYRRGRDVSASLGLVPRQHSSGGKDVLLGISKRGDRYVRSLLVHGARAVVSQAAKKDDSLSRWINQLVTKRGFNKAVVALANKLARIGWSVLANNSTYQVAYKMK

SEQ ID NO: 482200 - protein, 324 aa, unidentified
MSFKIFRKNCCELDVHKTWIYACIGITDTNGRTDYKQTRFSSFSKGLKELSDWLAKYHCSEICMESTGKYWIPVFNVLEKADVSVILSHPKYTKPQKGNKTDRKDAKWICDLFMCDMVKPSFISPADIRHLRDLVRYRFKLIGMITGEKNRAQNCLTVSNLKLDDVFSDVFGKSSRSITEYILKHPGDLFDVTPFVDRRCKTPIEEIQAALDLIRTVPGFDKNPMTAIQVLSEIGGDMSVFPSAKHLVSWAGCCPRNDQSNKKIKSTRISRAGSYFKPVLVQVANGLLRSKKHPEITDRYKRIKAHRGHKKAIIAICRMLLTAI

SEQ ID NO: 482201 - protein, 414 aa, unidentified
MDVLHDRCAGLDIGKKDLKACVRTPSPTRRSRRQEIRTFATTTNALLELREWLVDQKVTLVVLEATGDYWRGVYYLLEDTLNVMLVNAAHAKGLPGRKTDVSDSAWLAQLGECGLLKASFVPPEPIRHLRDLTRYRATLTVERTREAQRLEKELEDAGIKISSVATDILGVSGRAMLAALIDGQDDAQVMAEMARGRMRTKIPALVQALTGNFGEHHSFLCRLHLTRIDELSATIEELSARIDQEMRPFAPQIEHLVTIPGVQKTTAEVIIAETGADMTRFRTPANLASWAGVCPGHHESAGRQHSGKRRHGNRWLGGALGTAAMAAGRTRERTYLGARYARLVPRLGKQKTIVAVEHSILIAVWHMLTDNVDYHDLGGDYFTKQDPERAIRRIIRQANELGLTVRFDPIPDVA

SEQ ID NO: 482202 - protein, 361 aa, unidentified
MVKVRSWAGLGVHARSVLAVTMDAETGELRTARLGGETAKVVDFCAGLPGPTRVAYEAGPTGYGLARALEAAGVGCVVAAPGKIERPAQDKLKTDQRDAERVLRLLMIDALHPVRVPTVEEEALRDLVGAREDVRGDLMRARQRLSKLLLGHDILYDDAHSTWTQRHRAWLRAQDLGGGAQATLTDYLGAIDTLECRRGQLETTIEQLVPCSPYAQTVARLRCLRGVDTLSAVGLAAEIGDFTRFERAGRVASHLGLVPSETSSGETRRQGAITKTGSRHARRLLVEAAWHYRKTPARGVTLQRRQDGQPANVIAISWQAQRRLYNVWQRLAEQRGKRRTIVAVAVARELAGFCWALARAD

SEQ ID NO: 482203 - protein, 351 aa, unidentified
MTNNAKTEIVATIGIDLGKNTFHICGMNACGVVVLRQKFSRRRLGQQLANLPPCLIGMEACAGAHYIGRHLTTLGHDVRLIPAQYVKPFLKGHKNDYRNAEAIAEAVQRPTMRFVPLKSADQIDLQALHRVRSRLVGQRTAVINQIRGFLLEHGITVRQGPAGLRQALPTILAQRSDVLAPRIMHLIEDLAEDWHRLDTRVDDVTREIVQLARQDENCKRLQGVPGVGPLTASAVVAAIGNGAAFAKGRDFSSWLGLVPKQISTGGRTILGSISRRGNRYLRTLFVQGARSVLLATKNLSKHELGRWLAAAAPRLHRNVLAIALANKLARIAWSVLHSGRGYEVNFKNHVA

SEQ ID NO: 482204 - protein, 347 aa, unidentified
MAHFVGLDVSVKETAVCVVDEVGEVVLEQKVPTEPDDIVTLLTSIGEAYGRVGIEAGPLSQWLVNGLAAAGLPVVCVETRHMQALLKGQQINKSDRNDARGIAQMMRVGLFKPVHVKTLVAQEQRMLLTSRKLLQRKLLDVENDLRGTLRNFGLKVGTVSTRGYEARIRELVEDFPKLAAIVEPLLTVRRVMRQQFTVLHKMLLDTVRHDPVCRQLMTAPGVGVVVALTYRATVDQPQRFVHSRAVGAHVGLTPRRYQSGEIDYDGCVSKCGDTMLRTMLYEAAQSLLTHSRKWSWLKAWGMRVAQRRGMRRAIVAVARRLAVILHRMWVDGTEFRWSNGPAAAKAA

SEQ ID NO: 482205 - protein, 356 aa, unidentified
MGQKRLDYFSNLKITNMQVSKKNFLGIDVSKPWFDVSLLPVINHVKQTVVSQRFDNSTTGIKFFKEWLDAHSVSFDDNSLLVIENTGVYHRLIWSFCSKHNLQLHIGNAARIKWSLGITRGKSDVIDALRLCQYCYKQADELKATPALNPVFMKLKDLMSSRSRLVTQLHSTKNYIKEIQCTNDKALIALLDKAHKAAVDGIKKSIVQLETLIESIIKADPVIYNNYQLIKSVPGIGHLTAVYIICCTNNFTNNASGKQLANYAGVVPFGHSSGISIKGKNRVHKMANKDLKKMLHLCALTAIRYYPEFKQYFDRKKAEGKNGMLVLNAIRNKLVLRVVAVVNKQQPYVDNTKLAA

SEQ ID NO: 482206 - protein, 341 aa, unidentified
MSAPCFAGIDVSKDHLDVHLRPTGEAFRAGTDEPGLARVVARLVGAGPALVVLEATGGYEAPVAAALAAAGVPVAVVNPRQARRFAEATGKLAKTDRLDAAALAHFAEAVKPEARPRPDADTAALAALVDRRRQLIAMRVAEQNRLEHAPPAVAREIRAHLAWLDRRIDRADRDLAAAVQASPVWRAKDDLLQSAPGVGPVVSRVLLTELPELGALSGRRIAALVGVAPVAKDSGRKAGARRIAGGRAGVRSALYMAALAAARFNPAVRAVYRRLRAAGKAVKVAQVAAMRKLVAPQLVDRLDTPEEVAKLACFLASDDAAFITGGVYPADGGALAWIGTR

SEQ ID NO: 482207 - protein, 313 aa, unidentified
MDTNYFVGIDVAKDHFDIHILPDNTAFQTGSAAEDIAKLIVKLKKLSVKLIVIEATGGYETQLAAELQANDLSTAVVNPRRTRLFTSATGRLAKTDRIDAKALALFAQKLQPPARPIGDENTLKVKAIVARRRQLIRMRTAELNRMHQAKNKGIRQSIQMILDLIKQQIKDIDDQLGLAIAESSQWTKKAELLKSVPGVGDVICNTLLAELPELGKLNRRAIAALVGVAPMNCDSGKFRGYRRIRGGRTPVRNALYMATLVAIRHNPKIRTYYQRLVESGKKKIVALVAAMRKLLIILNIMLQRNQPWQPELC

SEQ ID NO: 482208 - protein, 320 aa, unidentified
MMAQNDRVVVGIDVAKDKVDACIRRFALRQTFPNTAQGHRQLVAWLRKHKVDKAAMEASGGYERDWAKVLRQAGIEVRIVDPKRVRSFALSAGRLAKNDNIDAEMIAWFAETFDEVPGQTHDAAREELVALVKARKGLIDVKIRLQSQNEHAASGPVQKAHARILKSLAAEIAKLEAAISAKIKATPHLADRAEIIASVPGFAEATSANLVAGMPELGQVSDEIAAALIGVAPYDDDSGKRRGERHIKGGRRWVRNAIYMPCLGAATQNNPVLRAFYNRLVAKGKAPKVALTACMRKLIVILNTLIARRQKWDASRYAVA

SEQ ID NO: 482209 - protein, 430 aa, unidentified
MHNKNYISVGIDVGSAFSFMTILAPDETVILKPFKITHNNKDSLERAVSEIKKAEELYSLESRTFLESTGIYHFPLFCYLVDCGFNASIINPIITHSTKNGNIRKVKNDKIDSKGIAKLGLSKDIPVSQFPAKLVLELRSLTRKYYDLTDERSAHINKLKGDLHTVFPQYLDVFCDVTGKTSTMILRQYGTPDKILRGHKKTMIEKISKASRKGLAKASERYEKLCAAANAAKTFGCQIDSIYFNIFLTLDLVEKLDSALDSILNRIRQLITFNKNEKFIQQIKLLNTIPCVGFLTAVTIMCEIGDFSAFRNPKQLFAYFGLDPEVNESGKFVGTQLHMSKRGSRIARRAIFAVALASIRTKRNGEGINPYLRKYYELKSGQKPKMVAIGAVMHKVCNIVFAVLRDEKAFELRSPEEHCKQYQRPALAAA

SEQ ID NO: 482210 - protein, 343 aa, unidentified
MFIGIDVHKAKWVVTIRTYDLELKTFSMKPSAEELEKFLLKNYPGAEFRIVYECCFSGFWIYDYFSEKGYKIIVTPTNRIYKDGSIIKTDKIDSRKLALQLSRELLKEVIVPAKRIREYKYIFRIYDKQKMRQGQILRQIKAFLEQKNHPLKWQKWNKGLLEQLKELKFIDNLFDLKFRSLLTEYEYVVSQIKDTEKIIEQIKEDQELGRRIQIIEKINGIGIISAVRMSIYLFDRKDRFENSERLNHYLGLTPSERSSGEKIVRGRSGMCGNRQLRSIIVQLAWMTVRKDGSLLDKFDRVYRKSGSKQKAIIAVARKLMTKIYAAVRKEEDYRINLREVKAA

SEQ ID NO: 482211 - protein, 371 aa, unidentified
MEQFIKFVGMDVHKATVAVSVAESNGGELRYSGEIANTAEALTKLVRQLRKGGAELSFCYEAGPCGYGIQRQLTELGWKCQVVAPSLIPKKVGDRVKTDRRDSLMLARLLRAGELTAVWVPDDLQEGLRDLTRARDDMKGLQLKAKQRLSAFLLRYAKSYPGKSNWTQAHFRWLEEIKFTQPVQQIVFQEYVDTVRVLSKRVATLNQQIEISARESVFWPVIEALMALRGLDVLAATIIMSEIGDLRRFATAPQLMAYLGLVPSESSSGPTTSRGGITKTGNSHVRRVLVEASWTYRHPARKTAHLQRRAERTSEEVQAIAWKAQTRLCGRYRVMNARGKLKVQVCTAVARELAGFIWAIGQAMPRPAINA

SEQ ID NO: 482212 - protein, 321 aa, unidentified
MTSQNEAVCFGIDISKHWLDIAEHPSAQVTRIDNTAAAIRGWLRTLPKGSQRIACESTGTYHRTLVELLIGAGHQVFLIDGFKLSRYRDTVGQRAKTDRHDARLIARYLAHEGTDLRPFSLPAPAVTALRSLLRRRATVVRSLGRIRQSMEDLPGFGREVRVALARLTALIKRFEQRIASLINESGWTEPYRRILKIEGVGALTAAGLCAAFHRAPFSGADAFIAFLGLDVSVRDSGKKTGRRALSKKGDSEMRRLLYNAAMAASRSSTWQPFYQRMLERGFSRTQALVALARKLARVAFSLMKNAADYVPKQHENACGGT

SEQ ID NO: 482213 - protein, 409 aa, unidentified
MVVHAAPVTRSTVVVAIDVGKNEFAVSVTDAARAKLLKPRLACPMTGTSLRGVVDTIQRLLPPDAEVRVGIEAAGHYHRPLLAAGSWPAGWKLFELNPGHVTEQRRVLGKRTIKTDAVDLEAMTELLLAGRGLPVRSRDAVLAELTAWSAHRTSRIQIRTATKNQLLGQLDRSFPGLTRALPDVLGTKVGRLLAGEFADPARLAALGSSRFIRFGATRGLQIRRATADKLIAAAKDALPTPDAAVARAVLAADLALLTNLDAQIDAATAELVRLVPLSPFRTLLTVKGWGAVRAGNYGGALGDPARFTSSRQVYRTAGLNPIQYESAGKRRDSVISREGSVELRRALIDLGLGLWLNDPAAKQHATALKARGKKGLVIACAMAHRANRIAFALVRDQADYDSTRWIRED

SEQ ID NO: 482214 - protein, 338 aa, unidentified
MTLYGGIDLHSNNNVVALTDESDRIVYRKRLANDARRVLEVLEPYREAITGLVVESTYNWYWLVDALMAAGYQMHLANTAAIVQYSGLKYSDDDTDAAWLAKLLRLGLLPEGFIYPQAQRAVRDLLRRRSRLVQQRTANVLAVQNLFSRNRGCSISANDIRRLTPERIAELVADANLALAIQSTLLAMQGQQAAIDLLEREAWRQTKATEVWQPLLTVSGIGRILGLTIVLETGPIERFAEVGNYASYCRCVGSTHVSSGKQKGKGNTKNGNKYLAWAYVEAAHFAVRYNPQIKRYYQRKRAQTKGVVAIKAVAHKLARACYHILRDGSDFDVNRAFA

SEQ ID NO: 482215 - protein, 416 aa, unidentified
MKIVRPICCGMDVHKNIIVATIGITNKKTRITEYIQETFSTLNPDLLNLKQWLINHKCFDACMESTGKYWIPIFNILEDEINIYLTHPKYVKAIKGKKTDKKDSKWICDLFKHDLIKFSFIPPKEIRALREVSRYRYKLVGMRSSERNRYQNCMTVSNIGIGSVFSDPFGKSAQAIMKEVLESDIIEDEKILKCIHGSCKNKDKILDSIKHCNIETDQRFKMNESMTHMEELQVHIDNCEIEMMKRAAPMFDRFMHITQLPGISTLSAILIISEIGVDMKQFESDKQLTCWAGLAPANNESANKKKSVRISKAGQYLKPLLVQCALGAIKDKEGYFGIKYSRIKKRRGHKKAIIAIARMMLVSIYHMILTGETFNPSDYESFRNPNPPIKQQVLTEESAIEFLKKSGFDVSKLTKP

SEQ ID NO: 482216 - protein, 307 aa, unidentified
MRFYTKQHQFYCGIDLHARTMYLCVLNQDGEILLHRNMPAGPEPFLKAVAPYRTDLVVCVECIFTWYWLADLCAREGIPFILGHALYMKAIHGGKAKNDKIDAQKIAVLLRGGMLPQAYVYPAAMRATRDLLRRRMHLMRKRAELLTHVQQTNWQYNMPEIGKKIAYKANRAGVAERFADPAVQKSVEVDLALIDYYDELLRDLELALVKTAKQHDAHTLYLLQTVPGIGKILSLVLLYEMHDIARFPRVQDFVSYCRLVKCAKESAGKRYGASGTKIGNAYLKWAFSEAAVLFLRNNPAGQKYLAR

SEQ ID NO: 482217 - protein, 352 aa, unidentified
MSPKLNAAIAVIGIDIGKNSFHVVGLDWRGAIVLRQKWSRGQVEGRLANLPPCLIGMEACVGAHHLSRKLTSLGHDVRLMPAKYVRPYSRGQKNDFRDAEAIAEAVQRPTMKFVATKTAEQLDLQALHRVRERLVRQRTGIINQIRAFLLERGVAVRQGLRFLRAELPRILATPCDVLSPRMVRVLEDLAADWRRLDERIERLSSEIEALARRDAGCERLMSVPGVGPIISSAMVAAIGAGEAFSKGRDFAAWLGLVPKQISTGDRTILGKISKRGNRYLRVLFVQAAWVVLIKPKSWQRHGLKPWLEAAKRRLHHNVLAIALANKLARIAWSVLAHGRTSRTFETSKIHAA

SEQ ID NO: 482218 - protein, 336 aa, unidentified
MRYVGLDLGWKVSAINVRDSNGRKLSSRKIRGSWTKVLGELMKVKRPFAICFEASTGYGWMYERLKEMASRVEVAHPGSLRMIFKSKRKSDRIDAEKLAKLLYLDEVPTVHVPSLDVRSWRGMIEHRSRLVQRRTGIKSALRALLRGQAIVAPRSLWSRKGMTWLEGLEFANGLLTVRRDLFVEEVRRHDAMLKRVEKELDKVGRCHPGVRLLRTIPGIGPRTAEAVMAYVDVPERFHSNRSIGCYFGIVPCQNESAGRNRLGHITKQGPSTVRRLVVEAAWQAVRHSPAVKARFQKVLRADPKRKRRAIVAVAHYLFRVMLAMLQSGEPWREKSA

SEQ ID NO: 482219 - protein, 329 aa, unidentified
MSVNQQGREAVAASRPCAGVDVSKAHLDAAWAGHTERVSNDAGGWDALAAKFQAAGVDVVVLEATGGYENAAACALQAVGLAVVVLNPRQARDFAKALGELAKTDRIDAQVLEQFAGVIARHPQRERYIRELPEAQRSHLAALVMRRRQLSAMRTEESNRLEQAHRATHQSLRAILKALDKQLAAVDHDIDQHMQCHFKEVASLLESAKGVGDVTTSTLVGLLGELGQLPRRPIAKLVGVAPLARDSGTHRGVRSIWGGRDDVRTVLYMATLSAIRHNAVIRQFHQRLIAKGKPNKVAIVACMRKLLTILNAMVRDGTPWDDSRHIKTA

SEQ ID NO: 482220 - protein, 404 aa, unidentified
MDLAPLYRRVAALDVHQAKLTVCVLWEEADGELRVELREFGGFKRDRREMARWVASFAPELVVMESTGIYWKSPYEALERAGLRARVVNARHVSQVPGRKTDLADAQWLAILARSGLLRGGFVPPANFRHLRLVSRQMQKLTGILASEKNRIHKVLTDGGIRLGVVVSDLHGKSGRAMVKALVAGEPAQSLLGYADPRLKATEEELLDALDGDLSEEHRLVLRQLLDHIAYLEQHIAALHQALVAGLAPQQGLLQALQTIPGLDETGAAMLVVEIGDDMQAFGSPEKLASWAGVCPGNHESAGKRKTGKQRKGNPYVRRLLCEAAHAASRTRCALAEKFKGLLVRRGRKRAIFALAHKLLKTVFVLIDRGDYYRDAGVDYEAMSVERNAPRWIKMLRKYRYIPA

SEQ ID NO: 482221 - protein, 404 aa, unidentified
MNAIGIDVSKGKSTVAVLRPYGEVVVSPFDVAHTGSDLRALADLIKKLPGETKVVMEATGNYFESIARYLHEQNIFVSVVNPVLISDFGGNTLRKPKTDKKDSVKIASYALTYWLDLKEYTPQEDLRKSLKLLNRQYQQSIKLKTMMNNNLISLLDLTFPGINKLFTSPSRESDGHEKWVDFVLEFPHCDMISKLTIKAFAKKYKKWSDKNSYHFTESSCEKIYAFAKDCVSSVSSDKAIVFSVVQAAKMLISATENCHAIQSEMNRVASKLPEYDTVMNMYGVGKAVGPQLMAEIGDPRRFHSRKAITAYFGYDSENNDSGQKTTRSNPMTKKGSGALRRTLFIIMQVLLQTKPQDNPVYDFLIKKKSEGKHYYSYINAAANKFLRIYYARVKEVLNVSEQMT

SEQ ID NO: 482222 - protein, 341 aa, unidentified
MKNKSFIGIDISKNVIDVSIFCEETPIKDFSHDVFNNSRKGFGEMCTWLKKNHVVLSNSLFGMEFTGSYSMELEKFLNTRNYQFCMLSTHVVKHYPMGPKDKSDKIDSAKIADFLYRYNGTECVKPYNMPDKTMQRLKALMNERKFLVEQRTCFMNRRQLCITKEDAQLYDGYIKKFSRDIENIELEEQKLLATDDSLLSTYKNLLTIPGIGFVNAINVIVITRNFTAFETARQYASYVGVAPHSHTSGTSVRWRPRPSARCDGQAKADLSMAATVAVQYDAELQSFYNRKLGGKQDSDTKRKALNAVKFKLVLRMFAIGKQNRKWEPLDSKSSNEKLAIS

SEQ ID NO: 482223 - protein, 338 aa, unidentified
MMNSLSYVPNFKFMKKIIIGIDISSKTLDICLKQGEQVSYSTIDNELTSIKGFFKKYTKDEVVVAMENTGRYNWNLFKVLPGFGFEVYVISPLHLKKSIGLVRGKNDKVDAHRICLFIEKNRSEMKQWKPTPLAIRKMKVLLAERSSRVKMKKQLLNQQRDYKLMKDISLDGELMKLNKKLIQTIDQHIKKIETEIEKTVELDEQLKSQSKLIRSVPGVGKVVSWMMLAKTEGFSLIDDPRKMACYCGVVPFEFQSGTSIRNRPRVSMYADRSMKSVLHLAAMSAIRLNNDLKTYYVRKIDQGKNKMSVLNAVRNKIIHRIFAVIKNQTMYKNDLVLS

SEQ ID NO: 482224 - protein, 411 aa, unidentified
MKMAGIDVHKKVLMVVVIETTSPEEKPERRRFTTLPGDLSRLSSWLRAQDVQEAVMESTAQYWRTVWLELEPHMLLHLAHAFSNRAPRGRKHDFKDAERLVRRLFADELILSFVPNGEQRIWRNLTRMKMQLTRDRIRLQSQMECLLEEMRIKLSSVVTDLLGASGLRILRALAAGETEAKRLAALGDNRLKCTEEQLLDALTGSSQPIHREMLALQLERLQLLDTQIAKLNNLIAQGMKPHQEAVMRLAEVPGLGVDSAQQIIAEVGAQAGTFSSAAELTSWVGTCPGKDESAEQNHSSRSAKGNKYLRRVLNQAAHAAVKKRGSYFQVVFRRLLPRLGYQSAIWAIAHRLCRVVWKILHEGARFIEKGSEPDAQTKKKRARMLVQALRRLGYDVAITATHLATQNAMQV

SEQ ID NO: 482225 - protein, 373 aa, unidentified
MPKHSTAFGMDVHLRSTTVCALDADTGEAVTRRFPGNPWGEIAGWMDGFPGPSLAAYESGYLGFAPQRELAGLGVECVVAAVSKIPRSAADSASKNDRNDAARMAKAILAHDISPVWIPSPEVEGIRDLAGAYDGATARLATAKQRLLAFLAKRGFVYGGTTPAGNPRKYWTYDFLRWLDKVRPEDDGGVRTLAALRNEVEAAAEARADLLSEYGAAVDASPIAAEVAALQSIKGCAFALAAAFSAEVGDFTRFRSGRQVTAYFGLAPSQRSSGDSVRLGGISGAGNALVRKLAVEGSWCYAAARHQPKLMPRDTGVPLEIRMHGRKGSERLLRRREEMLARGVPAAKANAATAAELVRWLWALGMMCREGAE

SEQ ID NO: 482226 - protein, 347 aa, unidentified
MLRVGLDLIRKRLDICAISDQGELVDELAAPFDEEGLCRLSERMAEKHAGRVRAVVESMNGARFVHDTLEAQGWDVLVADAQRVKVLAPLACKTDKVDARVLAELSFRDLVPAIWLPDPQVRRERELARFRLHLVRHRSSLKNRIHSTLITFGKPCPVSDLFGVAGRKLLERLDVPEPWRENVEASVVLIDQLDRQIDAVASELKYVGADHPYVPLLMSAPGVGWLVGFSIACEIGDISRFSSPTKLCGYTGLCPRVIQSGESDRRGPISKHGPKYLRWALFEAALNACDHPLYKERYERTKKRLGRQRGPKVAQIELSRKLAEAIWHMLTRNQPFAPAGAPFRLAA

SEQ ID NO: 482227 - protein, 428 aa, unidentified
MNCNTQNAKIASITEKTLIVGIDVGSETHYARAFDWRNYEYTKKPLEFSNTEAGFMTFKAWVEDIAEKHGKTAVIPGMEPTGHYWFVLGKFLQDNGMKPVHVNPHHVKKSKELDDNNPNKNDRKDPKTIAALVNEGRFSYPYIPTGIYAEIRSLSNLRFQTQEELTRIKNRIARWFAIYFPEYKDVYGDLKAVSGRMVLKVAPLPEDIRKLGVEGVNKIWRDAKLRGAGMKRAKTLVSAAEHSVGSKEAPEAARFELKNLLNDMDVYASRLEELLRNMEEKLKEIPYVDKLMEIKGIGLVTVSGFIAEVGDIGRFDNPKQLQKLAGYAIVANDSGKHNGESRISYRGRKRLRYVLYEAAISLVGKNTEFKAIHEYYRTRKENPLKKMQSVVAVACKILRVFYTILTKGVDYDPLKLMGDIKRPQMQAA

SEQ ID NO: 482228 - protein, 417 aa, unidentified
MKDNERKLYVGIDIHSREHRAAIIPILLLERPGAAWRKVKPLSIRNNISDFENLDTAIKSHIASTDEVAIAVDHTGGHYSEPLVHFLQARGYTIYYLETKAVKAARERFLDQESKSDVIDSTSAAYLLYLRDIHGLSFRISAMTPELGSRASALNPLVLQRWQFNKLATQATNRLHQFLLAVFPEGEAQYFNKLLKIIPYYPTPKDILASNCLETIEGLCRKDKEKIVELAGNTVGVPSEIYRWLIEALSSQRSEFIAKRDALTSIIREQVAIHPYGDILLSFPYLGEIAAATIIGIIKDIERWPDKKKFKKTLGVYSSLTQSGSGPGHTRRGKEGSRHGRRVLFQICLGCVTSNAHDNDSRDYYLRQVARGKVRVKALVSTMGKLAEIIYHCLKAGEPYQYQGIYRATATSTDKKS

SEQ ID NO: 482229 - protein, 447 aa, unidentified
MAQRKRPTTQSAITLTHPNAAGIDIGSASHFVAVPPDRDDQPVREFTSFTAELHRLADWLDACAVDTVVMESTGVYWIPLYELLESRGFTVLLVNARHVKNVSGRKSDVLDCQWLQQLMSFGLLRGAFRPAERVCVLRSLTRQRTMLLRSQGRIVQHMQKALTQMNIQLANVISDVAGETGQRILRAIVAGERDGLALARLKNSRIRASEDEIAKSLQGCWRAEHLFALKQALDAFDFCGTQLAECDAQIQSQLQTLHVREDEPAQGKKRGRARNAPKFDLRTQLFQMCGVDLTRIDGIDVTTALVVVSEVGADMGKFPSDKHFASWLGLCPGTKITGGKVMSGKTKRCANRAAQALRLAAAALRSSQSALGAYYRRMCGRMDKPKAVSAAAHKLARLIYAMLTHGQEYTDRGQDYFEERYRQRVLHNLANKAKAMGMQLIPSENTA

SEQ ID NO: 482230 - protein, 406 aa, unidentified
MQVVYSCCCGIDVHKKMIVACLNKSGKRVLRQFGTMTNELKELCDWLMESGCEKIAMESTASYWKPLYNLFEITGLECMVVNAAHMKGLPGRKTDMKDAEWISDLLRHGLLKASFIPDRGQRELREISRYRKSLVEERARELNRLQKMLESANIKLGCVVKNINGKSSRQLLDQIIANKSLSEEEISGLVYGGVRKKLDQIVLAIDGVTTPLQRRLLAQVVDHIDDMTRRISALDALILDYMKHYEYAIALLDALPGIARRSAETIISEIGVDMSRFPSAAHLCSWAGICPGNNESAGKRYSGRTTKGNQTLKSTLVECAKSARNVRSSFFSAQYQRISIRRGKNRATVAVAHSMLIAIYHVLRDGVPFVDLGSDFYAKFNREKKITACLKKLRDLGWQPTAVTQP

SEQ ID NO: 482231 - protein, 358 aa, unidentified
MQGKGTTIDFNGQNVYAGIDIHLKSWKVTIMSGDREHKTFSQDPNAETLRNYLRKNFPGAVYHSAYEAGFCGFSAHRDLVGFGILNLVVNPADIPTTDKEKRQKEDKRDSRKIAKSLRNGELVGIYIPSKGMEELRGLVRYRKTLVKEISRHKCRVKSFLYFNGIQIPLELGGNSTHWSGRFTHWLREVKLSTAHGKMVLDDTLDTAELLRKKLLKVNRHLRQVVGNGEYLEKLRLLQSIPGIGLISAITLLTEMEDILRFRNLDQLCSFVGLVPSTNSSGEKQNVGRITRRNNRFLRSIIVEAAWMASRKDPSLLYCYGLLCKRMEPTEAIIRIAKKLLNRIRYVMKNETEYVHSVI

SEQ ID NO: 482232 - protein, 323 aa, unidentified
MDAGTGRAATATSIVGVDVSKDKLEVFVDSTGESFSVDNTAGGVAELARRLLSLPAPAALVVVENTGGYERRCAADLMDAGLPVALVNPRRTRDFARAMQWLAKNDRIDARLLAEFGRRVGPTPAVRVPPERALLDELVGRRRQLVAMRAAEQVRLQQASGKAVVASVEKHLRQLSAQVHDLETRIAKMVEDDDDWRGKAELLKSVPGVGPAVAATLVAELPELGSVSRQHAAALAGVAPYDDDSGKWHGRRHCSGGRASVRCALYMAALTARRFNPVIKDLSDRLGAAGKPFKLVMVACIRKLITILNAVVRRGTPWVPSPT

SEQ ID NO: 482233 - protein, 385 aa, unidentified
MAQFEDLSRCLAAFDQNSTLVMVVEMSQSSWLVAGLVPGVARQPLKKLEPDGAALLRLVQRWRSEAVKAGRMIDRIVLAYEAGRDGFWLARWLRSHGIESYVIHPTSIPVSREHRRAKTDRLDAAMLLRALLGWLRGEPKHCAMAAIPTIEEEDAKRPGRERESLVSERTRIVNRMKGALARLGIRGFKPELRKAAQHLGGLRTPESTPIPPNTLGEFRRGMARLAVIHAQIKAIEVARLEHLEQAPDSGPPAMVRLLARVLGIGVETADMLVYEILYRKLRDTKAVARYAGITGSPDESGAKRREKGLAKAGNARVRRGLIQLAWRLLLFQPDSALVQWYRARIAEGARKTSMIVALARKLLIALWRMVNTGEIPDGFVLRPAV

SEQ ID NO: 482234 - protein, 343 aa, unidentified
MPTITPGLDLGDRSPRYAVLDADAQLIGEGSVATTREAMQDFFAALPLARVILEVGTHSPWVSRVVATGGHEVLVANPRRVRLISAAVRKNDRIDAVALARLGRADPTLLSPISHRGETAQADLGQLRARDALVRTRTLLINHVQGTVKAMGYRVPSSTARTFALRARAALPPALAPALASVVDTIGHLTEQIATADKAIVLLARDRYPETARLRQIAGVGPITALCFVLTLEDPTRFADSRSVGAYLGLCPRESQSGARSPQLRITKAGDPMVRRLLVTSAHYILGPFGPDTDLRRWGLALAARGGTNAKKRAVVAVARKLATLLHHFWVTDVVYQPLRHAA

SEQ ID NO: 482235 - protein, 302 aa, unidentified
MTNGQMIDLHRNQFACCVRWENGRNYLTDWKLEDLPRLVKKLRPSDEIAVAATGNTRLFHEAVAAHVARVVAVDPNQFKVISHSVKKTDPNDARNLAPYVEKDLLPEVRMKDKTQAQLASLTQTRDTLVKLRTSLKNKVNNILSAHGINLEKEALSSEKKLHEVLAMKFDPMVKIELEVIVEEIRSLNQKVAKLEKTIAEEGKLAAYFGIVPRVCNSNETERSGRITKRGNKLGRTALVQCALIAQRYSPYLKRHYEKIKARRGTGKAIIALARKLLGIIYRTLKNKWVFEDFPNFVLAEAA

SEQ ID NO: 482236 - protein, 356 aa, unidentified
MGEGSWVGLDVHARSTVAGVLDGASGELRVRRVSPESGQTVEWLRALPQPVRVAYEAGPTGYGLARACAEAGIACTVAAPSKIPRAPGDRVKTDRRDAERLARLLRLGELVAVRVPEPYEEAARDLVRAREDARGDLMRARHRLSKLLLRHGLVYDASAWTLAHDAWLRRQRFASRPLALAFDESYGVVLQAKARRHALDAAIAELAAEPPFAEVVGRLVCLRGVSTLTALALTVELGDLRRFRPQSLGPFLGLVPSEDSTGERRRQGAITKTGNGHARRLLVEAAWHQRRPLRASATLERRRAGQPAAVRARADASACRLHQRWHALESRGKRRTIVAVAVARELAGHCWALATM

SEQ ID NO: 482237 - protein, 372 aa, unidentified
MDESSKTLYVGLDVHKDSIAVAYAPEDRWAEIASLGSIGTRQYDIDKLIRKLEAKGATLVFVYEAGPCGYWLYRYLTGKGFVCHVVAPSLIPRKAGDRVKTDRRDAITLARLMRSGDLSSIYVPGIEDEALRDLSRGRDDAMQDLKRSKRRLKSFLLRQDIRYAGRANWNAAHLRWLSEVVCPTPPQQIVFQEYVRAVTEQQERLQRVEHELHEAVKGWRLYPVVEAIQALRGVELTGAVILMTELGDITRFATPRELMSYLGLTPSEYSSGARRQQGGITKAGNSHARRALVEGAWAYRYPAKVSRHLQLRLEKLPAEVQAISWKAQVRLCRRYRQLTARGKHVNQVVVAIAREMAAFAWAIARLVPVASS

SEQ ID NO: 482238 - protein, 374 aa, unidentified
MDDHSVAYVALDTSKLRNAVAIAEAGRDGEIRYLGEIDNAPAATAKLARRLAKKHATLTFAYEAGPTGYGLYRQIKNLGHDCIVVAPSLIPHKPGDRVKTNRRDALSLARQLRAGDLTAVWVPDPHHEAVRDLTRARGAAVRDQRAKRQQVSALLLRLGLHYPGKTTWGKAHMAWLAGQKLAHLEQRIALEEMLHAVRQAGDRIARLEQAIHAAVPDWSLAPSVTALMALRGIEFIAATTLLTEIGDLTRFRTPRELMAWLGMVPSEHSTGDRIRRGPITKTGNRRARSVLVECAWSYRHPPRVSRDKLARLEAAPPAVRDIAWKAQSRLTARYRALRRAGKLDVVAITAVARELAAFIWAVGLAVGSGRTPEV

SEQ ID NO: 482239 - protein, 416 aa, unidentified
MGKQRDNACGADIHKNKIVATILSQSGTKIQADFGTTLPELLKFKAWLINNDCRIMAMESTGTYWIPIYSVLEGSIDIIVANPYMIKHIPGKKTDLVDSDWLAELCLKDLIVPSRIFPKEDRVLRNLTRSREGLVKIRTRLKNKIHRDLSSSHIKLSSVVTDIFGKSGTHILRGLLDNRSIDEIIESIPSRRVKKNADKIKESIENNLDSSQIFLIESSLDLMGSIQDNINRIDADLRKRTSSRLNDLKIAMSIPGIEFTSAVTILAEIGDYRDFRSPEQLASYFGIVPFVNQSADKLRTGCITKHGSKHLRWIMVQVAHAASKKIGSRLRKFYLRVKARRGANVAIVALARKILCILHHLLINQEMYEEPGVTKRTRPVKLDQPSSQSEFTAQEMIDILQRSGYEIRKIERGAFG

SEQ ID NO: 482240 - protein, 321 aa, unidentified
MAIPVQPLLIGVDVSKATLAICLGPDQPVQSLDNDRKSITRWLATLPAGPACIAAEATNTFHLDLVDLAHHAGHAVYLVDGYRLSRYRDSIGTRAKTDASDAQLLQRYLAHERDSLRPWSPPPQGYRTLQQLLQRRATLVRARVALQQSLADLPGLKQAAATLFRQLKRIDQKIQQGLIDTLAQLDWDADFKRCQGIEGVGPLTAAALTMSFHRGAFRSSDAFVAFLGLDVRVRDSGQLRGRRRLTKKGNPELRRLLFLAAMQAARSRSWKDFYQRHLDRGFSRIQALVVLARKLARVAFALLKNQTDYHPRYLKEACMET

SEQ ID NO: 482241 - protein, 338 aa, unidentified
MTYTLYVGIDIAAQSAAVAWQVPDRGEWQTLEIKQQQSDYARLVRQLRRQATPAETLVVMEATGVYWLALADALHRQGFQVGVINPLQARRFAQLHLQHAKTDAIDARLLAAYAQHMQPTPWTPPPAIYYHLQQRLAYRQDLVKMRTQERNHLHALCHHPHADAAIIQRQRQHLAYLTGQIKALEAELKNLLAGDHPWREAARRLQTIKGFGPIVTAWLLVATQCFAFCDTPEQAAAYAGLVPYPRHSGSSLRATRSTGRTGHAQLRVMLYMAALSAARHIPSVKALYDRLLARGKPNKVARVAAARKLAHIAWAVVVKERDFDLYYTPSRQAVPIPT

SEQ ID NO: 482242 - protein, 265 aa, unidentified
MKKLFIGIDFSKEKLDATIILACGMNEIGSREYGCFPNNTTGYRKLCNWVKTNAWNTIAEEWLFCGEDTGSCSIGLSKWLYGKGYDIWIENAYAIKHSSGIQRVKNDKADSAIIAEYAWRQQDKVVPFEPLNESLAQLREIFLYRHKLVGQRVAMELRKEDKSQSNKSKAISFINRKSKHLIAEINKTIAECDKAIDSIIEADEELKENYAIITSIKGVARQNATCMLVYTNNFKKFGYDPRKIACYYGVAPFGKQSGTSVNYQE

SEQ ID NO: 482243 - protein, 344 aa, unidentified
MPIITVGIDLAKAVFAVHGIDEAGKATLVKPKVARDQLVPLIAQLPPCLIGMEACSGAHHWARVFAEHGHTVKLMAPKLVSPYRMSGKRGKNDAADAAAICEAVTRPSMRFVPVKDEHQQATLCLHRTRQGFIEERTSTYNRLRGLLSEFGVVLPQSPERLRKEIGPCLDTLPGWARRCMSELLEHTSHIEDRLVELDRAINQIAREDDRSRRLLQLRGVGSTTASALVASIGDGHDFRNGRQVAAWLGLTPGQYSSGGKQRLGSITKAGDAYLRSLLVLGARSVMANLGDKQDPLSRWIRNLMERRGYWRAVVAIAAKNARMAWAVLHYGDTFKPEQAEPTGA

SEQ ID NO: 482244 - protein, 341 aa, unidentified
MHFIGLDIHKKTISYCVKDVSGTVLSEGTIAATRAQLDDWVKTLPAPWTVAMEATMFTGWIYDHLLPHAAAVKVAHPLMLRAIAAAKKKNDRIDASKICDCLRCDFLPECHMVSAEVRERRRTLRYRKLLVRQNVQLRNKVSQMLMESGVVYNKQKLHKVGYFKELMETNPDISRELKPLLAICRETIVRIGKTESALIRSLRRDPLLHARVERLMTIPAVGPITALTWVLEVDDVARFHSVKQAVSYCGLCGAERSSAETIKRMPISKQRNKHLQSVLIEAAKLAPRLSPELALVYDTEKQKGHANRASIAVARKLVAYLLAVDRSGREFVVAGERRAAA

SEQ ID NO: 482245 - protein, 341 aa, unidentified
MRKTLFCGVDLHSNNAMYVIMDGRDKQLFRKRLPNRLPIILECLEPFRQRLKIVAVESTYNWYWLVDGLQDHDYPVVLANPSQMDQYNGIKEADDLTDAAFIARLARLNILPTGYIYPREDRPVRDLLRRRTLVVQHRTAIKQSLQNMAMRQTGQSLGWRTIQKLSDRERTELLGDNDCLVFVASQQVDLIELLNKKIQRFEEKILEHAQLKPAYVCLLTIPGVGIILALTIMLETGDIGRFETVGDYTSYCRCVRATRTSNSKSKGKNNSKNGNRYLSWAFVEAVHHAIRHCPQAKRFYDRKLAKRNGALATKALAAKWSKAAYYIMKRQETFDLTRVFG

SEQ ID NO: 482246 - protein, 343 aa, unidentified
MYYIGLDVHKKTISYCVKDAAGCVHQEGRIGSTRRELDAWIRTLPQPRMIAMEATIFTGWIYDHLLPHAEKVKVAHPLMLRAIAAAKRKNDRIDAGKIADCLRCDFLPECHMASTEIRNRRRILRYRGLVLRQAVQMKNRVSGLLMETGMSYNKLRLHRMGYFAELMSTNEEVSESIRPLLKLCREHIDRAVKLDTALLRSLEQDPLLSDRLRRLRTIPGVGPITALTWALEVGDTSRFRSIKQAISYCGLCSAEKSSADKVMRTPISKQRNKHIQQVLVEAARLAPRYSDELAVLHEKERQRGNGNRATLAVARKMVALMLAVERRNTDFVPAAEFRRAAAA

SEQ ID NO: 482247 - protein, 345 aa, unidentified
MVMIGIDPHKRTHTAVAIDTAERVLDERLVRATSKQVPELLEWVKRLDGGDRIWAIESAGGLGYLLAQQLLAAGEQVVDIPATLASRVRLLGTGRSDKNDPNDARSVAIAALRAAELVPVRVEDHASVLRLVSRRHTQLGWSYNKTACRLHALVADLVPGGISKEVVVCQARSLLADHPSIGAVAVERHALALDLVDELERLNTQRKALRKRIAVAVDASGTTLTEIFGVGDVGAAIILGQVGDVGRFRTADRFAAYNGTAPIEWSSGNPARPIHRLSRRGNRTLNHVIHIAAVTQLRHRHSPGRAYYDGKRTQGLTGRAALRSLKRRISDAIYRRLVADAARRS

SEQ ID NO: 482248 - protein, 405 aa, unidentified
MSNDVFVGLDWAVHTHAVCVIDAAGSVLDRFEVAHDRDGLAELMRRLAPWGERLRIAIERPSGLIVDALVDAGHEVFPIHPNAVKASRPRYRSHGAKSDASDAYLLADLLRTDGHRWHALAQQSDAIRALRALVRSRDDLVAARVAAANQLTSTLQAFWPGAACIFADIASPIGLAFLHRYPSPRSARRLTQAQLQRFCMRQHYSGRRSAADLLGRLRAAATGRVGAQTEQAMADVVRAQVAVLVPIVTQIADLTRRIEQFMHSLPDGLLMMSFPRAGQVCAAQILAELGDVRERFPSADLLAAEAGAVPVTYQSGKTRSVAFRWACNHRLRQAITCLADNSRHASDWARTVYQAARARGCDHPHAIRILARAWLRVIWRAWTDRTPYDPPRHGALTTLAASHRG

SEQ ID NO: 482249 - protein, 338 aa, unidentified
MEKYIGMDAHSSICVFSVVDENGTEVNQAKIATNGRLLVEYLRSIKGLKKLVFEECELSSWLCETLRGEVNELVVCNPTRNMQYKRAKTDKLDAQNLALLLRGGFLSAIYHDGSKTEHLRALMSGYQDVVDTGVSIKNRYKSLFRKAGLPARGTKLYDDSSLLEDLPRPDQRFVGHSFYRLLEALEKEREHYVAAIKKSGRTFPEIKLLKTIPGIGDIQATKIVSQVISAQRFKDKHKFWSYCGLVRHRMESGGQIYGSRRGWGNRILKCVFKMAAHTVLSSDNELRNYYDELRAKGTSDKSARNAVSRKLAAISLSILKTRRPYDETHILPQMAQAR

SEQ ID NO: 482250 - protein, 350 aa, unidentified
MIIIGCDYHPSFQQIAFVDTETGELQERRLQQREEAEKFYRDLAAQGMKVRVGMEASGHARWFERLLSELQCELWIGDAAEINAKRVRKQKTDRQDAQLILRLLMKDDFPQIWVPSWENRDLRQLLWHRHRMVQARTRIMNQLQAVALNEGLRCKKKLWREAGREQLEAFKLAPWASQRRVDLLELLDRLNPTIGQLTQAIDREVEKCPAARRLQTHPGVGPLTALAFVLIIGNADRFQCGKQIASYLGLVPLERSSGNQRRLGHITKQGNSRLRFLLVEAAQVTVRSLPEWRSKYCHLTLRRGRKIAKVAMARKLAVRLYWMMRKEWDYEQLRKFGSHAGQPGHPDGVR

SEQ ID NO: 482251 - protein, 418 aa, unidentified
MTRRDDSRIIRIVHPICCGLDVHKESVSACIIFPDDKGEEQYDVKVFGTFTDDLMRLRDWLAEHNCPVVAMESTGVYWRPVHNVLEDSVDVVLANARDMHNVSGRKTDIGDSKWIAGLLRHGLLKSSFIPPQDVRQWRDLTRLRKKYVHTVGDYRKRTHKLFESANIKIDSVVSDLFGVTGRNLMQLLVADRKLTLSDIQTCVRGKLKGKEAELFRSIQGFFTDHHRFVLKMILETIATLEVQIEALDLQIRCAMKEHEALLDRMKQAPGIADVASREILAEIGPILDSFPKDTSLVAWCGLCPGNNESAGKRKSGRSPVRKNHLKTIMTEVAWAAIKKKDSYFKDKYYRLKARRGAKRAIVAIAHRILLGIYHVIKDGADFRDLGGDYLTLRNKSQKVSHLRKQALSLGFDLVPQAV

SEQ ID NO: 482252 - protein, 346 aa, unidentified
MPETEVDTFAGIDVSARELSVALRRGKGEDKPALAKFSNHPSGHKALIAHLLRGGRRVRVCLEASGNYSLDLALTLQAHRQVEISVINPRRARRFAESLGQRSKTDPVDARVLCEYAARMPWVAWQPPSSVAIHLRAVARAIADLGVIHTQQNNRAHASAASQALPVLVVREMQRHQKYLEQRMTRLRREALRLIAGDSELDRRFRLMLTTTGIAETSALQILGELAVLPEMLDARQWVAFCGLDPRLFKSGKSVEKRPRISRGGSRHLRRALYMPALVALRRDPYLRSFYQNLLARGKARLQAVVAVMRKLLHALFAMFRTNQPYDGSKLCCAVDMTGHAIAAFA

SEQ ID NO: 482253 - protein, 342 aa, unidentified
MLYVGIDIAKNKHDVTALNVPGKTVLKPLTFSNNKAGFELLDLSIRQLNQDCLIALEDTGHYAFNLLNFLHEQGYKVYTYNPLLIKEFAKSLSLRKTKTDKKDAHGIALKLLSDPNREQFQHDNRQVDLKILARHIHRLKKKQSDWKVQYTRCLDIIFPELDKIVGKHSEYTYQLLTRYPNPQKRIEAGFDKLIEIKRLTASKIQDILSVAPRSIGTTSPAREFEIIEIIKHYKRLIDKAETCVNDLMAEFNSVITTVTGIGNRLGAVILAEIRNIHAFDNPAQLQAFAGLDSSIYQSGQIDLAGRMIKRGSPHLRWALIQAAKACARFSPAFKAYLKTKLE

SEQ ID NO: 482254 - protein, 335 aa, unidentified
MHTYFYHIGVDISKSKLDFVILERLSFKVLKHLQVENAEEGISKIFQYLEQKEICIENALFCSESTGIYTFPLTLGLALRKADLWVIHAMEIKLSKGLVRGKNDRTDAKEIALYSIRHFDKLRLYKAPVQDIQKLRLLFAEREKASKALLILNSTKENKDFSSVAVFHPIETLNLRIVNQLKAHRTEIELKMLEIIDRSCALSKHYKLITSVPGIGKMTAIYLLITTGNFSQFENWRKYACYAGVAPFEYESGSSVKRNARIHRFGNRKIKTMLRMGALTCLRYDKQLREYYKKKKEEGKNHSLILNNIKCKLISRVFAVVKRGTPFVNVKGFAN

SEQ ID NO: 482255 - protein, 400 aa, unidentified
MNPLSIRVAVDVGSTRHRVAIGLPDGKLLDEFDIDHNAAGFGEFFSHIETIEHRHHLPVAVAMESYNGWARPLDGHILRHGYSLYSVNNLKLARYKEIFPAPAKTDAIDARRILELFRLSEHLPLARDALHEVAPTPVANDQLKRLTRRRKQLVWERVRVLNRLQSDLHAVCPGLLAITGEAGNLWFLNFLTCRDKLPKLAKLRQSSLLAIRGVGKLYASRIRAWQPQAQFAPEVEWAGEMIGQDARRILALGKDIKAMDQKIADVSVLSELAQSIGSIPGFGKTTLAEIAGEIGTLERFETESGLAIYTGMAPLDNSSGKKNSTKAPRQVNTRAKAAMMVAVARHVECVPASRAYYDRKRAEGKKHNQAIRSLGRQLVRVIWSLVKQGRKYEIREENSK

SEQ ID NO: 482256 - protein, 377 aa, unidentified
MTSPDGSVIGGIDAHTDTHDAAALDAHGRLLGTRTFPTTPAGNRALLAWLESFGPVALIGAESTGSYAAGLVRYLRSRDVAVVEVNQPHAHTRRRRGKSDPIDAEMAARQALSGHATVIPKLTDGIVESIRQLRLARDSAVKARTAALNQIAEIIVTVPDELRAHLSTRKTTRGKATLCSRLRPDLTRLHEPAQAAKLALRSLARRIAELDREIAALDERLGPLVTTAAPRTTRLIAISTGHAGQLLLTAGQNIERLRSDGSFAALCGASPIPVSSGRRDRHRLNHGGDRDANRTLHMIAVCRLRYCPRTRAYAQRRIAEGKTKQEIIRCLKRYIARETYHALCADLADFLQPPPQPAVAITINCGAGPTGRTRHRT

SEQ ID NO: 482257 - protein, 354 aa, unidentified
MSQKLNAVIAVIGIDIGKNSFHIVGHDHRGAIVLRQKWSRGQVETRLANLPPCLIGMEACVGAHHLSRKLQMLGHDARLMPAKYVRPYSKGQKNDFRDAEAIAEAVQRPTMKFVATKTADQLDLQALHRVRDRLVGQRTGVINQIRAFLLERGIAVRQGLRSLRSELPGILATRTDVLSPRMLRIIEDLAGDWRRLDERIEGLSSEIETLARQDKACERLMTVPGIGPIISSAMVAAIGTGDVFSKGRDFGAWLGLVPKQISTGDRTILGKISRRGNRYLRVLFVQAAWVVLVKVKCWERYGLKSWIEAAKKRLHHNVLAIALANKLARIAWAVLNKGRAFECVKTEETASLPA

SEQ ID NO: 482258 - protein, 444 aa, unidentified
MAMRKQAVLELAHPNAAGIDIGSASHYVAVPPDRDEEPVREFRSFTVELERLADWLNACDIETVAMESTGVYWIPLFELLESRGFTVYLVNARHVKNVSGRKSDVLDCQWLQQLMSYGLLSGAYRPKEAICALRAVSRQRDMLLSYQARHVQHMQKALAQMNVQLANVISDIVGETGQKIVRAILAGERDGARLAKLKNARIRASEEEIAQSLRGNWREEHLFALKQAVLLYDAYGERLLECDRQLQSMLAALQPENVGDPGQKLRRSRSKNAPKFDLRAYLFGMCGVDLTRINGIDATTALKVISEIGPDLSRFKSAKHFASWLGLCPGTKISGGKVLSGASKRTANRAAQALKLAAAALRSSHSALGAYYRRLCARLDRPKAITATAHKLARLIYTMLTKGTEYVDQGQNYYEERYHQRVIHHLAKRAQKLGFQLTPIPETA

SEQ ID NO: 482259 - protein, 408 aa, unidentified
MNPLYVGIDVSSKSNVVYFMLPDGSKHCNFSVANSHTGSSQLVKRILSAMTSCSLDTVLIGLEATSVYGDNLVYFLREDAALARFNSKIHVLNPKQVSKFKEAYNDLPKNDLIDSFVIADCLRFGRINKEVYIGDYRYKALQNLTRARYFAVSNLIKEKQRFMNILFKKYSTMTQEKVFSDTFSTNALAVYDEFESAEALADMDLHELTAFIMEKGKNRFPNPNAVAKAIQKAARSSYRLPKTVNDSVNQVLSISITSIKALEAQIKEFDKAIATQMELLPNVLISIPGIGPVFSAGIMAEIGDINRFHNQAQLAKYAGLAWKQHQSGDFEAQTTRLINSGNRFLKYYLCEAAFSLVRCDKEYSDFYHLKYKEVNRYQHKRALALTARKFVRLVFRLLKDNRLYTSAE

SEQ ID NO: 482260 - protein, 380 aa, unidentified
MKKKKNRKASQGLRVIQPDVAEIDLGSRKHYVCCPPRKDGLPNVQSFKTTTPELLRLADWLKEEGVRSVAMESTGVYWIPLYELLESRGMEVILANSRMLSRVPERKTDMLDCQWIQRLHNCGLLKGAFCPNESTCRWRTLVRKKNMMESERADWVRRIQKCLEQMNIQVHHAVSGITGQTGTSIIRAIVNGERDPNKLAQFRDPRCKKSVEQIAEHLTGNWREEHLFVLKQNLGMYDHMCTRLDQYQSKILKVLESLQPPDLKPEPIPEVRNQAKRKNIRKRGQKPMRIGLFLFSGVDLTTIDGISAGTAETVLSEIGRDLIAFPTEKHFAAYVNLAPKLAISGGKPIRKKPRGSGPTSMKDVMPTKSGFRRRGFGLAA

SEQ ID NO: 482261 - protein, 482 aa, unidentified
MKKRNIYQNQSQELLRLFEKAGSSAKVMCVPMDYAKKDHLVMFCNGNGDILRKPFSVKNTPEGIGYIDDQVTRSCRRRGINKKHVFFGGEDANSFAKNFVSTLRCKGWLVASVNAHDAKKQRGNVQASTDRIDLMGIATMLLNYRANCGPAQSGIYRNLRTLVRHRRKLVQMLTEVKNRVHGIVDELFPGFLNEKNSGIVPFTQSSLYLMEDRFSPKQIRRRRRQKLIEILKRFGTSKAEKTAAKLQQYAAKVLHAPVEYVGTMQLSLAQHVKHIRCLKESVAQMEKEIALNLAQTQGAFLTSVRGIGLVLAAGVTAEIGDLNKQKPLNNLASYSGIIPRVKQTGGLDGKTYTGPVAKRCNRILKDYVVKSAYHLGLHGPSDLMADYKRRDASGQHADFGIGRRYLRMAINLMRTSQVYLPPNLRKDDHTLEERAGYYLMNWPYLREKWRKVGALEAAFANNRPLGLWRQVVQEIYDIKLKL

SEQ ID NO: 482262 - protein, 395 aa, unidentified
MHRDLLVATILNGSTKETKRFVNDANDINNLKNWLKTHECKRAVMESTSIYWVPLYLALEESGFEAVLANAHQVKGIPGRKTDQSSSEWLAHLLRGGQIKPSYVPDKRLRELRELTRLRVKYVQNRTAFKNRCQKVLNRVNIRLRSKLSDVFGKAGMEILNGLMAGKSVEYILEHTESKRLKSRCDEIKSVAKGALSENDIFVLKHLTETIKHLDEQIHQLEARIEMVVNKEDIEIVSSVPGVGSRSAAAIVAEVGDAKRFSSGKQIASWTGLVPSVYQSAGTFVLGSITKQGSKWLRWSMVEVAHAAVRVRDSRFRALFLRVMAKKGKKTAYVAVARKMLTVIWHLLVNGEKYVEDGFEKPVRGSKVAYGGHVPLEEMAEVLRSAGYIVSGPNG

SEQ ID NO: 482263 - protein, 326 aa, unidentified
MTAPKLGIDISKKTFDVALIRDPETMKVKQRQFSNTPDGFRALQTWLAKQGVGRVHAVMEATGAYGLDLAECLHGAGHPVSIVNPAQIKAFGQSELQRNKTDRADAALIARFGWRHNPAPWTPPEPEHRELQSLVRHLDDLIEQRTQVSNRLSEGRLTKAVRESWEEILQALNERIAEVKRQINQHFDDHPTLKRQRELLDSIPGIGPETAARLLAEMPQLGEFDSARAAAAHTGLTPKRHQSGTSINAPARISKIGNSRVRYALYLPAMAALRSSKEFKELAARLTERGKKKMQIIAAAMHKLVRIAHGVLKNQRPYDPNYAAAD

SEQ ID NO: 482264 - protein, 343 aa, unidentified
MDHFAGLDVSVKETSVCIVDDTGRIAREVKVASEPDSLLQVLTNPAYHFKRIGLEAERLSQWLFSTLAEAGLPVICVETRHMRAALKAQVNKTDRNDARGIAQMMRAGLYRPVHVKTLRSQKLRMLLTHRKLLQSKAIAIENDLRATLRNFGLKVGMVGTVKFETRIKELVDNLPELAVLVEPLLIVRRVLREQIGILHRRLLAVVRDDDVCRRLMTVPGVGPVVALTYRATVDVPARFRNSKAVGAVFGLTPSRYQSGESDRTGGISRCGDEMMRAMLYEAAQILLVRSAKWSWLKAWAMKIARHRGLKKAIVALARRLAVIMHRIGVDGTEFRWTREVAAT

SEQ ID NO: 482265 - protein, 341 aa, unidentified
MENVTLIGIDLGKHSFHVHGQDRQGKTLLRKKFSRPQLIAFLATFHPCTIIMEACAGAHFIARQLAGFGHEAKLISPQFVRPFVKSNKSDFIDAEAICEAASRPAMRFVTPKNEAQQTLSALHRVRESLVRERVRASNQIHGFLLEFGISLPVGHAAINKLPSVLAEQRLPARLMLLLERLHAHFKYLDKQIADIEKDLTRQVTEDDLGRRLMTVPGIGPITASVLAAEVGDGKHYRCGRDFAAAVGLVPRQYSTGGKNKLLGISKRGDKNLRRLLVQCARAYMQRLERQRGRLAQWVHAMLTRRHSNVVACALANKLARTAWAIAAHHTEFEIKEAPMTT

SEQ ID NO: 482266 - protein, 441 aa, unidentified
MHMKRRIDRVCGADVHKDLIVATITGDDVLPIRENFGTTKAELERFRNWLVANKCEQVAFEATGVYWMPIYDALSQTIDTIVANPLQIKTIPNDKSDSKDSKRIATLCLNGQIKRSRVFTEEDRDLRMLTRARSGYVKTRTQFRNRIHKYLSSSGIKLSSCMDDIFCKSGRYIMDGLAEEKPIEEILKGIPSGKIRKKRDLIRAALENRLNDTNRMLLIDALEILDNLESKMEKLSLEVLKKVQQKSKDLAIVMSIPGIGFVSASVILSEIGNYRDFQTPDQLAKWCGLNPGENESAGKKKKCGITKRGSKHIRVVLVQAAQTISNMGKTKLSRFFQRLIKKKERNVAIIAVARKLICLIYHLLINQELYQEGECRARGSSRNKPSHAPSFQEEHLTDKVAAIVDAFYHLKESSRKNALMRELGAISMAEPSQKRPSGGDG

SEQ ID NO: 482267 - protein, 355 aa, unidentified
MTDVKYIGMDVHQASISIAVLDGRGALLMQSTIRTHACTLREFLRGLEGTLYVTFEEGTWSAWLYDLLSPHVAQAIACDPRHNALLKSGNKSDKIDARRLAELLRAGMLKPVYHGQRNSHRLKELSRSYLTLVHDGTRVMNRIKAIYRSQGIRCAGQRVYSLRYRVNWLEQLREPGLRQRAAFLYQQLDGLQTLRKQARRALLAESRNHPAHRLLLSVPGLGLIRVALLLALIQTPHRFRSKRQLWAYAGLALVTRTSADYRLVRGSLERSRKPIAIRGLNQNHNHDLKEIFKSAALRACRLPGPWRDSFTKRVEHGMKPELARLTMARKIAALTLVLWKKGEHYNPEKLIMQAA

SEQ ID NO: 482268 - protein, 412 aa, unidentified
MKRIYQRCCGIDVHKATLTACVRVHGAGRKLSQEIRSFGTTGDELLSLHDWLMTHRVSHVAMEATGVYWKPVFYVLEQGFTLLLVNPADVQRMPGRKTDVSDAAWLAQLLENGLLRPSFIPARAIRELRDLVRYRSELKHDHTRVANRLHKVLQDADLKLSSVMSDILGVSGRQILRQLAAGHSDPAALAELARGSLRGKRPALRQALAGRFSEHHAFLIGQALTELDNLEESMSALAARVEQHLVPFAQQIEQLTTIPGIKRVAAAVILSEIGTDMSCFPDTAHLASWAGMAPGNHESAGKRRRAKARHGNRWLRTILVECGHAAGRTRNTALAAIYRRMIIRAGRKHAAFVTGRHILNIAYHLLTQHDTYRELGPSYFEQRRAEQLKRRCLDQLRNLGFQATLAPLPTAA

SEQ ID NO: 482269 - protein, 338 aa, unidentified
MTIKTIGIDLAKNVFELCGLDEHGEIQLRRRVRRETLLRAVGEIPACVIGIEACTGAFLWQRQFEALGHEVRIVAPQHVKPFRRRQKNDRNDAEAIAIAVIQPRMRFVPKKSVAQQDIQSLHRARRRMVNHRTALVSQMRGILLDRGIAFGQSITRARRMIPEIVNDQSNDLSGLCREILRSLLELMSEIDKRVQEFDRRIDEVFRANEACQRVGRIRGVGPKTATAVIAAVGDGRDFDNGRHMAAWLGLVPRQHSSGDRTVLMGISKRGDQHLRTLLVHGARAVVRTAVGKTDRFSRWVNELRERRGMNRAIVAVANKNARIIWALLARNEEYRPAT

SEQ ID NO: 482270 - protein, 351 aa, unidentified
MAAKKRSIIGGVDTHRDTHHAAVIDGTGGLLADAEFPATSDGYADLLTWMRSFGRLTAVGVEGTGSYGAGLARHLSSHKVTVVEVDRPDRRTRRSKGKSDPIDAIAAARSTLAGTAMGVPKTRTGPVEAIRALRVARQGAVKARTAAINQMRGLVAAAPEGLRAQLTKLSAAVLVSRCTALTIDPTRLNDPEQATAAALAGLARRISILTEEITTLDRQLAPLVRQAAPRTSALFGVGTDVAAQLLTTAGDNPDRLRSEAALAHLCGAAPIPASSGRVRRHRLHRGGDRGANHALHTIALCRLRYDPRTRAYQQRRITEGLSKQEILRCLKRYIVRDVYTALRADFAALAP

SEQ ID NO: 482271 - protein, 387 aa, unidentified
MSHKVAVLIPASVDYEKTLVLAIEVSNESWVLAAQVPGQPHTKAKRKINPDAESLKTAIAGYRTRAAATGSSIERIIAVYEAGWSGFWLARWLMSHGVEAYVIQPSSVPIDRRMRRAKSDGIDAELLLRTLLAWLRGEPRVCSMVPVPDEADEDARRCIRERTELISERVGLTNRIGAVLATLGVSDYNPLLQSRRRRLAELRTGLGEPLPPNALAKIERLLARLELLLAQIAELERERDAVMETEAPDKASKMIQQLASLRGIGVQSATVLVREAFIRRFANGKALGSYAGLASSPYSSGGIDREQGIAKAGNRRVRTVMVELAWLWTRYQPGAAQVCWFRERVKSTGRRVRKIMVVALARKLLIALWKFVTDGVVPEGAVLKPAV

SEQ ID NO: 482272 - protein, 449 aa, unidentified
MFKLLSLIVWQFSQWLLIFYERSLTMKVTYQTCCGVDVHKSFLVATIVKTTGGIEPSYQKKRFSTFNNSILEFKQWLLDNDCHDVCMESTGKYWVPVFNLLEDEINVVIANPKWVKAVKGNKDDAKDSKWIGDLFRLGLVKGSYIPCKKVRILREYTRYRYKLVSCRSSEKNRYQNALTVCNVALDSVVSDIFGKSSTSIIDYLLEHSGISINHEEIASKLLRSLKSKEDAVIESIEGYQMTDAQKYRMRLVRAHMDYITAEINDVDKMIENVISSDPDFENAVQFLCTIPGVKRASAITIISEIGTDMTQFSSSKRLCCWAGLTPGSNESAGKKKSVRITRAGVYLKPALVQCAHAAVKSDKSPYYKKKYDSLVKRRGKKRAIIAIARMILTAIYQMLSTGELWNPSDLYKIDMPVALVEKQKAKAIKQAKKLLQQEGLLPPDEPLAS

SEQ ID NO: 482273 - protein, 493 aa, unidentified
MGACELESGDVALAAIPIRKMTIGIAQTLLLIIDWRITMPKRTTGDRAELKPVNVGAAAIDIGSKMHMAAVNPASTDMPVRSFGTFTQDLHDLADWFKACGVTSVAMESTGVYWIPVYEILEQRGFEVILVNARYAKNVPGRKTDVSDAAWLRQLHSYGLLRGSFRPDAEIATLRAYLRQRERLVEYAAGHIQHMQKALMEMNLQLHHVVSDITGATGMRIIRAIVAGERNPEVLATYRDVRCHSSIETIRAALVGNDRHEHIFALTQSLELYDVYQAKMLDCDRKLEVLIAALNNKGAKPAGKLSKPRIKTKQVNTPTFDVRSALYGLLGVDLTEIHGLGPSLALKLVGECGTDLRAWPSAKHFTSWLCLAPGNKISGGKVLSSRTRRSSSRAAALLRLAATTVGRSDTALGAFYRRLSSRAGKSKAVTATARKIAVLFYNTLRHGISYRDPGADYYEQQYRNRVLANLQRRAKSLGFVLQAIPGDADPAVS

SEQ ID NO: 482274 - protein, 357 aa, unidentified
MISKKISVKSKKNNSCSLTENESYDHYIALDWSEKNMAIARLGKKDTEPKIIDVPSDLKELKLYLSKLQGKKILTIEETTTSQWLYVELYEYADRIFICDPYRNRLLTDGPKTDRIDAGKLCKLLKNGMMKEVYHSTNQMYELRKLVSYYDDEVRAGVRLLNQKSALYRAENKSWKKKQELEASRVNKFIVAQLDEKIESYREKKKKYEEEFEKISKKSKVLRSLKSIPGLGPISSVTILSIVIDGRRFKSSNHYLSYCGLVKHEKQSGGRSYGRRSPRYSRRLKAVYVSAAVRVASTENPLRQYYEYLLNEKKLPVYNAKNALARYIAKISLGIIKSGEKYKPYKWRESKKGKEAA

SEQ ID NO: 482275 - protein, 314 aa, unidentified
MSDYVGIDISKAHLDMHHTRTEQASSYGNDEDGIEQLLQGLVNAPPRLIVLEATGGLERALVAALLAKGLAVAVVNPRQVRDFAKASGHLAKTDRIDARVLAQFAKAIEPMQRPLPDEAAQAFADQLTRRRQLVEMLAMEKTRLKQAPNKLVRKDIKQHIAWLENKLRASDEGLRHAVEDSPIWQAKRDLLGEVKGIGEVTALTLIGALPELGRLDRKQIAALVGVAPFNRDSGTLRGKRTVWGGRAVVRQILYMATLSAVRFNPPIAAFYRRLRGNGKVAKVALVACMRKLLTMLNAMVRDGRRWSPPAIVSA

SEQ ID NO: 482276 - protein, 424 aa, unidentified
MNFKMQNKQNQLIERITDQHLVVGVDIAQHVHVARAVNFRGIVVGKPLSFENNEEGFTSLLNWIQELKQMKNLDTTIVGMEPTGHYWINLSKWLVKQNMDVVTVNPHHVKRNKENRDNTQSKSDKKDALVIADMVKNGYYAFVRSTSESFEKLRVLMANRDVIVKRLVSSINQINRWVDVVFPELRQVFKDVSCKGAIATLRLFPTPDELCSLQPQDIVTGWKSCMKRHSGHKKARSLLVLAKRSIGTKQALDAYKLHLGQLLEEYDLASSQLERVTQEVTNVLEQIPFVKQILAIKGISEISLAGILGEAGDLSGFAHGNALLRHAGLHLAEASSGKWKGQIVLSKRGRSRLRRYLFLVTMSLVMNNPEFKALHSNNVKVKKMKKMKSIMKLCGKLARILVGIARNGSAYKPEMIFPLEQLAA

SEQ ID NO: 482277 - protein, 408 aa, unidentified
MKTLHQRCAGLDVHKQDVVACLRLATKGRVHREVRRFPTTTRGLLELAAWLEAARCTIVAMEATGVYWKPVWHILDGSFELVLANAAHIKGVPGRKSDVNDATWIADLLAHGLIRASFVPPQPIQELRDLTRTRKQLSREIVRHTQRLQAVLEEANVKLASVITDILGASGRRILKAMITGETDPSHLAELGSRRLGCSRDTLVEALDGRVRDHHRFLLDQHLKTIEQLEETMAAFDARIEAALAPFRDTVERLTQVPGLSTRAAEVVIAEIGLDMSRFPTAGHLLSWAGLVPALDESAGKRRSTRVTKGAPWLKPVLVQCAWAAANKKNSYFEAQFLRLKGRRGPKKAAVAVAASILTTVYHMLRDGTCYQDLGPNYFARRNPARTARKLADRIRSLGYIVEIRSAA

SEQ ID NO: 482278 - protein, 379 aa, unidentified
MTCKECGQVVKLTRTMNKCHSNTELSSHEETRCQFNGGTGAIKLGIDVHQDFYVVVEQVGATNPKPPQRFQKQAFVHWAAKLKSQATEVYAVYEACGFGFSLQRKLSALSIKCYVVCPQKLDEQNRRVKTDGLDAKALCLKLDRFVQGNRDALAIVRVPSEEEEQARAIHRQREQLVKARKQLEAQGRSLMVNHGLEPVHNWWKPRTFTALPVPQWMKELLANSQPILVALQQKIAALTVQLQSAASPEQPRGLGKMTSVVIDREIGDWNRFSNRRQIASYTGLCPGEYSSGNTRLQSCVTKHGNPRLRAALVELAWRLVRFQPDYHPVRKWRQILAKSALATGAARKKAIVAVARQLAVDLWRIKTGRLRAEELGLIN

SEQ ID NO: 482279 - protein, 391 aa, unidentified
MGRVVIGMDPHKRSATIEVIDGREQVLAQGRFGTDTDGYRQMLAAGRRFPDRVWAVEGCAGVGRHIVQRLVADGETVLDVPAKLSARARIFATGQGRKTDPVDAHSVAVVGLRTPGLRTVALDDATVALRLLVDRRDELGRSRTEIIGRLHRLLLDLIPGGAKKFLTPGQAAYLLRTMPPPVDIVARTRHQLAVELVEELTTVDTRIKTANKQLGQLVAATGSSLRDLNGIGPSGAARLLGDIGDIHRFPTAGHFASWNGTAPLDASSGDQQRHRLSRAGNRRINRVLHIMAIVQLRHDTPGRAYYRRRLAEGKTPMEAIRALKRRLSDVVYRQMVNDSQRASTNGTDPGGHSGATLQSSAASPIPTADSSDKSLPGPATDKRRRTLATTP

SEQ ID NO: 482280 - protein, 339 aa, unidentified
MDTVTGELSRRRVCPTLRGVTEWLAELPAPVAVAYEAGPTGFGLARQLTAAGIRCVVVAPSKLQRPPGDRVKTDARDARHLANLLRMDQFVEVRVPGVEQEAARDLVRAREDVRGDLMRSRHRLSKLLLRHGIVYSGGHPWTGVHEVWLRGQHFDLPGLQLAYDTAFETVLLTTARRDRLDKAIAEMAANSEYTPVVRRLCCLRGVSTLTGFGLAVEIGDWQRFTGSTIGAYLGLVPTESSTGSKRVQGSITKAGNTHARRLLVEAAWHHRKAYRPGLTMQARWNLAPAAARARGHQGNQRLHDRWEVFTERKKRPVIANVAIARELAGWCWSLAVMDG

SEQ ID NO: 482281 - protein, 338 aa, unidentified
MLYVGVDLHKQSISLCVVELADRARKIVERRRFCCDQEEQMAEYFASLGEYQLVVEATASYEWFVQLVEPTADRVVLAHPAHLRVIAQSKRKTDKLDAQTLAEFLALDQIPEAWRPTPRVRQHRTLVRHRNYVVRRRTSVKNKLRRVLSHYNADLKHLFTEAGRKYLATIDLSEADRFVTNQLCEEFDQHSARLKAVDKQLKAFAKAAPVAEQEARAVLESMPCVGPVTVDVVLAEAGDVRRFGSQRKATAYAGLAPGIRESAGKAKQLGITKEGSRLLRAILVETAWRLVNRTRRWARVYEKLKARCGAKKAIVAVARRVWCVMVSILHSGQKYQLT

SEQ ID NO: 482282 - protein, 351 aa, unidentified
MKTEPTAQPKLYIGIDIHKRSWKVHCATDLFGGKSFTMPPRPEVLLEYVTKHFPDHEVTTAYEAGCCGYYAHRSFEQYGWTSLVVNPADIHRKGKERFTKTDKIDAQLISRELKDGRLESIHIPDIEREQLRSLFRRRNDLVKDFRRIKSHIKMQLLYFGVAVPDEFDNDHWSHKFRGWIDDLSFVYPSARETLDSRMRSFRFIDQELRDVSSEIRAYCRKHYKKDYYLLKSIPGIGGIVACAIICELGDLRRFKSIKHLAGYVGLAPGIHQSGNNQKSTGITVRAHRLMRSYFIEAAWQAIRTDPIMQAYYRKHLGKDVKSIIIKVARKLLSRTLAVIKTETPYTIGVIE

SEQ ID NO: 482283 - protein, 437 aa, unidentified
MDGRAKRRKSQKQQQKTMNDSTQWQPHRAFGALDWASEKHSVIVVNPAGKVIEDFEIEHSALGWKKFREKLQPYGSIPFAIETSQGVAVEQLLEAGMLVYPLNPKSAQAYRERKAPSGVKDDRLDAWSFADALRVDGQDWKALRPEEPLIKELRLLCRDEVTLIEQRTAFVNQLRHALAEYYPAALEAFAEWTSVSAWMFLQRFPSPELLAQAGKGQWQKFLHSRRLWGSDQGPRRMEIFAHATEFAGTAPTLKAKSLLALSLVQMLFTIEKQLALYRQQIEALFARHPDHDLFGSLPGAGPKIAPRLLSEIGDDRQRFGGDPQNLQCLAGSAPVTKRSGKQRKYWHVHQRWACDKHLRHAIHLFAEQSLSRCAWAEIYYQLHRQKNQSHANALRRLSHRWLKIIYKMWIDRTPYNAELHHRNQLQHGSWVFQLQQS

SEQ ID NO: 482284 - protein, 482 aa, unidentified
MKKKTIYSNQSQELLRLFEEAGNNSKMMCVPIDYAKKDHIVMFCNGYGDILRKPFSVKNSPEGVKYLTEQVRRSCRHRGINSKHVFLGGEDVGSYAENFVNTLRVKGWIVAGVNAHDAKKQRANIQASTDRLDLMGIASMLLNRRANCSPAQSGIYRNLRTLVRHRRKLVVMSTEIRNQIHTVVDRLFPGFLDERKTGIVPFTNSSLYLMENRFSARQIHRRKRDRLIEILKRYGTSKPEHTAAKLQEYARQVLITPKEYMSTLQLSLAQHVKHFRCLKENIKQVEREIALWLSQTQGAFLTTIRGIGIVLAAGVTAEIGDPSVQKPLNNLASYAGIIPRVKQSGGVEGKTFTGKVAKRCNRILKDYVVKSGLHLGLHGPEDLMADYKRRDAAGQHADFGMARRYLRMAMCLMRTSQIYLPSRLRKKGVDVQQRSSYYLMTWPYIREKWYKLGALEATFEKDRPLGQWRYRVQELYEIKLKL

SEQ ID NO: 482285 - protein, 319 aa, unidentified
MADYREAFIGIDVAKLKNAIAVAESGREGEVRFWGEVDASDTSMRRIIQRIAAKFDRVHFCYEAGPTGYGLHRLIRSLGHECVVVAPSLIPRKPGDRVKTNRRDALALARLLRAGELTAVWVPDEGHEAMRDLVRARAAAVETLRVHRQQISAFMLKHSRIYPRKKGWTMRYLRWLQEQQFDHPAHQIALQEMVEAVRVSKERVERLEKVIEEFVPTWSLAPVIRALQTLRGVDLIVAVTFATEVGDVSRFESPRQLMGYLGLVPGERSTGETIRRGGITKAGNGRVRHMLVESAWTYRHPVRRDSSRWCQDLVSLGTL

SEQ ID NO: 482286 - protein, 411 aa, unidentified
MSKFRFYVGIDLGNSQQAICVLDQNKKELSRQSVGTNDVVNHLLRAIGQVPFNEVAVAVEDRNNVVVDALLELGFAVFSINPKQADRFRDRMSASGAKDDRRDALVLARALYTDMEFFLRRPALTELEAKMRIYRRREATMAEEGRRLSSQLYALVQRLDPTLLTLCAGADEAWFWSLFLAASKDVRLTTSKVEALLKKEGKRKLDELVPTVMAVVGNDRRTRATKSMISIVVVEAKTLITVLRAIETERLKALKDLTAFVEDEAKRHHVTDDGRTVAGTVGILLSMPGIGIKTAADLVADATPLLHRDKLHLLRAVAGVAPVTKQSGKSRSVSMRRACNPRLRNAMFHAAQAAVRHDVIFKSYLEKLLAAGHGRPRALRSVADRMLRVLVAMLTSGTLYDPERATQAAAA

SEQ ID NO: 482287 - protein, 412 aa, unidentified
MDVMYPCCCGLDVHKKTVAACLITSTEGPEPVKEIRTFRTMTADLLALADWLQEAGCTHVAMESTGVYWRPVYNLLEGQFELLVVNAQHIKTVPGRKTDVKDAAWIAELLRHGLLRGSFIPSKPQRPLRELTRYRSTLVQDHARMLNRLQAVLEDANLKLASVVTDVYGVSARAMLAAILAGERDVETLADLARGRLRAKRDQLKEALEGRVTAHHSFLLTEHLSTLEYLDEAIARVSGEIDQRLTADQEAIALLDTIPGVGQRAAEILIAEIGTDMSRFPSAKHLASWAGMCPGNHESGGKRLSGKTRKGSRWLRQILVEIAHVASKTKNTYLAAQYRRIAARRGKKRALIAVGHTVLTIVYTLLARKQPYQDLGTAYFDQREQRRVERRLVQRLERLGYEVSLQPKALAS

SEQ ID NO: 482288 - protein, 429 aa, unidentified
MRPRSRITSEAMTLQDRLGVTGEFIMGEVIIYESSHWLDIAKGESQVQAFLQKKKPFKKTFKFKHDTEGLHRFYRFYEEMEQESGIRPVVIFESTGHYHEPVLPFLQEHNVTYYLINPVIAYESKKTSLRKVKTDSIDAVHLCELYYKEDLETFQRKSIKTMNLRNLSRQHDALTNTYVQLKLKFQTILDQVFPEYKGVFGDLYSPISLKTLLEYPTSHDVLLCEAEDIAEAMFEMGGRRSYAWCLNKAFKLKEAAVRNPFKKNLYHSHLISSEMYIHMLLQYQEHLSKLEREIDALAKEFEEYEVIRSIPGIGGKITATIISEIGEIDQFNHPKKLVAYAGIDPSIYQSGKFTANIARITKRGSNRLRQALYKAVQCGLTSNRNPILKTFYDKKREEGKPHKVAVIACANKLVHWIYAILKRKEAFKI

SEQ ID NO: 482289 - protein, 498 aa, unidentified
MSTKASIYANCNSQLVKLFESAGHPAKVLCVALDFAKAQHTALICNGRGDILKGAFAMDNTREGAEQLLEQVRRCAKKRKVDTQHVFFGGEDCPPYAENFLRRLRQEKYLVMRVNAWEAKQQRSNFQASSDTLDLLGIAKCLLNRRAEPVVDLPAAYANLRIATGDRDALVRTATATSNRIHSYVDRLFPGFLDASKSGLTPFCQASLDLMLEDFSPKQVGRRPGRALAQWLGRRGVEDPQVAAGRLKDLAKGVLCPAPEQTVMLQRSLAELVKLYRGLEASISMLDRELAYWLARTPGALLTSIGGLGVTLASGWTAQLGPPNQWRAVRRLCSYAGVVPKTKQTGGPDKEPVTGHVQHRCNKRLKNVVLQAVEKVRQFGPEELRRAAQELEARGAHTEYGLAKRLVRLCKYLATTGTIYRPKALLAADTAPATLAAYYQTAWDKLLAKWKNKADLQDVFAPKHPLGQWRAMAQELYALELRLPQPRAERAQAGALTP

SEQ ID NO: 482290 - protein, 351 aa, unidentified
MPHKLNSAIAVIGIDIGKNSFHVVGHDKRGAIMLRQKWSRGQVEARLANLPPCLIGMEACVGAHHLSRKLQMLGHDARLMPAKYVRPYSKGQKNDFRDAEAITEAVQRPTMKFVATKTAEQLDLQALHRVRERLVSQRTGIINQIRAFLLERGVAVRQGLRFLRNELPHILAAPCDALSPRMLRVIEDLAGDWRRLDERIEGLSSEIEARARQDKGCERLMTVPGIGPIISSAMVAAIGTGDAFSKGRDFGAWLGLVPKQISTGDRTILGSISKRGNRYLRALFVQAAWVVLVKVGPKHWARYGLKSWIEAAKKRLHHNVLAIALANKLARIAWSVLAHGRTFEASKIQAA

SEQ ID NO: 482291 - protein, 344 aa, unidentified
MDHFVGLDVSVKETSVCIVDELGRIVREVKVASEPEALLAVLKNPAYHFKRIGLEAGPLSQWLYGALAEAGLPVICVETRHMRAVLKAQINKTDRNDARGMAQMMRVGLYRPVHVKTLRSQKLRMLLTHRQLLLSKAIALENDLRGTLRNFGLKVGMVGKVKFEARIRELVESLPDLAVLVEPMLIVRRVLREQIVILHRRLLAIVRDDEVCQRLMTIPGVGPVVSLTYRATVDIPARFRKSKSVGAVFGLTCAKYQSGEVDWDGRISRCGDAMMRTMLYEAAQAMMRSKKWSWLKAWAMQIARRRGMKKAIVALARRLAVIMHRIWLDGTEFRWTRQQAAVAA

SEQ ID NO: 482292 - protein, 341 aa, unidentified
MRKEEIECIGVDVSKNTLDVALFRGKIDWNEGHVKVSNNESGYKELRKWLRLKNAEKKRLRICMESTGLYTHDFRSWLEKENIIYYVVDPKLMHHFAPPQSIKGIRQTKNDKADAFRIAIYCSLFHDSMEPSKLPSAAYFKLKRLLAERRQYVKQSVLYRQQLSDISIYDSVGSRIRKKNEVENLRDNIKQTDAEMKAIIDTDPEIRRNYELLISIVGVGLVVAVTTIVLTENFTTFTNPRKYASYIAIAPFPHESGTSIRGATRVSKQGFRQAKADLSISVLSAITFDPDIKEYWQRKKAEGKHTGCVLNAIKFKIVLRMFAVVKRGKPYVNTKGYKSNK

SEQ ID NO: 482293 - protein, 317 aa, unidentified
MAKHTTICAGIDTGKRKLDIAIDGRAEQLQVNNTAHGHEKLIAWLRQHRVKRIGIEASGGYERAVVAALRRNRFVVVVFQPAQVRAYAAFHLQRAKNDKIDAALIASCTAAVKKIHAPPDPRLEPFADHLTMIDQISEDIARLKTRREPCRDPRIRQLWKEEIARLKKLEKTELKSLVAAIRQHRDLAQRLDLIYSIDGIGLRTVVAILVRMPEIGRITREQAAALAGLAPYDDDSGNLVGVRHIAGGRERLRGALYAAAFAAAFHWNTQLIALYKRLNRAGKLHKVALIACARKLLIFANTVVARGTPWTTQAATA

SEQ ID NO: 482294 - protein, 351 aa, unidentified
MGNITIGMDLGDKINFVCVLDESGKVKQRISIDNTMESIRTFFSKYKGAQVAIEAGTHSPWISRLLSSIGCNVLVGNPRKLRVIWESDNKTDLRDAEMLARIARFDPNLLYPIRHKGEQAQADLALMHSRDLLVRNRSSQVNHVRGTVKSFGERLPSCSTECFHKKVVPHIPEQLKQSIEPILILIAQMTSQIKEYDKEIETISTERYPETALLRQVKGVGPLTALAYILTIETPERFETCRQVGPYVGLTPRRDQSGETDKQLRITKAGSSFLRKLLINSAQYILGPFGGDCNLQRFGLRLASRGGKNAKRKAVVAVGRKLSVLLLRLWKFGEIYDPLYKRNPWPIAKAA

SEQ ID NO: 482295 - protein, 392 aa, unidentified
MVVSVGVDVSKDKHDCFILSSEGEVLADVFTIPNNLDGFRFLLRRIRDCTHAQDKIKVGLEATGHYSYNLLGFLLDNGLPTYVLNPLRTNLYRKSLSLRKTKTDRVDARTIAAMLLSDAGLKPYTNTAYHNEELKSLTRYRFDKVKERAKLKSSIARLVCILFPELEKLVPSLHIASVYALLEEFPGAKQIAAAHLTRLKALLETASKGRYKRDMALEIRDAARNSIGSWMPAKSLELQHTIRLIRELDVEIAEIEEQIQSIMDELHSPITTIPGVGFRMAAMILAEVGDFTRFDSSDKLLAYAGMSPSTYQSGQLKNCYPHMEKRGSRYLRYALYNAAKYVCHWDPTFAAYLAKKRAEGKHYNVAISHTAKKLVRLIFAMEKSGTPYHLTV

SEQ ID NO: 482296 - protein, 451 aa, unidentified
MSESASTSQAAAPAESPLPPRGASPGGPHWSLFTHFAGFDWAKDHHDVTVVDRSGVVAMEMRFDHTAEGWAVFAQKVRAFPTLALTIETSSGAVVERLLEMGLHVYPVHPTAAERFRDRKAPGGVKSDRLDAWCMADALRTDGHAWRRLRPEDPLTQELRLLCRDEVALIEQRTALVNALQAALGEYYPAALDAFDNWTLPSAWAFVERFPAPAELARKGKRQWEKFLHTRKLARPEMYAERLAVFAKAGAFVASPATTRAKSMLAVSLCVQLRALQGQLDEYRRRIQELFAQHPDQGIFSSLPGAGPKLAPRLLAECGTDRDRLGDHEALQCLAGTAPVTRQSGQMRIVKQRLACNKLLKTTVHLWANLSRSTCVWADAYYKKKREQGKTHACAIRCLGQRWLKILWKMWQDRKPYDEAVHTRNQVRHGSWVVRLIAATPPATPSLATPR

SEQ ID NO: 482297 - protein, 341 aa, unidentified
MQVSTIGIDLAKIVFQVHGVDAIGKVTITKKLRRSQVLALFDRFPRCLIGMEACATSHHWARELRALGHDVRLMPASYVKAYVKRNKNDAADAAAICEAVTRPSMRFVPVKTADQQSALMLHRTRDLLVRQRTQLINAMRAHLAELGLVAARGREGVQSLIALVRDNVSQLPDLARSALQAILSQLDALGQQIANIERHLHAQHRVNEVSQRLETIPGIGVIGATAIAATVTDPKVFKSGREFAAWIGLVPRQNSSGGKERLGSISKQGDRYLRRLLVIGATAVIRQARTHPDEHPWLIQLLARRPAKVVAVALANKTARIAWAVLARGGTYRAPALAARV

SEQ ID NO: 482298 - protein, 495 aa, unidentified
MARSPFSSHAPWADTPRPATTINKPTHDVYPETVGRDETAAQLNESADAFKSEELPISPSPLGRRRVLHPMKTTTTYVAFVGLDWADRSHQVCLRAADGTRDEQSKLAQDPAALHAWANALRARFPEGKIAIALEQTKGPLVYALSMHAHLELFPINPAMLAKYREAAKAASGTKNDPLDASLLCELLRVHRDWLRSLPTVPAAARELQMLLETRRGLVDQRTGLCSQLSAALKGYYPQALALVGHDVGTPLACAFLRRWPTLSAVQQARPKTLRDFYHAHQVRSEERIEERMAVVRSAVALTADAAVLATLPMLVASVVAQLEVLAPAIADYDRRIAASFASQADAALFESLPGAGEQLAPRLYVAYGPDRSRYTSALQLQQYSGIAPVQEQSGKTKVTHWRWHCPKFLRQSFHEFAGCSIPRSRWAKAYYDEQIARGKPHHRVVRALAYKWQRIMFRCWQNHEPYDEERYLAALRRHHSPLISRIDSTRVEAA

SEQ ID NO: 482299 - protein, 393 aa, unidentified
MLSQEDAVSAPEASGIDGNIFVSVEMSRSKWVIGVHTPMADKIAIHTFACGDADAVLALVERMRTKVEAAGNRSPTVIVCYEAGYEGFWLQRRLDALGIRVVVIDPASLLVDRRAKRAKTDRIDARGMVRALMAFARGEHQVLSEVRVPTVEQDDARRVLRERHRLVKERTAHTNRIKGLLKTQGIMDFDPRAKGAALRLDEIITGDGRRLGACLKQEIVRELERLSLVMEQLARVEAERDAVAEVGRQQEVSAADHHRDAAMIAVLNRLKGIGTNDASILVREVFWRNFHNRRELGGWSGLAPSPWASGSASRDQGITKAGPPMLRAQMIQITWRWLFWQPDSDLARWFQKRTEGATGRMRRIMVVALARKLLVALWRYATIGTVPSGAIVT

SEQ ID NO: 482300 - protein, 402 aa, unidentified
MNAVGIDVSKGKSMVAIMRPFGEIVSAPFEIKHTASDIHSLIELINSVEGESRIVMEHTGRYYEVLAHQLSEANLFVSAINPKLIKDFDNDSLRKVKSDKADAVKIARYALDKWQNLKQYNVMDELRNQLKTMNRQFGFYMKHKTAMKNNLIGILDQTYPGVNTYFDSPARSDGSQKWVDFASTYWHVDCVRKMSINAFIDHYENWCKRKKYNFSKSKAEEIYGKAKELVPVLPKDDITKLIIKQAVDQLNSASITVESLRTLMNETASKLPEYPVVMAMKGVGTSLGPQLMAEIGDVSRFTHKGAITAFAGVDPGVNESGSYEQKSVPTSKRGSSDLRKTLFQVMDVLIKTHPQDDPVYQFLDKKRAQKKPYYVYMTAGANKFLRIYYGRVKEYLASLPES

SEQ ID NO: 482301 - protein, 343 aa, unidentified
MLKFNVIGIDLAKNVLQICVISKHGELVSNKIVGRQRLKEMLAKSSPSIVGIEGCGSSHYWGRMAESFGHDVRIITPKKVKAFLSGHKTDANDALAIANAAMQIGLKYSKPKNEEQQTLQSLEASRVFLSRNITSLGNHIRAMLYEYGIVSAKGAAGLRKVVQDTFEENNELPTCLISTLHQLWAQYLNLKEEFTKLEKAKNSIVRQVKPCKQLMALEGVAEVCAGMLYSSIGNGKQFKNGREAAAFVGLTPKQHSSGGKVFMVGIDKKGGVKELRAALYQGAMSIVTHLPDKPKTIKQAWLIQLVKRVGIKRTCIALANKTVRTAWAMLKHESKYEQQLITA

SEQ ID NO: 482302 - protein, 413 aa, unidentified
MKRIVERCAGLDVHKASITACVSTPGEGGEPHQEIRKFSATTRGLLQLRDWLASFAVTLVGMEATGVYWKPVYYMLEDDFELWLLNARHLKNVPGRKTDVKDAEWICQLVEHGLVRPSFVPPKEIRELRDLTRYRKAQIEERTREVQRLEKVLQDAGIKLSSVATRALGVSGRAMLDALTSGTTDPEILAELARGKLRSKIPALREALEGRFSAHHGLMVGKMLAHIDYLDESIAELSMEIERVIAPFAEEVELLDTIPGVNRRTAEVLIAEIGADMIQFPTHRHLASWAGMCPGNDESAGKRRSGKTRKGSKWLRSALIEAAYAAARSKGTYLSAHYARLKGRRGPKKAAVAVGHSILVICYYILQRGEPYQELGEDYFNWRHSEEAYRKRLVRQLERLGHRVVLETLPQPA

SEQ ID NO: 482303 - protein, 350 aa, unidentified
MNITHVGADLAKSVFSVCAMGPEGRVVERRDLKRDGFLAWLQRLPQGCIVGMEACGAAHHWARQLSLLCLVPKIMPAEFVEPHRKSRSMKNDRNDAEAIVLAVRDATMRFVPVKTLEQQARLSRHRMREGWKEERTALMNRMRGLLTEFGVVFPRSSTQLRKGLAEAMHDARVPEAVRELVAWAREDLERIEQRIAACDRAIGLACRADATAKRLQELMGVGPVTADAVIATAGNARDFRNGRQFAAWLGLVPRQFSSGGKARLGGITRRGDAYVRTLLVQGAKSSLKQALKASPENATRLQRWACQLHGRAGYHKTLVAIANKNARVLWALLARDEHYNPEAWKNYAKG

SEQ ID NO: 482304 - protein, 428 aa, unidentified
MSQRDYSRQVAKRQRIKKSTLIVGVDIGKAFNAVGFMDKDGNVLNSCPKLYNSREGFEECINLIEGLKAKHHLKDVLIGMEPTGHYWRKLAYFAKDHGYEVRFVRTTALKHHREIDESSSAKSDRRDALTIANITREGKYIDTVIEDGPLRQLRTLSKARERLLRYSVSAKNSLHAALDDYFPELHEMFWSMGSRSLWAILEQSPFPQDVLLMKESTLKELIAQSSRKKAGSAQKAKALCDAAQKSIGVKQIGSADRYRIEMCLEEVKRTVMTLKNIDMQLKRMLKEIPSAPYLMSIPGIGPLSAAVFLGEIGDPVNFHNARQLVKYAGYDPQESDSGSRIGRRFISKKGRWLLRKYLFFMSMRVVVLSKYFQEYYQRKLETKNRFGQHPRRKEMLCAVVIKLIKVIFALLRDKRGFEDLAPVALAAA

SEQ ID NO: 482305 - protein, 408 aa, unidentified
MNAVGIDVSKGKSMVAALRPMGEVALLPQEFLHTEVGLEQMAYAIVALGEDTRVIMEATGRYHEPIAAALHEYGIYVCVLNPLFIKQSGGGSIRKVKTDKADAMKIAKYGLDNWVELREYTPMDTVRQQLKLCSRQYNLYMKTVVSLQNNLISLTDKTFPGVNELFSSPERADGHQKWVDFVMTFWHCDCICRVSEKAFTDRYQKWCKRKGYHFSTEKALDLYAGSCGHFTTLPKNDNTKLLITTAAQQLLAGKTTLAALRTEMTRLAKQLPEYDTVRAMYGVGETTAAQLMAEIGDVRRFPRRSSIVGFAGVDPAVDQSGKHSAKSVPTTKRGSPHLRKTLYQIVCTYLKRSPADEPVYQFLDKKRAEGKPYFVYMTAAQNKFLRIYYARVKECLEAFDARQDTVQN

SEQ ID NO: 482306 - protein, 329 aa, unidentified
MAIVGIDVSKGKLDICWLKDPQAMRIKTRVFSNTDSDIRKLNDWLVSQTGKRPEAVRVMMEATGIYHERLAYVLYEAGFQVYVVNPQHVHSYAKSFGRRSKNDRKDSVIIARFLSDRQQELPLWQPEPQEVRHLKAMLARLNALDADIQREQNRLEKALVQKASQRVESSIRTMIDALQQERKKLEQDIDNHVDGTPSLKEDRRLLESIPGIGRVLSVELMATMRSRDFESAGQVAAFLGLVPIMRQSGSSVDERPRMSKGGSSRIRAKLYMGSVVAIQHNPMIQRQFARLVGRGKSKMSALGAAMRKLVQIAYGVLKHQTRYDPQWAA

SEQ ID NO: 482307 - protein, 353 aa, unidentified
METPIKQTAGIDCGMQELVVSFGILTGDGTFICKLTKVFANTAKGFQQLLQWINEVSSKETAVLYAMEATGVYYEKLAYYLVANDCHVSIVLPNKINAFAKTCTSKKQDDQQASKVLCEFGCVKHVDEWQPPHPLFAALKQLTREKHQLQQELVIIKNQLHAEQTKAITASASIKRMKARCRLIEKQIAEVEKEIIDTLNDDAAIKEKINKICTIPGVGLSTAVTVIAETNGFNLIRNARQLVSYAGLDAVQKQSGISVKGRAHISKKGNPHLRHCLHLPSFVAVKYNLPMQQLHHRIVEKQAIKMKAYVAVQRKMLMLIYTLWKKNEAYNPSIKFLEQPVEAALTELDYICS

SEQ ID NO: 482308 - protein, 312 aa, unidentified
MTRIICGVDISSLSLEARIGPEGAFASFSNNPQGIAALAAFCQAHQVELVAMEATGGYEQQALALLSEQGLPVAILNPRAVRRFADSMGQMEKTDRLDAGMIAWYAQTRHSQPVCLTSASQQQLRALVTRLRQLTEARTAQMNQSRLVTDPAVLALIEELLAVVARQIRELETSIAALIAQDPLWQHLDRVFRTIKGVADRTVARMMAEMPEIGTLSNKAISKLAGVAPLARDSGKHQGKRAVRGGRASVREILFIVASVVGRHEPDFIVFQQRLSAAGKPRKVIRIALAHKLLVRLNAKARQVRQQLEAAA

SEQ ID NO: 482309 - protein, 341 aa, unidentified
MSYKLFIGADTSKAKFDFTGLDNDGHKQLATEVSNCSTTLTLWLSELLDGHSLSASQILICIERSGIYSLNLAYIAHEMGFTVWMEDALHLAHSFGRVRGKTDAVDAARIAKYAQRNWQDMKPFNPENETVTRIRSLVKQRLRMIKTKNILLVPINEEQEFATIPIDDLHQSSREVIEKMEKTIKGFDDQIDQLIEADKQLKQKATFAMSVPGFKKVNFRNLVISTEGFTRLDNPRALACNIGIAPFPRQSGKCLNKRPTIGKMGNKSFKTTLTCAVMSVIGGENRFGQYYRRKMAEGKKHLVVVNALRNKMLHTVLACIKNEAMYEEKSSHKLAGTIAIW

SEQ ID NO: 482310 - protein, 418 aa, unidentified
MKIVFPTCCGVDVHKSFLVATIIKTPQNSLQQSYQKKRFSTFNSDLNRFADWLRENDCLDVCMESTGKYWVPVFNILEKQGIRVVIANPKWVKAVKGNKDDTKDSKWIGDLFRIGLVKSSFIPNKEIRILRELTRYRYKLISMKSSEKNRFQNAFTVCNVALDSVVSDMFGKSATAITDYLTSDVEFDAQHCISLLQRSLKKKAPAVLEAVEGHEIAPEQKTRIGIVRDHLHYIDKLVERVDDCVEGMVQKYEGAITLLRTIPGVDRSSAITILSEIGIDMAQFGSSKRLCCWAGLTPGNNESAGKKKSVRISRAGVYLKPALVQAAHAAVKDKSSTYYAVKYERISKRRGKKRAIIAIARMILTAVFCMLSTGEVWNPVDLYKVDMPEHLKEKQLAKAVKQAVHFLETQGLTVLDSA

SEQ ID NO: 482311 - protein, 394 aa, unidentified
MKLIGIDIGKNKHFFYVMDQQTGETISQPVSFSNDKEGFDFLVQKIKSYPKDSILIGMEDTGHYHFALLKYLLDLQYTVALINPKTTDFNRKMQGGITKNDKLDTINICDVLDTPERKKQYRITKVNSFDLYEQKQLTRQHHNLKEELNVYKNRLQKSIDIVFPEFNSLFKSKYGTVYMNILKTFGSAENIANTDIRTIRKCFEIDGRGNRISLTPERLKECARSSIGIFSSAEVIQIKHLTAQIELIEEQLTEIDKKIEEFSIQNNSPILSIPGISHFSGTSILAELGDISNYSKPSQIIKFAGVAPLHYESSQFNAQHTAITKKGSKYLRKTLYQIILPVIKYNPVFKKYYQLKISQGKGHRCAQGHCVRKLLRIIYHLLKTNQQFDPQLLR

SEQ ID NO: 482312 - protein, 367 aa, unidentified
MKDSSTVVGLDVHKNSIQIVTADTDGAMEVRHFGRIGGTMDALDRAVRKLVSRGSTLRFVYEAGPCGYEIYRHLTGKGFSCKVIAPSKTPKKSGDRIRNDRRDAETLARLERAGELTAIYVPREEDEAMRDLTRAREDAVRAQKTARQQLNAFLLRYGQRYPGKASWTPSHLRWLSDIALPHPSQQIVLQEYINTVTVDTERTTRLTDQIAKLLPEWRMFPVVKALQALRGVAPIVAATTIAEIGSMSRFEKPRQLMAYLGLVPSEDSSGESTHRGSITKTGNGHVRRALIEAAHAYGFPARVSRHLLKRQEGLPQTVLAIAWKAQVRLCGRFRRLMARGKMKTKIVTAIARELSGFMWAIAREVEG

SEQ ID NO: 482313 - protein, 349 aa, unidentified
MKNFSIGIDVSKEKFDLTVKKVHFGAEQSEFLHYDVYENNPSGFRKMLKAVDKATGRADKSEWLFCLETTGAYELHLCNYLYAKGYDVWRESALQIKMSNGVTRSKNDRVDSDRIADYAIRHMDKMVIYVPVEEKLSTLKSLFLYRDRLVKEKQSKHTSSQEIKCTHVMNDEMRWMHTRSQQDIARLNKEIKECEDHIQELIASSAEIEKNYKHIMSIKGMGIITTTALIICTHNFATITSARKASSYCGVAPFFAQSGTSISHKKNVSHYSNAQLKAILTQAAFIATRYNEDIAIYYNRLKEKGKPLGVCVNNVRNKLLRIAFSLVQNDCDYEEKHEWRRSQLYKDAA

SEQ ID NO: 482314 - protein, 372 aa, unidentified
MSQSSTLYVGMDVHKESIAIAYVAQAHGAEVVSLGTIGTRQCDIDKLIRQLQSKAKHLVFVYEAGPCGYWLYRYLTKKDYICWVVAPSLIPKKAGDRVKTDRRDAMQLARLMRSGDLTPVDVPALDDEAIRDLSRAREDTLRDLKAAKLRLKAFLLRHDIRYTGRANWSPAHLRWLSEVVCPTPAQQIVFQEYVQTVTEQTERLGRLELELHEQVKTWRFAPVVEALQALRGVQFTVAVTTVAELGDLTRFANPRQLMNYLGLTPSEYSSGARRQQGSITKTGHSHARRALVEGAWAYRYPAKISRHLQLRLEKLPTAIQAISWKAQVRLCKRYRQLMAKGKNANQVVVAIARELSAFMGAIAKQVAGAPKA

SEQ ID NO: 482315 - protein, 402 aa, unidentified
MRRTKKFIYFCGIDIAKNKHVVCVIDRDGTVCTRPSSIANTVDGYQRLLERLKAVGRKTSVLIGMEATGHYWYSLHDFLTRSGYTVVVLNPIQTARQVAQAIRKCKTDKYDATHIAQLIRSGNYKPAAIPSEKAMTCRQLTRLRYSMLGQQTQLKQLIWSKLHPVWPEYERLFSNSFGTTARMVLRLAIESPGLCQMPLDELAERIRSSSRGKFGPLKAREIRHAFEESAGMQRGREGLGMTINYLLDQLEALESVRKRLDAQITELVEQLPPYLLTLPGASPLNIVSLYGEIDPIETFEQPSKLVAFAGLDAAVFQTGQYNAPRRHISKRGSPFLRKTLWQMAYRAAYQEGDLRDFWLKKKGQNKHQLVAVTAVARKLCHVVWRIMTDRRDYVPKGYNQKS

SEQ ID NO: 482316 - protein, 321 aa, unidentified
MSPADVYVGIDVAKDWLDVAQRPGGEAWRVSSDETGVVALVERLKGVRPTLVVLEATGGLQIPAVAALAAAGLRTAVVNPRQVRQFAGATGRLAKTDAIDAQVLAQFGEAVRPEVRPLPDAATQELSALVNRRRQLIEMLTAEKNRLRLATKKVRPNIEAHIRWLEGELLDLEGGLGDVIRSSPVWRERDNLLRSVPGVGPVLSSVLLADLPELGKLSRKEVAALVGVAPLNRDSGLFRGRRQVWGGRSHVRTALYMAALVATRYNPIIKSFYQRLLSGGKPKKVALTACMRKLLTILNAMTRHQTPWQTMDLTLDLKDSC

SEQ ID NO: 482317 - protein, 377 aa, unidentified
MSKLRFVGLDVHADTIAVAVAEAGGEVRSLGVIPNRLESIRKMIGKLAPVETLKCCYEAGPTGYVLYWQLVQLGVACEVIAPSLIPTKAGDRVKTDRRDAEKLARCYRAGELTSVWVPDANHEALRDLVRAREAAKKDQLRHRHRLGKFLLRHGKRPTDAGKAWTQKYLNWIRIHVHFEQPALEATLKYYREEVDHIAARITKLEQAIDEAVKQAPPEIRAVIEALQALRGVAQTTAATVFSELGSLSRFPNPSQLMGYSGLVSREYTSGNRVQRGAITKSGNAHLRRVLLEAAWTYRHRPNVQGRVLRRQKSLALSEEANRIAWKAQQRLHKRFAALTARGKESNVAATAVARELLGFMWAIAVHTEAQHQQAKAA

SEQ ID NO: 482318 - protein, 410 aa, unidentified
MRRMKGKRSASSIVGCAPRCAEPHAETPEGVLPQAFRGGRPVSKTITSFIGLDVHKDSTAIAEAEAGRESPRFIGTVSSDLGQLLKALKSLGKPETMLVVYEAGPCGYGLARQLRSRGYSCEVVAAGKIARRPGERIKTDRRDALTLARLARSGDLVKVMVPDERDEAMRDLSRAREDAVKARLKARQQLKALLLRHGHRYGGKSSWTLAHERYLAGVSFAHPAQHIAFTEYRQAVGEGHERVERLTQALRTQSEQWRLKPLVAALSSLRGIDFVAAVTLAAEIGDFSRFAHPSELMGFLGLVPSEYSTGDTRRQGDITKTGNSHARRVLVEAAWNYRFPARISRVLQIRQEGQPKAVREIAWRAQLRLAHRYRRLSSRKLHPNKICVAIARELAGFLWDIARQVKVAEA

SEQ ID NO: 482319 - protein, 370 aa, unidentified
MGSMVFVGMDVHKATVAVAVAEGGRGGEVRQVGIFPNRAEVIAKLAGRLAGDGRELNFCYEAGPCGYGLQRQLAGLGHDCVVVAPSLIPSKPGDRVKTDRRDAMSLAKLHRAGELTAVWVPDTAHEAMRDLVRARATAVRVLGKGRQHLQGFLLRHSRIYAGKTTWTVAYRRWLATLRFGHPAQQIVLQDYIHAVEDAEKRVARLAEQISVLLPSWSLAPVVQALQAMRGVGSIVAVTVVAEVGDFARFRNPRQLMAYLGLVPSERSSGATVRRGGITKAGNALARRVLVEGAWTYRMQARVSPKLHERLEGLPAVIRDIAWKAQLRLCARYRHLIAAGKAKVVVTTAIAREMVGFIWAIARQVQLQPAP

SEQ ID NO: 482320 - protein, 400 aa, unidentified
MISVGIDVSKEKSTICILKPYGEIVSRPFEVCHTEKELSELASMLLRLNDDVRVVMEATGIYHLPVLCYLKEKGLFVAVVNPFEMKEYRCQGLRRVKTDKQDAITISNYGIDHWYRLKNYEAEESVYAELKLLGRQYRHYMRMRVESVLELTHLLDYTMPGIKTLLKGWNETNGKDKLGDFAEEYWHYDNITKKPEEQFIESYLKWAKEKGYHQSQDKAVKIYALAKEGIPTVSSDTPSTKMLVQEAVRVLREVDNTLMTILTQMQALAKSLPEYPVVRAMGGVGNVLAPKLIAEIGDVRRFHSGKALIAHAGIDAPPYQSGQFIGTERKISKRGSSSLRKIGYEVMRCLKTHKEPEDAAVYRFILKKEKEGKSKRAAKIAGLNKFLRIYYARVMEVYQK

SEQ ID NO: 482321 - protein, 361 aa, unidentified
MKRGHFIGIDTHCDFCEVAVVNSAGQVVQRHRCETSIVALREILEAVPRPRALVIEEGPLAGWLWRELHAAVERMVVSEPRRNRLISEDGDKDDDIDGEKLAQLLRGGFVKEVHQVKSLARAVFKQQVSVYHFRVRQRVRESLRLSSLFKQHGVIIREKAYVASEDRPALLGRLPADRTLREAVQLLWSAYDELVAQEETWRKRLFHLAQQEEVVQRFAALPGISWIRGATLYAYLDTPWRFRSKSALWKYLGIGLERERSGNGPEHVGVPLLTHRLLKSTILGAAQSAAALGDNPFADLHRRWRAQGLSARLARRNVARAVSATLWGLWKNGSAYRPEWVGVAAAAQRGDAGVSARTMAD

SEQ ID NO: 482322 - protein, 343 aa, unidentified
MKDTTISVDVAKSVFEIAVSLHPGHVAETHRLPRPRFAQFFAVRQPTTVVMEACGMAHHWGRELQSQGHRVVLLPPHTVRPYVPRNKTDRTDAKGILEAFRNQAIHPVPVKTVAQQALAALHRLRSRWMATRTSRINTVRGVLREFGVPISLGSRQVVPAVRAALEDADSGLPDAIRPALATACEEIRDLEAHIASADRQIAALARETPVVPALRSVPGIGLLTATALVAVVGDAARFPSGRHFASFIGLTPRESSTGLRRRLGAISKRGDSYLRMLLIHGARSVLCHAKKAGTHDRLRTWALDREQRRGHNKAAVALANKMARIVWAVWTKGVPYQDTATAD

SEQ ID NO: 482323 - protein, 341 aa, unidentified
MDKELYFGVDVSKKTLDLAYYDGETIDWKNAHIKVSNDDAGFKKIGSWVAKVGKDFDTFLFCMEYTGLYNQNFRLWLESKKYIYGMVEPRKMHHFEPDLDDDQRSLDRIKTDELDAFRIAIYCEQNHKKILRNPSKLPSPVYFKLKRLLAERKQNTKQSTLYKQQLHDICAYDTDLSVERKKLLLKNMMENQKAIDKEIDSYMNEDASISKNYDLLTSIPGIGRIIALETIVLTENFTAISNPRKYACYIGIAPFKKESGTSVRKRTSVSKKGFSEAKADLSIAVLSAIKNNPSIRDYWIRKRKEKCGGIVLNAVKFKLVLRMFAVIKRGTPYVETDAYKN

SEQ ID NO: 482324 - protein, 443 aa, unidentified
MLPDRMELKILNIREAIRMQEKLLRVSDKTIIVGVDVAKKEHWARITDYRGVDLAKPVKVHNNVDGFEKLMARIEKVCNNTGCDKVMIGLEPSGHYWKPLGWYLYLHQSNPMLVGVNPYHTKQAKELDDNSQTKSDKKDALTIAHLVRDGRYFDVYLPEGAYAELRILCNERKRLQKQVNRANNVIVAVMDEYFPEYDGVWEKVTCPTSREVMRKMPFPSDILDAGEEKVAELLRESSGGVEGKARAARLLEAAKRSIGVVEGRNSAKIRLLSLIDELEFYEKKVAAIEDEMTSIMDSLEMGELLQSMKGVGPVISAVFLGEVGDVSRFDNWKQVRKLAGMNLVEQSSGQRKGKTKISKRGRPYLRYMLFLAGQVGSLHNPEMHGYYRCLRERKNNPLTGYQAFVAVGLKIMRILFHMAKNRVPYDPAKALGNVREQQIAALA

SEQ ID NO: 482325 - protein, 311 aa, unidentified
MQDTIGIDVSKEGLDAYRLSDRCHARFANDRGGVKALMRWIGGKTPTLIVFEATGAYHRQLETTLAARGVAYAKVNPRQARRFAEATGRLAKTDRVDAAMLARMGAVLELDAQPARTEILQGLKDLMTARRALIKDRTAALARQKVLASSLLKRQAAARLRQIEGHLQELDAAIAHAVGRDALLSQKLAILITIPGIAEATAFAMLIEMPELGSLDGKQAACLAGLAPISRQSGKWQGHERIQGGRTFLRRAIYMPALAAARFNRDLKVKFDQLIAAGKPAKVALVAIMRKLIVLANALLRDGRPWSEIRP

SEQ ID NO: 482326 - protein, 348 aa, unidentified
MLHAGLDLSRRKIDVCLLSAGGEVVEEFASPPDGDGLGGLARRVGGHGLAVRGVIESMTGARFVHDRLEALGWDVLIADAAKVKGLAPLACKTDKIDARVLAVLSHRDLVPEIWLPDPRVRREREQARFRMHLVKHRSMLKHRIHATLISFGHPCPVTDLFGVAGRELLDRLDVPQPWRGTVDASLRLIDDLDRQIDTINKQLRASGADHPYVPLLLTVPGIGWVLAFTIAAEIGDISRFPSAKKLCGSTGLCPRVYQSGDRDSRGPLTKQGPKYLRWAMLEATMHALRHPAYRERYQRNKRRLGRQRGAKVAQIDVARKLTEAIWHMLTNHEPFAPAPGGSAFRLAA

SEQ ID NO: 482327 - protein, 380 aa, unidentified
MNELTTYVGLDVHKKDIAIAYADGAGGEPVWVGKIPNQPDKLARMLRQLQKRHSQMVVAYEAGPCGYAIYRQLEEMEIRCVVAAPSLIPVKAGDRVKTDRRDALKLARLLRSGDLSPAWVPDEQHEELRDVSRAREDAVEDLHRARQRLSKLLLRKDLRPPTGVNTWTKRYREWLEHVRIGTPAQDAVLQEYRLAISQAEDRVGRLETAMREAAAQSPHAPVIAALQGMRGVQAVTAITLVAELGDLTRFRSARQVMSYAGLVPCEDSSGGRERRGGITKTGNAHARRVTVEGVWHYRHAPHVGKGLKRRQQGVPESVVRIAYRAQVRLHRRYERLLKSGKPVQKVAVALAREWLGFVWAIGQEMARLKAAEASREQLAA

SEQ ID NO: 482328 - protein, 359 aa, unidentified
MDAQEAAVRRIVGGVDTHKDLHVAAVVDEQDRVLGTQSFASTRQGYRQMLAWMRAFGEVQRVGVESTGSYGAGLLRFLQQAGITVLEVTTPDRQDRRRCGKNDDFDAQNAAHAAFAGIRTVTPKSRDGMIEALRVLSVCRKTAVAARRIALQMIQNTIVCAPESLREMLRRMTRMQLVRTLAAWRPDLTAYRDVEAAYRISLKSLARRYLELHDEIADLDAMITAIVEELAPNLVARNSIGHVGAAQLLLTAGDNPQRLRSEAGFAALCGVSPVPASSGKTARHRLNRGGDRAANSALHIIAIGRLRTEARTQTYVAKRIGEGHSKMEAIRCLKRYIAREVFMLIKQRQKEINQTRIAA

SEQ ID NO: 482329 - protein, 370 aa, unidentified
MAKRSMFVGMDVHKESIDISLAEEGRDGEVRHYGVIPGDLEALAKVVRAVRAPTRRLRFVYEAGPCGFGIHRYLTAQGEDCVVVNPSSMPKRSGDRIKTDRRDGDALARLHRAGELTAIYIPTPDDEALRDLVRGREDAVGLSTQAKHRLKAFLLRQGRRYPGRAGWTTPYRRWLADLSFPLAPQHIALQEYRDTIDETERRVERLTDQLRQLTPTWRWAPVVDALQALRGVSFVTAVGLVAEIGDIRRFTHPRELMAFLGLVPSEYSSGPSVRRGGITKAGNPHARRLLAEAAWAYQGVPRLGRQMLYRQEALPKSICDIAWKAQLRLTSRFRRLVARGKAKPKVATAVARELTGFIWAIAREVPAPPA

SEQ ID NO: 482330 - protein, 332 aa, unidentified
MFVGMDVHRNRTQVCVLDRKGNEVRNRNIANDRQALRKELAGLRKGTPIAFEAAYGTGWIAELLGDLGFEAHLAHPAGCRAIADAKLKNDRVDARTLANLLRTGYLAEAWLAPKDVREQRLLLRERARLVRIRTSAKNRIRAQLADEGVPTPSHGLWTKQGTVYLEALELSPMHRWVVTDCQALLEVLGSRITLLEAEIRRQAKPDKRVDALMAIPGIGLLSAMTLVSEIGDVTRFATSRKLCAWAGLIPSMRNSDRTLHHGHITRAGPAAVRHVLSEAAQTAIRTEPHHSDFLGTKRRRGTGIALIRVARKLLTEAFYALWALEDQQSQCS

SEQ ID NO: 482331 - protein, 462 aa, unidentified
MMNVQEQREMVEKANRILSEMKSFTWRDLETQGKFSKNDKLSFISDDMLIVGCDIGSETHYVRAIDTRGRELSRKALAFDNNAEGFQKAHDWAVQLAAANDKKQIVLGLEPTGHYWFCLAAWMVSNGISVVQVNPYAVKQTKELEDNSQQKDDRKDPKLIANLVKDGNYGMPYLPEKVYAELRRLSMFREQLTEDRNRSMNRLHREMKIYFPEYKDAFGKIDGAFCMAVLKEAPFPEDILKLGGEGIREIWHQAKLRGRGYSRAAEIVKYAETSIGLKDGTAAGREAVRWFAEKIMELDEELAEVENKLNEKCREIPHAENVLEIPGIGGKILAGILAEMGDITRFDDVKEIQKLSGLGLVSCSSGKHKGETRISHRGRKRLRYWLFQAARSAVAHGEEYKWIHAHYTTRAGNPLQKMQSLVVIACKLLRVIYTMLKTGKKYDPEKLLKDIRYPESVQSAAA

SEQ ID NO: 482332 - protein, 312 aa, unidentified
MTYIGIDVSQGTLDGADATGAAWQHANDAAGIAATVALVGARGPTLVVLEATGAYHVPLTAALAAAGVPVAVVNPRQVRRFAESVGQLAKTDRLDAALLARFAATVQPAARPLPDAATQELAALVDRRRQLVEMLTMEHNRLAVARRSVQPSVRQTIRALDRALRALEAETDRWIQGSPLWRAQEELLTSVPGIGPQTARMLIARLTELGALSAKEIAALVGLAPFAQESGRWRGVRRIRGGRADVRTGLYMATLAAIRCNAVVRAMYRRLVAAGKPKKLAITACMRRLLVIVNAMVKHQTRWQASPTPTTA

SEQ ID NO: 482333 - protein, 326 aa, unidentified
MTQTSPHVDTRVILGADVGKASIVVKRLVGDTPTKGGTLTIANDPASIATALAELGHIDLIVCEVTGGYERALLNAAVQAGLAIHRADGARVKAYIKSNGVRAKNDAIDALWLAVYGQDRFDKLKTWSPPAQEDEAFQALVRHRQDLLKAQTVVKNRRKAPTCDHIVTFLDDELAFYAKLIKDVEKEIEVLLAANTLIADKEKKLRAITGIGPVSARILIAMLPELGTVTRREIASLAGLAPHCDQSGTSTKKRPMTGGRDLIRSTLFLAALSAARHHPTLKLFYDNLITNFKPAKKALAAVARKLVTIANAVLRPDYKPEVVLLN

SEQ ID NO: 482334 - protein, 373 aa, unidentified
MNYSTVYVGMDVHKESFSLCCYTNEKEKGEYPQKVEAHYSKIINYIEAMRFHYGDDATFICGYEAGCLGFTLYHQLTDHGIKCIILAPTTMPQPQGKKKVKTDKRDAERIARCLAHHDYSAVHVPTEKDEQTKEYIRMRCDHKLALKKVKQQILAFCLRHNYRYEDGSNHWTEKHLKWLRSLKPDGLYGEILQEYLLTYDTLSDKLERLDKRIEELASDAMYKENVHKLTCFLGIKTQTALSVITETGDFKRFATAQHYASYLGLVPGEDSSGDDQNRLGITKAGNRHLRMLLTEASQSYSRGQVGYKSKVLKQRQAGNDPAVITYADKANERLRRRYYKLVLGKCKKNNVAKTAIARELACYIWGMMTGNIA

SEQ ID NO: 482335 - protein, 391 aa, unidentified
MDTTSRVVIGMDPHKRSVTIEVMTSDESIVGKGRFATDRDGHAALRRYVQAWPERVWAIEGCQGIGRHVANRLLAEGEHVLDVPPKLSARARVFATGQGRKTDATDAHSVALVGTRMSGLRPVVNDEQLAVLRILVDRRRSLGEEHTRKMSQVHHLLLELIPGGAKKDLSAAQAKKLLATVRPRDAAGKTRRRVAAELITDLERIYQRKKAANKELTALVAATGTTLMDLTGIGPSGAARLLVEVGDITRFPDNNHFGSWTGTAPIDASSGDNVRHRLSRGGNRQINRVLHIMATVQLRNPTEGRAYFDRSKARGKTSNESMRLLKRRLSDIVYRTMVNDAARHMATGPGGQRGNDSDSSAAGSQPHTNSSDKPLPGPATTDPRTPLPAAS

SEQ ID NO: 482336 - protein, 361 aa, unidentified
MSIQRMSVGLDVHARTVVAAALDASTGEILRAKLSSDNRDVLGWLGGLPCPVAVTYEAGPTGFGLARALDAAGIECKVAAPSKLQRPTGDRVKTDARDALHLAKLLHLGEIVEVTVPSVAQEAARDLVRAREDVRGDLMSARHRLSKMLLRQGIVYSGGKPWTGAHDAWLRQQRFELPGLKLAYESAYDTVVSTTDRRDRLDAAIEIMAADSEFTPVVHRLGCLRGVATSTAFGLAVEIGEWHRLTGRSIGAYLGLVPTECSSGTSRSQGGITKTGNGHARRLLVEAAWKHRARYQPSSRGIRRRWDLAGSAARQRGHAGNQRLHARWQGFDARSKKPVVANAAIARELAGWCWSLAVLEE

SEQ ID NO: 482337 - protein, 348 aa, unidentified
MTVFIGLDISLDETHICVVDEEGKTLKESKVMTEPEAIAPVLRRFEGRIKRVGFEASSLSPWLSNELIKLGFPAIIVETRHMASALGAMRNKTDRNDARGLAQMMRTGWYRSVHVKSDDSHRLRILLTNRRILKRKFLDIENAIRGTLKVFGIKMTRTTRGRFEQNLMVKLAEADPMLREMTQSMLEARRTLLEQHNRCHKLVLQVVRGDDVCRRFMTVPGVGPITALAFKTTIDNPTRFKKSKTVGAHLGLTPKRYQSGTVDYEGRISKCGDPEMRTLLYEAASSLLTRVQSWSVLKAWGMSLQKRAGKRRATVAVARKLSVILHRMWVDGSEFIASREDLSAAKVA

SEQ ID NO: 482338 - protein, 370 aa, unidentified
MSHATPISWIAMDTDAEAIHVAIFRGQERNPSEEFQVSSDNRGVGRLKNKLAKETGQVKCVYEAGPCGYGLHRQLREAGFECEVIAPSLTPRKPGQQVKTNRLDARRLGVLYRGGQLTPVRVPDEEQEGLRDLLRARDDVRRDVMQRRQRLNGFLLRHGYHFAAGQNHWTQKHWAWIKALVLAERLQKVVDEYIVGVESSQQQLERFDKQIEEIAQEPAYAAKVARYSVLRGIRTLGAMTILAEGGDLRQYASAAGFMGSTGMVPRESSSGDRQRRGSITKAGNGYLRRILIEASWSYQKRAHGGAAIQKRRRNQPEWLLAIATKADQRLHQKFTKLQYRYNKKAVVAAVAVGRELAGFIWAIGQQIEKQ

SEQ ID NO: 482339 - protein, 406 aa, unidentified
MLIGWDWASETHDVTVMDRDGKAVDCWGLRHDEAGIDKTIRRLGRHGRPEDLPVAIEATHSVVIDRLLAAGHPVVPIHPNAFNAARPRWSASRAKSDPGDSWKLADYLRTDGHRLRRLEPLDQATADLQALVRLRDDHVEAKVAATNQLAAILDRHWPGATTIFARLDCEIALSFLDDYPTPASATRLGEARMAMFCRRHSYSGRRPPGQLLDRLRAAPEPVAVLSPEVLTELVRAQVRLLRSLLATIADLDRAIGAALLEHPKAHLLAPMPRIGEINLAQVVAEVGPILARAVDVEHAAAEVGATPVTKASGKGRSVHFRWAVNTQARQAMATFADNSRHASPWAAQLYASARRRKKRHPQAVRILMRAWLRVMWACWHTDTPYNPVNHGAEKRLAAEKPKQSAA

SEQ ID NO: 482340 - protein, 401 aa, unidentified
MEPAAATVWAGIDVGKTHHWVEVVDACGATLLSRRVRNDQVEIDAILAAVVPLAETVLWAVDIVGSPSALLLALLADAGQQVRYASGRVVSVMSSAFTGEGKTDAKDAHVIAETARLRRDLPLIDQSTDLARNLAVLTAHRADMVADRVRGINRLRDLMTSVFPALEREFDYASCKGALVLVSGYATPDRLRRVGRARLAAWLRARHVRSYAQLADRAVTAAGAQHVVLPGQDISAGIVSELAASVLALDVRIKAVDTQIAATFELHPQAAVILSMPGFGPFLGASLLAAAGDLRAFPTAGHLAAAAGLVPVPNDSGRRSGNLHKPRRYSRPLRHVFYLSAQTATMRPGPNRDYYLKKRAHGRTHTQAVIALARRRIDVLWALLRDNRTFTEQPPAAAIAA

SEQ ID NO: 482341 - protein, 440 aa, unidentified
MIGIDLAEDKQALAVIDHDVRVLARKTVRVKVFRLGAALDWAVGQARAKGFGQVTVACEPTGARWLQVQRLCAERGLPLVCIQPLISHIAREQQDFTRHKTDESDCVMIARLAVELHCYVPEELDETWAHLRHLGRRRAQLITAATASAQRIRDFLSVAWPAVPETCARPLESVTWLAALQVVTARCGADPGKLAAMGEQEFTALVRGAVCGWGGQKAHGPISGRVFAALTDTEGVVVSSRRGLLRRVADELGDLQRTRAQLRAVEADMVAVLDELGLCRLADIPGLTAVGAAAILAETGDPHRYDNSSSLVKHAGMSPSDNASGAFSGQAHISRRGRPGLRLVVWRAVWPMLQFNPVMAAKYQAMTRAADTAAAHAGPQQGKAAQAAARTRRAKARVACAASLLRWIYCMVVHDTSWDPAAASGAASRHETPPTPAKAA

SEQ ID NO: 482342 - protein, 356 aa, unidentified
MERFIGIDVHKDSCTVAVMGPSGRRIRCDVVETNGAVLIELLKLIPGERRVCIEETGQSEWLCEILKPHVTEMVVEGTTERKDRSHQKDDERDARGLAERLRTGTVKNRVCKPPRELSKLRDAVRAYGIVVGDLVRVKNRLNAVYRSRGIAVEGNEIYRSNSREEFLAKLPESRRALAKVLSQELDALEALKAEAEEQLEQEARSHPAVARLTTAPGFGTIRAAQVVAIGITPRRFRTLRQFWSYCGLAVVMRTSSDWTRENGQWVRSDNVAKTRGLTRKRQPVLKAVFKGAATVVVGRMTDHPLTRKYQQLCEAGTKPSLAMLTIARKIAAAVFAMWKNQEVYDPEHRGRCPQPA

SEQ ID NO: 482343 - protein, 321 aa, unidentified
MMARQTNHNRIVVGIDVGKQQLDLFDTHTNQHRSVPNDDEGWATIKVKMVELKPDLIVLESTGGYERGLVAELAAANLPAVVVNPRQVRDFARADGQLAKTDRIDAGILAKFGLAMRPEIRPLPNEKTLILKDLLARRAQLINMRTAESNRLQQARAAKVQRSIKRVLELLEKQLKSIDDDLDRQIQESSIFRDKLKFLASVPGVGPQTCRTLLLELPELGAATRQEIAALVGVAPLNRDSGKMRGRRMIYGGRPAVRRVLYMATLVATRCNPRIAEYYQHLQSVGKRKKVALIACMRKLLTILNAMLRDQKPWRTSTVKT

SEQ ID NO: 482344 - protein, 345 aa, unidentified
MMVTLGTDAHKHSHTVVAVDEVGAEIATLTVKATPQGHLRLVKWSARWGQRLWAIEDCRALSRRLEADLLAAGERVVRVPPKLMAGARRSARTRGKSDPIDALAVARAALREPDLPTARLDGPDREIRLLVDYRESLVKDRTAAQNRLRWRLHELAPGYDPPAGSLDRYKTLTAIDELLDDHHSVVADLARREVSRVRELTREANQLGRDIAARVAVLVPSLLAVPGCGALSAGKLVGEAADITRFKSRDAYAMWSGAAPIPVWSANNQRFRLNRGGNRQTNAALHRIAVTQIRMHPDAQAFIARRLGNGSTKREALRALKRKLANVVYRAMLADAQQPALAKAA

SEQ ID NO: 482345 - protein, 423 aa, unidentified
MRNNAARKLKQVPKGYLVMGVDPHKKRHAAVAVTQDFTTHSKFKFNNSRKGFETALERARAEMMRTGSRGIIFAIETGGHYWRNLAYFLDERGIPFHFINQFTLKRRREGKDLNRRKNDYRDSEVAAQLLCTGVFTDTKLQHGVYAELRAAYNAYRRLVKERTRITNLVKGLLDGLFPEFTQVFKDPCGLTALSVLSICPVPVVITKMTEEEFVNAIRAKHQGRLMKRKLCALHYAARTSIGIEAGAQSVSSEISFLVEKLRLIRRQTRRIDEALARLVDETEEGKYLLSIIGLNYISVAGLLAELGSFRSYRSAKQLIKMAGSNPTESESGGKRSAHTPMSKKGRPVLRYCAWTAVIPMLRFNPDFRVWAKELRERPAHANPLGGREIVGAALNRLLRLAFALVKKQTFYQVPQLEVAQAVI

SEQ ID NO: 482346 - protein, 384 aa, unidentified
MQKPNDLNQSRIVLKQDSTLIAVIEMSLSSWLVAGIVPGVERQPLKKLAVDESALLKLLNRWREEAEKAGRRIERITVAFEAGRDGFWLARWLRARGIEAHVIHASSVAVSREHRRAKTDRLDTELLKRAFLGWLRGERDHCKMVAIPTTKDEDAKRPNRERQSLVGEQTRIVNRMKAALIRLGIRGFNPKLKKAARRLEDLRTPEGEPIPPNTLAELHRDMERRRLVSDQIRQIEKARLERMEQAPGDGPHAMVRLIARVIGVGIETADMLVHEVLSRKLRDRRAVARYAGLTGAPDESGSKRREKGLAKAGNARVRVGMIQLAWRFLLFQKDSALAQWYRTRTEGGRNRKTMIVALARKLLIALWRLVTTGEVPAGVVLRAA

SEQ ID NO: 482347 - protein, 344 aa, unidentified
MFYIGLDCHGKWTTAAGFNPETGEVLRLERVSNGPGEMAKALEGFEAPFYGVMESGTNAWAMYREFLPIFERLTVVDPSGVWDRRSDRQAKTDHLDAMRMAQMLYRGQIKGLYIPDEVTQDLRVLVRAKVRMSRWVTRLTSEIGSVLKSWGYVGNRSLLSKSGKAQMGKVHLPNHSAKVLKLWSELLEKAQEIEDELQAAIEEEAANDPECAILQTIPGVGAFTSLLVRAEVGDIARFPKAENLVSYIGLSPRVFQSGESCHYGGLGNWGNRWLRYALGLLAQRVAASKRESCLRRTYWRVSFRRHRNEAKIAVARKAARIIYGMLSQGEVWNESKHRRAKAAA

SEQ ID NO: 482348 - protein, 353 aa, unidentified
MNRDKYMGIDLHQATSVVVVLDSEGKQVLETIVATEAPAMIRLFQSLSGPLHVTFEETTQAAWLYEVTRAHVADVIVCDPRRNKLLSEGSKADKPDARKLAELLRAGMLRSVYHGHEGTRTLKELVRAYETLSTDCTRIMVRIKALYRGRGIRTPGRGVYQAAERQEWLKRLAEPGLRQRVELLYDELDHLRPLRKRAKQAMLMESRKHRAATLLQTIPELGAIRCALIVATVDNPHRFRTKHQFWSYIGLAVVTHMSSEYDIRDGRVVRKKKPLATRGLNRNCNRRLKEVFISSATGGAQTEPYHSYLQGLESRGVRPQMARLTLARHIAAIALRIWKKGETFDPTKLNWAK

SEQ ID NO: 482349 - protein, 352 aa, unidentified
MNMNAIGIDVSKRKSMVAILRPGGEVVAKPFEVSHLSKDLRSLIHRIRSLDGESRIVMECTGHYYETIAHELVSAGLFVSAVNPQLIRHYQDEDNSLRKVESDKADSLKIARYTLDRWSKLKQYGLMDELRNQLKTMNRQFGFYMKHKTAMKNNLIGLLDQTYPGVNTYFDSPAREDGSQKWVDFADCYWHADCVRKISVDAFVDHYQKWCHRKKYNFSKTKAEEIYETAKEPVSVLPKDVFTKRIIKQAVEQLNTASRTVEQLRSLMNETAAQLPEYSVVMAMKGVGPSLGPQLIAEIGDVSRFTHRNAITAFAGVDPGVNESGDYSQKSIHASKHGSPALRRPYFRSWTF

SEQ ID NO: 482350 - protein, 501 aa, unidentified
MKTRRSKAKIRVRQKKLSGICSEPEQKLEILRPNAAGIDCGAQEHYVAVPPDRVSAGEATVRCFSAFTEGLEAAVDWLRDCRVSTVAMESTGVYWIALHQKLEAAGIEVYLVNARHVRCVPGRKTDVQDSQWLRQLHRFGLLNASFRPEDIICRLRSLHRHRDNLVSSSGSEIQHMQKALQQMNLHLHHAVSDITGVSGLRIIDAILTGERDPEKLVKLRDHRVFKSTPEQMKAALKGDCRPEHLFVLSQSLQAYRFYQARIEECDREIEPLLERLAQQVEAASAKLKLDALKPPSNPKDGATTPEPLSESKALCGLKAKRKRKPRANEPKIDLAGLLERICGIDLTKVVGLNVLNALLIVSEIGVDMSKWRSAKAFCSWLGLCPGNKISGGKVLDSRTRQVVNRVADALRLAAQSAGRTNTCLGIFYRRKQAHLGAPKATTATARKLACLIYHLLKYKQPYQEPDPAIYQLRLQKSALSKLQKQAASLGYTLLPTAPLPG

SEQ ID NO: 482351 - protein, 374 aa, unidentified
MIAGIDTHKDTLAVAVVDDSGRLVAGGDVPNTRAGFAQLVDMFNTHHVQRVGIEGSGSFGRAVAVHLALCWQSDQPVAVVEVPTLMTSRERRPGQLGKGKTDPVDALAIARITTREQQLPPVRLTVGAAADLRALLDYREDLVRERGALVNRAHAELGGLRPGYQQQIPILTTCARVRAAVDLLGDDTSIRATLCRRRLERVIAIDAETAELKRQISKLVAAADTTLTDLYGVGPLVAARFLAEVVDIRRYPNRNAFASANGTAPLPASSGRTVRHRFNPGGNRQLNRSLYTIALTQIRGDTEGRAYYERKRAAGKSKREALRCLKRRLSDIIFTTIRHDAAGADASSDQASPPPWPVPVGVDAVDANEARLTA

SEQ ID NO: 482352 - protein, 346 aa, unidentified
MKETYMAIDAHARRCVLGVMDESGRYLGDWQFPTTESELVRHVVAVKAARKRLALEEGPLAYWIAQTVRAYVEEVVICDPRENALIGLSAHKSDQVDTPKLCRLLRLGELKRVYHPAEDHRAVFKAAVQAYLDLVLEQARLKQKIKAKYRAWGVAVHDTTKVYHPKRRAAYLAQVALAPIRAQLERLYAVLEAARQAKREALRQVVELGRRYSEIAEFAKMPGVGVVGAHVFDAYVQTPERFAGKRQLWRYAQLGLCDRSSDGQPLGRKRLDRAGNSALKAMSYRAWLGALHARSNEVKTFFEASLERTHDKTHARLNTQRKVLASLWGLWKRKEAYDPQKFLGTA

SEQ ID NO: 482353 - protein, 369 aa, unidentified
MEKDTTYVALDDSKRKIVAGILRPNDTAPELREIANDPQHIRRLFTRLQRERPVTACYEAGVSGYDLYRQLRALGVSCDVIAPALTPRRPGQRIKTDRRDAAKLVHLYRAGELTAIHVPDAVEEAGRDLVRCRDDIRRDVLRWRHRVLKLLARHGRLYLAGKNWSQAHWRWIREQRFDLPPLQRAFEASLFALEQALARQAELDKEIEALAETAPYREPVGWLRCFRGIDTLSAMILLVEVIDFQRFRRPRQLMAYLGLVPTEYSSGDTQRRGALTKAGNAHARRVLVEAAWHYRHRPTIGHALARRSHGQPPATVAQAWRAQQRLHRRYRHLVGPGKRPPVAVAAIARELVGFIWAAMTGHESRLQTA

SEQ ID NO: 482354 - protein, 365 aa, unidentified
MTSMTSPTAPVTVIGGVDTHGQTHHAAVIDQVGRQLGDREFPTTPAGYRALLTWLRGHGQLERVGVEGTGSYGAALARHLRRMGAGVVEVDRPDRKARRAKGKSDPLDAYAAARAALSGTATGTPKTRDGRVEAIRVLRVARSGAVKARTQGTNQLKALLLTAPAELREQLRHLSTTTLIATCARLRPSSELTDPEQATKTALRRLARRHQHLSEEIAEADTELRTLVTAAAPRLLVLPSVGIEVAGQLLTSAGDNPDRLHSEAAFAHLCGVAPVPASSGRTHRHRLNRGGDRAANNALYIVVLGRLRYDSRTRVYADRRTKEGLSKPEIIRCLKRYVAREVFAVLTAPTVEDPVATTTTMSTAA

SEQ ID NO: 482355 - protein, 419 aa, unidentified
MAFKIFRKNCCGLDVHKTWIYACIGITDTNGRTEYKQARFSSFSKGLKELADWLAKYRCFEVCMESSGKYWIPVFNILEKAGLFVTLAHPKYTKPQKGNKTDRKDAKWICDLFMCDMIKPSFIPPADIRHLRDLVRYRFKLTCMITGEKNRAQNCLTVSNLKLDDVFSDVFGKSSRSITEQILAHPGETFDVAPFVDRRCKTPIGEIQAAIDGAVSPEQAVKLRQCLDHIDELEMHIEKVQQEILRLSDKYQAALDLIRTVPGFDKNPMTAIQILSEIGGDMSVFPTAKHLVSWAGCCPRNDQSAGKIKSTRISRAGSYFKPVLVQVASALTRSKDHPEITNRYRRIKARRGHKKAIIAVCRMLLTAIWHILSDLKPYTPDGFVEPRPAEKSKVLTTAQAISLLKQRGYVISDSAPVLN

SEQ ID NO: 482356 - protein, 318 aa, unidentified
MTRSADVEWSSVGIDVSKAELVIAVAPSGERWTSATTPEALVAFVARVKTLAPSVVVMEATAGYDVPVAVACAAAGLPVAVVNPRQIRAFAQAIGRTAKTDPIDAEVIALFGERVRPEPRPLPDADTQALAALVARRRQLLEMLHAERQRLEQATATAVRRDLRQHVTWLKRRVADTDDELQKRIQKSPAWREKDDLLRSVPGIGPAVSRTLLAELPELGQLDRRTIAALVGVAPMNRDSGRFRGKRMIWGGRASVRQALYMAALVASRYNAPLRTFYQRLQAAGKPKKLAVVAVMRKLLTILNAMVKHNTEWQQQAA

SEQ ID NO: 482357 - protein, 458 aa, unidentified
MSEVMIGIDPHKSSHTAVAIGAGEEPLGELRVQACPSQAEQLRAWAAGWPARAWAIEGAAGLGCLLAQQLVAAGERVLDVPPKLAARVRLLQAGDTNKNDPNDAFSVAVAALRSPAPRPVLAEDHAVVLKIWAKRHRDLARLRNQAACRLHAVLCDLVPGGHPKEISAAQAARILERATPTDAVAQARCELAAEFLTDIRRLDAQLREANKKLAAAVKASGTSLTGLFGVGPVIAGTVIGDVRQVFRFPSRDHFAAYNGTAPVEVSSGGRKAWRLSLRGNRRLNHAIHMAAVTQIRHTHSDGRAYYEKKIAEGKTGKEALRCLKRRISDAIYAALVADARQAAAATCPQGPGGQPGNHFVSRAAGSHPERRLFGQATPGPATTLRPAHNPGARARHSPVAAIQPPAKPQVQVERPQRSEDERPGGAARRRPHSAARKAPRDPELAPEATTAKKTQATA

SEQ ID NO: 482358 - protein, 471 aa, unidentified
MFIHHDRWDAAVVLRMGIDIAVRAPHQASLANEKGELLWSAHRFRTTTGDLEKLWARLPTGHTPSDVTIVMEPTRNAWVPLAAWFRRRGAHVVLVSAERSSDLRAYYAKHTKSDRLDSVLLARLPLLHPEGLHRERGLGPGDPLRRATKMHSTLVKRRTTSLARLDALLEILGPDWHGAFSADLSNKTPLQFLAAGYADPHTVRRLGRARLTRFLYRHSRGAFGEAHADQILAAARASLELWGDDLAFPDLAEDIAIEARLALTLTAEIKELDERIAILVADRDPHGIITSAPGVGAITGAVILGRLGNADRFQSLAAVRSFSGLVPSLDSSGVSGRHGGPTKRGDHLLREALFISANQARRLDPTLAAKYHRLMIDSGKHHNSALCHIATTLLTRVVACWRAQTPYQIRDIDGRTLTTDEARAIIRERYTIPDTVRRSRITTGTGRRSKESLRAPSTGPSNQHAKQPGAA

SEQ ID NO: 482359 - protein, 455 aa, unidentified
MAKKGKQNTPTPENMPILHPHAAGIDVGAEEHWVCVPADRDAQPVQKFSAFTCDLHRLADWLTTCRITTVVMESTGVYWIPLFQILEARGFEVALVNARHVKNVPGRPKTDRFDGRWLQKLPTYGLLAPSFRPPEDICQLRSLLRHRDNLIRMTVKHIQHMQKSLDQMNLHLHHVISDVTGVTGMRILRAIVAGERDPRTLAQYRDYRIKSSPDTIAKSLEGDYRPEHVFTLTQSLALYDFTHQHIAACDQEIERVLSTLDSLVDLEAHPLPPPTTTHRQPQRNEPAFDLRAHLYRITGVDLTQVPGLQAMTIHIILAEVGLNMHKWPTDKHFASWLGLCPDNQISGGKVLSTGSRRVQNRASRALRMAAQSLRTSPTYLGAFFRRMRSKLGPAKATTATAHKLAKIIYHMLKEKTPYRARGAEEYLHKDHERQLRQVRKQAKHLGFDLVPQPNN

SEQ ID NO: 482360 - protein, 346 aa, unidentified
MLIIGCDFHPGFQQVAIFDNQSGEMQEKRLRHRDEAEQFYIALPAPARVGMEACGHYPWFEQVLEKCGHELWLGDAAKIRAGVVRKQKTDRRDAEHILELLIADRFPRIWTPSLEERDARQLLVHRHKLVVRRTQVKNQLQAMALSHGVQKKWKLWSEAGRAELEKLPLLPYAAARRKHLLEALAELEAEIGRWQQRVEAEVRQRPAAVKLMTHPGVGPVTALAMVRTLGPAERFACPKQVASYFGLIPSEHSSGGRQQLGRISKQGSSFLRFLLVEAGQSAARYDSELGRFYRRLAARKHRALAKVAVARKLAMRLYLMLREDWTYAQLCRAVVQASPSHSVVES

SEQ ID NO: 482361 - protein, 338 aa, unidentified
MKYSAIDLHSNNNVVVVTDETDRVLVEKRLPNELDRVMELLAPHRDDLAGVVVESTYNWYWLVDGLMAAGYCVKLANTGAIKQYDGLKHSGDEADARHLAHMLRLGILRTGYICPPAERALRDLARRRLQLVRSRTSHILSVENQLTRQTGKHLRSNDVKRLTSVAVADLGLPDDVARGMAANVAVIQTLNQEIDKLEARLLEEVKKTPGWVLLNSIPGIGKVLATVIVLEIGTIGRFADVGDFASYARCVDSARMSNGKKKGQGNTKNGNKYLSWAFVEAAHFAMRFSPEAKRFYAKKYAKTNGAVATKALAHKLARACYHMLKTGQPFDVKRCFAG

SEQ ID NO: 482362 - protein, 321 aa, unidentified
MTYIGIDVSKDSFVVAYSPDKNSKTKTFKNTTKGIHEFIRTISKDEHHCVMEATGNYSALLVYLLSEAGITTSLENPLKVKNFARAMLSTVKTDEIDARLITLYGEKMQPAPYKLQSDAILTLKQKRTVIRQLKKQLIATRNLKGSMEALPFFDAKCRKSVEKTIAFLEKQIKDLEEDLSDLARSEYKKQMDLLTSVKGIGVTLAAALIMATGGFTYFDNAKQLTRHLGLSPTYQQSGTSVNFKGHINRNGDSSLRSQLYVAAFASLRCNTECRACYDRLRSKGKPGKVAVIAVANKLIRQAFAIVTQEKPYVDGYISSKK

SEQ ID NO: 482363 - protein, 400 aa, unidentified
MIDVSDIGAFLGLDVGKGEHHATAVTPAGKKAFDKRLPNSEPKLREVFGKLQAKHGTVLVVVDQPASIGALPLAVARDMGCEVAYLPGLTMRRIADLYPGEAKTDARDAFVIADAARVMPHTLRSVDLEDETIAELEMIVGFDDDLAGEATRISNRLRGLLTQIHPSLERVLGPRIQHPAVLELLDQFGSPAQIRKAGRRRLTALIRPKAPRMAERLVEHIFTALDEQTVVVPGTDAAALIVPSLTNSLRAVLDQRKLLATRIEELLENHPLSKVLTSMPGIGVRTGARILIDVGDGSSFPTAAHLAAYAGLAPTTRSSGSSIRGEQPSRRGNKQLKRAFFLSAFAALADPASRTYYDKKISQGKHHTQALLCLARRRADVLFAMLRDGTFYDPQPATSA

SEQ ID NO: 482364 - protein, 359 aa, unidentified
MEQKRFVGIDLGKRTFEIKFIASNGSVTGTNGKTCPSGRKELYKKLLPTDRIAIEVCSLGMVMAKEIIQQVGAEVVLLNPSQIALIYRSVKKNDKEDALKLARLVQKFTNEELPKVELPTEHEENLRQILTELRQLKNDRTKEINRVHAIFVECGITEIKKSNLATHKNRSECIRILKGIFLSQAERSLKKLELIEDQILEVEELLDKEIDGDKNIDTLITVPGVGKQLAASFVAFLGDGSRYPNVSSIGAATGLVPRLDMSSTSLRLGHITKKGNSNLRSLLILAAWSHVRAKNGGALKEKYLYMTIAQSKSKKVAIVAIARKIAELMYSLLKNNTQYEKRAPVSIKKLATEALVVAS

SEQ ID NO: 482365 - protein, 341 aa, unidentified
MEHVSTIGLDIAKHVFQVHGVNAVGAVVVRRKLRRDDVAGFFRTLPPCLIGIEACATGHHWARVLMALGHEIRLMPASYVKPYVKRQKNDATDAEAICEAVARPTMRFVPVKSEEQQSVLMLHRVRELLIRQRTMLVNALRGHLAEFGIVTRQGIVGVGMLIALVEDDGHNLIPPLARSALLSLIGQLREVHEKVGEMDRQIHAWHRSNELSRRLETIPGIGPITASAIAATVTDASLFKSGRQLAAWIGLVPRQNSSGGKDRLGRISKQGDPYLRRLLVVGAHAVLRFSRKARIPPTRWAAELLAKKPYNVVAVALANKMARIVWALMTTGKQFEAAAVL

SEQ ID NO: 482366 - protein, 324 aa, unidentified
MLFIGIDISKLTFDAAYSRDSRFVHKQFDNNPKGFNIFISWIKKSHDELFICLEATGIYSFGLAQYLSSQKLPVMVVNPIITHAFFKTELNRNKTDKADAKLIARYCEYVVLKDDFKKKLYQPKGADYEAIQRLVTRCDQLEKSKTQENNRLEASANQHASRSIKRLQKAIDKEISLIKKTISTIVKNNQQLSQQVELLTSIHGIGERTAWSILAYIGDINFFSNAKQIASYAGLTPKIIQSGTSINKSSLSKLGHKRLRKSLYMPALVAIRFNPVLKGVYERLVSNGKPKKVAIVAVMRKLLIISYGVLKSGKAFDVNYQPMS

SEQ ID NO: 482367 - protein, 417 aa, unidentified
MHTHYAWFLGIDGGYEAHQICLMDATGLIVMERQVAHDAAAVQTAITALLERTGAAPAQIAVAIETPRGALVATLLERGFAVFALNPKQLDRFRDRHTVAGAKDDRRDALVLADSRRTDPRAFRRVQLDDAVVMQLRELAHAEDDLKRDLGRLTNRLRDQIYRIAPAVLPLCPAADEPWFWTLLEQAATPAAQRALTRTDVLTLLKRHHIRRLTAADVLAATQAPAFYLAPGVAEATREAVELLMPQIRVVAAQLKRCEARQEDLLTVLRERPASEAEPGEHRDVEILESLPGVGRMVTVTMLVDATQPLATRDYDSVRAHVGVAPITKASGKRRVVSMRYACHPRLREAAYHWGRVSLQHDAASAAYYRRLRARGHTHGRALRSVVDRLLRILVVMLRHRTLYDPIRFVIPVAVPA

SEQ ID NO: 482368 - protein, 349 aa, unidentified
MEHYVGIDVSLELSSVCLVDAKGKIVKEAKVASDPDALVSFLRELGVSIERIGLEAGPLSQWLHAGLTKAGIETVLLETRHVKAALSAMTVKTDRKDARGIAQLIRMGWFRPVHCKSPGSQEIRALLVARKLLLGKLLDVEFSIRGILRGFGLKMGLVTRKGFEARVRELSAGHVMLEQVCAAMLAARAGLQTEYTKLHKALLTIVRNDHVCRRLMTAPGVGPVVAITFKTAVDDPTRIAKSKAVGALFGLTPKKYQSGETDVTGGITRVGDAMVRTALYEAANILLSRVTRFSALKRWGMDVLKRRGTKRAKVALARKIGVVLHRMWIDGTNFRWTKAERATEGAAAA

SEQ ID NO: 482369 - protein, 388 aa, unidentified
MIKYSLGIDISMKMFHVCLSVIDNQQQIKVKACRKFTNNVAGFKELCDWIKKHYKQQDIPLHIIMEATGVYYEQCAMYLYKKGFTVIVVLPNKAKKYLQATGLKSKNDKIDAKGLAQMGAEKKLNPWQPMDDFYYTLRSLTRHHESLQNIKTNINNQLHADNAGMYANKQVGKQLKNLIETIDKQIAEIEKSIEDHIASDSAVQQKVDGIIKIKGVGLMTVATLLAETNGFLLFENIPQIVSYSGYDVVEDQSGKHIGKTKISKKGNSHIRRILHMPAFNVVRYKVSPFLQLFNRTLQKHNIKMKSYVAVQKKILIIIYSLWKRDHAFNEEYYKGTTTRDEELVQPSRLSFTEAVQVAQKNSPETNQGYTRCTTVEVSSFAPSRLLQK

SEQ ID NO: 482370 - protein, 330 aa, unidentified
MKLYNVGADLSKKTIDFVIHSLKAFLFLKVDNNISGFRELIKWFQQHSIDPSEVLIVMEHTGLYSYQLEQFLHQNGISFTKVSALAIKRSLGLVRGKSDKIDARRIARYAFEKRDCLSADQPVSENLTLLQRLHSTRERLVKTRASYITAVNEEREAYKLKKTDIIIAAQLKVIKTLDQQIQKLETEIQAIVQADKDLNKNNNLLKSVTGVGPVVALATIVKTRNFTCFTNPKKFGCFCGTAPFEHTSGSSIRGKTKISSLGDKKMKTLLDLAAKSAIQHDKELKAYYMKRLAIGKSKKSTINIVRNKIIYRMFAVIKRQTPYQEHPTAA

SEQ ID NO: 482371 - protein, 429 aa, unidentified
MNSTQNKKIEQVKETTMIVGCDVGCEKHYFRAFNWRGIELTRKPVAFSNSMEGFNSFYNTIVELMQKSGLEEVLVGIEPTGHYWFDLGQFIGEKNIKFVMVNPHHVHKTKELDDNSPSKNDRKDPRVIAGLVRDGRYFYSYMPTGVYAELRNASNRRFVLVEEQTRAKNRLQKWIAVYFPEYKGVYTHIDAKGGLLVLKEASTPEEIVKLGEKGIIKIWKDAKLRGNGHKKAMNILNAAMRSIGLKAGLTEARMEIQDLIEDYELQTKRLERVNDLIKELCQQVRYADKLLEIKGIGITTVAGFIAEVGDITRFDSTKELQKLAGLELVSDSSGKHNGKTKISKRGRKRLRYLLFEAAISVVGKNKEFKEIHRYYTTREKNPLKKMQSLIAVACKLIRVFYVILIKGISYDSSKMLKDIQHPGDQLKAA

SEQ ID NO: 482372 - protein, 370 aa, unidentified
MTTTTTTTTTTTVTTILAIDLAKARSLFCWHDVVKGTHQIRQVPSTPQAFHDALVSRAVDRAIIEVCDMAGWVKDLCESLQIPLQIANGNTEGWRWRNVKRKTDKDDALKLISLSLTHQLPTVTLPGRPVRQWKSLILYRQKLIERRTRVKNRVHALLVSEGKAMSGGRKAWGEASLAELGRLAKPIADCTMGELWQGQLHLELGALDDLNHAIERLDRKLDELGEADARVIRLQTIPGVGPRLSELVVAVIDDPGRFKNVRQVSAYAGLVPRRYQSGTMDRSGRISKAGCGKLRKLLVEIAWGMLRHNDHGKGVFKRISKGQKTRRKQAAVALARRILGWCWAMLRDGTDWRDPSATMPTTPSPTPAIT

SEQ ID NO: 482373 - protein, 382 aa, unidentified
MQASTAATLTADHCGTVFVAIELSQKTWLVTLHSPDRDRMSRHKLEGGDHAELLALIERTRARVGEKLGSVPDVVSCYEAGYDGFWLHRLLEARGIRNFVFDAASIAVEQRARRAKTDRIDGELLLRTLMAYLRGEPRVVRIVRVPSVEAEDTRRASRERDRLVTEQTAHTNRIKALLRLCGMAVGNPRRRDWLTWLAQQRDWQGQPVPPQLLAEVTREHARLMLMREQLAALEEAQAAPVPPAGAPAAQRRDQLHRLKALGPAFTATLVNELFYKDFRNRREVASYCGLAPSPWKSGGIDREQGISKAGNRRARHKAIELAWLWLRHQPDSTLSCWFRTRTANAGKRAKRIAIVALARKLIVALWRYLTTGLVPEQAVMKA

SEQ ID NO: 482374 - protein, 320 aa, unidentified
MLSFCGVDVSKDRLDVIVLPEQQCSSVGNDAAGWSQLIEWLRGFSISAIGLEASGGYERGIMRALLAAGMSVRQINPFKLRQFAKASGVLAKNDRLDARMIASFVAVMPTHPVQRRAPAVERLAEMVTVRRQLSDEKIAAENASRMLENPMLQRLSRRRIARLAADIAEIDERLVEIVLSDASLAERYRLLTSMPGVGAVLACTLIALLPELGRLSRTKIAALIGVAPYDFESGKLKGKRCIWGGRTPVRNVLYMAALSASNWNPTLKAFHDRLAATGKKPKVVIVAVMRKMITMLNAMVRDNIVWADRYGVRHSVPNAR

SEQ ID NO: 482375 - protein, 366 aa, unidentified
MSETSVAFQSFVGVDLHKCTVTLGVVQADGQSKRLRISTKSTGKIEDWLRKLPGPVWMAVEACPFVEWFIDRFRECVDRIDIADATELANRRGKRRKTDPKDALDIAWRLSRGECPLGFIADEQLMQLRKLGRHWRQLSRLLSRTKHSMKSMLNAANIRGPKFDATGGHRWYLANRDLLKPVQQQAFADFLDILLLVERQRERLRREIIFATRSGRFAPLVALLMSVPGIGEIWAAIIVAEIGPFDRFPNADALEFWAGLTADLKESAGRTQSGNITKAGSVTLRWALCQAALSLCHSDAKQEATRQRLITRIGKPKANVAMGRRLLRILYAMVRDGKWYQGGARRDRTAAANKAKQSRKQTKEAA

SEQ ID NO: 482376 - protein, 454 aa, unidentified
MKKAKSAPQPKAQVALQIVFPNAAGLDIGSNEIMVAIPPSREGVTVRGFDTYTPDLEALADWLTEQGVTHVAMESTGVYWIPIFELLEERGFEVIVVNARHIKHPPGRKSDVMDCQWIQQLHAHGMLSGSFRPGADMCTLRAYLRHRDNLLEDRAKHIQYMQKALLQMNLQLGQVLSDLTGETGLEILHAIVGGEHDPLALSRMRHGNCKHSPEDLIKALTGHYRKEHLFVLKQALEMFESFSQRLRECDQEIERLLEEMQPELPDDFPPLPPDPKPNSHSKNAPSYDARALLYPLAGVDLMAIPGMNAILLQKILAEVGLDMSRFPTAKHFCSWLGLAPHNAISGGRILYSHTLKNHNRAGQCFRLAARAVSRGKTTYSEFYRHIRARSGAKEANMATAHKIARTFYYMLQRGQPFLAPDLQTYLQVQREKDIRRLQARAAKYGFRLQPAEVT

SEQ ID NO: 482377 - protein, 405 aa, unidentified
MVTVGVDWAEAHHDVAIHDPQGRSLRTGRIDTGPAGFSELLEMIADCGATPETTAVAVETDKNLLVVALQDAGFEVFAINPRAVARYRERTGQAGAKSDARDAAILADILRTDRHLHRPMPHPSDQAQAVKALARQHQEAIWALHQTLSRLRSVLLEFYPGAVATFPQLKHHTALAVLAAAPTPTQGRQLTRRQVVAILHRVGRRNDAGLADQIRAGLQSPALVQPQQVADALGVSVAALVAVAQTMIIGIDALEAQLAIVFATHPWAPVLRSAPGLGPVLAARVLAEIGDDPARFATTANLRSFAGTAPVTRASGKARWVQARRVRNKRLADACHWWAFAALTRSAGARAHYDRRRAAGDHHNAALRHLANTLLSKIWHCLQHQQAWNEHHAWPTPANPPAVAA

SEQ ID NO: 482378 - protein, 341 aa, unidentified
MQITTIGLDIAKNVFQIHGIDAAEKVVVRKQLRRGQVMKFFAALSPCLVGMEACATAHYWARELTKLDHEVRLMPARDVKAYVKRNKNDAADAEAICEAVRRPTMRFVGVKSAEQQGRLMQHRTRDLLLRQRTQLINALRGHMAELGMVAAQGREGLKTLLEIIAKDADERLPIDARASLIVLAAQLEALQTMIGAIEKRIVARHRANEASKRLASIPGIGVLGASAITATVTDPSAFGSGRDFAAWIGLVPRQDSTGGKQKLGPISKQGDRYLRRLLVVGAHSVLRRAKQSPQNYPWLTQLLARRPFKVVAVALANKMARVAWALLARGGTYRVPQLAAA

SEQ ID NO: 482379 - protein, 354 aa, unidentified
MSEIITVGLDLAKNVFQVHGADGAGRAVLRKKLRRGQVLEFFSQLPPCVIAMEACGGAHFWGRETGKLGHDVRLIPPACVKPFVKRHKNDAADAEAICEAVPRPTMRFVPVKSEETQGAAMVFRVRELLIRQRTQAINALRGHLTEFGQIVPQGAANAARLIAIVDDPDNGLPGEAVAILRVLVSTLRHLDTEIGKLNAEIARRARENEVAGRLMTVPGIGPLIATAIATLAPPPETFRKARDFAAWLGLTPRQHSTGGKQRLGATTWMGERSLRRLLIIGANSVIIKRQVHASAQPGTWLGGMLMRKPPGAFRVFIEPEFEPFSFEFRYLPSQLKPETLYAGAGAGAGGAGQK

SEQ ID NO: 482380 - protein, 344 aa, unidentified
MSTFAALDVSQEATAVCVVDENGRILAERKIPTCPAALSSFLARHAPGLERAGIETGPLAVWLWNELHDRGLPIICIDARHANAALKLRPNKTDRNDAAGLAQIVRTGWFKQVRIKSRISYELRSLLTAREVLVRSRVKIENEIRGLLRTFGVLFGKASKGFASRVDQIVASELDASPMMRTIIGSLAKARAALLDNIKELDRQVLHTARGDATARLFMSVPGVGPITALSVASVFDDASRFKRSSSAGAYLGLTPRRYESGEMSLSGRISKQGNKMTRKHLYEAATTMLTRTTSFCTLKAWGLRLAKRVGLKKARVGLARKLAVVLHAMWKTNTPFRLGAIAA

SEQ ID NO: 482381 - protein, 365 aa, unidentified
MSMMHQSVVPDQSYFAGLDAHERHVAVAVVDKQGGLVHRASARSAEPARLVETLTPYHTPAHPLAVVVETCPFWPWLYDLLVPVGIRFHLAHAQELEAIAKAARKRDERDASLLARMLAGGLIPFAYPKPPAQRENACLVRHRAALVRHRTMLANRIHSQLHAVGLTLPRERLLRRATRAWLRETAGPVLRPEQRRLVASHWALLRRLTRMLRQLEPAITAAAAREPAAGLLTTIPGIGAYRGLLLATELLPMTRYASEGKFVGYAGLAPITQCSADTVHHGPLPNAANRWVRGALISSIPTHLRCAPASALSQYYARQKARLGWQIARVATARQLARVIYHMLRTGECWRATPALEAPARGPRA

SEQ ID NO: 482382 - protein, 312 aa, unidentified
MPEQNTRHYVGLDVGKHQLEYHIDDTRTGELAYNADALATLIGELKKLPHPVVVCESTGGYERSVVRSLLAAGIEVCLVMPGRVRAFAYAEGLLAKTDRIDAALLRRFGQQMHPRVYVPVTAAAEELRELLDYRRLVVEQLAELTSREETAGTTLRSLLADHRSLLEQALFNVQQRLDAHISAVPELKAKAHRLRGIKGVGPVLAATMLAHVPELGQVSDRSISALLGVAPYANDSANTSRPRHVRGGRAMARRVLYMSAVCAARWNPILKAFYQRLRAHGKPAMVAIVAVMRKLACLMNRLITDPKFALAS

SEQ ID NO: 482383 - protein, 391 aa, unidentified
MKVEYICCAGLDVHKRIVVACVLKGALGEEVISKVKSFGTTTPELMEMIEWLKSCGATHVAMEATGNYWMPIYNLLEGHFELIVANAVHMKAVPGRKSDVQDAEWIAELLRHGLLRSSFIPSREQRDLRELTRHRSSLAGKRAQAANELQKSLESANIKLQSVVTDITGTSSMEMLQELTSGKNNPKELAQLAKRRLRAKIPELEKALHGNLRRHHQMIIEQLLADIGLFAAQIAELDAYIENLLRQEQEIIDRLDDTPGINRRIAEIVIAEAGTDMNRFPNQYHFASWIGLCPGQNESAGKRKSGKTRKGNRALRCALVEAAHGAVRKRDSYYGAQYRRIAMRRGKKRAVVAVAHSIAIAIYHMLKSKTAYRELCPWHRARVRRLFRRKE

SEQ ID NO: 482384 - protein, 348 aa, unidentified
MVLIGSDFHPSWQQVSWLDRETGETGDQKLVHEAGSVEKFYKQFPAGSRIGMEATGNCQWFLELMAKLGHEVLVGDAAKIRASDSRQQKHDKRDARLLVQLLAEDRFPRIWVPSRVENDLRQLLIHRYKLVRIRAQVKNGLQHLALNQGLQRKKRLWSEAGQKALCELPLAPWASRRREDLLKMRSELDAKIDLLDQAVMEAAEKNEKAKLLMTQPGVGPITSMAFVLTMGDVKRFPRGKQVASYLGLIPREYSSGGKQRLGSISKQGNSFLRMLLVEAAQGAARYDAGMRNEYLHRCHTKAKGVAKVAAARKLAIRLYWMLRSNTKYPEVVHVESSSRVPLVVRHGG

SEQ ID NO: 482385 - protein, 311 aa, unidentified
MIAHPVHFVGIDIAKDSLEIACPGLTLPSLVENHPIGFRPLLKLLAQSTAHVVCEATGSCHRALVAALHEARIPVSVVNPRQVRDFARARGQLAKTDKIDALVLVDYGHTMRPIPTAVPDPEITRLDDLVTRRAQLVEDRASEKNRLQQTSCAEALSSLNRHVRYLDGEIKRLDQRIAALISAHPGLRAKADLMISIKGVGPLTAAALLASLPELGTLSENQITALAGLAPFNRDSGTFRGTRSIGGGRPEVRKALYMAALCASRFNDILSKFYRRLRALGKHHNLVLTAVMRKLLVLLNSLLKKHAQASV

SEQ ID NO: 482386 - protein, 413 aa, unidentified
MPNTLFVGIDVSSNSCEVAFLDDEGRQLGRSFSVPNDLEGACKIGEAICLSAEAQEVSDVRIGLESTSVYGWHLRDFLFDLESLKKYSTLVYDMNPSIVAGFKKSFSRKPKTDSLDAFAIAQRVRFGQLRPYSKAHMTTAPLQQISRLRFHLVQTLTAEQNRALNMLFLKFSSYKQSNPFSRVFGKASTSVLEEFTPDEIASYSVEDLASFILENGNSRLKDPNVAAKVIQSAAKRSYRLNSKMQDAVDVTLSLTLQNIEFLRSQIKKADAVIAREVEAFPQTLTTVPGLGPVLVAGIISEVGDIFRFKDHGALAQFAGLTWTNYQSGDFEAEEHSLTKAGNRYLRYYLVEAANSLRVHNEEFKRFYQRKYKEVPKHQHKRALVLTARKLVRLIFSMLRKGQIYNPEAMNKPV

SEQ ID NO: 482387 - protein, 339 aa, unidentified
MKHWIGIDVSSETLDFALLDEHGVHLESIQVKNESKAVIKLMSAWGKRHGVAMEQSLVCLEPTGHYTLMLLNLIVEQQWKAWLAHPLDIQQSMGIKRVKNDKVDALRIAQYARTFREKARLFTAQNLKLDKLKHLLTRRQHLVRVRAMYKKHISDLNRYMDRDIQKVFDQLDKRLMAASDRAILRVEQLILAQIRGDQQSSTQYDLLRSIPGVGPQLAAYLIALTDGFHRFTDPRELSCHAGVAPFERSSGSSVRGRTQVSHKANKTLKTLLHMAALANVQREGELRTYFRRKVAEGKKPILVVNAIRNKVVHRICAVIRKGEAFKPFLENSKTRLEMT

SEQ ID NO: 482388 - protein, 343 aa, unidentified
MSNDTRIGVDVAKAVFEIAISDRPGHIVRRERAQRAQFLPFMAQQPRATVVMEACGSAHHWGRKLQDLGHRVVLLPPHHVRPYICRNKTDRTDAKGILEASRNEDIRPVPVKTVDQHVLTSLHRLRSGWMTERTARLNALRGLLRELGIFIPMGAREVVPMVWSLIEDADSDLPEALRPIFAEACREIREIEARVKQVERQLEATAEQLPAVGYLRTIPGIGLLIATALVAFIGDIRRFPSGRHFASYLGLTPREYSSGLKRNLGRISKRGDGYLRTLLIHGARSVLLHARQQQPDRLREWANNLGKTHVHNKAAVAVANKLARIVWAVWSRQQPFVLIAKAA

SEQ ID NO: 482389 - protein, 344 aa, unidentified
MTNRCQLHVEVFAGLDVSAREISVARLRSKEKTPTVASFANNASGHKALLAYLLQGTEHVRVCLEASGNYSLDLALALHAHRHVEVSVVNPRRARRFAESLGERSKTDPVDARVLCEYAVRMPWLAWRPPTARALRLRAITRAIESLGVMHTQEKNREHALKASQALPSLVIREMRRHQHYLENRMEQLRREARRLIVKAPELDRRFRLMVTVPGVAETSALQILGELVVLPGGLDARQWVAFSGLDPSQFTSGTSVEKKPRISRGGSRHLRRALYMPALVALRREPHLRAFYQRLVCRGKARLQAVVAVMRKLLHALFAMFRSNQTYDGSKLCSLELATNLAA

SEQ ID NO: 482390 - protein, 351 aa, unidentified
MVTIGVDSHKATHTVVAVDEVGRVLGEKKVRATSEGHLALAQWSARFGEVVFALEDCRHLTRRLEADLLRAGHVVVRVPTRLMAQARRSAREPGKSDPIDAEAVARAALRYPDLPRAELDGPAREVKLLSDHRRDLVNQRTRIAAQVRWHLHELDPALEIPSRGLRRKTVVAQLQQRLAGVPGVVARITRDLLVRCEQLNAQIAGLDAELRDLVRALAPSLLAIPGCGVLSAAVIIGETAGVHRFRSRAAFARFTGTAPVPVWSGASAGKVRLNRGGNRGMNCALHNIAITQARRGVGPGAAYITKQTERGKDTTAALRLLRRRLSDTVFTALRTDQATADNTAITLPQAA

SEQ ID NO: 482391 - protein, 318 aa, unidentified
MMQPILNVGVDVAKDAVVVACAEHSFPVKSVPNQRAPLRAWLKSLPQGSRIGLESTGAYHELLADLAQAQGFTVFLLNPLDTRHYAKAMGTRAKTDRVDAELIARLIAQEHMRLRAYTPPTANQRKLDRLIRRRATIVRLKGTLKLTMRHLGGFAPELKAVVGNLDALLAKIDATMAAIAACSPQHQEAQQRVETIVGVGPVVGISLTNTLERVPFRKADAFVAFTGLDPRANDSGHKAGRRRLSKRGPAELRRLLFNAAMSAIKTTVWKPIYESYRTQGWSTTASLVIIARKIARAAWSIHHYRTTFNPERITKCLT

SEQ ID NO: 482392 - protein, 344 aa, unidentified
MDISVLGIDLGKNVCSVVGLDASGAVVMRRKVRRETLIALAEKLPPCVVGMEACCGAHHLGRVFAAHGHDVRLMSPEYVRPYIKAQKNDDRDAEGIAEAATRPTMRFVELKSQDQLDMQTLHRSRDRLVGERTALINQLRAILLERGMVAPQGKRKLEQFLAVLMDEQGGAGLSPRMIVLVADARTQWAEIDRRIAAFDAEFVRWVKENEEARRLMTIPGVGAIVASALVAAVGRAESFERGRDLAAWLGLVPRQFTTGGKAKLLGISKRGNKYLRRQLIHGARAALPYVAERDTPLGRWAKGLASRAHRNVAIVAFANKLARIAWAVLRRGERFAVTGMPVAA

SEQ ID NO: 482393 - protein, 458 aa, unidentified
MGPEVLEIDADGDGEQVVERVAAVDVAKASGMLCTRVPHASVAGRRVTRVWEVRSTTNAIIALADQLVRERIERVVVESTSDYWRPFVYLFEARGLCVWLVNARDVKQVPGRPKTDKLDAVWLAKLNERGMLRRSFVPPAEIRRLRDYTRLRIDLVEDRSRQVQRLEKLLEDALIKLSTVATDIMGVSGRAMIDALIAGERDPHVLAGLARGRMRVKRAALVEALTGRFDDHHAELASMLLDQIDALTAKSEALTLRIDQLIAEIASAQAPVVDPASGSGRDGGGPSDPAGVSLSAVARLDEITGVGLHAAHVIIAEVGLDMSQFPTAGHLASWAKVCPRTIQSGPKRRSGRTGKGNPYLKRVLGEAAAAAAKTDTFLAERYRRLVRRRGKLTALVAVERSILVIVWHLLADPTARYADLGADFYASRINKDRKTRNLVYQLQALGHHVTLQPIAMAA

SEQ ID NO: 482394 - protein, 341 aa, unidentified
MEKATIIGLDLAKRVFQVHAASKDGRPVLRKKVSRAQLLGFLAKQPPAMVAMEACATAHQWGRAIGGLGHEVRLVPPIYVKPFVRRQKNDVADAEAIAEAASRPTMRFVALKTEEQQARSMIFRTRDLLVRQRTQLVNALRGHLAEHGIVAAHGLAKVKVLATAMRDTGSLHPLVCELGERYLEHIARLDVEIAELDKRLRRSSKDDETLKRLQSMPGMGPITAAAIEAFAPPMATFKRGRDFAAWLGLVPRQHTTGGKPRLGRTSKMGQRDIRRLLIIGAMTIVRWAVRKGAARGSWLARMLAEKPRLVAAIALANKMARSVWAMLSKGEDYRGSALAPA

SEQ ID NO: 482395 - protein, 355 aa, unidentified
MYYSGIDLHKDMSFITTIDDSGSIVKQSKLPNVEYAILNYFFSQGSDHKAVVESTSNWYWLSDLLKDHGIELILAHAKYLKAISYAKVKTDKVDSQTLAQLLKMNLIPSAHQISLEKRGLRDMMRARLRLVHKNTSCLNSIHRLMEKFNFSIPDNRPMHELPTLDLLKELPFDNEYKFQLDILIEQVILLNSQIKALEKSLHPLLIPNPDIQRLLYVPGIGKVLAFTIYLEVDGIERFPNVNQFYSYCRLVPGADNSNRKQKHKSGNKDGNKYLKMAFTEAGFRAVQYYKEIKQFYQSKSRKKHNNIARILVAKELAKICFYLLKDNVDFNNTFKGIKLSKEKSKQWPRLANPAA

SEQ ID NO: 482396 - protein, 332 aa, unidentified
MDNCMGIDVSKASINVHISKNSEDLQFVNSVKGFKSLHAKLKKIYKKEIEDNIFIFEPTGSYSEVLRKYCYQQKIKCFIINPKQFSNYAKALGVEVKNDIEDARVLSKALLIAKDHQIRVPVYDEDVERIKELMRYYKFTTKQTTQQKNHLESLTSKDGDLFAIKELKKSIKESQAKEQRVLDQMQMVIDDNPLYKKAYENITSIKGVGQIGGIALLHLFLKYPEANQRQITSLAGLNPIYKQSGTSVQSGYKISKAGSSMYRGSLFMGVLTAVRFEPTFKTFFNRLIANGKHTTQAHIAVMRKIIITAHSLYKNDKKFEQNFGSQEVNMTE

SEQ ID NO: 482397 - protein, 334 aa, unidentified
MEQVTTVGIDLAKRVFALHGVDGAGSVVLRRTVQRDELVELVAGLSPCLIGMEAGSGAHEWARRFQAFGHTVRLMAAKFVTPYRRNGKNDGNDAEAICEAVGRPGMRFVPIKSAEQQAVLAVHRVRQGFVEERTSTINRIRGLLAEFGVVLPLRSESIRRHAREAAETLPDIARRPIQDLCAHLRELDARVLAYDREIERLARQSEAARRLMKIRGVGPLSALAIVATVGTARDFRSGRQFAAWLGLTPRQHSSGGKSRLGHITKRGDAYLRTLLVLGARSVLNTAMRHKDRISRWVLALQTRRGYHRALIAIANKNARIAWALLSRNQELRTA

SEQ ID NO: 482398 - protein, 324 aa, unidentified
MQTIPIGCDISKDKIDLCVWLNDGKQEYLLIGNNQKGYLKALAEIKRLNIKPHICMEATGIYYEGFADFMAENGHLVSVVNPLKIKKFAESEFQKTKTDRQDTRLIACYCLKMQPKADYIKPNPEQYAVRRNIALLKQLNADLNGIKNRIKVAKDEFVRQILTNQQKEIKKHIKEVRQHLAKITEQTAAGQVAEKLESIPAIGQTTALILAHYLNMYRFDSENKFVAFAGLAPGKHESGSSVRRPDKLTKYGNRTIKGALYMPAMVAYRFGYFGAFVNRLRNKGKPPKVILIAIMRKLAAIAWNLWKNGQTFNPARYGLNSKTA

SEQ ID NO: 482399 - protein, 362 aa, unidentified
MNAVGIDVSKGKSMVAIMRPFGEIVSTPFEIKHTTSDINSLVELINSVEGESRIVMEHTGRYYEVLAHQLSEANLFVSTINPKLIKDFDNDSLRKVKSDKADAVKIARYALDKWQNLKQYSVMDELRNQLKTMNRQFGFYMKHKTAMKNNLISILDQTYPGVNTYFDSPARNDGSQKWVDFASTYWHVDCVRKMSLNAFIDHYQNWCKRKKYNFSQSKAEEIYGKAKELVPVLPKDAITKLIIKQAVDQLNSASTTVESLRTLMNETASKLPEYPVVMAMKGVGTSLGPQLMAEIGDVSRFTHKSAITAFAGVDPGVNESGTYERKSVPTSKRGSADLRKALFQVMDVLIKTHPQDDPVYQF

SEQ ID NO: 482400 - protein, 348 aa, unidentified
MVTIGIDAHKSSLAVSLIDELGRELAAREFGNEPRAHRALHAWIVRLAPGERRFGVESTGWVGRGIACFLLDQGEQVVDVRGSLTERQRTRLRGQGKSDPRDAFAIARVTAREQRLPPVRVDSLSRDLKLLCDYRAQLVAERIRSANRLHVDLVSLHPGYEKQIRTLSSGVQLERAERLLAGDTRVQATLARRRIEKLLRPDAEIKQAQRELRALVRESGSNLPQLAGVGDLIAARLIGEVGEIQRIASKARFARMNGTAPIPASTGQTNRHRLNKGGNRRLNHAIHMIALTQARMDPRARAYIERRRGEGRTRRDAIRALKRHLSDVVYQQLRYDAERRSDADVRAA

SEQ ID NO: 482401 - protein, 339 aa, unidentified
MGYFVGIDLHSNNSYIAVIDTDNNRTFKKKARNNLSEIIKLLAPFEKQIKGIVVESTYNWYWLVDGLMDNGYKLHLANPSAIKQYEGLKHSDDITDAFHLANLLRLGILPEGYIYPKHERPLRDLLRKRIHLVHHRTALILSFQNLIARNLGSKMHVSAINKINEEDLEDLFEDEYLILSAKASISTIHFLRSRIVQLEKVIAKAAKLKSEYELLKTVPGIWNILAQMIMLETGPIERFKKVGNYASYCRCVQSNRFSNSKSKGKGNRKNGNKYLSWAYVEAANHALWNYEYVKRYHQKKTAKTNNVVAIKAIAHKLARACYYIIRDQKEFDPLKAFAK

SEQ ID NO: 482402 - protein, 353 aa, unidentified
MMIIGCDFHPSFQQIAFVVQETGEYGERRLIHRGEAVAFYRSLAGKSVRIGLEATGNDRWFHKLMSELGHELLVGDASAIHASAPREQRTDKRDARHILQLLVENRFPAIWQPPVANQEQRQLLLHRCRLVRMRTRIKNQLDSMAKNEGLTGSRSWSAKRRQQIEALPLTGWYAERRKDLLELLEEMDKRISPLDKAVEAAAEQNAEAQLLMTHPGVGPVVSLTYVLILGDWRRFPRGKQVGSYLGLIPAEASSGKHQQRMGHIAKQGNTLLRWLLVEAAAKAQSKDPSWHRQYLRLSMNKHHGVAKVAIAHKLAVRLYWMLRSGQNYRQIMERGSHAGQSVLAGGCGIRPIN

SEQ ID NO: 482403 - protein, 392 aa, unidentified
MYIVGIDIGKNHHEASIVSPEGKQIGRSLRFATTHKGADSLMRFIFKNIGNSPCVFGMEATGHYWYPIYSFLKAKGYTIYVINPIQSDSLRKMYIRQTKNDSIDSFLIAEVIRFGQFGTTSMADENILAMRQLCRYRDSVISSRTEIKLRIGTIMEQIFPEYEKQFSSLWVSTSMGILEKYLTPENIENAPIDELFEIIKDKSHNRLTKAKAISIKEAAADTFGIKIAQDAFSFQLKQLIDRMNFLDKQIEALDIEIMKYYEQFDCYLHTIPGIGIIGAATILAEIGDISRFKNSSALVAFAGIDPTVRQSGEFNSTHNHMSKRGSPYLRHAIFLAATTCSFHNSPLNAYYKKKRDQGKHHLTATGAVARKLTTVIYAVLRDSKPYEPKKFC

SEQ ID NO: 482404 - protein, 401 aa, unidentified
MPEQPLIQRWIGLDIHKAFFVAVGVDAEKRTVFGPHKIPNVQLENWIAKHLLPTDAVVMEMSTNTYLFYDTLVPHVGSVIAVHPPNVRLVTGVKVKTDKKAALTLTQLHAAGMLIGVWIPPVEVRELRAVIAQRSKMVRLQTQAKNRLTSLLHRTHRERPAQPFKPEQKAWWEALPLTAIEKYIVASDLETLAFAGKQIDAIGEVLRQEAAKDERVPLLTQLPGVAMLTALTILAAIGPIERFEDAKHLVGYAGMGASVHDSGQMHATGHITKAGRRDLRGAMVDAANAAVRHHLYWKKVFERLEYRLGRSKAIVAIARRLLVAVWHILTNGVADRHADETSVAASMYKLAYEIKVNNLPKGTSARAFTRQQLDRLGIGQTMDVLPWGGKKVKLPPSQLNT

SEQ ID NO: 482405 - protein, 316 aa, unidentified
MEHQQGVWVGVDVSKSELVVAVRPGGEFFTLANDERGVAQLSKRLSALGCTRIVMEPTGGYEAAVAAALWAQGLPVFVVNARWIREFARGLGQLAKTDALDARILALYAERAELEPRELPDEQTRELRALLLRRAELVEMLVMEKNRLEHAPQRLRRELNGHIDYLTKRLKRLDHDLDQMVKSSPLWREKSALLSSMPGVGPVLRASLLGQLPELGRLNRGEVASLVGVAPFPHDSGKLRGVRAIAGGRAALRRTLYMGALSAIVHNPPLRRYYFHLRDKGKPGKVALVAVMRKLLCILNVMLKTKTPWSPPCPAA

SEQ ID NO: 482406 - protein, 360 aa, unidentified
MTTTPGSVIGGFDTHKDTHHAAVIAVTGQLLADRQFPATAAGHRSALEWMQSFGVVDAIGVEGTGSYGAGLARFLTAQGHRVVEVNRPSRAARRLDGKSDRLDSEQAARSVLAAADAVPKSKSGPVEVIRMLRIARSTAVKARTQTMNALQAIIVTAPEELRAMLRDLRKRTLITRCARLRPETAVLTGLASHPDRLLIAGAKTALRGLAVRWQTLDTEIKQLTDQISTLVQDAAPSLTALPGVGPEIAGQLLITAGDNPDRLRNEAAFAKLCGVAPQPASSGKTTGRHRLSRGGDRAANSALYLIAITRLRRHEPTRAYVARRTTEGLSKREIIRCLKRYIAREVYAALPTTAQRSLPA

SEQ ID NO: 482407 - protein, 348 aa, unidentified
MTIVAEKYDYVIGIDTHARTHTYAIINTRTGAREQCQTFPVTTPGMNRAVAWLQRNIHGESIAAVEGTRSYGATIAHTLVDAHIEVVEAKPPRKKDQSSRGKSDEIDATAAAISILGKDISKLLRPRSEGTRAALSILSASRGRIDSQRTINRNSLSALLRTFDLGIDARQSLTTRQIKQISAWRDHSADSVDQKFAREEAKFLASSILAADQLLKENSKAMSELDEQLAPELQQVFGLGPVTTAWILMAYSHPGRVRSEAAFAALAGVSPLQASSGNHERYRLNRRGDRLLNKALDVVARTRMGHEEETRKYVEKRTAEGLSPKEIKRILKRYIARSIYRQLRVIMA

SEQ ID NO: 482408 - protein, 455 aa, unidentified
MYLPDWKWIPIRKELLLMSNKVIFNLDDLFISVGIDVGADFSWMSIALPNQQFVGKPYKILHNSIDSLTTAVSKIKEAEELYSLESRIFLESTGIYHYPLFCYLRDKGFNCSVINPIITKNSTNINIRKVHNDRFDSKKAALVGLKPDLKVSLMPSDLALNCRNLCREYYDLMDNRSAYVNKLQGELRMAFPQYLGIFSKVTINTSLTLLETYTSPSAFLEADKQEIIDIIKSTARFGLTYAQNKYNAIIQAATDANQFGYIIDSNIKRIRLYISFIRKYDEEINNILESLHELVDANEDADFVKQIHLIETFKGAGFLSAVSIMGEIGDFSAFSKPKQLFAYFGLDPAVKQSGKFEGTKVQMSKRGSAIARRVIHTLTLQSISISRNGEAKNPVLREYYLKKCDSKPKLVAMGAVSHKVCNMIFAILRDNKSFEIITPQEHIKQYNASKCDMAA

SEQ ID NO: 482409 - protein, 356 aa, unidentified
MIVIGADTHKSSHTLVAVDSVTGRRVGVCTVASTTAGALDALSWARRVCGGADRVWAVEDCRHVSGRLERLLISAGEAVVRVAPRLMAGARSSGRERGKSDPIDATAVARAAIREGVEQLPVARLEGAELDVRLLLDHHDDLVKARSQSQQRLRWHLHDLYDDLSIPAGALDRTVWLDRVLGRLRRSPQTTRVRIARDLVCEIRGLTRRIRELEQEIRLLVCELCPQLVAMPGCGPLTAAKLLAEVAGADRFKSDAKLARAAGVAPVPASSGRQDRHRLDRGGNRQLNLALHRLAVNAARHDPTTAAYLARKQAQGMSRMEALRCLKRHLVRRLHKLLTQPAHDQARAPETALALT

SEQ ID NO: 482410 - protein, 383 aa, unidentified
MTLDRHFRQCVGIDVSKDKFTVCLQMYDRASDVGCHTMSIDFDNTKSGFNQFVKWSRKEAVKGFPLTYLMEPTGVYYEPLAYHLHKIGQTVYVVLPNKARSFCEAEGIKTKTDAMDARCLALLGCTSRKLKPWSPPAPIYRELRQMTRFHTDLSQIMTSVMNRMESLNHMEEADKTVRKNCQKLIDEIDTLMENNDKAIMQKITEDKELEARVKRIAKTKGLGVTTVVCIVAETEGFHLIENRKQLTSYAGLDVRAKQSGREDPMHAISKKGNAHIRAALYMPALVAVRYNPQIKAAYGRICQKHPKEKKIGVTAAMRRLLLLIYTLWKNGEEYDPMRDKTHTHQKKMKEEDTELEYEPEDCIGPKRDPADWNATDEHGNPPF

SEQ ID NO: 482411 - protein, 344 aa, unidentified
MVMLGTDAHKRSHTIVAVDPAGADIGSVTVAATTDGHLRAVQWSAQFDERQWAIEDCRALSRRFETDLLSVGERVVRVPPKMMARARATARGAGKSDPIDALAVGRAALREPDLPVAQLDGPSRDVRLLVDYRETLVRQRTGFQNQLRWRLHELDPSFDPSPGSLNRYCTLEAVDAILSRHTSMVAELARRETERIRNLTGEINQLERDIEHRVSTLVPSLLAIPGCGALTAAKLVGEAADITRFRSKDAYAMWAGAAPIPVWSANNTRYRLNRGGNRQTNAALHRIAITQMRIHPDAQAFIKRRLETGSTKREAIRLLKRKLANVVYRNLLADAQPAQLAHAA

SEQ ID NO: 482412 - protein, 364 aa, unidentified
MLEFFPKRRPAMILTIKPSQYDVVIGVDVDHKSYATTYFNDEISNGRSLKMPAKPENMHSYFQKRFPGKRLLYAYEAGPTGYALHDYIVNQGQSCIMVHPAGVPKAPNSRVKTNRLDSYKLAQEAKSGKLKGIRVPSEAYRELRHLVNLRQQYSQDRRATKQRIRALILFENIQLPEALKPWTSSYRYALHQIPLKETLRFKLDLLLKDLDHARDRLLLMHRQIRKFSTHQEAIAKNLNYLRSLPGIGIVVSTYLLARIADPAYLQNVRELGAFCGLVPSENSTGDKIHKGAITHMGDSTLRSLLVEAAWIAIRKDKELGEFYYRIRAKGKGEAASRVAIVAVARKLTHRIYRVLKEQRPYVIC

SEQ ID NO: 482413 - protein, 368 aa, unidentified
MNYIIGGVDLHDNSLVVKVARNIEKPVKLSFPNTGAGRLAFIRSLKARARAAGGAGVVAAYEASCQGFGLYDDAGEKCFVLAPTEMERSTSEANSKNDERDAGRILQILRAHLLAGNDLPSIWVPDKKTRDDREVVRARLDIASKATAVKAQVQMLLKRSGVRMPKGIKNRWTRMYRAWLKGLVGSSALKFCAACALAALLRQLEFLESEIKTFDSLVEAMSEEERYAEPVREMTKQTGVGILVAMVYLTELGDLSRFKGRKQIGSYVGLAPRCRESGEAGDRKGHITHQGPERVRKMLCQAVWTRVRFDSAEKARYDRQVKRNPKHKKIAIVAAMRRLAVLLWHKGLEAQTRAGVFARAAKAPAPAR

SEQ ID NO: 482414 - protein, 430 aa, unidentified
MNDLNVIRLKEFCQFKKEIRGSTEYLIVGLDIAKERHNAFFGTATGRTLHKGMFFDNTYGGFQKLLIQTEALKVQHGLCKVVFGLEPTANYHKPLGEYLIKGGHLVVLVAAAATSKNRELLDGRWDKHDTKDAANVADLIAQGKCLYYDCPGEDLRSLRGLLSLKKRLKKEEHGLRVRIRNQLLAQYFPEMDQHFGSVTSLNVVQRCLDPSLISIMEYDEFCRTVVPGKVNMAQQRRLTQIWRAAKQSIGCIVGEAVSVEAQIMVMGLHRVRETIKIVEDKIEDICLKFPEYSFLLTIPGFGPDVSSKVLAAIGDPERFTSGKQVLKMSGFDLCANRSGKTSNSATPVISKHGKSDLRYALYQAAIISSLNYKEFIVYHTNKIRGREREKGIGTKMRVKLAAKLLIIAWTLMKKKEPFDPKHLNQKDDKV

SEQ ID NO: 482415 - protein, 328 aa, unidentified
MSAFLGIDVSKATLDVCLIRDDGGVEQPQPFANHDGGIQQLCTWLIQQCHDEVHVCMEATGHYWSQVARRLLEAGYKVSVVNPLQIKAFRDTALSRGKSDAQDARLIAQFCYLHRPAPWIPFDAAQDQLKQLCRRRQALLKMRQQERNRLQSGVTESWVIGSLERTIAFYTDEIAAIDSHIRQHLKQHPHLWHAYQLLQSIPGIGVHTAPLLLAEIRDIRAFDRANQLVAYAGLDPQPHQSGTSIHQPTRISKRGNARLRAALFLPAVVAKNRSDYFQAFVERMEKDGHCPMSIVTAVMRKLLHLVYGVLHSGLPFDPLYRQKLALAT

SEQ ID NO: 482416 - protein, 374 aa, unidentified
MILFDMNHQSVSFDLFFKRIEKQAAKFDLPVSVGMEGYGGWARPLDEMVINRGWKLLNVNNLKLARYKEIFPSPAKTDAIDARKILELMRLSPLLPQAKEILNEVIPAPQVNHHMKLLTRRRRQLVDERVTIINRMHSDLQAIAPGLLEITGSVDNLWFLNLLIARDSFKQMARMHQSGIMKIKGVGRKYAELICDWKKTAGFSSDVLLVGDMVIEDAKRVLVLSGKIKRIEVKLKDLIGQSHLASTIASITGFGHICSAELAGEIGTMKRFLSEAALARYIGMAPLDNSSGVYKGAKGGKQINRRAKAAMMTAVARHYLHTPQSKVYYEKKRAEGKKHNQAVRSLGRHMTRVIWSLVKHNKLYECREKLSEIA

SEQ ID NO: 482417 - protein, 411 aa, unidentified
MSQMLIGIDVSLRSHHVHFMDERGRDLASFSVSNDQAGANELLQNMIATAEKGNCSSLRIGMEATSNLGWHLAHFLQHRLQTERSELDAKIYVLNARKVARFKKGYDTLPKNDVIDAWVIADHLRFGRLPHAMKDVIQYEALQRLTRTRFHLMKSIARDKTYFLNQVFLKFSGLRQDNPFSNTFGSTSLAVIQELEPEQIVAMSLDALIDFLKEKGKNRFKDPEEVAQYLQKVARASYRLHKAMADPVNLSLATMLSVIKHMEAEVKKLDKEIAKLMKGIPQTLTSVKGIGPVFAAGMMAEIAGIDRFRNHHALAKYAGLVWNQYQSGEFEADDTKRMLTGNKYLRYYLIQAADSLRKNDPEYKAFYQKKYAEVPKHQHKRALVLTARKLVRLVYALLSTNQLYTPSERRS

SEQ ID NO: 482418 - protein, 355 aa, unidentified
MASITLLGIDLAKDVFQLHGLDELGRPQLKRTLRRRALVQFVAKLPACTIAMEACSSSHHFSRKFQQNGHEVKIISPQFVKPFVQGNKNDAADAEAICEAASRRNMRFVATKSVVQQDIQCLHRVRKRLVHNRTALTNEIRSIVGEFGIVFAKKRSALVEGIKGLLNGSCPREELSSEGLTLLQDLYSELLELDQRIENCELKLKKISSQPQCQRLFKVGGLGLLSVTALAVALADPGQFKNGRNFAAWLGLVPRHQGTGGKNRILGISKRGDMDLRTLLIHGARAKLRGINAKCRAERKLDPLEDWAYRLCQRQGYNKATVALANKNARIAWSISAHKTEFESHQAVASLKKGV

SEQ ID NO: 482419 - protein, 1042 aa, unidentified
MVTKRFTVEISAADEGAVKPWRKRLHDLDEDQHGARVCTGEEWLEPGGSYELPVGAVIVGCDPRPGGEEKRVRIWRLKTNGRLKVERDSTLKSRSAFGASVRGTLRRLLEAYPPAEGHQARQVGAAPPRANKWADQCCLCCQPLPARAGILERDAGRSRPRHRPGECPPPPPRENDWAQPCGKCGGWLEAGTGVLYTVGHGLGAQKRARHREECPPADERKAPPPRTNSRAQGCERCGVVVPPEGGELLHAGAGWMVRHWEGRCPQPNEDLWEIGRGEPGSFRPRPERWAAPGTVLRSRLFERADRPFPEDAPGYRRLSDDEVTAIVTTVREKRPVYCRDKDGDQPGELIGEDGWYFRIFVRPASADEAAGILDEEEKAARRRALDQRRKALFDIRLEDCTIPREPDLSNTAPVNFGAEARRSLLQRWPDDELRVDEEDAGVVWFLAHYWPTCTSNTRRRTRRGSSAIRPEKLMLRFAASTVAASAESFFRISAVVRTPQGSAQEATVGLDEQYRPIHHTPPRTRNRQLVRGHSSAAPQRASLSRGDDPRSRKPYSSHSSGSSKRTSHPQGGNFFSRSKGVVGLLYAGIDWSDKWLDCAVVDRTGALVAERRIVYAAGDDPVAQYRDFLRPLARRWRATVTGIEDANLLFSRSLAASGMTVVHVDPTRAARHRSALGIAKSDRADAAVIAAMVRNGIYRPVVSSPDAEAFRAVTQAHRAAVAARTEALHALRAALVKIWPAAVSAWSSNVGGLRNSEARAVLAAAPGPRSASALTRDQLADLLRNAGRTRSIDGEAERLHLHFCRPVMLLDPRVEQAEAVRIRDLVAAVDHADHRANDLHRDMRRRYRAHPHHMVTAGVPGIGDVYGAYLLAEIGDRPHQRFGSGRSLAAYAGVAPVTWASGSVTRVSIRRASSRVLRSTLHTAAWAMAMHSPGAGAYYRRRRAAGDAHATAVRKLGRRLVLCLYTCMTSGVPYDDSIAFAYDPASPPPRPGRPRPMSDREIARARELLGQPRATVVGTARELGVSTQTIYRHVLGRPRSAS

SEQ ID NO: 482420 - protein, 346 aa, unidentified
MTIVEDTRAITGGVDTHAGMHAAAALDPLGGLLGVREFPATAAGYADLLSWLAGFGTVALVGIEGTGSYGAGLARHLAAAGIRVVEVDRSDRQDRYRQGKSDPLDAVSAARAAQSGRAAGAPKGRDGAVEAIRALMVAKRSARAGRTQAINQARALIVTGPDELRARFARHAPAQLAGGLAALRPRPGDMPGYATRAALRELGRRAGFLEAQIARLDELIVPLVAGRAPGLLALPGVGPHTAALLLIAAGDHPGRLRSEAAWAHLCATAPIPASSGKLTRHRLNPGGDRQANHALWRIVITRMSSHPATRAYVARRTAEGLTKPEIIRCLKRYVARQVYPHLRGTC

SEQ ID NO: 482421 - protein, 429 aa, unidentified
MKIIYPRVCGIDVHKKFIVAVICISESVEPVYLKKRFSTFHNDLIRFRDWLIQNDCQNVCMESTGKYYIPVYNVLESHISNIVVANPKWVRAVKGEKDDDKDAKWIADLFKFGIVRSSFIPQKDFRILRELTRYKYKLVNMRSSEKNRYQNALTSGNCKLDMVFTDVFGKSASNIIDLILSDNPYTDEDILSKVHRNCKASSDMILDSINGTDLTPVQKSRIELVNDHIKQLSSNIQRLDKLIDLMIEPYKDYISFLCQIPGVSRNSAITILSEIGVDMNQFTSTRRLTSWAGLTPSSNQSAGKKKSVRISRAGVYLKPCLVEVAHAAVKDKSHPYYANKFNKISKRRGKKRAFIAIARKILVAAYHMLLTGEIWNPADLAEVETPVEQRIKYVKNNFKSDIKQLLNIGLTVEELTLMIQQNANIIATQ

SEQ ID NO: 482422 - protein, 421 aa, unidentified
MNQLADTAYTVYVGIDWADAKHDIYLESADGEVMEFDCISSRPEAIAAWALELHDRFGGPIAVGVELSKGPIVSALLKYDFIELFPINTTMLAMYRRAFTPSRAKDDPTDAELVVDLITRHPERFQPLKPQSVEMRKLMALVEQRYKVLSDQRRAVNRLNHALKQYYPQVLDWFREHNTALFCDFVTEWPTLQQLKRARASRVTRFFQTHNMRRKAVIERRLKAIKEGVPLTDDEAVIEPHCLQVEALVEQIRLTIRYLKRYDEAIAAITERLPDYDALFSPLPGAGKILAPRLLAAFGEDRERYPHADDLQMYSGIAPVTERSGKKTWVHWRWQCPTFIRQTFVEWAAQTINKSAWAGAYYRQQRDKGASYEVAVRALAFKWIRILYRCWQDRKPYDESKYLETLRRKGSPLLKYLANPA

SEQ ID NO: 482423 - protein, 378 aa, unidentified
MTLTTVPSPTFATDVMGNVGGVDTHKATHYAALVDARGHLLAHQEFPANERGYHAMLDWFLEHGPLEAVGVESTGSFGASLARFLTGKKVHVVEANSLNVTVRRRDGKSDRLDAEQVARAVLSQASTAIPKSKNGAVEVIRALRVTRTSAVKAKTQTFNTLWGLIIGSPSVLRDELTALSKRTLIKRCLALRPETTDLLSLASRPDRLLLAGTKTALRDLARRWRSLDEEIAALNRQIDGLVRQAAPELVALHGVGAEVAGQFLVTVGDNNNRIHSEAAFAKLCGVAPQPASSGRTTGRHRLSRGGDRAANSALYIVALVRMRRHQPTIDYVQRRTAEGLSKREIIRCLKRYIAREIYANLPRQASEPPSPVPLTTAA

SEQ ID NO: 482424 - protein, 412 aa, unidentified
MQTLIERGCGLDVHQATVVACLLMVRRDGKVQKQMRTFGTTTRELVGLREWLLSEGCTHVALESTGVYGKPIYAILEGALEIVVANAQHIKKVPGRKTDVKDAEWIADLLCHGLLRSSFVPPKPIRELRDLMRYRRKLVESQAAERNRLLKVLETANIKLANVATDVFGMSGRLMLRALIAGKATPQEMAELAKGLLRKKIPELELALEGKLEQHHRFLLELQLQRLEAAEKDLAVLEQRIRQMLEPYAAQLALLDEIPGVDWTLAAVIIAELGVDMSVFGSVSQLASWAGVCPGNNESAGKRKSSRIPSGNVYLKCGLVEAANAAARAKGTYLRDKFFRLKARRGYKRAVVAIAHKILVAIYHMLSQQVSYNDLGDLYLDKLNQNHLTRNLVHRLERLGYAVTLTLQQKAA

SEQ ID NO: 482425 - protein, 351 aa, unidentified
MSHKTAATVAPTIGIDTGKNTLHLIGLDDNGAIVLREKIARGRIAARFANVPRCLIGIEAGMATHYVARELFALGHDVRQVPPAYAKPFRQGHKNDFRDAHAIAEAVQRPSTRCVPVKTDDQLDLQALHRVRSRLVGQRTAVINQIRGFLLEHGIAVRQGLRFLRQQLPDILAKRSDVLSPRMIRIMEDLSGDWRRLDERIEHITKEIEVLASTDVNCGQLMTVPGIGPIIASATVAAVGNGTAFAKGRDFAAWLGLVPKQMSTGDRTILGRITKRGNRYLRMLFVQGARAILLRSKSWVKHSFGPWLTTAARRLHRNILTIALANKLARIALSVLIQGRSYETRIVPAAA

SEQ ID NO: 482426 - protein, 308 aa, unidentified
MPENVIGVDIAKDWIDTHCLDSGRSGRLEMTPHALKAFARRCAGALVVFEASGGYERPLAEALSAAGVAYARINPRQAREFARATGRLAKTDRVDAQVLARMGRALELSPTPPPDPARTRLTALMARRDDLTGEAAREACRLRQARDAFVRADIASLIGILKRRIARLEAEITALIKAHAPLAEAEARLRSAPGIGPITAASLIARLPELGHVSRGAIANLAGLAPHACDSGQMRGQRRIWGGRKDVRTSLYQAAFVASRYDPALKALRQRLQDAGKPFKVAIIAVARVLLTQLNAILREQRNYRPAI

SEQ ID NO: 482427 - protein, 351 aa, unidentified
MTSMTSTRRVVTVGVDTHSDVHHAAVVDEVGRPLADAGFPTTPAGYRQLLGWAEQHGEVAAFGVEGTGAYGAALARELRAAGQRVFEVDRPDRRTRRQRGKSDPIDAYAAAAAVLSGAAGGTPKTRDGQVEAIRTLRVARRSAIKARTQAINQLKALVLTGPADLRQSLTGLTTRELLATCRRLRPGPGRLTDGPDLVTAATKTTLRRLARRIATLTEEIDDLDADLRPLVTHTAPALMAVYGVGTEVAAQLLTTAGDNPDRLRSEAAFAQLCGTAPLPASSGRTTRYRLNRGGDRQANYALHIIALVRLSSHPPTQAYAARRRSEGLSNLEIIRCLKRYIAREIHHVLIA

SEQ ID NO: 482428 - protein, 433 aa, unidentified
MKVKYEDRLKQKLLAITTDTLVVGVDIAKNCQWARFVDFRGIEHDRALKFKNCKDGFETILARIQEICKKESFAKAVVGMEPTGHYWKAFANWLEKQDGITVVLVNPYATKQAKELDDNSQTKSDKKDALTIAKLVKDGRYFELYLPHDVYAELRGLSTTRTGLNKRKNALKNTITAVMDEYFPEYEKVFRCPLSGKASRHILKTCPFPKFILELGEDGVTDEIKKAVKKTVGRKKAAQLTEAAGDSIGVDYGEEAARLKLRLMLEELELLEKQTEELEGQMADTLHQTDYADFLLSIKGIGVVTLAACLGELGDPTRFDNPRQMSRMAGYNLVEDSSGKNKSGTKISKRGRKNLRSVLYQMALVMVATNEEMKQLYHYLKTREKAPLRKMQALIVISKKILTLIHTLAKKKESYAPEKVFGHVRREQLKAAA

SEQ ID NO: 482429 - protein, 453 aa, unidentified
MSRKRKNNKKKISVPELHCLSPNAAGVDVGATEIYIAVPVDRDPQAVRCFSTFTEDLHAAAKWLKACKIETVAMESTGVYWIPFFQILEAQGFTVFLVNARHVKNVPGRKSDVSDCQWLQYLHSVGLLRGSFRPEQAVCMVRSILRHRDSLVQMASSHVQHMQKALDQMNLQLHHVISDITGVTGLTIIEALLAGERNPHTLAALRDGRVKATADTIAKSLVGDYRREHLFTLRQSLAAFRHYQELIGACDREIAQHFEAFESKLDPREGSAPKSQDEQKPSDRELRFDLRSHLHRIFGVDLTRIPGINVLTTQTLLAEIGPDLSCFACAPAFTSWLGLCPDNRVSGGKVLSVKTRKVKNRAATALRMAAQSLHRSQSYLGHFYRRMRAKLGAPKAITATAHKLARIIYHMVTTGQDYDETICVKNETKNRQRLEARLRKHARELGFQLVAAS

SEQ ID NO: 482430 - protein, 426 aa, unidentified
MTHPKMKCTYVGVDSHKDTHTAVFLDCFFEKLGEITFSTLPSKFVEFLDNAREFQQENTTLFFGLEDVSMYGRTLAVFLKKEAQQVKHVNALLVARERKNQTITQKTDSVDAECAARVLLSKFGELPDALPDDRYWMLKTLVSRRAFIVKNNIALKNHLHSLLTLHYPNYRDFFPNIESDSSLAFFMRYPSPATLEGTSLEELTEFLYEAAQGHVGAGRTAEDRARIILDTLQDTAVPFQEIRDEAVRSTLRQIQANMVEIEQLRTTLARFLEQFDCTLTSMIGIDVVSAAQMLSCIGDIRKFATPAKLARYSGIAPVTYASGKKDQQFSNQRGNRELNSLFYQLAVRLTSPTGPNSKIINMFFYEYFHRKQAEGKTKRQALKCVERRLVNIIWTMLTNGEEYINPPVFDKPKEENNPCVFDKKVL

SEQ ID NO: 482431 - protein, 316 aa, unidentified
MTTTGVFVGIDVSKARLDVAVGPAGELLGVDNDARGIAELAGRLQRLGPELIVLEASGGLETVLVGELAAAGLPVAVINPRQVRDFARATGQLAKTDALDARALALFAERIKPPVRELPDAQTRQLRALVTRRRELVEMLTAERNRLGSVPAVLHREIRAHIRWLEARLKERNRDLDQLLRGSPLWREQEDLLSSVPGVGPVLCATLLAGLPELGRLNRHEIAALAGVAPLNRDSGTMRGRRTVWGGRAQVRATLYMATLSGVRFNPALRSLYCRLRAAGKPAKVALVAAMRKLITILNAMLKHRTHWSAPCPSPA

SEQ ID NO: 482432 - protein, 399 aa, unidentified
MIRNHETVDVFIGLDVGKGEHHAVALDRAGKKLLDRALPNDEARIREILAELQGHGQALLVVDQPATIGALPVAVARDAGVLVGYLPGLAMRRIADLHPGEAKTDARDAFIIADAARTMPHTLRSVQLADAQLAELGMLCGFDDDLAKQVTATSNRIRGLLGQIHPALERVLGPRLEHPAVLDLLQTWPTPEALRHAGRRRIANRLKKLAPRMGERLADEIIEALGKQTVVVVGTNAATLVLPQLAGMLAGFREGRDAVYAQVEALVEAHPLHTVLTSLPAVGVRTAARILTEVIGKDFASAAHLASYAGLTPVTWRSGSSIRADRASRKGNKVLKRALFLSAFAALKDPLSRAYYDRKRAEGKRHNQALIALARRRCDTLYAMLRDGTHYQAKTPTAA

SEQ ID NO: 482433 - protein, 352 aa, unidentified
MQYFIGCDVHTRNQVVAWIEEETGEIKKRRLEHAGEEVRKFYAQFPRGTVVGIEATFPAYWFERLLAELGHELWVGDAARIRASEVRYQKTDPRDAEGILDLLRTGRFPRIWVPSLEERDLRQLLVHRMKQVRARTQIKNQLHALAISQGVCRKGKLWSAKGRAELEKLPLLPWAARRRQELLESLDRLDAQVRELDRAVEEAGRGRPEVALLRTHPGVGMVVGLGFVLSVGPIERFPNSRHLVSYWGLNPRENSSAGRQRLGSISKQGNTMMRWLLVEAAQTAARLDPQLRRTYQRLKSRRHSGVAKVAIARRLAVRLYWMLRTRHNYAQLVHKSGSPSSAVVPPPAGSNV

SEQ ID NO: 482434 - protein, 340 aa, unidentified
MEKRYFGIDLHRNRFTCCLRLEDGRMYLTHWQLEKLPRFVKKLRPTDHVAVEITGNTRLFHDAVSPYVARVVVVDSNQFRVISRSVKKTDPNDARVLALYLSKGLLPEVRMKSKQHARLASLTQTRDTLVKQRSALKNKINNLLSARGLNLRKEALSSEKKLAEILSLPFDEIMLVELRVIADQIRSLNKSIAELEKAISEASSELEGHTGLTSIKGIGATTSAILLSVIGDVNDFPDEKHLASYFGIVPRVSNSNETERSGHIHKRGTKLGRTALVQSALIAAQYSPYLKRFYERIKAKRGAGKAIIALARKFLGIIYRTLKNKWVFEDFPNFVLAEEE

SEQ ID NO: 482435 - protein, 354 aa, unidentified
MKRTTKYVALDVHQATTVASVREESGRVIARSVLPTDPGALTEFVRGMRGARHVTFEEGTQAQWLYELLAPLVDRVIVCDRRGAPRQGNKGDQVDADHLSELLRRGALRAVYHGSADRATLKELTRTYRNLVEDATRVMLRLKALFRARGIPTAGTAVYHPRHRARWLAQLLEDGARFRAAALYAELDVLRQLRPKAKAVMITEARQDPAWRVLRTIPFLGPVRVALLLATMQTPWRFRTKRHLWAYAGLAVVTRSSADYTLSAGAPVRRRRAPMTRGLNRNHNRVLKDVFKGAATAATARPGPLQDFYHGVLARGTREELARLTLTRKLAALTLRLWKKGERYDPTKLTTPAR

SEQ ID NO: 482436 - protein, 338 aa, unidentified
MAIVGGFDLHRRQITFEYVDTGSGEVSRGRVAPADREHLRAWLRRLKGQEAAFAVEACTGWRFVVEELERAGAQAHLAEPADTAALRGPKRRAKTDRADARHLRELLMAARLPESWIPPAHVSDARTQIRLYKALVDERTAWLQRVHAILFQLGAPAVPGLARASGRGRLDLAALPPAARLAVEVALRSVDRVNDELDTLRPELARLSRAQSGCRALQAHYGIGPLTSVAIWAELGDCGRFSSSSDAVRHSGLDVTVHSSDSRRARGHLARQGPGVLRWALFEAAVCAARPASPDHAYYLQVKARLGHQRAVLSVARKLARWCHHTLRALGDQALAPA

SEQ ID NO: 482437 - protein, 409 aa, unidentified
MERLIERVCGLDVHKQTVAACVRVPGSTGAREQHVRTFGTTVADLLALRDWLEVHEVTHVAMESTGVYWKPIYYVLEERFTCLLVNAAHVKQVPGRKTDVQDCVWIAQLLEHGLLRGSFVPPAPIRELRDLTRYRKVLIQDRTREANRLHKFLEDAGIKLASVATDILGVSGRAMLEALVRGTTDPEVLAELARGKLRAKLPGLRQALRGRFRPHHAFLVSQLLAHLDYLDETITALSERIEEVIAPFADELARLDTIHGVARRTAEVLIAELGVDMNQFPSDRHLASWAGLCPGNNESAGKHKSGRTRRGNRWLRAALTEAALAAIRTSNSAFTARYRRIMRHRGHKKAVLAVAHAMLVTAYHLLARQTTYQELGADYFDRRHGERVTRRAVQLLERQGYRVTLERAA

SEQ ID NO: 482438 - protein, 309 aa, unidentified
MELTIVGIDVSKDRLDVALRPSGEVFLVERSAVGLDSLIARLRSVAPHIVALEATGGFETIVTAALAAAGLPVVVVNPAQVRSFAKAIGQRAKTDPIDAGVIAHFAEATKPELRPLPDAETQVLADLVQRRRQIIEMISAESQRHKRAPAALRASIARLLKALQKELTSVDGDIDGMVRGSPAWRETENLLTSVPGIGKTIARTLVAELPELGRLDRKAIAALAGLAPFTRQSGTWRGRSFIGGGRTAVRSALFMGALVAKRHNPVLKTFFDRLVANGKPKLVAIIAVARKLLTILNAILRDRKAWQNA

SEQ ID NO: 482439 - protein, 323 aa, unidentified
MPGSEVFVGIDVSKAHLDVALSNSDAAWRVANTEVEIQELVSRLTAADPALIVMEATGGFEIASAAALSAAALAVVIANPRQVRDFAKATGQLAKTDRIDAKVLAQFAARVRPRVRPLPDEETRALDAIIARRRQLIGMITAEKNRLGFALEPVRKRIRKHIRWLERELASVDSDLDQMIRNSPVWRAKSDLLRDVPGVGPNLARTLIAELPELGRLSNKEIAALVGVAPLARDSGVLRGKRRVWGGRAPVRSALYMSIWSASKHNPVIRVFYDRLRAKGKPPKVAQVACMRKLLTILNAMLRDGRKWDPSIPLEQLRFQHSC

SEQ ID NO: 482440 - protein, 315 aa, unidentified
MTTTSEKYVGIDVSKDKLDVAVLGQKATSAARNTKAGIAAVVEKMRQLHPKLIVVEATGGYEEALVLSLFEAGQPVALVSPQRVRQYAKARGLLAKTDKLDAQNLAEYGEKIQPRLFVAKSEAGRRLSAIIGRRKQLGDMQKAEKNRLRTAYAEMRGSIQTVIDCLEAEIKRLDAEIRDFMKEHADFGKREKILRSAKSIGPVTAATLLADLPELGKLDRKQIAALVGVAPMNSDSGKKSGYRKTKGGRPDVRSVLYMSALSAIRYNPVIKSQYDQLVKRGKEKKVAITACVRKMLTILNAMMRDQLPFRAIPAS

SEQ ID NO: 482441 - protein, 362 aa, unidentified
MREGIRWVGLDVHATQTAAAVFDSDTGEVSSRRIMGRPHELMGWLEQIPGPVRAVYEAGPTGYGLARRARAAGIDMQVCAPGHITKAPNDRVKTDKRDALRLARLHAAGELVRVYVPSVEHEQLRDVVRAREDVRGDLMRARHRLGKFLLRREIYFPGRAQAWTREHRHWLAGLHFEDLASQLTLADYLHSHDVLLARRERLDEALTQLATDSPWSTTIARLRCLRGIDTLSALGLCAEVCDFARFGSPTAFSNYLGLVPSENTSGEKRRQGAITKAGSTHARRLLVEAAWHYRRQPAVGGTLQRRQQGQEPWVIDCAWRAQRRLHGRWQRLQTQRRKRGGICAVAIARELATFCWELAITE

SEQ ID NO: 482442 - protein, 356 aa, unidentified
MSEITRVGVDLAKSVIQVHAVDGAGKLVTNRQLSRDKFLPWCAQLPPGCLVAMEACGGSHHWARKLIALGLNVKIIAAHLVAPYRLQGKGGKNDANDAAAVCEAASRPNMRFVPVKTTVQQGILCVHSLREGLKEERTASINRIRGMLTEFGLVASKSPEKLREKLTDMLEDASNDLSGLARLVVQEAYDQWKDLDERIKWCNERINAHVKDDAQAKAAKELVGVGPVTASAVVATVGDFNQFKNGAQFGAWLGLTPRQNSSGGKNSLGGITKRGDMYLRMLLIQGAKSAVMTAHMRSDPISKWLYELREKSGWQKAAVAMANKNARILWAMMTKGCRFDPRHVSVKPAGLATAMA

SEQ ID NO: 482443 - protein, 333 aa, unidentified
MKDLSTKKHFIGCDVSKDTLDFALYERGKDYREFAHIQVTNNLEGFQAMRKWLRVLKVKLSEAVMAMEHTGSYSTPLAEWCYKKGYTFVFLHPLDVKNAGARGRNKTDKIDAQFIADYVYTMREKLEPSTPESPVIKKLRMLRNERRLAINARMAFIVQNKCMDDAQAAKRASKIITELNKQITAIEAQILNVIQSEKSIKSNYELLLSIKGVGMINALVTIIATGNFTRFQTARQYAKFCCVAPLSRQSGTSIRNGDHISKAGHNEIKALLTEAARSAIQHDAQLKQYYERKRAQGKAHGCVMNAVKFKLICRMFSVQKRNTPYVDTDKYRS

SEQ ID NO: 482444 - protein, 424 aa, unidentified
MQQSAPEEFGAYIGIDWADQTHFVSLRDANSQEVKRYKLEQKPEVLSQWVNELQQQFPGQRVAVALEQTRGALIYALMSYEFFVLFPVNPKALARYREAFNVGGAKDDPSDSDLLLELVTLHRSKLRAWRPDDELTRTITLLVQYRRDLVDTRTALTHRLAALLKLYFPQALQWAGDLDTFQACDFLQRWPTLAKVQKTSATKLRQFYVSHNCRNVAVIEKRLQQIPTAQPLTTDGAVITTSVAMVQAIVSQLRPLMVSIKELDKQIAELFAKHEDYELFSSFPGAGEVLAPRLLSAFGADRDRFASAEEMQQLSGIAPVMERSGKTCWVHHRFACPKFLRQSFHEFAAQSISQSLWARTYYKRRRERGNGHQAAVRSLAFRWIRIIYRCWQMRVPYSEQIYQQALRRRGSPIAKLIPLADQAS

SEQ ID NO: 482445 - protein, 400 aa, unidentified
MKGPIVSIDVSNGNSHFQCFTQRGTKMGKVHRISHTVEGFNCLKSKIEELEKKTNEEVVAVYEATGVYTKPLERFLEKNEIKQYSISPLQSAKQRKTEIHNKKTDKKDPESIAEVYYIKELREDEKEADLYHELRTANRVYEDCLVHLRKYKVTFQSHLSIVFPGYMKLFQDGYSQISLQLLEMYPHPDRLKNKQPEKVAKKLNKHTDHSFEVCLKTAEKAIAFANKTYPGCDKEDAWVAVLVDDIHHLQDTMEEAEAKLDKIIELAKATPYYSIILSIDGIGPNLASRIIAEFGDISKFKTRGAMVAYVGNDPNRAESGDIEGYHLSISKKGNKRLRCILYLAVTCSIRSRKENPINAFYQKKRQQSTPLKSKAAKVACITKLIRTIHGMCKTGTVFTS

SEQ ID NO: 482446 - protein, 332 aa, unidentified
MTKKWIYFIGIDVSKKTLDVYAYEQTQHIKIENGSKGFKALEKWFQEHNIDVSKAVVTFEFTGGYEFKLMQYLESKSIDYCRLPGLEIKNSMGMVRGKADKVDAKRIAKYSYQKKEELKASNPINTAIVELKSLMNYRKKLVRENAGYKSSISERVEMFNVKKTDLIVKSSTKKIRENEKLIKIVEAKMFEIIKADADMLLNYNLITSIKGIGKVNAIITIVFTENFTKFNDARKYAVYCGVIPFENSSGTSLNGRKKVSHLANKNIKQELNQAAKAAMTYDEETILYAERLKGKGKHYKVILNNIKFKLILRMFAVVHKKEMYVDMYKKTA

SEQ ID NO: 482447 - protein, 397 aa, unidentified
MYENTFLGGVLMIYIGIDISKYKHDCFIATETEEHQFSFENSQSGFNELLGHFKPLVKQEMIIGLEATGHYGENLKSFLTLHGYSFMEINPFLVKKFSEAHSLRKTKTDKKDAHTISTYMRSVDYKAYHHQSYHISALKSLTRLRFKLISDRTKHYNMMTKVLDVIFPEYKPFMREQGYSETTLYILKHFSSSERIAKMNDVHFDKLRKLSMGRFNYPKFVKLKELAKSTIGVTQDHQLFKLKTSISYVEKLNRDIDETEKQITSLMDRYPTKIQTIKGIGIISAAVILCEYGDITLFSNPAEMLSYAGLDSTIKQSGTMSSTGKLVKRGSKYLRATLINIGMMTMIYNPVFYAYYHKKKQEGKHHRVAMVHLAKKLIRVIHHLETHHEDFDSSKLQ

SEQ ID NO: 482448 - protein, 465 aa, unidentified
MRTDKMLWRNRKAKKELARRLQSENPGLEVVHLHAAGIDVGNSAHYVAVRPDRDLQPVRRFECFTADLHRLANWLQNCGVKSVALQSTGVYWIPLYDILEEHGFEVYLVNARHTKNLPGRKSDVQESQWLLKLHTYGLLNNSFQPLSKIRILRTYWRQRLLHVTGAGTCVQRMQKALTQMNIQLANVISDLSGVTGQLIVRAIVAGERDPHKLAELSHPRIQASRAEIAKSLEGNWRQELIFVLQQEMEMYDTYQRRVAECDQELQKHLRSFAATAPTPVKEALPPKKKKKQNKNNPHFHLADELQRITGVDLTRIDGVDVIVAQTLVSEVGLDMSRWKTEAHFASWLGLCPDNRISGDKVLSRGTRHVLNRAANALRLGASTLLKSQTYLGAQYRRLRSKLGAPKAITAMAHRLARLVYRMLKYGQHYVDKGAEYYEQRNRQQQIEFLRKKAAQLGLQVTAPHA

SEQ ID NO: 482449 - protein, 402 aa, unidentified
MYNAVGIDVSKGKSTVAVLQPAGVIIRKPFNVNHTSSELDELAKYIGSLEGETRVVLECTGRYHEPVVKTLSEAGLFVSAVNPHLIKNFGNNSIRKVKSDPADAKKIARYTLDNWIELRQYSSMDNTRTQLKTLNSQFSFFMKQKVAAKANLIALLDNTYPGVNKLFDSPVRDDGSEKWADYAYSFWHVDCVRKIGLKTFTERYQAFCKKHHYNFQPAKPAELFLASKDLIAVFPKEASYKLLIQQSIQQLNLASSHVEELRSKMNELASTLPEYTTVMGMYGVGKTFGPQLIAEIGDISNFSHREALTAFAGVDPGVDQSGTHNSKSNKASKCGSNRLRKTLFQIMSTLLQTAPEDDKVYQFLVKKRAEGKPYYVYMTAGANKFLRIYYGKVKECIRNLEQ

SEQ ID NO: 482450 - protein, 346 aa, unidentified
MEHYAGIDVSLELSSVCVVDTQGKIVKEAKVASEPEALVAFFKALSIAVKRIGLEAGPLSQWLHAGLRQAGFETVLLETRHVKAALSAMTVKTDRKDARGLAQLIRMGWFRPVHAKSMGSQEVRALLVARKQLLGRLIDVELSIRGILRGFGLKVGQVTRKAFEARIRELVTGQPTLERIAGAMLSARASLKVEYEKLHKAVLAIVREDAVCRRLMTVPGVGPLVAITFKSAVDDPSRIAKSKSVGALFGLTPRKYQSGEKDVTGGITRVGDEMVRTTLYEAANVLLSRITRFSKLKRWGMDVAKRRGSKRAKVALARKIGVILHRMWVDGTTYRWAAAEPIAAQT

SEQ ID NO: 482451 - protein, 369 aa, unidentified
MGDYSEAFVAFDVAKMKHAVAVAESGRKGEVRFLGEIENRPTSIERTIKKLARRYCRLHVCFEAGPTGYGLCRQVRELGHDCIVVAPALIPRRSGERVKTNRRDAVTLARLHRAGELTGIWVPDLVHEAVRDLVRAREAAADDLRRKRQQLLSFLLRHGRIYEGGGHWTLAYRRWLARQAFEHAAQQIVFQEKIDAIEDTARRLARLEEQLAAIVPTWSMAPVVAAYQAMRGASFLVAVIFAAEIGDVRRFDTPSQLMAFLGLVPAERSTGDTVRRSGLTLAGNRRARRALVEAAWTYRYPARVSETLRTRREGLSSAVRDIAWKAQVRLCARYRRLSAAGKKPPVVVAAIAREIAAFLWAIGREVAPS

SEQ ID NO: 482452 - protein, 347 aa, unidentified
MIVFAGLDISLEETHVCVVDSNGKTLKEARVPTEPDAIVPVLQRFGESLKRIGFEASSLSPWLSNELTKHGLPAIIVEARHMAGALSAMRNKTDRNDARGLAQMMRTGWFRQVHVKSDDSHRIRVLLANRRMLKRKFLDIENAIRGTLKVFGVKMTRTTRGRFEEDLRERLREEDPVLQDMTECMLHARRTLYEEFQKCHRLVMQIAREDEVCLRFMTVPGVGPVTALSFKSCIDDPGRFRRSKTVGAHLGLTPKRFQSGTVDYNSRISKCGDPETRWLLVEAGNSILSNVRTWSVLKAWGMRLQKRLGHRRAAVALARKLSVILHRMWLEGSTFMPSNADLKARAI

SEQ ID NO: 482453 - protein, 333 aa, unidentified
MNKCHSNTELSSHEGTRCQFNGGTGAIKFAEGRIRPVCGLGIDVHQDFYVVVMQEGGANPKPPQRFHKEAFVHWAAKLKSRATEVYAVYEACGFGFGLQRQLSALGIQCHVVCPQKLDEHNKRVKTDGLDAKALCLRLDRFVQGNRAALALVRVPSEQEERSRAIHRQREQLVKVRKQLEAQGRSLMVNHGIEPVKSWWKQGNFGALQVPEWMKELLGNSEPILLALQEKISALTLQLQAAAALKQPRGLGQMTSVIIDREIGDWRRFNNRRQIASYTGLCPGEYSSGNTRLQSCVTKHGNPRLRAALVELACPESLRGSSPATNRSSNGKGS

SEQ ID NO: 482454 - protein, 438 aa, unidentified
MSNKVIFNLDELFISVGIDVGADFSWMSIALPNQQFVGKPYKILHNSIDSLTTAVSKIKEAEELYSLESRIFLESTGIYHYPLFCYLRDKGFNCSVINPIITKNSTNINIRKVHNDRFDSKKAALVGLKPDLKVSLMPSDLALNCRNLCREYYDLMDNRSAYVNKLQGELRMAFPQYLGIFSKVTINTSLTLLETYTSPSAFLEADKQEIIDIIKSTARFGLTYAQNKYNAIIQAATDANQFGYIIESNIKRIRLYISFIRKYDEEINNILESLHELVDANEDADFVKQIHLIETFKGAGFLSAVSIMGEIGDFSAFSKPKQFFAYFGLDPAVKQSGKFEGTKVQMSKRGSSIARRVIHTLALQSISISRNGKAKNPVLREYYLQKCDSKPKLVAMGAVSHKVCNMIFAILRDNKPFKIITPQEHIKQYNAAKCDIAA

SEQ ID NO: 482455 - protein, 368 aa, unidentified
MGKSSKLFVGMDVHKDSIDVATGDERGGEVRHYGAIGGDLAAVSRLARKLESAGGPLVFVYEAGPCGFGIYRMLRARGHECWVVSPGLTPRSNADRIKTDRRDCLKLARLARAGELTPIHVPDEVDEAMRDLVRTREDAVVMQRQARQRLGALLLRNDIRYAAKTAWTPAHRRWIAVLKLPQAAQQLAFEEYVQAVDEAGGRIARLETAIRDELQHWRWLPVVVALQAFRGIQTLHAVRIVAELGDLSRFGTARHLMAYLGLVPCEHSSGQQRQQGSITKAGNSSARRALVEAAWAYRYGARVSPIIARRQSGIAKPVTDLAWKAQLRLCARLRRLSARGLHRNKIVVAVARQLSGFVWALGQKVKPS

SEQ ID NO: 482456 - protein, 350 aa, unidentified
MDHIGIDVHKKESQIYILADGGEIIERRIRTEAERFAAVLGTRPRARILIEASTDSEWVARCLEALGHEVIVADPNFAPMYATRSRKVKTDRRDARALAEACLLGAYRRAHRLSDPQRHVRGRLGVRDALVHTRTRYISLIRALLRQQGYRVPSGSAESFADRVQAVPLPGPLLSVVAPLLAVMCHLNRQLAYSDERIEHLAVQDPRVPRLRSVPSIGPVTAAAFLAAVDDAQRFRHAHQLEAYLGLVPREYSSGDTQRRGPITKAGHSRVRWLLIQAAVSILRRHPPQADELRTWALRIATRRGKQVAVVALARRLAGILYALLRDGSVFAPPRVRPPRPTAAAALVNM

SEQ ID NO: 482457 - protein, 326 aa, unidentified
MHKSKEFIGIDISKKVFDVWSEKWGYKQFKNTSEGFSAFLLLLTSQSWCVMEFTGSYYLQLALFLHDNDVAVSVVNPLVIKRFIQMKLQHNKTDKSDARMIVRYAKEQPLSLWKPQPQYIRDCKDLHTVISLYHKQRTALKNKLHSFVDQGLKGKVVTSVKRHIRQLDAEIKLLESQLETIIKTHEQELLSNLLSIPGLGRKTAILLIVCTNGFKTFENSRQLSAFFGLSPVIRASGSSVRGKTRISKRGNPMVRNHLFMCSFTAYSKNHQCKALYERIVNKGKSKKLALIAVTNKLLAQSLAIAKSGVRYDPDFKSVNPSNNFSF

SEQ ID NO: 482458 - protein, 344 aa, unidentified
MEKYSCIGMDTSKQIFQLHGVDGSERVILRRKLKRREVLRFFGGLSPTMVGMEACGGAHYWARELAHLGHEVRLIAPQYVKPYVKRGKNDAADAEAICEAMSRPTMRFVPVKSAASQAALMLAGLRERLVRNRVQLANAIRGYAAEFGLVAARGRARIEPLLSRLQADQTIPALARELFAEQAKEYAQLEAQLATIDARLMAWHRANEPSRRLAQIPGVGPVIASLLAMKTPEPHAFRSGRQFAAWIGLTPKNHSTAGKTRLGVITRAGDETLRSLLVVGATAVIWQVRRGTGRGASPWLLALLRRKPPKLAAVALANKIARIAWKLMTTGETYHAGRALPAPA

SEQ ID NO: 482459 - protein, 358 aa, unidentified
MKLQSNKISFKGQNIYVGIDVHLKTWSVTILLKDSNYKKTFTQPASPKALFEHLKKNYPGGIYHAVYESGFSGYSSCYELRDLGVDCIITHAADVPTSQKERLSKTDAVDSAKLARSLSNGELKAVYLPPKDKLGDRELMRTRQTIMKDICRVKCRIKHLLYTNGVSYPEPFAAYRSHWTRAFIKWLREEVTLLSGKRIALDMMIEELEYYRKLLLRANREIRILTKSEAYAEAYNRLIAIPGIGMITAMTILTEAVTPDRFTGLRRFISYLGLVPTMDDSGENENAGEITPRGNQKIRRMIVESTWTTIRYDREMASAFGKYCQRMKKNQAVIRVARKLATRLWHVFKYGEDYKECQ

SEQ ID NO: 482460 - protein, 351 aa, unidentified
MIVLGADTHKRSHTIAAVSAPAGELVGEQTVQVGAKGFAALVLWARELGSERVWALEDCRHVSGSFERFLIERGERVVRVTTKLMADSRRRARGRGKSDSIDAIAVARAALREGLDALPAAQLQGPELDLRLLVDHRERLVRQRVALNNTLQWHLHDLWPELQLPGSSLFYGTWGPRVARRLARAEQTMRVRIARDELRRIRELSHTITALEAEIAQLVAQIAPHLLAEPGLGPLTAAKLVGEIAGVGRFASDAKLARAAGVAPIPVSSGNTNRHRLDRGGNRQINATIHRIAVTRLRCHAETQDYIARKRAEGKSTKEAIRCLKRHLTRRIWHLLQAAPPGPGHPHPSMS

SEQ ID NO: 482461 - protein, 348 aa, unidentified
MFIVGIDIAKRSHEAIIIAEDGQVVRKAFSFRNNCTGYNLLLEQVRRLTLVKSQIVFAMESTAHYWLALYARLLKDGYAVMVLNPIQSHSLRELYIRKAKTDARDSLIIADLVRFGRCKASNVPQDKILALRELCRSRAYLVDMAADLKRKLIALLDRIFPEYESLFDSVFSKASIAVLSKYSTPQKAKNAHLGKLTDILMESSNGHFGEWKAHQLKEAACSSFGIDDSGGVYSTLLGMFLEQILSLTAQADSLEKQISVFFQEFNNPLTSIPGVGTVLAATILSEIGDITRFSSADKLLAYAGLDPSVKQSGEFKSNQNRMSKRGSPYLRRAIWLASTVAVHRDPMF

SEQ ID NO: 482462 - protein, 340 aa, unidentified
MNATTYGLDVAKHVFQMYWVDAQTGEIANRRFRRDELISFLAQRPAGRVAFEACGSAHWWARKIKALGHEAVLLHPKFIRPFVQTNKTDAADARAIWTAVQQPGMRTVAAKTEDQQAMLALHRMRSLLIKFRTMQVNQMRGLLYEFGASFRVGRAAGLAEIRARMTELEDTLPGTMLSSLQDQLRRIDGIEQDIDQLEKQIGSWHKREAECQAIAAVPGIGRLTATALVATIGDAKTFKSGREFASFLGLVPRQSGTGGKVWLGGISKRGDPYLRTLLIHGARSVMYHSKTPTGWQKAILERRPANIAAIALANKMARTAWAILAHGNAYEKDHTSVRPA

SEQ ID NO: 482463 - protein, 344 aa, unidentified
MAVIDGEGKKVYKKKLPNDGPILLAGLEPYRGDLRGVVIESTFNWYWIVDLLMDEGYKVHLANPAGIQKYKGLKHSDDRSDALWLAEMLRLGILPEGYVYPKEDRPVRDLLRKRMHLVRLRTSLINSLQNIIARSVGGFLSGNKMKQLTKDHVAEVLDGEEYLALTGRVSKEVIDHLTRQIKKIEKAALKKVRPLPQYRYLVTMPGVGEVLGLTITLETGDIGRFVGVGNYASYCRKVPVSWTSNDKKKGRGNKKNGNKYLSWAFAEAAELARRNDALVRSWYNRKVAKTNMMVARSALAHKLARAAYHMMKEEAPFDQNRLFGYSVGPGGGTDKGVGKTTRLD

SEQ ID NO: 482464 - protein, 412 aa, unidentified
MVSVGIDVSKEKSMVCILQPYGEVVMSPREVNHTEAEVNGLIKSILSLPGEIKVVMEATGIYHLPILHRLKQSGLFVSVINPFVMKKYASSTLRKGKTDKMDSVRIANYGIDKWFRLTDYQPLEKSYEELKILGRQYSHYITLKIASKLSIADILDRTMPGIKKLLSAKQSSEPTKDKLSDFVEEYWHFDNIVRMNENQFVSHYGRWAKKKGYHQSENKARKIYAMAQSGIPTLSSDTPSTKMLVQEAVKVLREINRTLEIILTQMQSIANVLPEYSVVRSMPGVGAVLAPRLIAEIGDVRRFHSGSALIAYAGIDSPPFESGGFIATKRRISKRGASLLRKTGYEIMKCLKTVKPTQDAAVYQFMLKKESEGKPKKVAKIAALNKFLRIYYARVKEVYTTENYELSEKAMA

SEQ ID NO: 482465 - protein, 440 aa, unidentified
MSKRKDRVCGADVHKDLIVATIVSDDETSIQAKFGTTRAELEQFKDWLVANKCEQVAFEATGVYWIPVYDVLSSFIDTIVANPWQIKTIPNDKSDSKDSKRIASLCLNGEIKRSRIFTEDERELRTLTRARSGYIKTRTQFRNRIHKYLASNGIKLSSSIYDIFGKSGRYILDSLVEEKSIDEILDGIPSGKIRKKRDLIKAALGIGINEISRMLVRDTLDLLDNLEVKIEATSREIFNKLQSKSKDLAIVMSVPGIGFVAGSIILAEIGDYRDFQTPEQLAKWCGLNPGENESAGKRRQCGVTKHGSKYLRTVLVEVAHVVARMGNSRLSRFFQRLKRRKNYNVAITALARKLICLIHHLLANQEMYQEEDCEKGEPKPDVGDHESSSSSMERLEDKVAAIVDAFYHLNARDRKDALKDKFGALPVSEFVPRRPYDGGG

SEQ ID NO: 482466 - protein, 348 aa, unidentified
MTIVDAARPVTGGVDTHLDLNVAAALDPVGGLLEVAEFPATAAGHRRLLGWLAGFGPVTRVGVEGTGSYGAGLARYLRTAGVEVVEVDRPNRQARRRAGKSDPLDAIEAARAALSGRASGAAKTRDGNVEAIRALVVAKRSARSTKIATLNQIRHLSFTAPEQLRERLKGVSRQQLAARAAALRPSQREGADPVMTATKTAIRLLGRRVLALDEEKARIDALLSGLVIQTAPELLTLHGVGIDTAATLLVTAGDNPGRLRSEAAWAHLCGTAPIPASSGKVTRWRLNRGGDRQANCALWGIVITRLRNDPRTRAYMTRRLAEGRSKPEVIRILKRYVAREVYHHLPRP

SEQ ID NO: 482467 - protein, 338 aa, unidentified
MNKLTRIGLDLAKNVFHLVAFDAQGKEIKKKMLRRSQVLSDFAQLPPCLVGMEACASAHYWAREMELLGHTVRLIPPQHVKPYLRGNKNDYNDARAIAEAVTRPGIHFVAIKTPQQQDIQALHRQRQGAIADRTALCNRLRGLLGERGLVFPKGLSALRRRLPAILEDADNGLSDTCRRLLARDYQCLQELDDHIDAYTQELRLHSQQSDACQRLQSIPGFGPIVASVFHSQVGDGRAYRRGRDVAASIGLVPKQHSSGGKNVLLGISKRGDRYLRSLLVHGARAVVIQAAHKDDRLSRWINKLRAERGYNKATVALANKMARIGWAVLANNTVYRTA

SEQ ID NO: 482468 - protein, 402 aa, unidentified
MNAVGIDVSKGKSMVAIMRPFGEIVSAPFEIKHTASDIHSLVELINSVEGESRIVMEHTGRYYEVLAHQLSKANLFVSAINPKLIKDFDNDSLRKVKSDKADAVKIARYALDKWQNLKQYNVMDELRNQLKTMNRQFGFYMKHKTAMKNNLIGILDQTYPGVNTYFDSPARSDGSQKWVDFASTYWHVDCVRKMSLNAFIDHYQNWCKRKKYNFSQSKAEEIYGKAKELVPVLPKDAITKLIIKQAVDQLNSASTTVESLRTLMNETASKLPEYPVVMAMKGVGTSLGSQLMAEIGDVSRFTHKSAITAFAGVDPGVNESGTYEQKSVPTSKRGSADLRKTLFQVMDVLIKTHPQDDPVYQFLDKKRAQGKPYYVYMTAGANKFLRIYYGRVKEYLASLPES

SEQ ID NO: 482469 - protein, 437 aa, unidentified
MNKPTTPTPHQDDYAAYIGIDWADQKHDVCLWAAGAGRVEHTVIEHTPEALADWVHGLRRRFGGRAVAVCLEQTRGALIYHLMQYEFIVLMPLAPKRLARYRESVTCGGAKDDPTDADLILDYLIKHRDRLRVWKPDDALTRQIGLLSEQRRKAVDLRTGLSNALRQQLKGYFPQVIAWLHDTVDNRLAADFLLKWPTLGDLQRAKPQTIRRFFYAHHSRRMDRIETVIEQIRDARPLTTDTAIVQASVMSVRTLARLLKDLADAIDGFDRRIGQLFATHPDAPIFQALPGAGKALAPRLLAAFGTDRDRLDSADPMQSYCGVAPVTQRSGRTCVVHRRWACSKFLRQTFHEFAKCSLPCCAWARAYYQQQRDKGKGHHTAIRAVAFKWIRIIFRCWKNRTPYDEATYLRSLRRRGSPIAALLPVNATDPPRGKPDA

SEQ ID NO: 482470 - protein, 323 aa, unidentified
MNKGIKYFGIDISHLVFDVTDSDGNYHQFKNNPSGFKKFTKLLNDNSHCVMEATGYYHYQLAYHLLESGIKVSVENPLAIKRFIQMKLSKIKTDKSDSKLICEYAKQVELKLWKGNSKHQTECLQMIRLLAVYTKQSTMLKNKLHGEAVLGNPSKTVVGSLKRSLKQVQKEMKMLEDKLMILVKEVHQDVLTRLKSIPGIGNKTALMLVVLTDGFERFNSGSELCSYAGLTPVTRQSGSSVNGRPRISKIGNQKLRNLLFMCSFNACKYNKACRDIYERIVAKGKSKKLALIAVCNKLLKQAFAIAKSGLIYDETYRSTLVKS

SEQ ID NO: 482471 - protein, 425 aa, unidentified
MKIFLYSGVYCIYKSIYKGIVMDTSPTMTINPQLTKAAGIDIHSRTIIVYYYQHDQPENTQQYGTYTCDLETIRNDLQRYNITDVIMESTGIYWIALCSLLTAAGVHVCVVNPWFIKNMPKEKTDKKDAKWLCKLLVNGLVRNSYLVPEDQRAFRELCRQRTKYTQQIAQSQNRILKHLECRNIKLRSVVSSMHTKSAMEIVQALAQGETDIERLVSLCRGKLTVKQNEMRKALVGVLTNHDRDMLQTLLDDIAHYRRQITKLENAIRHHTETVNKELVANLQTIAGISQRSTEIILAEVGDTVDAFSTPDKLAAWVGLAPGNNESAGKMKYAGRRMGNVYLRSTMIQAAWGAVHTRNSYWRALFNHLNKRLPAKKAIVVIARKLIKVVYKSIKYGRAYTEYGAKAFYERFVPRTSIVLRPIATV

SEQ ID NO: 482472 - protein, 347 aa, unidentified
MLHAGLDLSRKKLDVCLLSDQGEHLDQFAVPPDVDSLRRLAGRIEEVHRQPVCAVIESMTGARIVHDTLEQQGWSVEIADAQKVKGLAPLACKTDKIDSKVLAVLSHRDLVPAIWLPDPSVREERELARFRLHLVKHKSALKCRIHSTLVNFGKPCPVTDLFGVEGRRLLKRLQVPEPWRGNITASIELIDDLERQIVEINRRLKEGHAEHPYVPLLLTVPGIGWVLAFTIAAEIGEIERFPSPEKLAGYTGLCPRVNQSGEKDRRGPLTKHGPTYLRWALLEATMHALRHPAYAERYQRTKRRLGKQRGAKVAQVDLARRLAHAIWHMLSRKEKFAPRGAAFRLAA

SEQ ID NO: 482473 - protein, 399 aa, unidentified
MLAVGIDISKSKSVAAILNQDGSMHTSPFEFHHTQPELDAFIKYILNSNQSATILMENTGHYHYPVLKAFQEAGLPVCIVNAYQIKKFGDMDLRKAKTDKKDAVRIARYALEKSYSLVPYTSMEQKYEDLRFLARQYNQRMLTLKTNKVFLLNLLDETMPGITNILPLTTRAPGTSLSVLFINRFKSYDRIKKMGKSRFLDAFEKIARKSRNRQTKTYGLAIYEAALRNITTRGENEYILAAQDQCLELVCESQKAADSIILKMQTLAETLPEYAVLRSMAGVGDRLGPLILAEIGDIRRFHSGKALNAYAGNDAPPYQSGTFESHNRHISKRGNAALRKYCFEVMQALKLTQPQDDPVYLFLLKKEQEGKPYNVAKMAGVNKFLRIYYARAMETLKQQ

SEQ ID NO: 482474 - protein, 328 aa, unidentified
MRDQYIGIDLHQAFFQACAVTASGERVWEGRFPRTVAGVAALTARCTPRSALAVEASTPTWHFADAVVGSVGDLRIVDPLKTRLKAGYAAKTDRLDARRLADALRRDSVVGIYYPPLAIRDLRELCRSRLALVHVRTAVINRLRAVLLRHGITDGRRLAKTRTDGWLAELALPPQAAASVRRLRQVLTTVRTEAAAVDREVTDLATTDPIARALQAVPGIGPVLALMIRAEVGDMGRFPTPAHLASYAGLVPRVDASAGRVRYGRVTKRGSPWLRWALVEAAIHGPRRTDRVGRWGRRLAMQKGALKARVALARVLCAEIHARWPRQA

SEQ ID NO: 482475 - protein, 265 aa, unidentified
MFDHYIAVDWAQKNMAIARMTKSAKAPSVIDVPADIKELQLYLRKLKGKIILTFEETTTSQWLYTELKPCVNEILVCDPYRNKLLSDGSKSDKTDAIKLVQLLRGNLLRVVFHSGDEFIYLRKIVSGYEDLIKSGVRLKNQRWALFRAQGKDDLKEELNHPAERFVLQDLDGGISEYEREKEQYEKEFEILRKNNEIIRCLKSIPGIGTISAVKIAALVVDPKRFPTKGHFFAYCGLIKHDKISGGHSYGKRKYIVEPPHISNLN

SEQ ID NO: 482476 - protein, 354 aa, unidentified
MIIVGCDYHPSFQQIAFVDTETGELKEQRLVHREGAEEFYRALAATGQRVCVGMEASGHARWFERLLAELRIELKVGDASEIQRKRGRKQKTDRQDAQHILNLLLKNDFPPIWVPSWENRDLRQLLWHRHRMVQARTRIMNQLQSVALNEGLRCRKRLWRAGGREQLESFRLAPWASRRRHDLLELLDRLNPTIAELSQSVEREAENNPAAQRLKTHPGVGALTALAFVLIIGDASRFQCGKEVASYLGLVPLEDSSGNRRRLGHITKQGSSMLRFLLVEAAQVTARSLPQWRSKYLHLMMRRGRKTAKVAMARRLAVRLYWMMRQGWDYQEWNKFGSHVGQPGNRHGVQSNIE

SEQ ID NO: 482477 - protein, 372 aa, unidentified
MKTKNKTNLTPSVVSTSTAPVHAGGFTIGLDLGDRNHYHCVLDVTGQILHEGPMLNDRVALALLLTRYPAATVALEAGTHSPWISRYLTGLGAKVIVANPRKLHAITRHERKCDRRDALMLARLARADKALLHPLQHGTAQAQHDLLGLKLRDSLVRTRVNLINTVRFTLKSLGHAVSNPSSEAFHKSILTAVPAECLPVVQPVLAVLTLITDQIKTLERDLVVRSKRDYPVTQRLQQIAGVGPLTALCFVLKIGEPTRFGRSRDVGPYLGLCPGRDQSGGTDKQLRISKCGDGLLRRLLVSAAHYILGPFGPACALRAYGQHLMGTSVREKKRAVVAVARKLAVLLLSLWKHGTDYEPRVPATPALVMIPA

SEQ ID NO: 482478 - protein, 489 aa, unidentified
MKIQPATKAQKDKKASKKASGKATPGKWDEMNRKQRREMMRKMQSEDLSLEVVHPHAAGIDIGNESHYVAVPPSRDPPPVRCFGCTTAELKKMAEWLTQSGIRTVAMQSTGVYWIAVYDILEEAGMEVYLVNARETKNLPGRKTDVQEGQWLMKLHTYGLLRNAFRPSQEIRTLRTYWRQRHDLVRSTGRHIQRMQKALTQMNIQLANVISDISGVTGQTILKAILDGQRDPRELAAYRDCRVEASEEEIVQALEGNWQEDQLFVLRQEQAGYEFCQKQITECDQQLAQYLARLEDRTQGATLPEETRKGRRKKKKGNPQFNLREELFRMTGVDLTQIDGIDVMTAMTVVSEVGWDMSKWKTENHFVSWLKLCPDNKISGGKVMGKGRMPTNNRATTVLRMAATTLRESDSYLGAQFRRFRTRLGPPVATKAMAAKLARLVYRMLRYGMKYVDQGAELYETKHRKQQVIHLKRKAAQLGLQIIEVAAAA

SEQ ID NO: 482479 - protein, 350 aa, unidentified
MTNNRIDYLGKKIYVGIDVHKRTYSVYCQYEGELVKKATIPAIPTALIGMFRKHFAGAEIYSAYEAGFAGFVLHRFLLAQGVKNMVVNPASIEVAAKDKVKTDKRDCRKIAIQLAAGRLKGVFVPSEEQEQERLLTRTREQLVNERTRLGLQFKSRLYQFGLIPSDDETVLSQGFMEEYLGKELPKRLKESLSTIYRVWKVVHQEIKSLEREMKHQAKADKNESIYRSAPGIGPLASRILSNELGDMSQFHNERAIFSHIGLTPSEFSSGDHRRQGHISRQGSGRLRWILTEAAWKAIKKDQKLAQDFERISLKAGKKRAIVAIARKLIGRIRACFRKGQSYELGFGLAV

SEQ ID NO: 482480 - protein, 409 aa, unidentified
MDQLIERGAALDVHRKTIAVCVRVPDERGDRGQHVRTFGTTAAELVTLRDWLEAHQVTHVALESTGVYWKPVYYVLEEAMTCVLVNATHVKQVPGRKTDVQDCVWLAQLLEHGLLRGSFVPPPPLRELRDLTRYRKILIQDRTREANRLHKVLEDAGIKLATVATDILGVSGRAMLQALVSGTTDPDLLADLARGTLRKKLPALRHALAGRFRAHHAFLVSQHLAHLDYLDEAVGALSTRIEEALAPFAADLARLDTIPGVAQRTAEVLVAEIGVDMRQFPTAQHLASWAGLCPGQNESAGKHKSGRTRPGNKWLRVALIEAASMACRTRNTAFAARYHRIARHRGHKKAVVAVAHAMLVTAYHLLARQVDYHEPGADYFDRRHAERTTRRAIRTLERQGYRVTIESAA

SEQ ID NO: 482481 - protein, 400 aa, unidentified
MLSIGIDVSKGKSTVCGMKPGGEIVYAPFEVQHTREGMSELVLLLHNSGEEVRAVLESTGSYHCPVVAALLENGIFVSVVNSLRMKRFCSQSIRKVKTDRIDAMQIALYGLAYWQELQPTRLPEDTYRELQLLARQYYQMTSMLIKAKVDFNALCDQVLPGMQELMNDHAGRHKLSDFVLRYRHTTHILEMGETRFRKDYCKWAEKKGYRNCERMAAHIFATAQNGIPVLPNAPSTQIVITEAIRVLHTVEASRDAILTQMQALAKTLPEYSLVREMPCIGDTLAPRLIAEIGDVRRFHSKRALIAYAGIDAPPYQSGKFCANNRHISKRGNRYLRKTGYEVMQSYVMHKPANDPIFTFIEKKRGEGKSGKLAMVAGLNKFLRVYYGKVTELYRSLPAIE

SEQ ID NO: 482482 - protein, 419 aa, unidentified
MAFKIFRKNCCGLDIHKTWIYACIGITDSNSRTEYKQARFSSFSKGLRELADWLAKYSCTEVCMESSGKYWIPVFNILEKTCWVTLAHPKYTKPQKGNKTDRKDAKWICDLFMCDMIKPSFIPPPDIRHLRDLLRFRMKLTYQVTGMKNRALNCLTVSNLKLDDVFSDVFGKSSRSIIRQILDYPGKSFDVTPFIHKRCKTPIEEIQAAVDGAICCEQATKLKICLDFIDEQQKRIDKLDSEIFRISEPHTAVLDLIRTVPGFSKEPLTAIRILSEIGADMSVFPTSKHLVSWSGCCPRNDSSAQKVKSTRISRAGSFLKPILVQIANALIKSKDHPEFGERYRRIKPRRGHKKAIIAVCRMLLTAIWNILSKLEPYSANGYLSDKLTEHSVVISKSEGLALLRKRGYIFKDELAGTSS

SEQ ID NO: 482483 - protein, 406 aa, unidentified
MNAVGIDVSKGKSMVAIMRPFGEIVSAPFEIKHTASGINSLVELINSVEGESRIVMEHTGRYYEVLAHQLSEANLFVSAINPKLIKDFDNDSLRKVKSDKADAVKIARYTLDKWQNLKQYNVMDELRNQLKTMNRQFGFYIKHKTAMKNNLIGILDQTYPGVNTYFDSPARSDGSQKWVDFASTYWHVDCVRKMSLNSFIDHYQNWCKRKKYNFSQSKAEEIYGKAKELVPVLSKDAITKLIIKQAVDQLNSASTTVESLRTLMNETASKLPEYPVVMAMKGVGTSLGPQLIAEIGDVSRFTHKSAITAFAGVDPGGRRIINESGSYEQKSVPTSKRGSSDLRKTLFQVMDVLIKTHPQDDPVYQFLDKKRAQGKPYYVYMTAGANKFLRIYYGRVKEYLSSLPES

SEQ ID NO: 482484 - protein, 341 aa, unidentified
MSIVGAFDVHRRQLTFEYLDTVTGELKRGRVMPADRPHLRAWLSRFAGQADVQFALEGCTGWRYVVEELHAAGITPHLAEPADTAALRGRKRHAKTDKTDTRHLRVHLMAGDLPECWIPPEHVLEARATARLYKDLVDERGGWHQRVAATLFHQGVPAAVSVAKPDGRAAAEQAFLSPAGRQATETGLRQIDRLTAELEPLRRQLDMLSRAQPGCAALRAAHFGIGAVTSVAIWAELGDVRRFGNSDDVVRHTGLDITVWSSDGKGPPGRLSRQGPELLRWALYEAAKCAARPAAPDYRYYTAARDDRGGGRATLSVARKLARRCYHTLRELGEDALAPAA

SEQ ID NO: 482485 - protein, 415 aa, unidentified
MLVAGIDIGAELHHVAIVDDAEAVVVKATPFAEDAAGYQKLFELLARAGVRGGGDLPLAPASGPTLVVMEATGHYWQNLFTALVTEGYAVALVNPLRTHCFAGEEMARTKTDSIDCLQIARFGAQKRPAPTCLPEAAAGELRELVRLRTRLIQDMVDRVNQLHRLIDLGFPEFTRYLSDPNTALASVILRQYPTAQAFRTLSPRRLAKLTYDGRHRVGEELARKLIDAARISVGSQHSQAHQTGVRYACEDLQTLRDRLKQLEAEISGQLEQHQVGKLLTTIAGIGDNTAAMLIAELGDPARFQSAGAVAAYLGLCPGHKHSGKHQPKSSALAPLGNRRVRQALWMPTLGAATQSNPWLMAFYRRLMDRGKPHKVALIAAMRKLVGAVYSVAKHRRPFVPFLNTQPAARLDYEKA

SEQ ID NO: 482486 - protein, 327 aa, unidentified
MAKRTTICAGIDTGKRKLDVALDGSSEQLQIDNTPEGYKVLLDWLRCHRVKRIGIEASGGYEQAVVAELRRKRFVVVTFQPAQVRAYAKFHLQRAKNDKIDAALIAACTAAVKKIHPPPDARLLPFAEHLTMIDQIGEDIALLKNRLETCRNLRIQQVWKEDLARLAKRERVEFKALVAAIREHSDLAERLDLIYSVNGAGMPTAVTILVRMPEIGQLTREQAAALAGLAPYDDDSGNHIGTRHIDGGRKRLRRALYTAALPASFRWNPQLIALYKRLIAAGKGHKRALIACARKLLIFINAIVARGIPWDHEPPPNMAATALPQTG

SEQ ID NO: 482487 - protein, 340 aa, unidentified
MRVYTGLDLSRKRLDWHACRVDGTLVDAGAVPPDLDGLAQLVDRLGDGDVVAVVETMNGARFIHDRLELAGWDVRIADAQRARALAPLACKTDRIDAQVLAELARRDLIPEVWLPDPRVRGERERARFRLHLVKHRTMLKNRINQTLVAHGLGRPTRHLFGPSGRVVLERLPLPEPWHGTLCASLLLIESLDEQIATIDRELRLLGVDHPYVPLLKTAPGIAWILAYTIASEIGDINRFPAARKLIGYTGLCPHVYQSGETDRRGPLAKNGPNYLRWALIEAAHTAGRTTYYKPIVERMRDRHGRRRGSALASVEIARRLTEAIWWMLTRNQPFAPAGAL

SEQ ID NO: 482488 - protein, 337 aa, unidentified
MTLYCGIDLHANNSVISVIDDRDKVLYEKRHPNDLQVIRATLEPFRDDLLACVVESTYNWYWLVDGLMDAGFDVRLAHTGAIPQYAGLKHSNDQTDTRHLAHLLRLGILPEGHIQAREQRAVRALLRRRLLLVRQKTRHHLSLQSLIVRHTGERLSANQIKALDNDAIADRLTDPIRLGGQITHLACCWHEQAIAMLEDEVLKHLQPRKEYQLLNSIPGVGKILASTIVLETGTIDRFPGPGHYASYARCVNTERLSNGKLKGRGNKRNGNKYLAWAFMEAAHYAAIWSPEIKRFYQKRQAKRHILVAKKTVANKLAKACYYMLKRHESFDVKRAFG

SEQ ID NO: 482489 - protein, 429 aa, unidentified
MRTESTPGARGPVFCGVDTHADSHWLCVLDWRGRRVLSRQFPADAAGYEALAGAIAAAGEPACVAMEGTSSYGAGLTRHLASLGMPVREALSPARTQRRRPGQGKCDEADAERAARAAMSGSKLGTPKSQDGWVDGVRCMLAARSGAVKARTSAINTARSLLTTAPEGLRSRFRGMGGPRLMEELPSVRAEGALGAALGALADLWAAARDAALDMERAIEASLEENCPALLAMYGCGPVSAAKLAVAAGDNPGRLRSEASFAAICGACPIPASSGKTVRHRLNRGGDRQANSALHEIARQRVMRDPETAEYAERARGRGKSDREVMRCLKRYVAREAYRALMHPHEIRRPEDASELVAARRAAKVSQARAASILGTSEKYISMLERGQRELRPIRRAYEAWVEAGLPLDWDRQAFEAERKMDSKKHLAK

SEQ ID NO: 482490 - protein, 346 aa, unidentified
MPETEVDTFAGIDVSARELSVALRRGKGEDKPAMAKFSNHPSGHKALIAHLLRGGRRVRVCLEASGNYSLDLALTLQAHRQVQISVINPRRARRFAESLGQRSKTDPVDARVLCEYAARMPWVAWQPPSSVALHLRAVARAIADLGVIHTQQNNRAHASAASQALPVLVVKEMQRHQKYLEQRMTRLRREALRIIAGDSELDRRFRLMLTTTGIAETSALQILGELAVLPEMLDARQWVAFSGLDPRLFKSGKSVEKRPRISRGGSRHLRRALYMPALVALRRDPCLRCFYQNLLARGKARLQAVVAVMRKLLHALFAMFRTNQPYDGSKLCCAVEMAGHAIAACA

SEQ ID NO: 482491 - protein, 350 aa, unidentified
MNQEKYIGMDVHQATISVAVMDAGGKLIMECLLETKAATIVEFLRGLHGTLSLTFEEGTSAAWLHDLLKPHVSRLVVCDPRKNALLKDGNKSDRIDARKLAELLRGNQLHAVYHGEHGVRTLKELGRSYLTITQDVTRVMNRVKAVYHSWAIPCAGTTVYAPRHRAEWLAKIAEPGVRARAERLYQQLDLLQPVRMEARRELLAESHKHAAVKLLRQIPSIGPIRSALLVALLQTPHRFRTKRQLWAYSGFAVETHDSGEYRSVRGKLQRNRERMTVRGLNDNHNRDLKNLFKSAAISASTRPGPLRDFYVARVEKGMRPTMARLTLARKIAAISLTIWKKGVEFDAQQL

SEQ ID NO: 482492 - protein, 343 aa, unidentified
MSIVILGVDLGKNACSVVGVDAAGAVIVRRSMRRQSLIDYVAKLPACVIAMEACCGAHHLGRLFKTGGHEIRLMSPEYVRPYVKAQKNDDRDAEGIAEAASRPTMRFVELKSQEQLDIQTLHRVRSRLVAERTNLINQLRAILLERGIIFPVGRRKLELGIDDVIADKGEVLSTRLHQLVGELRDEWKKLDEKIETLNGEFVALARNDPATRRLTSIPGIGVLNATALVAAVGDASSFAKARDLAAWLGLVPRQHTTGGKPRLLGISKRGNTYLRTLLIHGARAALPSLSQSDTPLGRWLKAMIERGSHRNVVLVALANKLARIAWATLRKETDFDRGYPLAA

SEQ ID NO: 482493 - protein, 358 aa, unidentified
MKYIGCDFHPSFQQIAMLDKETGELVERRLLHTEEARAFYEGLQGPVVIGIEASGNMDWFESLLAGLGQELWIGDAAAIARQEGRKQKHDRRSAALILRLMVENRFPRIWVPTLAERDLRQLLIHRHHLVRMRARIKNQLQHMALNQGWQKKSKLWSRAGLELLGNLKLEPWAGQRRDTLLAMLEDLEEKIKPLDQAVAREAEGNQMARLLATHPGVGPVTSLATVLTMGDVNRFADSRSWVSYVGLNPSEESSGQRRRLGSISKQGNPFLRQLLVEAALTAARGDKDLGRMNARLKARKHHGVAKVAVARKLAVRLYWMARTKRSYPDVVRMQGSQSHPVAEVKAEALNRPPASHQS

SEQ ID NO: 482494 - protein, 360 aa, unidentified
MQTQRNELNFEGQNIYVGIDVHLKSWTVCIMTEHLEHKKFTQPPQAAVLNNYLTRNFPGATYHSVYESGFSGFRAHRQLEALGINSMVTNAADVPTGQKEKLQKDDPVDSRKLARSLRSGELDALYVPDESTIEDRSLLRMRVSLVKDLTRFKQRIKSFLYFFGIPYPERFHKSGTHWSKNFLRWLKEEVQLSEESGTQTLAILVKEVEEQRQLLLELSRQIKQLSEKEKYSSNVKLLKTVPGIGLLTAMHFLTEMEIVERFEDTDHFAAYVGLVPNRHHSGDVKKDGEMTFRGQSVLKKCVIESSWIAARKDPALSLAYNKYVARMEPNKAIIRIARKLLNRIYFVLKNKKEYVTCVVK

SEQ ID NO: 482495 - protein, 347 aa, unidentified
MSIRMIGLDTAKTVFQIHGVDETGKAEIRRKLRRNDLIAFFEKQAACTVVMEACGAAHHWARMLTGLGHSVKLIAPEAVKPFVKKGKKNDAADAAAICEAASRPDVKFVPAKSVEQQGILALHAARSLLVKQQTMLANAMRGLATEFGLTVPKGIHKLDELMAVVDADEIIPKRAKQAIAGLHDYCNNLSDGVETFETEIVAHARRDETARRLATIPGIGPITASLIAATVGDISLFKTARQFAAWLGLVPRQSSTGGKTRLGRITKTGNREIRKLLVLGATSMVYRADGWNSAVGAWLRSVLQRRPVRLVTVALANKMARIAWAVMTRKEVYRPKGGVAAVAQAAA

SEQ ID NO: 482496 - protein, 410 aa, unidentified
MEVLYRRCCGLDVHKETVVACLRLVSGGKVNMEVRTFETTTASLIALSEWLAQNGCAHIAMEATGIYWKPVWHILADGEFQLVLANSAHVKNVPGRKTDVNDATWLAELLAHGLIRASFVPDTQTQELRTLLRTRKQLVREKASHILRVQKTLEDANIKLESVITDVIGMSGRAMIEAIIAGESDPAKLANFANYRLKASQGELREALRGRVTEHHRFLLRLHLNQIDALDAAIAAIDRQVEAGIAPFRAAVEQVSTVPGIRDIGAQVIVSEIGTDMSRFPSDGHLISWAGLCPHSDESAGKRRSNRLRKGAPWLKTTLVQCAWAAVRKKDSYLQAQFLRLKARRGPKKAIIAVAASILTAIYHMLQDGTTYQDLGSNHFQNRSKSRQTLRLVKRLTDLGYEVALKPLAS

SEQ ID NO: 482497 - protein, 358 aa, unidentified
MLKYSLGIDVSKNDFHACLSVIDRKQQVKVKASSKFTNQPRGFKELLSWINRHKKEPDIPLVVTLEATGVYYENCALFLFKAGFDVSVVLPNNAKNYMKGVGLKTKNDKIDAAGLARMGAEQCLELWQPMDEFFFTLRALTRHHQSLQELKTNINNQLHADLHSIYSSKTVIKHLKKLIVGIEKQLEEVEQEIHRHLYSHEETAQKLDHIIAIKGLGYMTVAAILAETNGFALFKSIPQLVSYAGYDIVERQSGDRKGKTRISKKGNSHIRRAMHLPAFNMVRYDVGDFKPFFERILKKHNQKMKAYVAVQKKLLVLIYTLWKKDEAFKPKRQSQTFGNEEMVPSFVLADGQNEVAPA

SEQ ID NO: 482498 - protein, 364 aa, unidentified
MDELTHIGLDVHKDTIAVAVLRSGTTTCDERVIPNTPEAVRKLFARYPDRSVLRTCYEAGPTGYDTQRLISSLGIACDVIAPSLIPRRSGVRVKTDRSDARNLARLHRAGELTAVRVPMPAEEALRDLVRAREDLKNDRRIARQRIRSFLLRYGKRYPSPGARWSFRFEVWMRALRFDEPASQAAFDHLVSAYSVRDAQLAAIDKQIEEATLCDPLADAVARLRAFRGIDTLTAVTLLTETCDFQRFATAGSFMAFTGLVPSEHSSGASRHQGSITKTGNAHVRRVLVEAAWAYRHRPAVRGAHAKRLEGQSPEVAAYSWAAQCRLSSTYRKLAARKGPNKAVVAVARELSGFVWGAMTERMAV

SEQ ID NO: 482499 - protein, 356 aa, unidentified
MYQVKPLDFTGQSIFCGIDIHKKNWSVCLRNEERELKIFSQNPEPGILAHFLNRFYPGANISIAYEAGFCGYWPQQVFATEGLSCKIIHPPDIPQPDKSRRYKTDRIDCRKLALELSKGFLNSIYIPRQSTIESRSLVRTRQQLVKDQTRYKNRILSFLNFFGIDVPEGYKKSTHFSKRFICWLEQLPLASSSKAALQVKVSVLKSIREQLGAINRKLRALAESQEYKHLIRLLLSIPGIGIQSALILATELEDITRFKNFDHLAGYAGFKPDVYSTGEKNVVKGITHQCNTLVRETLVECAWMVIGRDPALTQAYYEYKKRMHYNKAILRIAKKLLNRVRYVLLKNQEYQIGIVA

SEQ ID NO: 482500 - protein, 312 aa, unidentified
MTRIICGVDISSLSLEARIGPEGAFASFSNNPQGIAALAAFCQAHQVELVAMEATGGYEQQALALLSEQGLPVAILNPRAVRRFADSMGQMEKTDRLDAGMIAWYAQTRHSQPVCLTSASQQQLRALVTRLRQLTEVRTAQMNQSRLVTDPAVLALIEELLAVVARQIRELETSIAALIAQDPLWQHLDRVFRTIKGVADRTVARMMAEMPEIGTLSNKAISKLAGVAPLARDSGKHQGKRAVRGGRASVREILFIVASVVGRHEPDFIVFQQRLSAAGKPRKVIRIALAHKLLVRLNAKARQVRQQLEAAA

SEQ ID NO: 482501 - protein, 314 aa, unidentified
MLLTSSRKWHTTAASNDEAGARKLVDWMCAKAKAAATECRVILEATGVYHEIVAQAFHDYGCEVVIANPKRVRDYAKGKGLLTKTDKVDARALALYGSEGDELVAWQPAPPEVRTLRALQARLDALVQDLQREENRWEKAQATHTPAAVRESLQRCLIALRAERERLLRAIDDHYDQHPPLKRERDRLKTIIGIGDISAHRLLSLLRSRRFQSARQASACAGLIPIEHQSGTSVHKRARLSKQGDPRLRATLYMAAIVAARHNPPLRKVYLDLISRGKAKMAALGALMRRLVHIAFGMLKHQSDFNPALVSKQA

SEQ ID NO: 482502 - protein, 424 aa, unidentified
MKFKMQDKQNQLIERISDRHLVVGVDIAQQFHVARAVNYRGIVVGDPLTFENNEEGFNRFLEWINKLKAKNSLDITIVGMEPTGHYWINLSKWLSNEKIDVVTVNPHLVKRNKENRDNTQSKSDKKDALVIADMVKNGYYAFVRSTPESFEKLRVLMSNRDVIVKRLVSSINQLNRWVDVVFPELRQVFKDVKGKGAIATLRLFPTPIELRSMQPQDIVGKWKSVMKRQPGLKKAYLLIDLAKRSIGTHQALDAYKLHLEQLLEEYDLATTQLERVEQEVTNVLQQIPFAKKLLAIKGISEISLAGILGEAGDLSGFAHGNSLLRHAGLHLSEASSGKWKGQIVISKRGRSRLRRFLYLATMSLVMNNPEFKELHANNVKVKKIKKMKSIMKLCGKLARLFVGIAKRNESYSPEKLQPFSAQAA

SEQ ID NO: 482503 - protein, 415 aa, unidentified
MKVVYPICCGVDVHKSFLIGTIITTTGGVEPHYQKKRFSTYNNDLHRFCNWLLSNNCKNVCMESTGKYWVPVFNILEERGIATTIANPKWVKAVKGNKDDTKDSKWIGDLFRLGLVPGSFIPSKEIRILREFTRYRYKLVSMKSSEKNRFQNAFTVCNIALDSVVSDMFGKSAAAITNYLISEDSFDPEYCKSLLQRSLKKKADSVIESIEGYSITNEQKLRMKIIRSHLDYIQSAIADVDSAIDAMVAKHENLIALLQTVPGIDRNSAITIISEIGTDMEQFGSSKRLCCWAGLTPGNNESAGKKKSVRITRAGVYLKPALVQVAHAAVKATDNSYYRLKYEQISKRRGKKRAIIAVARMILTAVFQMLSTGEAWNPSDLFKVDMPQPLKEKQLEKAVKQAMKFLEKQGIFVPA

SEQ ID NO: 482504 - protein, 313 aa, unidentified
MSELYVGVDVSKEYLDVASSDGTSWRVGNDEAGHQELVTRFGAAPPALVLMEATGGLERALAVQLSAAGVALRIVNARHVRHFAKATGLLAKTDRLDAQALVHFAQTLKPEPRAIQPEQTLALQALIVRRRQLVEMLTMERNRLRTAHRGVRKDLQSSIRWLEKRLAGVDDDIDGALRECGVWREKVQLLESVPGIARVTSVSLLASLPELGELNRHQISALAGVAPFNRDSGRWQGRRSIYGGRPLVRSALYMAALVGARHNPVLRTFYQRLRAAGKPAKVALTACMRKLLVILNTMLKTGKPWGGHLSAYA

SEQ ID NO: 482505 - protein, 313 aa, unidentified
MEKNQFIGIDVSKNTLDAGIIPKEEIKRFTNDDDGCRELASWLCTVSPELIVLESTGGLEMKAAGVLSSAGLPVVTVNPRQVRNFARAMGKLAKTDAIDALVIARFAQAVQPKVRPLKDDQTLELKALVTRRRQLNDMLVAEQNRLKGSHQRVKKSITATISWLKNQIKDTDKEISDSISNNDIWRDKEEILTSVKGVGPVLSASLLCLLPELGTLCRKKISALVGVCPYNRDSGYYRGKRSISGGRADIRSVLYMATLSATRSNPVIKAFFERLKQNGKLPKVALVACMRKLLTILNAMMKTNQKWNPVIAS

SEQ ID NO: 482506 - protein, 422 aa, unidentified
MLEETRDTEEIIERIAALDIGKAELVCCTRVPSEDRPGKRLQEVSAHSTMTRSVLSMADHLRCLGVTRVVMEATSDYWKPIFYILEGAGFETWLVNARDVKHLPGRPKTDRLDAVWLCKVAERQMIRPSFVPPPQIRHLRDLTRYRCDLIGARTAEKQRVEKLLEDAQIKLSVVASDIFGTSGRDMLAALLAGERNPKVLAQLARTRMRTKISMLEEAFTGHFTDHHAFLLAKMVARVDAISADIAEVEARIDGLAAPFATAVDRLDEIPGIGRIAAHVIIAEIGLDMSRFPTAGHLASWARLAPKVKESAGKKKGSSSTGHGNRYLARILGEAAVGASKTPTFLGERYRRIARRRGKQRAVVAVGRSILTIVWHLLCDPNAHFIDLGPDFYDNRIGPERKKRNHVRQLEALGYRVTLQPAA

SEQ ID NO: 482507 - protein, 423 aa, unidentified
MRFIGLDIDRDFCEVAIAEGGELRLAGRVQTEPEALALFAQGLGGDDEVALEATGNALEIARIIEPHVGRVVLANPKAVKGITRAGPKTDKIDARTLAQLLAGGFLPAVWLPDEQTRILRRRISARAQLVRQRTRAKNQVHATLMRNLKGKPPVSDLFGARGRRWLAAQDLPADEQETVAACLRQIGFLDGEIGLVERTLAEQLLASAELRRLLTLPGVNFVTAAALLAAIGDIRRFPSARQLVSYLGLDPRVSQSGVEPARHGRISKQGPGETRHVLVEAAWHAARTAGPLRAFHQRVAARRGGNVATVAVARKLAVIAWHMLSRGQDYAFARPSLTREKIRKLELATGAERQKGKRIGVWVTKEQHRLDKELAAQAELAYRRLVQDWQPAIKGTGAAPGRASRRPSSGQAARQETAPTPAL

SEQ ID NO: 482508 - protein, 378 aa, unidentified
MTDMPYVALIGLDWADQKHDVCLYDCAAQTQEHCVIGARPEAIEAWAMQLRVRYGGQPIAVCLEQKRGPLIYALCKYEFLVLYPVNPQTVSKYRQVFTPSRAKDDPTDAALQVELLRKHRDKLTVWQPASPMLRKLQALVEWRRTLIEDIGRTTNRLVDVLKGYFPQAIDCFEHRDTMVFCDFLTQWSTLSAVQQVSDEQLQQFFCEHHSRYKDCNARRIECLRNGIPLTQDSAIVESSQLMVQALVSQLRSLLTSVRQFEAQIDREFNQLPDAAIFAALPHAGTNLAPRLLLAFGEDRTRYQTAQDLLQYAGIAPVTERSGKKCWIHWRWGAPRFLRQTFIEWANESRKASLWGKGILSSSETSWKDASSCNSSTGV

SEQ ID NO: 482509 - protein, 331 aa, unidentified
MHARAMHVCVVDAEGVTRVHVNLPCVPGRFLQVIEPYRERLVVCCECLFAWYWLADLCREQGIAFVLGHALYMKAIHGGKSKSDKIDSEKIARLLRGGTLPQAYVYPKEMRATRDLLRRRMFLVRQRGQALAHVANTFTQYNVATPEKKLSYHKNRVGVVDRFQDQSVQRAVQSDLQLAEHLDEQLRGIELYLIQHAKIDDPQAFARLQTISGIGPILAMVIVYEAHDIGRFGSVQQFVSYCRLVKCSHESAGKKTAGHGNKIGNAHLKWAFSEAAVIMLRESAGAKKFVARREKKHGKAKAISILAARIGRTVYWMLKRKECFDEARFLK

SEQ ID NO: 482510 - protein, 343 aa, unidentified
MKLSRVGVDLAKNVYQLHGVDRHGKTVWKRRLRRGQWLQALLDKAEPGCEIGMEACTGAHHWARQLQSRGYTVRLIAPQFVKPYVKSNKNDANDAEAICEAMSRPHMRFVTVKSVDQQDIQATHRVRTELKDHRNAKANQIRGLVAEYGLVAPPSLLALRRTIPEWLEDAENGLTGYFRSVLHGLWNDLLTLEDRFKELDKEIEKLARSNEVTKRLQQLRGVGPIVATALVATVGTGEQFNNGRQMAASLGLTPRQSSSGDKRRLLGISKRGDVYMRTQLIHGARSVVSQAKHRDDPLSRWVTDIAKRRHSNVATVALANKTARMAWAMLHNETDYDPNLAVG

SEQ ID NO: 482511 - protein, 465 aa, unidentified
MRTDTKQWRSRKEKKELLRRLQSENPGLEVVHPHAAGIDVGNSAHYVVVRPDRDPQPVRRFECFTADLHRLADWLEICGVKTVALQSTGVYWIPLYDILEEREFEVYLVNARHTKNLPGRKSDVQESQWLLKLHTYGLLNNSFQPPSKIRVLRTYWRQRLQHVTGAATCVQRMQKALTQMNVQLANVISDLSGLTGQLIVRAIVGGERNPRKLAELSHPRIQASRGEIAKSLEGNWRQELIFVLQQEIEMYDTYQRRVAECDQELQKHLTAFADTVPPPAKEELPPKKKGKQNKNNPHFHLADELERITGVDLTRIDGVDVMVAQTLVSEVGLDMSRWKTEAHFASWLGLCPDNRISGDKVLARGTRHVLNRAATALRLGASTLLRSQTYLGAQYRRLRSKLGAPKAITAMAHRLARLVYRMLKYGQHYVDKGAEYYERRNRQHQLEFVRRKAAQLGLQVTPIQA

SEQ ID NO: 482512 - protein, 481 aa, unidentified
MGNQATGPETNQRLTRKQRKDLGRRIWSGNPGLDVVHRDAAGIDIGSREHYVAVGPDRDPDPVRSFGCFTADLLRLAEFLQQCGVRTVVMQSTGVYWIPVYDVLEQAGFEVWLVNARDTKNLPGRKSDVQESQWLLKLHTYGLLRRSFRPTPDIRAMRTCWRERAEYVQQAGTCIQRMHKALTEMNVQLGTVLSDLSGTTGMSILRAIVAGERDGRKLAEFRDPRVKASAQTIALSLEGTWRPEQLAILKRQLADWDHVQEQITACDRDLQAMMQQIPAAAVAPEPPPATTGNPAKKRRRKKNGKSSRNEPQFDLESELKRLTGVDLTRIDGVKANTIQTVITEAGLDMSKWATEQHFVSWIGLCPRNDLSGGKVLNRKTRKVVSRLATALRIAATTLRESDSYLGAQFRRFRARLGAPKAITAMASKLARLIYRMLRFGQEYVDRGTAHYEEKHRQQQIQFLTKKAAQYGFTLAEAAKTA

SEQ ID NO: 482513 - protein, 316 aa, unidentified
MARPTLSNVNVGIDTGKTQLDVCIHETRQFVSFANNAKGIRQLVLLLDMFPVERIVIEATGRLESIFVEAALARGLPVIVMQPIKIRRYAGAIGLLAKTDKLDARLIAEFAAVVKPPFRHPVDGNTRYIRDLLVRRRQLLRISTMEKNRLQIMPGHLTDDIQQLIKELQRQVKQIDHHLDEAVQVQSEWQAQFERLVAVPGLGPTTIYTLLADLPELGKLTARQISALVGVAPFNRESGKMRGRRRIKGGRASVRTTLYMAMLSAVRFNPPIRAFYERLLAQGKHKKVALTACMHKLIVMLNAMVRDQADWRFQEN

SEQ ID NO: 482514 - protein, 364 aa, unidentified
MRDPIQQPERVTLGVDTHAEQHVAAALDERGRLLGTCTIPTTTSGFAELVRWASAYGELGQVGIEGTGSYGAGLARWLGSRHIAVVEVDRPDRRTRRRRGKSDSVDAEAAARAVLAGIATAQPKAGTGAMEMMRTLRVARQSAVKARTQAANELHALVVTAPDALRPQLRQLRLPQLVIRAAAFRRSTELSTPTAATKLALRSIALRYQHLSVEIDELDKHLDKLVAVAAPTLVAIKGIGTDIAATLLIVAGDNPERLASEGAFAHLIGVAPVEASSGKITRHRLNRGGNRQGNRALYLLAVGRMRWDPATRAYVARRTAEGRTKPEIIRCLKRYIARELYPVLLAATSILVRLDSSTAHSAAA

SEQ ID NO: 482515 - protein, 334 aa, unidentified
MQNVALIGIDLGKHSFHIHCQDKSGNALLRKKFTRTKLMQFLVTCPSSVVVMEACAGAHFMARRISDIGHDVKLISPQFVRPFVKSNKNDFIDAEAICEAASRPSMRFVQPRTETQQAMRALHRVRESLIRDKVKTTNQIHAFLLEFGISLPTGDAVIKRLSLVLAEHEIPEYLSRLLMKLHAHYLYLIEQITELESELNQSIKADATAQRIMTIPGVGPITASLLSSQLGDGKQFSCSRDFAASTGLVPRQYSTGGKSTLLGISKRGDKNLRRLLVQCVRSFMMRLEHQQGRLAEWVRKQLDNKHSNIVACALANKLARIAWAITVLQKEYQA

SEQ ID NO: 482516 - protein, 484 aa, unidentified
MGKRKKSTFERLTKGPLNRKQRRELGRRLVSDDPGLKIIHPNAGGIDVGNESHFAAVPADRDAQPVQEFGSWTADLHRMGKWLQSCRIDTVAVQATGVYWIPLYDILTEHGIRVVLVNAQHTKNVPGRKSDVQESQWLMKLHTYGLLRDSFRLAENLEGVRTIWRLRDRHVKEAGRAVQHMQKALTKMNIQLANVISDISGVSGRAIIEAILKGERDPYRLADLKHERIQASREEVARSLEGNWRKDVLFELQQAVDSYQFAHRQMQECDGKLETYLAMLPTRVIDIAGQPNLQPTAVARKTKKAKKPKGNAPAMDLAAELKRISGVDLTSIDGIDVMGAQTILSELGTDLTAFATEHQFASWLGLTPSKDISGGKVIGRSRRKVQNRVAMSLRMSASTLLNSKSYLGARYRHLRKHLPTAAAAVKAMAHYLALLVYRMLTKGQAWVDRGAAKFEQKRIDWELSSLQSKALANGFKLVPIAEAQ

SEQ ID NO: 482517 - protein, 409 aa, unidentified
MIFVGDDWAEAHHDICVIDEAGKKLAKRRVPEGLDGVNQLHALVAAHASDPAEVVVGIETDRGLFVQALIAAGYQVYAINPLAASRYRERHSTSGAKSDPGDALVLAELVRTDRHNHRPVAGDSELAEAVKVLARAQQNLIWVRQRQLNTLRSTLREYYPAALEAFGDDLGSRDALAVLGRAPTPALGKALSAAKIAAAIRAAGRQRNVETRAGEIREHLRGAHHLEAPATLAKAYGATVKATVGILTEMNAQLAALEEELKGSFETHPDAEIIVSLPGLGTVLGARALAEFGDDRTRYDDAKARKSYAGTAPITKASGKSKVVLARFARNSRLADACYLWAFSALSASPGARAFYDAHRAARGPNDKDAHSKALRALANRLVGILHGCLRHHSPYDEAKAWHREEAAA

SEQ ID NO: 482518 - protein, 342 aa, unidentified
MLYVGIDIAKNKHDVTALNVPGKTVLKPLTFSNNKAGFELLDLSIRQLNQDCLIALEDTGHYAFNLLNFLHEQGYKVYTYNPLLIKEFAKSLSLRKTKTDKKDAHGIALKLLSDPNREQFQHDNRQVELKILARHIHRLKKKQSDWKVQYTRCLDIIFPELDKIVGKHSEYTYQLLTRYPNPQKRLEARFDKLIEIKRLTASKIQNILSVAPRSIGTTSPAREFEIIEIIKHYKRLIDKAETCVNDLMAEFNSAITTVTGIGGRLGAVILAEIRNIHAFDNPAQLQAFAGLDSSIYQSGQIDLAGRMVKRGSPHLRWALIQAAKACARFSPAFKAYLKTKLE

SEQ ID NO: 482519 - protein, 343 aa, unidentified
MTLNRIGIDLAKNVFQLQGVDDQGKVVLKKRLTRDKWLSVFCESVEPGCEVGMEACGGAHHWARQLQARGFVVKVIAPQFVTPYVKSNKNDANDAEAICEAMSRPNMRFVKAKTVSQQDVQAVHRIRQELMGHRTAKANQIRGLVTEYGLVAPLGLAALRAAIPCWLEDAENELTVLFRSLLNGLWEDLARFDERIATMDAEVDRIATSDPVAQRLQQLRGVGPLIATALIASVGDGKQFSQGRQMAAALGLTPRQHSSGGKARLLGISKRGDPYLRSILIHGARSTVAHAKHKEDRLSQWMTGLAERRHLNVAAVALANKTVRMAWAMMRNESDYDPEYVAA

SEQ ID NO: 482520 - protein, 395 aa, unidentified
MFIVGIDVAKRSHEVCMITSDGRTVQRPFSIRNNCTGYNLMLEKIRKHTNIKSQIVFAMESTAHYWLALFTRLRKDGYHVILLNPIQTSAMRDMFIRKIKTDAKDSFIIAELIRFGRYAESNVAQDRLLALKELCRNRFYLVDMAGDLKRKLIALIDRVFPEYEAQFDTIFCKSSVAVLKKYPTPQKLSNAHLDKLTELLWNSSNGHFGEWKARELKELARNSFGVEDCDGAYSTLILLMLDQIQSLSGKADALEKEISRLFQSFDTTVTTIPGVGPIIGAVILSEVGDISRFSSADKLAAYIGVDPSVNQSGEFQAVHAHMSKRGSPYLRRCIWMASQVAVQRDPMFRAYYEKKAAEGLKYMTIIGHVTRKMTAVVFAILRDHKVYEPVLPTAA

SEQ ID NO: 482521 - protein, 338 aa, unidentified
MNEVTTIGIDLAKNVFELHGVNQRGKSVLRKTVSRSKLLPLLANIPPCLIGIEACGGAHYWAREIGKLGHEVRIMAPQFVVPYRRRGKNDANDAEAICEAVSRPNMHFVAIKTPEQQSGLMIHRVRESIKEARTAAINQIRGLLMEFGMVLPQGAHSFSRRLAEALADGDLPQEALSVFAEMRGHLLVLEERLAEYDRKIAQLAQEDTARRLAEIPGVGPVTATALVATVSDARIFRNGREMAAWAGLVPRQNSSGGKSRLGRITKHGDSYIRSLCVQGALIVIRHLGEKNDPRSQWIRSLVARRGVHKAAVALAAKTLRVAWAIMARDERYRPALVQ

SEQ ID NO: 482522 - protein, 404 aa, unidentified
MEILYPRCCGLDVHQKTVVACIIALDGKEIRTFKTMTNDILQLADWLVAKQVTHVAMESTGVYWRPIYNVLESLGLTLMVINAQYIKAVPGRKTDVKDAEWIANLLRHGLVRGSFIPDRPKRELRELVRYRRTLIRQRAQVINRIQKVLEGANIKLSSVASNVMGASGRAMLEAISKGVEDPQVLAGYAKGRLREKRPELEEALKGLVGPHQRTLLQSQLRLIDFLDAEISRMDEEIAERMRPFKEVLKRIDGIPGMGRRTAEDVLAEIGKDVDRFPTAAQLASWAKLCPGNNESAGKRKTGKTGHGNTWLRNTLVEAAWGASRTRDTYLAAQYHRLAARRGAKRAILAVAHTIIIIVYSLLKTGEEYRELGANYFDERNRLATVRRAVRRIEGLGYQVELQPA

SEQ ID NO: 482523 - protein, 419 aa, unidentified
MDVVVERCAGLDVHKDTVVACVRVPAPGGGRRSETRTFGAFTVDLLALRDWLLAHGVTLVGMESTGVYWRPVFYVLEDVVECWLLNAAHMRNVPGRKTDVADAAWITQLIEHGLVRPSFVPPPPIRELRALTRYRKTQIEERTRETQRLDKVLQDAGVKLSSVASDILGKSGRDMLDALVTGTRDPDVLAELARGRLRAKIPMLGQALTGRFGPTHALVVGEILAHIDYLEEAIGRVSARIEEVIAPFTAERDLLTTIPGVGQRLAEALIAEIGVDMTRFGSASRLASWAGMCPGQHESAGKSRSGRARHGDSWLQRHLAVAAMAAGRSKDTYLAAQYARLVGRRGKARARKAVGHSILVAAFHMLAGGVPYEDLGGDYYLKRNSPERRARKSLSDLKAIGWTVTENPDSVTCRPPRAA

SEQ ID NO: 482524 - protein, 418 aa, unidentified
MTRREDSRIIRIVHPICCGLDVHKESVSACIIFPDDKGEEQSDVKIFGTFTDDLIRLRDWLAEHKCPVVAMESTGVYWRPVHNVLEDSVTVVLANARDMHNVSGRKTDIGDSKWIAGLLRHGLLKSSFIPPQDVRQWRDLTRLRKKYVYTVGDYKQRTHRLFESANIKIDSVVSDLFGVTGRNLMQLLVADRELTLSAIQTCVRGRLKGKEEELFRSIQGFFTDHHRFVLRMLLSTIAMLEAQIAALDLQLRGAMKEHDALLDRMKQAPGIADVASREILAEIGPILDSFPKDTSLVAWCGLCPGNNESAGKRKSGRSPVRKNHLKTIMTEVAWAAVKKKGSYFKDKYYRLKARRGAKRAIVAIAHRILLGLYHVIKDGDDFRDLGADYLTLKNKSQKVFHLRKQALALGFHLVPQAV

SEQ ID NO: 482525 - protein, 412 aa, unidentified
MDVIHPYCAGLDVHKKTVVACVITPVPKGGWHKEIQTFTTMTGQLLKLSDWLISKGCTHVAMESTGEYWKPIFNILESSFEVMLVNAQHIKAVPGRKTDVKDAQWIAELLQHGLLRPSFIPPIAQRNLRDLTRYRTSFIRERVNLVNRIQKLLEGANIKLASVASDIMGMSGRAMLDAIVAGETDPLVMASLAKGKLCNKREQLIEALEGRVQPHQRFILAQLLCQLDSLEETIARFNQQIEVYSEPFEAVIELLDTVPGVGRQTAEMLVAEIGIDMSRFPSAAHLSAWAGLAPGNYESAGKTLSGKTRKGNQTLRAGLMQSAHVASRSHTYLAAQYRRIAARRGKKRATMAVAHSILVIAYHIIQRREPYRELGANYFDQQQPEKTTKKLVKRLEHLGYQVTLQSQSASVT

SEQ ID NO: 482526 - protein, 432 aa, unidentified
MEKIRNNVSGIDIGAKKVFTAVEGQPVISHFTFTEDFLKLRDYLIRHKVESVAMEATGVYWVILYEILEEAGIDVWLVDGRQTKQVPGRKTDVKDCQWIQELHSYGLLNRCLVVEADIKELRSYLRLREDHIRSSSMHINHMQKALTQMNIRLKEVLSQLHGKSGIAIIEAILNGERNRDVLVNLCHVSILKGKKDLVYKSLEGRYTEPGLFALKQAYDAYKFYQHQIQQCDARISTVLNRIGKSGQGQNNDQKRKPIRHHKPQVDHLGSNLLNIFEGKDATLISGITDYSWVQLLSEIGNDLGKWPSEKHFTSWLGLSPGQNDSGGKKRRVKKKGRPVAGQIFRTIAQGLINSKNIAIGAFGRRLRARKGASIAIKAMARKLAILYWRIMQKGLDFVEKGIKKYEEQLAAQKLKTVMRLANELNLDISHYN

SEQ ID NO: 482527 - protein, 322 aa, unidentified
MEQITFTQVVSRGCGIDVHKKVVVATVDGEGIKKTTREFSTFTRSLTELREWLLELGITHVAMESTGVYWKPVYHILEPTGMKVWIVNARHIKYVPGHKTDKKDSAWICKLLLAGLLKPSYIPPREQRELRDLTRYRVKLIQGIAANKNRTNRILEDCNIKLSSVMSGTDGVVATKLIDKLIEGKQVTSEDIDRVYHGKLKASKEELLEACNGFITEHHVYMLGLIKRDISDSEVIISDIDDKVRQMLSPYDNVIELLKGIPGFNLKTAQDLIAEIGLDMSIFPSEKHLCSWVGISPGNNESAGKKKADEPPTATNPPKRQS

SEQ ID NO: 482528 - protein, 356 aa, unidentified
MSREVKYIGLDVHKEAIVIAVLNTKGHQVMESIVETKASSILQFIHGLQGELHVTWEEGTWAAWLYDLLKPHVHQVLVCNPRRNALLKEGSKNDKVDARKLADLLRTGMLRPVYHGEHGLRTLRELAHTYQTLSQDLNRVMNRLKALYRGWGIACGGTQVYAPRYREEWLTKIEHAGVRRRAELLYQQLDGLQTLRRTLRPELLAESRKHKAAKLLRQIPCIGPIRAARLLALMQTPHRFRSKRQLWTYSGLGIETHDSAQYRFVRGELQRAKKPQQIRGLNRNHNHEMKDIFKGAANRASCGMSPLRDFYVALLDKGMKPEMAKLTLARKIAAIALTLWKKEERFDAEHLKTQAA

SEQ ID NO: 482529 - protein, 345 aa, unidentified
MLYVGLDLSRKRLDWQALLPDGERAAIGTVPPDRDGLSKLVRRLGDGEGVLAVIESMSGARFVHDELERCGWDVRIADALKARGIAPLACKTDTIDTWVLAELARLELVPEIWLPDPEVRAERERARFRLHLVKHRSSLKNRIHAILFQHGVPNTSSDLFGSAGRALLASLRLPEPWASTVAASLELIDLLDERIAACEGDLRRLGAEHRYVPLLMTCPGIGWVLAFTIASEIGEIGRFASPRKLVGYTGLCPKVEQSGERDRRGRLRKNGPSYLRWALVEAAHTANRHPSYRPVHERFLARHGRERGTKLAAVEIGRRLAEAIWHMLTTNEPFAPAGAPASLAA

SEQ ID NO: 482530 - protein, 340 aa, unidentified
MNEIRTIGLDLAKNVFQVHGADATGTTVLRKRLRRGQVLAFFASVPRCLIGMEACATAHYWARELQVLGHEVRLMPPQYVKAYVKRNKNDAADAEAICEAVKRPSMRFVPVKTAEQQSALLMHRGRELLVRQRTMLANTLRGHLAEFGVIAAQGLHKVAGLIAIIRDDKDGRVPDMARQVLRVIADQLDDLETRIAAIEAQIMAWHKSNPVSQRLATIPSIGPIIATAIAATVAEPREFRSGREFAAWLGLVPRQNSTGGKARLGGISKRGDSYLRRLLVNGAHAVLLRSKAGRADPWLASLRTRKHRLVVAVALANKTARIAWAIMSRGDTYRRAAAAA

SEQ ID NO: 482531 - protein, 323 aa, unidentified
MNKDIKYFGIDISHLVFDVTDSEGKYYQFKNNPMGFKKFLKLLDANSHCVMEATGYYHYQLAYYLQEEGVKVSVENPLAVKRFIQMKLSKIKTDKSDSKLICEYAKHVELKLWKGNSKHQLECLQMTRLLSVYTKQSTMLKNKLHGEAVLGHPSKVVVSSLKRNMKQVQKEMKMIEDKLLVLVKEVHQGVLTRLKTIPGIGPKTSLMLVVLTDGFDRFTSGSELCSYAGLTPVIRQSGSSVKGLPRISKIGNQKLRNLLFMCSFNACKYNYACKAIYDRLVAKGKSKKLALIAVCNKLLKQAFAIAKSGLTYDNNYRSVLVEN

SEQ ID NO: 482532 - protein, 380 aa, unidentified
MDRRARHVVHVAIELSASSWLVAVRPPGAEKSRLHRIEGGETTALLALIAELRSRASTKLGRGVDVACCFEAGRDGFWLHRLLTAHGIAAYVLEPTSILVNRRARRAKTDRLDAEGILRVLAAWLAGDRQVCSMVRVPTPEEEDAKRPHREREHLVQEKLRIENRIEALLFTQGIRRRPSLRSWERDVAELRTGDGRALPPLLEAELDRLWRRLVLILELIREVEAERAAALAAAADDRIVQKITALQRIRGIGTNFSTVLVREVLYRSFANRRQLASYVGIAPMPYQSGGMDRDRSISRAGNPRARTTLIQLAWLWLRYQPGSALATWFRERVGRVQGRTRRIAIVAMARRLLIALWRYVETGVLPEGVEIRAEADATA

SEQ ID NO: 482533 - protein, 437 aa, unidentified
MPNVAYLGLDISQADVSVCFLLTDGREPVPRWTVANTQPGADRLSATVAQLCQTHQVDELRIGVEATGLLWWHLVCVLNAAPPLLPFRPHVYVLNPHLVETFRRNYGALPKTDRADAFLIAERIRFGRQLPPPFQVDVRYAPLQRLTRFRFHLAHNLAREKSYFLSFLFLTFSSFGQVEPFGDPFGATSSAVLSELTTEELAQQSLEDLAAYLQTHGHGRFADPAALAETLQQAARDAYRLDKVLAEPLRIVLSTTLANIRSLTAQLKTLNQTIAAELQPIPQTLHSVPGLGPVWTAGLIAELGDVSRFADDDAIAQFAGLTWPAHESGQFQAEDTHLSQRGNSYLRYYLVEGANSVRRHCPEYAEYYTAKYAETLKHPHQRALVLTARKLVRLIDALLRSQALYQPPDQRPTPPSAGPHARRPGRQRRQPQANPVT

SEQ ID NO: 482534 - protein, 405 aa, unidentified
MLFVGDDWAEDHHDVELMDTAGRRISKARLPEGVAGIERLHAMIGAELGEDSKAEVVIGIETDRGPWVRALIAAGYTVYAVNPLQASRYRERLAVSGAKSDAADAHMLADMVRTDSHQLRPISGDTADAEAVKVVTRAHKTLIWERTRTTQRLRHALLDYFPAALEAFDDLDAPDALELLAKAPDPAAAAKLTAAQIGAALKRARRRSIPEKSTKIQAVLRAKHLGQPAAVTAAYADSVRALVALLTTLNEQVNFLHGQVEAYFGRHPDAEVIRSQPGLGPMLSARVLAEFGDDPHRYASAKARKNYAGTSPITRASGRKKVVTARYVRNDRLIDALIAQAFSALRVSPGARAYYEQQRDRGIEFNAALRQLANRLVGILHGCLKTSTPYDEATAWSHRAHVLAA

SEQ ID NO: 482535 - protein, 321 aa, unidentified
MSKSVLGIDIAKHKFEVALLVEGKIKHKVCQNNPQGFDALRIWLEKQKSPALHACMEATSTYGEELATYLHELGHKVSIVNPARVKGFAQSELIRTKNDSVDSGLIARFCLAMDPQPWQPPSPEERRLQAQLRRIEALTNMRIQEENRLEVSHCSVKDSIKEHIAYLEKEIESVKKEVKEQINSNPDLKGKKDLLISITGLGDATSANVIAELPDIKRFSHSREVVAFLGLAPRQNESGTFKGKARLCKVGNSRLRKALYMPALVAMRHNPIIKEFVARLRERGKHGKVIVCAVMRKLVHIIYGVLKSGKPFNPDFKPNLA

SEQ ID NO: 482536 - protein, 461 aa, unidentified
MVATRVRTQRPRLDDLACVHPNAAGLDIGSEIIVAAVPTDRHEQPVRAFATFTPDLHALVAWLLECGIDTVAMESTGVYWIAIYELLEQAGITCYLVNAQHVKTVPGRKSDWNDAQWLQKLHMLGLLQASFRPDAEIRSLRVLARHRAELIRHRAPHILHMQQALKLMNIQLSEVLSDITGLTGQGIVRAIVAGERDPATLAQLRHPGCKHTEAEIIKALTGTWQEAQIFILQQNLQLYDFYTAQLAACDSEMERSYQAIESRHEKDAPLPDLPKAKPGSRSKNEPNFNVRAQLARIVGVDLVGVMGLSASSAQTIITEIGTDMTRFPTVKHFCAWLGLAPRNDISGSKVLRSRTLKVRSRANQAFRQAAESVARSQSSFGRYFRAMRARLGPEQAIVATAHKIARVVYHLLTTKEPYREEYAEEADRKRQERELKQLARRAQKLGYTLNPLAAPPPASSP

SEQ ID NO: 482537 - protein, 455 aa, unidentified
MPGKKTRGTSSGRLSTINPDAAGIDIGSTFHVVAVPSDRDERPVRTFRTFSGDLHQLADWLHAVGITTVAMESTGVYWIPVFEMLEARGFEVLLVNARDVKHVPGRKTDVNDAQWLQQLHQHGLLRGSFRPRDGVVRLRAYLRHRERLVDYAASHVQHMQKALMQMNVQLHHAVTDITGATGLRIIRAIISGNHAPDTLASYRDSRCATSEETLREALTGNYRPEHVFALRHALELYDVYQAKIAECDVEIEAVLGVLNEPRMAPDAPLPSARHAKSRNEPKFDPRPALYTLLGADLSQIHGFGPYTVLRLVAECGDDMTKWPTAKHFTSWLSLAPGNKISGGRLLSSKTRRSSNRATALLRIAAVNIGKTQTALGSFYRRLAARTGKAKAVTATARKLAILFYKALRFGMTYADPGASSYEERYRHRVIHALHRRAKSLGFTLVATVPATEGVS

SEQ ID NO: 482538 - protein, 387 aa, unidentified
MTTDHLATERQTAVRVNETKLFASLELSKARWLVTVSAPGSEKLSKHAVSGGDGGALLDLLGRLRATAERRCGMAVQVVVIQEAGLDGFWLHRLLEANGIESHVVDPASIAVDRRHRRVKTDVIDGEMLLRTLMAWARGERRVCSMVRPPSPGEEDRRRLTRERGTLLQERTRHTNRIKGLLSGQGITDYDPLRKDRLVRLDALRTGDGRALPERLKAAIRREIERVDLVVAQLALVERERDALVDMKSDPAPATMAAILTRLKGIGPELGSLIWLEALYRGFANRRQIAAYAGLAPSPWQSGGTDREQGISKTGNRRLRHAMVELAWFWLRHQPDSALSVWFRARVGQGRGRIRRIAIVALARKLLVALWRYATQGVVPTGAAFKV

SEQ ID NO: 482539 - protein, 428 aa, unidentified
MNYNQNQKLNQLDEGILIIGIDVSKKFHVARAQDFRGVEFRKGIKFDNTLEGFQQFCVWKDLLMKEETKTKVIVGMEPTGPYWLPFARWLQSQGYWTVTVNPAHVKKSKELDDNNQAKTDYRDARVIAQLVKDARFSEPNLLEGIYEELRNAKNIRKVMVNDLKRIKNMMANWLDRYFPEYKRGYANWEAESFLYLLKKYKLPETFAVQNPDEIYEDIKKSFPRGVGIGKIKSLIEASKESIGVKEGTRMASKELDYLLRRYKEIVSDIDNIEAVINGMCEELPEVQKITKIKGIGITTASGIVAELGEIKTYQNPKQMIKMAGLALTENSSGQKKGKMSISKRGRKDLRKILYQAVVGMIRTNAAFHELYEYYRYRAKNQLTGKQAIIVLVTKLLRIIHTIVVKDEEYNEGKMMASIRHPEEFVTAD

SEQ ID NO: 482540 - protein, 423 aa, unidentified
MKVVYPICCGVDVHKTFFVATIITSEGITPHYQKKRFSTFNNSILQFKRWLLDSNCRDVCMESTGKYWVPVFNLLEDSINVTVANPKWVKAIKGNKDDIKDSKWIGDLFRLGLVPGSFIPNKSIRILREYTRYRYKLVSCKSSEKNRFQNAFTVCNVALDAVVSDMFGKSASSITNYLVSSDSFDPEHCVSLLQKSLKKKADAVIESIDGFQMMPEQKHRVRMIRSHLDFIQNSINELDNMLNVLASPYESQIQLIYTIPGVDRASAITIISEIGTDMSHFSSSKRLCCWAGLTPGNNESAGKKKSVRITRAGVYLKPALVQVAHAAVKSKDNSYYRIKYERLAKRRGKKRAIIAIARMILSAIYHMLSTGEIFNPCDLYKVDMPLELRDKQKEKVLKKAAKLLIAQGLIKETDLPGLFMQPA

SEQ ID NO: 482541 - protein, 414 aa, unidentified
METVYSCLAGIDVHKKMLAVVVRREQNGKAEYESRKFGTTEREIRALAAWLQERQVREVVMESTALYWWPVWRGLEPHFTLHLCNPLQVRAVQGRKRDFKDATRLADRWSAGDLNESFVPNAEQRGWRSLTRMRVDLKDKIGMVRNQVEGLLERGGIKLTSVVSDPFGVSGWAMLKLIAAGETSVSALAAQARGKLRRKADQLEEALAGKLDATLRLLLRQYMEQVELLRRHITQLEVALAEAMKGQVVVLHRLMQVPGVDLCAAQELVAEIGSTAAAFPSASQFASWVGVCPGSKESAGICYSNRSAKGNRYLRRLLCQIAWASVRTRGTFFAGFFQRLRLRNGNKSAVWAVAHRIAKLIWMLLHDKVDYQEKGPTPLNPKTLVRKLKRLIEQFDLLNMDIKPLLGMSPAAPA

SEQ ID NO: 482542 - protein, 349 aa, unidentified
MAEPRISYTGERIDVGIDVHKETYTVTCLRQRQIVKTATVPADPARLAESLPRWFPGARLFSAYEAGFSGFVLHRVLTTAGITNIVVNPASVAVAANDKVKTDRRDAKKLARELADGRLRGIYIPTEAEELARLLPRTRAQLVAHRATITRQIKAKLHQFGLITPGSRRLMSSRYLREIAAWELPPELHVSLTLLADQWRFATRQLLEVRRLLREQAKAQAALETVYRSVPGIGEVVARTLATAWGDMTRCANERALLSYTGLTPSEYSSGAAIRRGHMSRQGVSRLRHVLVETAWRALSGDPILQAMFDRIAATRGKQRAIVAIARRLIGRIRACFRHGTPYAVGTVG

SEQ ID NO: 482543 - protein, 342 aa, unidentified
MTITTIGIDLAKNVFQVHGTDFRGKVLLRKQLRRTQMLPFFARLEPCKVAMEACGSAHYWARKLQALGFDVMLIAPQYVKPFVKHNKNDAADAEAICVAATRPEMPTVPVKTASQQSILSIHRARQGFVKARTAQANQIRGLLAEFGFVIPQGIIHLGKSVPEIIEDGDNDLPGSFRLLILRLLDHLKVLDNQVEELEAEIVRWHRENEASKRLSEVPGIGPMTASALVASVGDARNFKNGRQLAAWLGLVPRQHSSGGKPTLLGISKRGDTYLRTLLIHGARAVLRFGQAQPDSQLWTERLLARRHKNVAAVALANKNARIVWALLAHERRFRCDYAQNAA

SEQ ID NO: 482544 - protein, 351 aa, unidentified
MIIIGVDYHPSSQTIAFLDQETGECGERQLNHSDGEAEKFYRELKQRGVSVRVGMEATGHSRWFERLLAELGFELWIGDAAEIKTKRVRKQKTDREDARLMLKLLLENRFPRIWVPSPENRDLRQLLWHRHRLVQMRTRIMNQLQAVAMNEGYRWKKKLFSEKGRGLLEKLPLAPWASRRRKELLELLDQLDPKIAELTAAVEQEAKKRPEVLLLMTHPGVGPITGLVYVLVIGTPKRFPCGKQIGSYTGLIPCEDSSAGRQRLGHISKQGNTLLRFLLVEAAQAAARCNPDWRRKYLHLMIRREKRIAKVAMARKLGVRLYWMWRNHWQYSQLVEFGSNAGKLVHVHGVK

SEQ ID NO: 482545 - protein, 355 aa, unidentified
MNDEKYIGLDVHQATIVVAVMDSSGKLVMESILETKAATILQFFAGLCGTLSVTFEEGTWSAWLYDLLHCRVDKLVVCNPRKNALLKDGNKSDRIDARKLADLLRGNLLKPVYHGETGVRMLRELSRSYLTIVKDLSRVMNRLKAVYRSWAIPCAGRDVYYRRHRSQWLAKIRVAGVRRRAERLYEQLDMLQHLRQQARRELLAESRKHAITAKLRQIPFLGPIRVALAVALIQTPHRFRTKRQLWAYSGLALETRTSAEYRFVEGQVRRSKKLLSIRGLNKDHNHDLKGLFKGAATMASVRPGPFQDFYAAALDKGIKPTMARLTLARKIAAITLTLWKKGENFDPEKLKSQAA

SEQ ID NO: 482546 - protein, 343 aa, unidentified
MQTIKTIGLDIAKSVFQVHGVDAAGAVVIRRQLKRRSVLAFFQKLPPCLVGIEACASSHHWSRELQALGHTVRLMPPAYVKPYVKRQKNDMADAEAICEAVTRTNMRFVPTKTPEQQSCLMLHRTRHLFIRQQTAVINSIRAHLAEFGIVAPVGRKGVTELLHVVADPSDKRVTEVARACLAALGTQLLRLKQQIVEFDRMIMAWYRSSQTSKRLHYIPGVGPMLATALVASVADPRTFRSGRNFSAWIGLVPKQHSSGGKDRLGSISKQGDRYLRSLFVAGALAVIRYAKVHGTKHRPWLTALLGRRPTKVAAIALANKIARMAWAMMAKGERYRQPIALAA

SEQ ID NO: 482547 - protein, 348 aa, unidentified
MVADSLDVVIGVDTHRDAHALALVATASGALLLEAVVEASREGYGDALELARAHAPGRRAWAIEGTGCYGAGLARFLLARGERVLEVDRPRRERRAQRGKSDALDALRAARSLLGGERLARPRQAGAREALRGLISTRESAVDARRAALNQLRALIVTCPEPLRAELRPLTRARLLRRLRGTRPRRHADRQLRGALLAMRLLAVRIEALTLEQRELEGEIVALVRELAPQLLAQPGVGPITAAHVLLAWSHKGRLRNEAAFARLAGAPPIPASSGKVVRHRLDRGGDRKLNRALHTIILTRRRTDPDTIAYIQRRVSEGKSDRDAVRSLKRYLARSLFRQLEAHPQPA

SEQ ID NO: 482548 - protein, 367 aa, unidentified
MNRIVYIGMDVHTSNYTLCSLDPGYGVEKDNYFAEVQFTNNFVTNVVNYVSNLKKKLKDCEFVCGYEAGCLGYSTYKDLTKVGIKCVIMAPSTMAVQKGGKKVKNDRRDARVIAQCLAYQTYKEVYVLSEHDEAVRGYLRMRDSHNKALKRIKQQIIAFCTGHGLFSPTKSNWTVAHLKWLKDLKFNDPVEQEILNEYLSSLTFLSDKIKAMDVRIEELASEKQYCENVKKLRCIKGIETNVALTLLAEIGDFNRFSKPTDFAAYLGLIPGEQSSGDKVRGTGITKAGNSTLRRKLTESAKEYWRGRIGIKSATFKKLEKELPKEVTEYALKANTRLQRKFFNMTHVKGKNMNVAASACAREMACFV

SEQ ID NO: 482549 - protein, 419 aa, unidentified
MTHPKMKYTYVGIDSHKDTHTAVFIDCFFEKLGELSFPNLPSEFGVFLADAEKLKQDGTELLFGLEDFSMYGRTLAVFFRDNNLQAKHVNALLVARERKNRNVTEKTDSVDAECAARVLLSKFGEMPDANPNDQYWILRSLVRRRDFIVKHNTALKNHLHNLLTQHYPNYSDWFPDIDTQSSLAFFMRYPSPSTLEGITHEKLAAFLREASDWRVGAGKPGTVKARAILDTVQDTTVPFQELRDDAVRSAIRQIEYNAAEIEQLESTMREFLEQFQCTLTSMTGIDMVSAAQLLAGIGDVKRFPTPAKLARYSGIAPVTYASGKRDLQFANHHGNRELNSVIYLLSVRLITTVGPTGKMLNPFFYEYYHRKLSEGKTKKQALKCVQRRLVNIIWTMLTNHEEYINPPMFEAPNNGKDDT

SEQ ID NO: 482550 - protein, 353 aa, unidentified
MNEITTVGADLAKEVIVVCAGDAHGRTVYFKQFSFAGFAEWAAKLSACTFGMEACSSAHHWARFLSAHGHTPKLMAAEFVAPFRKSQSAKNDRNDAQAILAAVRQPDMRFVSVKSVDQQAMLAWHRARAGFGEERKALLNRTRGLLAEFGVWLGRSAAVLIRQLPQLAQDQRLPEHFRPILSCTLEHLRRIDQCIADCDTRIHAHVRQSEKAKRIQALTGVGELTASALLATVANPRDFKNGRQMAAWTGLVPRQNSSGGKLRLGVITKRGDSYLRGLLTQGARSTLQVALKREPLRRSRLQHWIVALHGRVGYHKTLVAIANKHARILWAILAHGESYDPDAWRRHALQRHA

SEQ ID NO: 482551 - protein, 386 aa, unidentified
MQTPNDLNQSRIVLKQDSTLIAVIEMSLSSWLVAGIVPGVERQPLKKLAVDESALLKLLNRWREEAEKAGRKIERIAVAFEAGRDGFWLARWLRARGIEAHVIHASSVAVSREHRRAKTDRLDTELLKRAFLGWLRGERDHCKMVAIPTTKDEDAKRPNRERESLVGEQTRIVNRMKAALSRLGIRGFNPKLKKAAERLEDLRTPEGEPIPPNTLAELRRDMQRRRLVSDQIRQIEDARLERIEHAPNDGPHAMVRLLARVIGVGIETADMLVQEVLSRNMRDRRAVARYAGLTGSPDESGTRRREKGLARSGNARVRRGMIQLAWRFLMFQKDSALAQWFRARTENARGTRKTMIVALARKLLIALWRLVREGVVPDGVVLRPAQ

SEQ ID NO: 482552 - protein, 414 aa, unidentified
MKLFVGIDVSMKDFKARMFDAEGEEIAKRIRCKNDDPGAESFVKYLVEICGANEVDSLRIGMESTSVYGWHLQMRLAGEPLLASFHPQVYVFNPKVIANFRKQYVDIPKDDWFDCLVIADRLRFGRLPESCQVDFRYLPLQRLTRFRYHLIQTITREKNYFLTNLFLKFNTICQDKVLSDIFGATSEAILTEFLSPEEIAARPLDELIDFLMEKGKSHFSNPEATAKALKHAAACAYRLHGSLLEPVNLILATSLQTIRTLEQQVKSIDKAIEKELSHFPNTLQSMPGMGPVCTAGIIAEIGDIHRFDNEKAVAKFAGLTWRKHQSGEFEADDTPLTKTGNVYLRYYFVMAADSVRKWDPRFAEFYARKFKESSTHHHRRALVLTARKLVRVVDALLRSNQLYVPQGQRKVVKV

SEQ ID NO: 482553 - protein, 371 aa, unidentified
MFGNQATFHQKGGPPMNYVGIDYHKKYSHVTAINEEGRVIRSKRLENKPESFEEFFKKLGGPSEAVLEASRTWGVMYDLLEDLEEVKSVELAHSQKVRAIAEAKIKTDKIDSHILAQLLRADLIPAAYIPGKQTRSNKEMIRQRVFLVRMRTRLKNRIHVLLDRLHIPLPSVTDIFGKRGTDYLRKLDLPGVDGEILRENLQLLEAFNMVIKEAEREIELLLGGNPLVKLLRTVPGLGPILAAVVALEIDRIERFLSPSKLASYTGLVPSTYASGGKLFHGRLLPMSNKWLKWALVEAAWISIRTSPYCRAYFENHKRHKGPHTAAIALARRLSEIVWHVLTENRVYEERPLQRQRRASIMATSPAALTAT

SEQ ID NO: 482554 - protein, 387 aa, unidentified
MRPISQTTTQKLSHCRRDDATLYASLELSQATWLVTSLSPGSEKMSKYSTLGGNGAALLGLLRRLQVRAEQITGGPVEIVVIQEAGLDGFWVHRLLNANGIESHVVDPASIAVPRRRRRAKTDSIDGETLLRTLLAWRRGEPRVCAMVVPPTPEQEDRRRTSRERAVLMQERVRHVNRIKGLLAGQGITDYEPLHKDRRAHLAALKTGDGQPLALRLKAELLREIELIELLIRQLAEVELERDAVELGAEGNQSPVALLARLKAIGPQIAAVLYLEGLYRSFANRREVAAYAGLVPTPWRSGTIDREQGISKAGNRRLRHIMIELAWLWVRHQPDSALSRWFRARVGTERGRIRRVAIVALARKLLIALWRYVTHGEVPEGAVLKAA

SEQ ID NO: 482555 - protein, 420 aa, unidentified
MKAEASSTITGEMRYLGVDLHKHYVVIGGVNAQQAVVLPPRRVELDDWPAWAKSHLVKSDVLVVEATGNTWMFYDETIALVLRIEVANAGKLPWIGQAKVKTDKQDVMKLARLCAAGLIPQVWLPPVHVRELRLLFSHRRRLVKGSTLVKNRLQSLLHRHHLAPPKGEVFSQANRAWWQQLDGISLTERLQVKHDLATLKQVEEQLAEIEVELNRLSTTEPWVSAMPYLMQLPGLGLIGALTVLAAIGEITRFESAKKLVGYAGLGAGVHDSGQTHRTGRITKSGRRDLRHVLVEAAWAAVEHHPYWNAEFARLSRRMDQNKAVVAVARRLLVAIWHVLTEQVADRHADEKRVATKLMRWSWELSEEQRGGLTTRQFIRYHLMRLQLGDDLTHFCYGNMPRRVASVEELLSVKPELRLTG

SEQ ID NO: 482556 - protein, 338 aa, unidentified
MNYHSLIAIDLAKNVFQVCTMSTNNHVLMNESFNRKGLTEFMLNQPASVVAMEACYSSHYWARLFKSFGHQVKLLPAQHVKPFVRGNKNDHNDALAIAEASQRPGIKAVPIKTVAQQDIQSLHRLRERCVRQRTSLSNQTRGLLSEYGIVFPAGFKSFKQTLAVLIDPSNTQLTEPLKQQLRYVADEFDRMSARLTELNQVLAQIAQTNPHCQRLMSIPGIGYINATALYSAIGNGGQFNNARELSVWLGITPKQYASGNKQVMAGITKRGNRYLRKQLIHGARALMRYCKKRDDQLSQWLQAIEQRRGKNKACVALANKMARLCWTLLQTNQMYRSR

SEQ ID NO: 482557 - protein, 411 aa, unidentified
MRVHHTVCCGIDVHKKSVTACLMWGPADREPEWEIRRFGTMTSQLKVMVEWLKQANCEIAAMESTGAYWKPVWNVLEGKIKLVLANAKHVRSLPGEKTDNKDGKRIASYLRHGLIRPSFVPPRDIRELRDLTRYRQKLLANGAAERNRIQKLLEDANIKLGSVLSDVFGVSGQRMLQALVNQPTTDVEQVAALAHWRLAPKIEQIKHALEGHVTAHHRFMIDLSLGHMQYIEQQILRLDEEIARHIQPYQKQFQLLQTIPGIGGNASAAVLAEIGPDVSPFDDEGKLASWSGMCPGNNESAGKKFSSNTRKGNPHLASTLVESAWASTHTKNCQFKTRYYRLRSRRGPQRAIVGIAHALLRTIYLVLKTGQPYQEPLRPALTEDRRDRKTERLSRELRNLGYDVILRIKTP

SEQ ID NO: 482558 - protein, 413 aa, unidentified
MDVLHPRCCGLDVHKSSISACILLREAGRVQKHQRRFGAMTQELQELAEWLRQFGVSQVAMESSGVYWKPVWNILEGQFTVVLANAQHIKNVPGRKTDQKDAEWIAQLLQYGLLRASYIPCEIIRDLRDLTRMRTSLSQEASRISSRIQKVLEDANVKLASVATNALGKSGRAMLEDIIAGEDDPEHLASLALGHLRVKIPQLRLALEGKIRSHHRFLLRRLLDQIQFVEHEIALLDERLEDIGRQRPDLAQAVARWDTIPGIDRVAAWALLAEIGDNMAQFPTAEHLASWAALCPGNHESAGKRLRGTTRQGSPWLCRMACQCAWAAARTKNTYLSSQFRRLAARRGKKRAIIAVAHTLIVIGYHLQKNQSNYEDLGGNYFDRIHSDGLKRYLVKRLQQLGHKVTLEPMEAA

SEQ ID NO: 482559 - protein, 428 aa, unidentified
MSNQEIIRRKQYCQIVKEITGSDQYLVVGIDVGKDKHHAFMGSATGKALFRKLIFENNLDGFSRLLKTADEIKVQNGLCKIVYGLEPTGNYHKPLARHLIGCDCNVVLVSGVAVKRNRELLDGRWDKHDTKCAANIADLVSRARCLYYDSPSPSITELRSLLSLRRRLKREEHGLKMRIRNNLLAQYFPEMDRFYSACESESLAIVQWFLNPDTIAVMEFGEFFHLVTRSRRGIAQTLRLRKIHGLATESVGCPMGPAGEFEADLLVEKLKQVRQQVKKTNDLIEDFCLEFTEYSYLLTIPGFGPYISARVLASIADPFRFENRKQLIKLAGYDLCADRSGKTSAKAIPVISKKGNGELRYALYQAANVAAARVDLFRTYFTRLLRGRERERGIKTKMRVKLAVKMLVIAWTLMKKEEVFDPAHLSID

SEQ ID NO: 482560 - protein, 349 aa, unidentified
MISVGMDVHVRNSYLHVLDSQRRLVHHGRCANTLGDLAAFLGRFEAEPMQISLENTTNSRAVYRMLMAYRREAGVELQAQVLDARKLRIIAESVSKCDRLDAAVIAELTHAELNLPVCYLPDDEEFTLREHLRARHDLVTLRTRIKNRVHSVLHRRGILAPLRGTLFAGSGRQFLEEVKLDDAGRTIVNRYLQLVDQLEDAVAASTKDLRALTRQTRWAKPAALLQTMPGLGIITAMTILAELGDIHRFRSRSAVANYVGLVPVLRSSNESHYSGGITKRGSKHLRAVLIEAAWTGARRVPRYQALFARVSGRRGSKVAVVAVARRMVEDAWIMLKRDEAFRFSQSVAG

SEQ ID NO: 482561 - protein, 346 aa, unidentified
MLDTATGEVVNQTLTHEGESVREFYSTLPGSVRVGIEATGSMKWFLQLMEELGIDCQVGHPATIRAAEPRRQKHDQRDAELLLRLLVENRFPSIWQPSQELLDLRGLLLHRHQWVRLRTRIQNALQAIALANGLRRGSSLWSESGQDAIASLPLATHTAHRRSKLQAMYARFEAEIEQLNQRVLEQAGQRPTAGLLMTHPGVGPITALATDVFLGDPKRFRDGKALASYIGIIPREHSSGGRQRLGGLSKQGNPLLRFLWCEAAVHAVRRDPELRRFYRRKLVQKGLGKARVAAARKLGIRLWIMLREQIDYQEFCRRGQMQQRSGGACAGMPRRRYGAKSHRLID

SEQ ID NO: 482562 - protein, 366 aa, unidentified
MNYIFVGCDSHDKTLVNKIALNREASQTKRFAAGRAGRGKMMEHLKALSQAAGNAKVVVAYEASGNGFTLCDELRQAGYECHVLAPTKIERSAKQKRNKNDDRDAERLLDIVRGHYLAGTKLPSVWIPDRQTRDDREPVRGRQDLSQKQTAVKTQLQMLVKRHGIEKPEGIGASWNKRYRQWLKALSEDAHQGWGMKQALGSLLRQLEFLEKEIEQLNEAMEQLADTPRWKPIVQAMTKEKGVGLMTALKYSTDIAEFSRFRRGRQVGAFYGLTPSSNESGENNDRKGHITREGSPTGRQVLCQSTWSRVRHDEHEREVFQRLVLKNPKKKKIALVACMRRLAVRLWHVGFQAQLQMKAAPVENRD

SEQ ID NO: 482563 - protein, 344 aa, unidentified
MEHFAGLDVSVKETSVCIVDDTGKIAREVKVASEPDALLTELTNPAYCFKRIGLEAGPLSQWLFNALAEAGLPVICVETRHMQAVLKAQINKTDRNDARGIAQMLRVGLYRPVHVKTLRSQKLRMLLTHRKLLQSKAIAIENDLRATLRNFGLKVGIAGKVKFEARIKELVENQPDLAVLVEPLLIVRRVLREQIVILHRRLLAIVRDDEVCRRLMTTPGVGPVVALTYRATVDVPARFHKSKTVGAVFGLTCSKYQSGEIDRSGRISRCGDEMMRVMLYEAAQSMLRSKKWSWLKAWAMQIARRRGMKKAIVALARRLAVILHRIWVDGTEFRWTREQAATAA

SEQ ID NO: 482564 - protein, 458 aa, unidentified
MAPRHKGNLPKVKSSVPPQLPTLHPHAAGIDLGAREIYVAVPPGACPRHVRSFPTFTEDLHALRDWLQACGITTVAMESTGVYWIPLFQILEAAGIEVCLVNARHCKNLPGRKTDVQDCQWLQYLHSVGLLRGSFRPADQVCAVRTILRHRDALVRGAGRCVSHLHKALTQMNVQLHHVISDLTGVTGQAILNAILQGERDPQKLAALKDHRIKASREVIAKSLRGDWRAEHLFTLQQTHVLWQQHQQLIAACDEQIAGMLQAFDARVDAPAGPLPPAKGSHKKPQKNEPQFAAREECYRVLGVDLTAVPGFATPTVLVLLCELGPEFAEKFATAKHFGSWLGLCPDNRITGGKIYSVRTRDVKSRVAEALRLAAQSLWRAQNYFGDLYRRWQARLGSPKAITAMAHKLARILWHLLKFKQPFNPEVFAKEEEKMKRKKLARLHNIAATLNYQLVPIP

SEQ ID NO: 482565 - protein, 445 aa, unidentified
MHYKRLLTWIDGSSSYLSVGLDVGADFTWMSIALPNGAFIGKPFKIVHSDPRSRDLAVTKIKEAQETYSLKSRCFLESTGIYHIPLLCFLRDKGFDCSVINPIITKNSTNINIRKLHNDKFDSKKAALVGLNVSLKASIIPEDSVVDLRNLVRDYYYFKDLQSAVALKLTAELKVSFPAYAKVFSKVTTQSSLKLLSSYPLAGDMLEASKDDIVETIRSTARFGEAYALRKYDAVIAAAQDASVFGRALPSNAVRIRLYIDTYQEYQKHLDALLKALHETVERLQDTLIYDQICLLQSLRGIGFLSAVVLIAEMGGFKLFPSPKNLYAYFGLDPAVKQSGKLNGDKVHMSKRGSSLARRVLHMVALNNVKVDKGSGTPVNPVIYDYYTRKCSGKKKPVAMGAVMHKICNIIFAMLRDNKPFEIITPEEHCQRFAAEYPDKIRKAA

SEQ ID NO: 482566 - protein, 322 aa, unidentified
MEQFSFFTGIDVSKLWLDIAVFKPTDGLVYQTRIDNNVKNIRSFLRDLKKHLKAEITEHLFCMEHTGKYGHAFLTASVLEKAKVWVELPIQIKRSQGLVRGKTDRWDAARIAQYAYRFADKAVFWMPADKTIQDLKDLQVKRNQLVKAYSQLSQENKNDPLFKKPLLALKQGIEVIEQKMEQLLNQNDRARHQYNLLKTVPGIGKQTAMALIIVTNGFTRLTESRKLSCYSGLAPFPYQSGSSVKGRTRVSKMGDKKLKVLLNLSAWNAIRSITAFKEYFNRKVSEGKHKMSVINAVRNKLIALALAVIKRNSPFEKNYSFS

SEQ ID NO: 482567 - protein, 337 aa, unidentified
MLHYGLDVHRKYTSICVMDDGGMILAEGKAITQELTSHPAFSLKGEKRAVLEAGGNWHYLYELLEPAVNEVLLAHPLRVRAIAAARVKTDAIDARTLAHLLRADLIPAAYIPPPAVRESRELFRFRYDLVKQRSALKNRVHALLAQEGLNSPFTDLFGRHGREWMAQLALADSKRTRLESFLRVLDGFTAEIQAADRIILERVKTDEKAKLLMTIPGVGFRTALVILAEVGEVSRFPDANHLVSYAGLAPRVRSSGGRTKLGNITKQGSSALRWALVEATHLAVRKPGYLQEMHRRLRRGKSAAVAITACARQLLVAIYFMLLRGEAFQPTATRTMS

SEQ ID NO: 482568 - protein, 412 aa, unidentified
MDVLVERCAGLDVHRDSVMATVRLPGERSRQREQHTRGFGSTIAELHALGDWLQGFGVTLVGMEATGIYWRTVFDALEPRFRCWLLNARHLRNVPGRKSDVIDSAWICQLVEHGLVRPSFVPPPEIRRLRDLTRLRKAQIEERTRAIQRLEKVLQAAGIKLTSVASQAYSVSARAMLEALLGGVTDPAELAELARGRLRLKIPQLREALAHRFDLAHHGVLVVQLLTHIDSLDLAIETLDQRIAHVTEPMAELIELLCTIPGVKLRTAQVLIAECGSDMSVFPTVGHFASWAGICPGTNTSGGKRYSGKTRPGSKWLRQALSESAQAAARSKGTYLASHYWQIRGRRGTPKAIGATRHDILVAYYHIVRDRVPYRELGPDWLARRYSPEHRARRLLRQLDALGFNVTIEAAA

SEQ ID NO: 482569 - protein, 356 aa, unidentified
MLYVGVDAHKQKSWITVMDENGKVVKRGAVASSRRAVQATLGRYRQPIKAVLEASYNWGPMHDWLDEVADDVVLAHPGKVRAIAEARIKTDKIDSETLAHLLRADLIPPAYAASKDVRAIKRVLRQRMFFVRVRTMLKNRIKALLAQHSVETPEVSDLYGKEGLRWLKALKLPEPDGKLLSEDLDLLAVLNERIAATEDLIQQLSAGDDAVDWLFSLPGIGEFFSVLIRYEVDRIERFSSPKKFAGYTGLVPSTYASGDRMVHGRLTKQGNKWLRWAFIEAVTPAIRKSAHLRRYYEKIKARRGAKDARTATARKLAELAWTVWTERRCYTESGKKQSGRTKSCSRTPTALFNSWA

SEQ ID NO: 482570 - protein, 451 aa, unidentified
MSGTKKSNSKRDISPTHLNAAAIDIGATMHVAAVRPDKFSEPVRSFGTFTGDLHRLADWFTKCGVRTVAMESTGVYWIPVFEILDQRGFEVIVVNARDAKHVPGRKTDISDAQWLQRLHEYGLLRASFRLKGEVAVMRAYLRQRERLLDYAASHIQHMQKALTQMNLQLHHVVADITGVTGMAIIRAIVAGERDPMVLASYRDPRCHASAETIRQALVGNDREEHIFALTQALELYDVYQAKVALCDVRIEAVLKRLRKASSTPVGKPPTVRTTQKQSNDPAFDVRAALYGLLGCDVTQIHGLGPYLTLKLVAECGTNLSAWPDTKHFTSWLCLSPSNKISGGKVLSSRTRRSGSRAAALLRLAAVAVGRTQTALGACYRRLSARVGKAKAVTATARKIAVLFYNTLRHGMEYSDPEASHYEENYRRRVLTNLERRAKSFGYTLQPAPTSG

SEQ ID NO: 482571 - protein, 352 aa, unidentified
MIVIGVDPHKQTHTVAAVDAAFGELRGERTAKARRIGHEQLLVWARGLAEERLWALEDCRHVSVSFERFLLASGERVVRVPPKLMAGARRSARQRGKSDAIDALAVARAALREPSLPAARLEGGSREIRLLLDHREDLVGERTRIQQRLRWHLHELDPELEIPAGALDRRLWLERVGRRLARREQTAQVRICRELVRRISELTRRERELERELALLVTAEAPALLALPGCGVLTAAKLVGEIAGSDRFADDARLAMHAGAAPLPASSGKRQRHRLNRSGNRQLNCALHRIAVTQGRHHPPARAYLARKEAEGKSRKEALRCLKRHLARTVYRTLTTTNITPPTQAALTPALT

SEQ ID NO: 482572 - protein, 459 aa, unidentified
MKKSASKRKKANQKVSVDQNWSVLNPNAAGIDLGSREHWVAVPAERDPQNVRRLGTTTPDLEVLAKWLKQCGVTDVAMEATGVYWVAVYQLLERRGFNVLLVNARQIKNVSGRKSDVLDCQWIQRLHTYGLLGGSFRPADAYCVVRSLVRYRDELIAGRTTQIQHMQKALLQMNIQLRAVLSDICGESGLAIIEAILQGERDPVKLAALAHRRVKSSREQIAKALVGDYRTEHLFVLKTARELYHTHQEKINQCDRELAAALEQLPERVNVQERPLAAKPKGKKIDSALRESLYRKLGVDLTAIESIGTTVALTVVTEVGPDLSAFGTEKHFCSWLGLSPDHRITGGKILSSHTRRVANRLSDALRLAATCLEHSATALGAFYRRMKRKLGAPQAITATAHKLARIIYRMLRYGEAYVRQGLEDYEKKTRDQSLKRLQRHAAAFGFELVQRMPVAQVVS

SEQ ID NO: 482573 - protein, 367 aa, unidentified
MKKISTAAAKQNRNFSEEKLTIGLDLGDRSSWYCVLDEAGEILLEQRLATTPKAMNEVFRGMPRCRIALETGMHSPWVSRVLMELGHEVIVAHARNVRLIGESRKKDDRLDAQTLARLARIDPQLLCPVKHRSAKAQADLTVIRARAGLVRARTALVNTARGLAKSYGERLRGCNVRNMNPAKAAGLSPELQTALEPLLAGIESLSECIREYNERIEELAQESYPQVALLKQVKGVGTLIALTFLLTLEDAHRFRKSRDVGCYLGLQPGRRNSGQREPQMHISKEGDPYLRTLLVQGAHHILGPFGVDSDLRRWGLKLAERGGRNGKKRAVIATARKLAVLLHRLWISGEAYEPLRNSDQRAMPTAA

SEQ ID NO: 482574 - protein, 333 aa, unidentified
MNKITLIGIDTAKQVFHLVGVDAHGHYVWRKRLTRRRLLSHLAQLPPCEVVLEACGASHHWARRIQALGHKVRLIAPQHVKPFRRGQKNDYRDAEAIISAALSPGMHFVGIKRVEQQAEQALHRVRSRVMSHRNAAANELRGLLGEYGVVFRRGFKPLREGARCFAETEEARTLGLVELVNDVLEEIEVLQRRMDHYERLIKQRVRADETSRRLREELRGVGELGASALRVKVADVRDYPGGRHFAAYLGLAPGHSGTGGKVRIGHIKRGHDRYLRQLLIHGARSALWHLGDKQDTQSRWMRSLLERRGFNIASVALAHKNARQAWAIMAREQ

SEQ ID NO: 482575 - protein, 415 aa, unidentified
MDLIVERCAALDVHKKTVMAAVRAPGPGGVRRQEIREHSAYTEGLVALRDWLVAEGVTQVVMEATGVYWRPVWHVLEEASGFELLLVNPRHVKNLPGRKTDVKDAEWLVQLLECGLLRGSFVPPREIARLRDLTRYRTKLVRERAREVQRLQKLLEDAGVKLESVVTDVTGKAARRMIEALIAGERDPMVLADMALTRMRPKIPELQKALVGRFDDHHAVLARMHLDHIDDLARMIGRLDAEVDRLMAPLDEPATRLLTIPGVGKRTAEAVVAEIGVDMSRFPTAAHLASWAGLCPGNDESAGKTRSGRARKGDEALRTALCEAAWAASHGKDTYLAAQYRRFLRRFGKKAEGKAIFAVAHTLIVIIWHVLNDGTTYRELGPDYFDRRNDAQTRQRYLIRELEKLGNQVTLTPAA

SEQ ID NO: 482576 - protein, 410 aa, unidentified
MVIGIDVGSETHYARAFDYRGIEFSKKPFKFSNNEAGFEMFKAWILDIKEKHEKDKVVPGMEPTGHYWFNLGKFLQDNEMKPVLVNPHHVKKSKELDDNNPTKNDRKDPKVIAGLVKEGRYMIPYLPDGIYADLRTASNMRFQIQSELTRVQNRISRWFNIYFPEYKTVYGKPDAISGIMILKKAPLPEDILTLGVEGVNQIWRDAKIRAVGKKRAQTLVEAAGHSVGTKEGTTAARIEIRMLLEDYESRNNRLQEVMLLIEELVKQIPMAEKLMEIKGVGIKTVSGFLAEVGDITRFSSPKELQKLAGLALIENSSGKHKGQTTISRRGRKRLRYLLFEVAMSLVGKNSEFGALRHYYTTRKVNPLKKMQSLMAVAAKLIRVFYAMMTKGVEYDPSKMLGDIKRPAAYM

SEQ ID NO: 482577 - protein, 345 aa, unidentified
MKNSNVIGIDLAKHVIQVCKIDKHGELISNKAISPGKLKEQLAKTVPSIVAMEGCGACHYWSRLAQKHGHDVRVISPKKVKGFLQGHKTDANDALAIAIASIQLGMKFSQIKTEEQQALQTLETSRKFLAKELSALNNHIRAYLYEYGITLRRGRKSLRETMAIVLDDLDMRLPSCLKNTLRLLWERYQLTVEQLTEAEKYKAHLVGQLEPCQRLMDLEGIGKVCASMLYASMGNGKEFKNGRQASAYIGLTPKQHSSGGKTYMVGIDKRGGNKELRAALYQGALSVIYKLPSEPRTLKEAWLIELVKRAGVKRTCIALANKTVRTAWALLSTGKSYEPALLGRS

SEQ ID NO: 482578 - protein, 343 aa, unidentified
MTVTSMPQTTLPERPEQQPAEDVILGVDTHKDVHVADVITVLGALLAHQVFPATAAGYRQLLAWARSFGLPHRAGVECTGSYGAALARFLSRENIQVVEVNQPDRATRRKRGQTDAVDADAAARAVLSGRAAVTPKTGEGPAADMRVLRLAKESAVKARTQAKNQLKAVLLGTDPELRESLSELSNSALIARCADLPDTGNAAVFTLRLLARRVQQLTAEVKELTSRVNRGVRTHHPRLLDIVGVGPDSAAALLIAAGDSRERLANEASFAALCGVSPVEQSSGKTQRRRLNRGGNRQANAALYRIVVTRLRRRNGCHLTQHRGILNVHLAYGCGSSSPGKSG

SEQ ID NO: 482579 - protein, 318 aa, unidentified
MTIHTESQIEINVGVDVGKSKLDIVLHPLDLHFQIPNDEENILKVINVLKKRNIKRIVVEATGRYEHAFVFACDQANLPIVVVNPISVRRYAQVIGILAKTDKVDANLIAHYAATIQPKIKPIADKQSRLIKDLLVRRTQLLEMQTMEKNRLQILPKALHRSIKTLLRSLETQIKTITKQIDEAIMQVKHWRTQTEILISVPGVGKVLAYTLLSELPELGKLNRKEIAALVGVAPMNRESGSWNGKRRIRGGRHRIRTVMFMAMLSSIQCNPVFKRFYEHLKAQGKLPKVAIIACMRKLIVVLNTMLKNETRWGENMA

SEQ ID NO: 482580 - protein, 357 aa, unidentified
MQTESNQLDFSGQVFYVGLDVHKKNWLVSIRNNQKELKRFSMNPSPYELSGYMHHHYPGGSYVSAYEAGFCGFWIHRALEQNGFENLVIHAPDIPTTDKEKQNKSDKIDTGKISRELENNSVKSIYIPDPLHEQLRSLCRLRYKAKQNEIRVKNRIKGHLYFYGIEIPPHEQIPHWSKRFNQWLQSLEFSHQSAKAYLDFCIEELEQHRKRSAQIIKILRGHLKAAELSELIRLLRSVPGVGLISSLTIYTEVINMDRFATFDQLKSYFGLAPSVEGSGDNILVKGLSNRRNRYLRHLIIEAAWVAIRKDPALLQAYNKLTQRMKAQDAIVRIAKKLLSRIRYVWKNQKEYVAAVVE

SEQ ID NO: 482581 - protein, 325 aa, unidentified
MGTSPHQQGWGYEDGKLSYGGIDVSKDRLDVVVLPEERFFSVSNDAAGWAELVARIRPLAVSAIGIEPSGGYERGIIRALLAAGLSVRRINPNKLRQFARARGVLAKNDRLDARLIAEYVAIMPTRVVQRDEAVEKLAEVVTMRRQLRDEHVTVENQAAHIEDAMLRRLNKRRLARLEADTRLLDKRLAEMVATNAALAQRYELLTSMPGVGPVLAFTLIALLPELGQMSRKQIAALVGLAPYDFDSGKLRGHRSIYGGRMPVRNVLYMAALSGCRYNPALKAFHKRLAAADKKSKVVIVAVMRKMITTLNAMLRDNVEWQPKSA

SEQ ID NO: 482582 - protein, 431 aa, unidentified
MKNRTNQRLEEITVGTLVVGVDVAKSLQWARFVDYRGVEIGKALSFTNNRQGFENIVARIEKECNNKLLRHPIDNVVIGMEPTGHYWKALANYLMNKDYRVVGVNPYHTKKSKELDDNSPTKSDKKDAITIARLVKDGRFFDPYLPKEEYGELRGLTNARVSVMKRQSAVKNTITAILDEYFPEIWTVFKNPLNGKASRQILRSCPFPVLILALGENGVLAEIKKAVKKTVGMKKARELTAAAKDSVGVQYGLTAANMRLSCLLDELELSERQLCEIEQMMEAELLKTGYAVQMLQIKGIGVVTAASFLGEVGDPLRFQNPRQIARYAGYNLVEDSSGKNKSGTCISKRGRKQLRSILYQMAFTLISQNAEMKALYRHLTTRKNNPLKKKQALVVVSKKIITVIYSLLKKKADYKPELVLGAVRKEMIKAA

SEQ ID NO: 482583 - protein, 370 aa, unidentified
MLDTTTFVGLDVHARSIKAVSLDVMTGEVRAATFGYDAGAVAGWVRSVDPEARCVYESGVTGFDLQKRLSGLGVDCVVGAVSKMIKPSADRRRKNDRNDAEFLARMLSVGNVVEVWVPDDECEAARDLTRALEDARDDLSRSKQRLSKFLLRHGLVFDERTPTGRRKGNWTRAHWSWIESIRFAERADNDVLAYYVDAVRRAAEEKARLEGLVGAEARKPRWRKRVDSLRCLKGVDTATAADLVFEAGEFSRFRNARSFAAWVGLTPSEHSSGESDRRGAITKAGNKHLRKTLVEAAWHYLTCSGRPKDLAKGQAPDRVARRHAAKGVRRLVERREALLARGVHGNKANVATARELACWGWAVGLMAEEA

SEQ ID NO: 482584 - protein, 417 aa, unidentified
MIIYVGIDVGKRNHEAGIINGEGKQIGKTLRISNTMTGFQRLNDFIQDRIKKITGEQDSSSDELLVHIGMEATGHYWKTLYTYLEKVGYKISVINPIQTEKVRKVQSIRKAKTDKIDAIVIANTLRINQPEQSVFADPDRIAIQKLSRTRRSIVESCTRCKLQGQTIMDQIFPEYESIFDNIYSSSSIAILKKCCTPKQMKEASINELTSIISKTSRGWYGADKAGQIIEAAQSSIGTEIAAEADILELNLLIAQIEMLEKQIKVLDAEIDKYMAKIKTTIFSIPGIGKVWGTTIISEVGDINRFSNSAKFVAFTGLDPSIHQSGDSSGLGGHISKRGSPHLRWAIYEAAECTRRFDPVFKAYYDKKRSEGKSHRSAVCACALKLTRVIYSILKTNKEYVVDPAQLEGAPIRSNCCG

SEQ ID NO: 482585 - protein, 356 aa, unidentified
MMRWCYSLPMKTNITKTSPTPSVVPTSSAAVSSGFTLGLDLGDRQHHVCVLAAAGNIVREASLPNTRPALAQLLADFPRATVALEAGTHSPWISRYLTEQGATVLVANPRKLHAISRNERKCDRRDAQMLARLARVDAALLHPIQHGSAQAQHDLLGLKLRDALVRNRVSLINAIRFTLKSLGHPVRNPSSESFHKTVLQDIPADCRPVVQPLLTVLAHVTEQIKAMERDLVRRSKKDYPATQRLQQIAGVGPLTALCFVLKVGDPQRFSRGRDVGAYLGLCPRRNQSGGTDKGWLRAVNKLSKLAKSTHGRQAAKKFEIRWPEILPLTEIAQAKNEKIISFRKNQMARGFGLESE

SEQ ID NO: 482586 - protein, 336 aa, unidentified
MGRIINIIVAYMQNVSSVVSVGVDIAKDKFDAAFLYGSNQSETETFENSEAGIKKFVRRLQKQKTAEAVPCVLESTGLYHLNMALMVHQAGYRVSVINPLITKKYQQSSIRNAKTDTIDALRLAEIGVKEAKLPVFSGNIQSIEAKKLVCYMGKLEEIKRQLRASRHFVEMTTEITGLDVDLDHTEKAIYELDEQIEVLKQKICELAPKEAKELSDSIYGLGHEKMAVILAMLGDKEFKSRDQLVAFVGLDVMPRQSGTWRGKGRLSKRGNPYLRKVLYQVAWGLKQNNPVYQAEYERLRAKGTNYVTTLIILSRKFLRFLYAYYWKKTACPQFTS

SEQ ID NO: 482587 - protein, 404 aa, unidentified
MIFVGVDWAEAHHDLAVKDAAGKTLAKRRITDDLEGVRHLHEVLACYTDDPSEVLIGIETDRGLFVSALRSVGYRVFAVNPFSASRYRDRHSSSGAKSDPGDAEVLADLVRTDSHNHREIAGDSELVEAVKILARAHKALIWTRQRQTNSLRSILREYYPGALAAFADGLNAKQAIEVLLIAPTPELGRGLSRSRIASALRRGGRKRSIEERSTEIQQALRAPQLEAPALISNAFGETVKALASVIAELSRQIESLEAELASHFDKHPDAKIVLSLPGLGTVLGARVLGEFGDDPDRFASAKCRKNYAGSSPITRASGTKRVVLARYARNRRLADALYLWAFASLTASPGARALYDRHRDAGDSHHQALRVLANRFVGILHGCLVSGTLYDETVAWETRAEIAA

SEQ ID NO: 482588 - protein, 358 aa, unidentified
MRIIGVDLHARQQTIAMLDTDTGELVEKTLEHDGNEVRNFYSTLPGPVLAGIEATGSMQWFLRLMEELGIECRVGHPQKIRKAETRKQKHDRRDARLLLTLLAENRFPTIWMPSSEQRDLRTLLRHRHQWVRMRSRVQHTLQSMALTNGLRRGGSLWSEAGQCELQSLPLTRYTHERRAALLGLYPRLQETIDDLDRQVREEAQQRPQARRLMTHPGVGPVTALATDVFLGDPQRFPDGKTLASYIGMIPSEHSSGRRQRLGAMSKQGNSLLRYLWCEATLHAVRQDPELQRFYRHKLIQKGMGKARIATARKLGIRLWIMLRDEIDYQEFCRRGQQRQKCGGAHAGMPDFNNGPAVQ

SEQ ID NO: 482589 - protein, 316 aa, unidentified
MDHKQAVYGVDVSKAKLAIAQYEGEMVVEIDNAPEPIAAWLASVPAGSAVAMEATGVYHRVLAQLAHAAGLVVYVLNPQVLKHYARAIGQRGKTDGCDARIIARYLVHERSKLRPWQPPLAAVDTLSRLLVRRRALVNARQTLAQSLTGMPMLKAPRQTLLASFKRTIATLDLLIRRELARLPEMAALHRRLTSIVGIGEVVAAQLVAALSTLCFTRSAAFIAYTGLDPRPDDSGQHRGRRRLSKRGPALLRCLLYNAAMSAAKSKVFKPVYLRLRERGLQSTEAIVILARKLARIAFALYKSGETFDVQKHLKTT

SEQ ID NO: 482590 - protein, 415 aa, unidentified
MKTKRSTKKIDLKNTLIVTADIGKFNHHGYYRCPDGNDITCFVFKNNLAGFTSFWKKVEHIQKEKRLKAIVFGYESTGSYGVPLVHFIKGKNVQLKLVNPAHTKRLKELQDNSPNKTDQKDPRVIADIVQLGRGLMPVIPEGKAAELRYLIQSREQILKSKNRITNQMESIITQFFPEFLVLMKGISSKSSLYLLTHYPTAESITQLGQEKLTSILRKVSRCRLGEERAMALYDAAGNTVGIKEGIVGMQQSLKIYLEQLDLLNTQQQVLVEEITKCLKHISYTKILMSLKGIGIITAAVLISEVGDFKWYCKSREIIKLAGLNLYEISSGIHKGQTKISKRGRPLLRQKLYFLALNLVKKGCLMHERYQTYLKKGMKKPQALTAVVRKLIMIIFAMVRDEQPFIEKYNETQKAA

SEQ ID NO: 482591 - protein, 360 aa, unidentified
MFGERTSVGLDVHARSVAAAAIDGQTGEVIKARLAPAHAQVLEWVCRLPGPVAVAYEAGPTGFGLARALSGAGVRCVVAASSKLQRPAGDRIKTDARDALHLARLLRLDEVVSVRVPPPAEEAARDLVRAREAARQDLMRCRHRLSKLLLRHGIVYDDGKAWSELHDRWLRHQRFDAPATQAAFDDAYETVLLAKARRDRLDEKITAIAGDSEFTALARRLACLRGISTLTGFALAVEIGDWQRFTGASIGAYLGLVPSEHSSGQSRSQGPITKTGNTHVRRLLIEAAWHHRTPYRPSVVLQRRWDQADAAARARGHAGNQRLHSRWVTYNLRKKRGVVANVAIARELSGWCWSLAVLPD

SEQ ID NO: 482592 - protein, 341 aa, unidentified
MDEYIGLDVSLEETAISIRRDGQRLWRGKCKSDPSVISAIVRKRAPGAKRMVFETGPLSVWFYHALSAEGLPVICIDARHAKAVLDMAANKTDANDADGLAQLAEVGFYREVRVKGYDSMLTRTLVAARTKLVRICTELSNQIRGLMKTFGLVVPPGRGRTFEQNVRQLLGGNDALSPTIMTMLEAWCGMRKQAAKLSRQLMATARESAPCRLLMSIPGVGVVTATSFVTAIEDPENFRKSRSVGAWLGLTTRRYQSGEVDYDGHISRRGDAHLRGLLYEAATVILTRAGADSSLRSWGLKLREKVGFKRAAVAVARKLSVIMHAMLKSGEFFDRSAAIAA

SEQ ID NO: 482593 - protein, 351 aa, unidentified
MIIVGVDYHPSVQQVAFLDTETGQTGERRLNHSDGEAERFYRDLQRRQVKVLVGIEATGHARWFERLLAELKFELWIGDPARIKAARVRKQKTDRQDAQLLLRLLVEDRFPRIWVPSPENRDLRQLIWHRHRLVQMRTRAMNQIQAAAMNEGVRRKKTLWSKTGRRQLEALPLARWATRRRQDLLELVDRLNTTIDELTAAAEQEARKRPDVLRLMTHPGVGPITALAFVLVLGSPDRFGCGHQIGSYLGLIPCEDSSADRQRLGHITKQGSSLLRFLLVEAAQTAVRWDPDWRRRFVHLAMRRDRRIAKVAMARKLAVSLYWMWRKECDYQQTLQFGSHAGEPGFVHGVK

SEQ ID NO: 482594 - protein, 391 aa, unidentified
MYFVGIDIGKRNHEACIIDVNGKVQQKTLRFSNNQAGGQKLIQWMRAVDPNLTSTHVAMEATGHYWLALHSFLRKHGLRPHVINPIQSDAFRNMYIRQTKNDAKDAFIIAEVLRFGRYTTTELASEEIVALRQLSRFRFSLVDTISDLKRKVISILDMLFPEYERVFSDLFGKTSSELLMEYTTPEEILAVDTEELAAFIAQHSRNRLGLDKAVELKSAAESSFGIDMALDAYRLQLRLLLQQIRFTEEQLESLNAEIVKRLESVDSNLVTIPGIGPVLAAAILGEIGDISRFPTGVKLVAYAGIDPTVRQSGQFNGTRNRMSKRGSPHLRRAIWLAASTAKTYNPILRDFYEQKRAEGKHPMAATGAVARKLTYIIHAVLRDRKPYEPIT

SEQ ID NO: 482595 - protein, 366 aa, unidentified
MKKNSTVSTGRKQIFKQARLTIGLDLGDRSSHFCMLDEAGNVIVEDNLPTMPNQVRQVFSKIPRCRIALETGTHSPWVSRQLSQMGHEVIVAHARNVRLIGESSRKDDQLDARMLARLARFDPGLLGPVRHRSAKAQIDLTVIRARAALVSTRTALVNAARGLTKSYGERLRKCGTGQMDREIAKGLSQELRDALDPLLGEIESLNVRIAEYDRRIEHIATEVHPEVARLKQVKGVGTLIALTYVLTLEDPHRFRRSRDVGCFVGLRPGRRNSGQSEPQLHISKEGDRYLRTLLVQGAHYILGPFGQDSDLRRWGLKLAERGGKNAKKRAVVAVARKLAVLLHKLWVSGEVYEPLRNNPKGVSAVA

SEQ ID NO: 482596 - protein, 426 aa, unidentified
MIPAVIERCAGIDVGKTFVVVCVMIGPANGEAQAEIRKFGTMNSSLEQLRQWLEESGCTQVVMESTGSYWKPILHVLEQSPRLHIVLANSQQVKGLRGHKTDPSDSHWLAHLLRHGMIRASYIPPQAIRELRALTRRRKQLVRAGAQERNRVQKELEECNIKLGNVLSDVFGLSGQLMLEALVEGKSNPEQIAQLAQRQARKKIPQLQAALEGHRLDMVQRQLIQLSLQHMAVLEDQIERLDETIFQHIQAAGLQTEHDLLQTIPGVKKQAAASILAELGPDMKVFGTGSKCSSWSGVCPGNNESAGKKKRAPVMRGNPWLRSTLVECAWAGANKKDSALQHRYQRLCPRLGHKRAIVAVAHALVLTVFDVLSQHQPYDGLGADPLPPQKLQRLVRHHTRRLKTLKRWLPAALRAHPSEASPPAPS

SEQ ID NO: 482597 - protein, 356 aa, unidentified
MKQVSKLDFTGQRIYTSLDTHKRSWKVSIFTEHFEHKTFTQPPDTEVLVHYLQRNFPGAEHRVVYEAGFCGFWIHDRLREKGINCIVVNPADVPTTDKEKKTKSDPVDSRKMARSLRNGELTGIYVPLREKIEDRSLIRTRQAMVKKQTRCKNQIKSALYFYGIVIPEELAEGRWSRKFITWLTEIQMTRASGNIALKTLLSELLYLRQTISDLTKEIRRLAHTQEYAENHRLMKSVIGISTLTAMTFLTELVDINRFKNLDTLASYVGLIPDVQGSGEKETTTGITSRRNPQLRGILIEAAWVAVRKDPAMMMTYNQLLTKVSKKTAIVKIARKLLNRIRYVLKNKQEYVPAVVQ

SEQ ID NO: 482598 - protein, 318 aa, unidentified
MSDSVFVGIDVSSQTLEVASSSELKTWQVANDAAGLDALVSRLLELGPALTVLEATGGYEFEAACALQAAGLAVAVVNPRTARDFARAMGALAKTDALDAKMLAAFARVLHQHPERERFVKPLADAELQRLQALVLRRRQLVQMITSERQRMRISHVAARPSIERVIEFLKTELGDSEADVAAHVQRHHAELAAALASVPGIGAASVAVLLAELPELGRLDRRRVAALVGVAPLNRDSGQMRGQRSIWGGRADVRRTLYMATLTAVRHNPILKTHYERLLAAGKRKKVALVACMRKLLTMLNAIAKNGSKWDPSLHNA

SEQ ID NO: 482599 - protein, 250 aa, unidentified
MENISNWVGIDVSKATLDVYIRPIGKALKVANSESEIAVLVEKLKLYDLNVIVIEATGGLKTELIIQLQAALLPVALINPRQGRDFAKATGKLAKTDAIDAQILAHFGEAMKPQVLAVESESARQLSELISRRRQLVEMQTAEKNRSSRARGKALIDVEEHIKQLDERLEKINHEIEQLTQNNQQWIDKANLLKTTPGIGQVISTTLVSDLPELGKLTAKQISRLVGVAPINHDSGEAVRSCRLASESNC

SEQ ID NO: 482600 - protein, 348 aa, unidentified
MLHAGLDLSRRKIDVCLLSAGGEIVEEFASPPDADGLRGLTRRVGSHGVAVRGVIESMTGARFVHDRLEELGWDVLIADAAKVKGLAPLACKTDRIDARVLAVLSERDLVPEIWLPDPRIRREREQARFRMHLVKHRSMLKHRIHATLITFGHPCPVSDLFGVAGRELLERLAIPQPWRGTVAASLELIGDLDRQIDQINKDLRSGGADHPYVPLLLTVPGIGWVLAFTIAAEIGDITRFASAKKLCGYTGLCPRVNQSGDRDRRGPLTKQGPKYLRWAMLEATMHALRHPAYAERYQRTKRRLGRQRGAKVAQIDIARKLTEAIWHMLTTNQPFTPAPGGSTYRLAA

SEQ ID NO: 482601 - protein, 438 aa, unidentified
MRARVGNFYKKSIPLSKPIKQRSVKVQVMNECCCGIDVHKKMIVACLLKGKAGEEPKKTIRRFPTMTCDLLRFRDWLLSEACTHVAMESTSVYWKPVFNIIEDCVEVILGNAREIKNVPGRKTDIKDCQWIAALLRHGLIKASFIPPKPIRELRDLTRYRHKLIQCRSSEINRIQKNLEDANIKLSSVVTDITGKSAQEMILHLIKKDMAPKQMADLAKGRLRKKVTELEKALQGNVKDHQRLILQISIQMISYYDLSIEKLNREIDKRMEPYQKEVELLRTIPGVQKKTSEVIIAEIGTDMSRFPSERHLSSWAGLSPGNNESAGKRKSGKTTKGNIYLKSILTESSWAVSRAKDTYLQARYKRLSFKRGKKRAAIAIGHSILVSTYYIIKDHRCYVERGANFFDRSNELKLLKNLTKRIQKLGYRVETKKNMRKSA

SEQ ID NO: 482602 - protein, 259 aa, unidentified
MELSPIFIGIDVSKARLDVAIRPSGQTESVSNDTAGIEALVKRLSERRPALIVLEATGGVERSVTRALASAELPVVVVNPRQIRDFAKATGQLAKTDGIDALVLARFAEAVRPAIPLPDEVSFDLRALIARRRQITQMIVAERNRLSGASKAVRKRIEAHIRWLESELDRADKDLDQSIRQSPIWQENQDLLKSVPGIGPVISRTLLAELPELGHLNRKQIAALVGIAPLNRDSGTLRGRRTIWGGRASVRAVLYMAAW

SEQ ID NO: 482603 - protein, 341 aa, unidentified
MTVYIGVDLHARQQTLAFVDTHDGEIKCRELHHQKEDVAAFYRQFTGEVIVGVEASGYTNWFEELIEQLGYTLLVGDAAEIRRLARRRQKNDRRDAELILDLLAHDEFPRLYRYPRQSREVLRQLRFRHKLVKLRTSVLNSLHALSISAGLSLQARLATAQGRTRLEQLRLSPVLATQRDEWLALGDELSHRILGVERWLQRQAKDDEQAQRVQTHAGVGLLTSLCLVHTLGDVTRFASTRKVTAYVGLDVTEHSSAERKVYGGISKAGSRLLRYLLVEAGQTAARSDEQLRDFYQQVMKRRGKAKAKVAVARKLLIRTFIMLRDEIDYAEFLRRGKRTGE

SEQ ID NO: 482604 - protein, 419 aa, unidentified
MSFKILKNNCCGLDVHKTWIFACIGITDSRSRTEYKQARFSSFSKGLQELCDWLAKYNCTDVCMESTGKYWIPVFNILEKNNVWVTLSHPKYTKPQKGNKTDRKDARWICDLYMCGMVKPSFIPPADIRELRDLVRYRYKLTCMITGEKNRAQNCLTVSNLKLDEVFSDVFGKSSRSITEQILQHPGEIFDVTPFVDGRCKTPIEEIQAAVDGAVSTEQAVKLKQCLNHIDELEMHKAEIDREIFRLSDKYEEALILIRTVPGFDKNPMTAIQVLSEIGGDMSVFPTAKNLVSWAGCCPRNDQSNQKIKSTRISRAGSYFKPVLVQVANALIKSKKNPEFTTRYRRIKARRGHKKAIIAICRMLLTAIWHILTDLKPYTPEGFLESRPVNESKVLTTSQALSLLKQRGYIIKDDVVPVS

SEQ ID NO: 482605 - protein, 430 aa, unidentified
MKSNTQNAKIEAITEKTLVLGIDVGSETHYARAFDYRVIEYSKKPFKFSNTEAGFVTFKEWILDIKERHEKDKVVLGMEPTGHYWFNLGKFLQDNEMKPVLVNPHHVKKSKELDDNNPTKNDRKDPKVIAGLVREGRYMIPYLPDGVYADLRTASNIRFQLQAELTRIQNRISRWFNIYFPEYKTVYGKPDAKSGILILKAAPLPEDILTLGIDGVNQIWRDAKLRAVGKARAKTLIEAAEHSVGSKEGAVSARMEIRMLLEDYESRNTRLQEVMVLIEELVRKIPMAEKLLEIKGVGIRTVSGFLAEVGDISRFNNPKELQKLAGLALVENSSGKHKGETTISRRGRKRLRYLLFEVAMSLVSKNQEFRELHNYYTTRRLNPLKKMQSLMAIAAKLIRVFYAMLTKGVDYDPKKMVNDIKRPAVYLQTA

SEQ ID NO: 482606 - protein, 502 aa, unidentified
MAGLARSTATQRKACRTCEGMLRQRRRENECRLCPLLDGRTRLQRKDGLNIRPQTGFQWPVWRHWPQRSDERAAPANECCASEARKVNDRKVRIAVIGSAKMLRSIANVRFGEAAPQRRNRLRMSGNGMYRLLHPAGYTESSSPADRRSSMATIEFDELMSIGIDIGKDTFHLVGFDHDGQRVLRKQIKRLALIATFEKLPRCVVGMEACLSAHFVSRTLRKMGFEPRIIPAIYVKPFNKGQKNDYNDAEAFAEAALRPNLKAVSEKTQDQLDLQALHRVRSRLVSRRTATINQIRAFLIEQGITVRKGLRALKNSFERILEERKDEISPRMDSILIGLYGDWMWMDDRIDKVSKEIEEISRTEENCVNVMTIPGIGPMISTAMVAAVGEGEAFDRGRDFAAWVGLVPRQYSTGGRTILGRISKRGSRYLRMLFVQAAKVIMMRPHRWPDFSFGEWLISASERMHRNKAAVALANKLARMAWSILRHKTAFDAPRDEVAIGV

SEQ ID NO: 482607 - protein, 364 aa, unidentified
MSQHFRFDASRSLTALEQDSTFDAQEEMLLKLLHRWHCEAGQAGRNIKRIVVAFEAGRDGFWLARWLRARDVEAYVIHPTSIAVSREHRRAKTDRLDTELLMRVFLGWLRGEKRHCSMVAIPTIEEEDARRPNRERQNLVTEQTRIINQIKAIFARFGLRTLRPTMRKLAEGLEDLRTAEGTPLPQNTLSELRRHLARLRFVRDQIHAVEQERLRKLAVAPAAETKSPDAMVRLIARVFGAGIETADMLVNEIFSRHWRDRKAVARYAGLTGSPDESGSRRRERGLARAGNVRVRCGMIQLAWRFVRFQKNSALAQWFAARTADGRASTRKTMIVALARKLLIALWRLVTRGEVPQGIVLRPAS

SEQ ID NO: 482608 - protein, 366 aa, unidentified
MSKLVCVPLEKQGGMPVTVRPQAGEPVYLAVDLSRSKWVYGLRWGGQDRRCVSSPYGLAHVQALVEEYRDCQLHVVYEACGFGYEMAWWLEEQGIDVMVIAPSRVERVPGAAVKTDRVDVRAMARKREQGQVKGIYIPRRPEHERRQLSRTYAQALQECKRARVRVRSLLQEQGRIGPVPKAGWATYEKWLATQSLPTPVARCVEELLTLRSAARASAARLRREILKLTSEPAYAPVVQAMTAQPGVGTFTAIRLVLELGQITRFPTADSIVNYLGLTPSQYSSGDMDHRGHLLKCGPGYLRAWLLQCAWASIRGAHADPGLQQCFEQLRPRVGKKRAIVAVARRLALRLRARWREAVQVPAPAAA

SEQ ID NO: 482609 - protein, 373 aa, unidentified
MKKSSKKQQGSAVAESKPEKVVGLDLGDRHSHYCILTSSGEVMEEGRIQTTAASLEKHFGSEARMRIALEAGTHSPWVSRLLKGYGHQVIVANPRKIPSLTSSKSKNDRNDARQLARMAAFDPELLHPIEHRSAERQQDLNLIHTRSVLVRARTMLINSMRGLVKSTGGRLPACSSEAFPEKVPAAMPPALKAACAPLLEQIAQMNQTIAAMDKQIDGLDKKYPEIAILRTVPGVGPVVAACYALTLDSPQTMPTNRQAGAYLGLRPGQQQSGDSNPQCGITRTGNTYLRSLLVQSAQYILGRLGPNSELRCWGLKLAASGGKRGKKRAIVAVARKLAVILLSMWRNRKKFEPFPQSATQLATGLNPSTQTLA

SEQ ID NO: 482610 - protein, 422 aa, unidentified
MPNVQSTQSPVVLVAIDIAKLRHDVLIEAPGWKRRKRLVLLNTAVEFRRLADYLHSLHMPVHIVFEATGNYHRPLAHFLLSQGFQLDLIPSLAVARTREAMHNSWDKNDPKDAQVLLHLLRTGVTQRYHDPLVNHTHDFQELSLTYAQVSMEKTRMQHRLLTHYLPLYFPEIERHYHASRSLWLLDFLQAFPTPATITALDRDQFVQSAWPIIGRKVAKRRLLEDIYHRAQSSIGLPVEAESEAVAMFRVLLKEMSRLCKLRQELEQRADGYLGDNDDFRRLKQIPGIGPILALTILAEAGDLRRFRHHRQFLKFCGLDLATQQSGQFRGATKLSKYGNGRLRCALWMAATIAVKQRENSFREKFERYIRKDPLSADRKRMAYVAVAGKMARVVYGIIKSGTEYRCFHEAAALSGRAVSVGP

SEQ ID NO: 482611 - protein, 343 aa, unidentified
METFVGLDVSLGETSVCILDKDGARIFEGKVASEPAAIARLIRKRAPGVVRVGLESGPTSAWLTHALTAEGLPVVCLDARHAQAVLSVRLNKSDRGDARGLAEMIRVGWFKAVQVKSLNAHERKALLIARHQLVDMRVRIDNQLRGILKTFGLVIGKCGRGHIGQRAQELSKRRPGIDGVVASMVAVRDSLLEQIIVCDRAIRRLAKKDDTARRLMTVPGVGPVVALAYISVIDDPKRFTHARDVGAYLGLTPKRYQSGEVDLAGRISKCGDGFARTCLYEAAGVLLTRVERWSPLKAWGVRLMKRVGATKAKVAVARKLAVILHRIWTDGTEFWWTKEAATA

SEQ ID NO: 482612 - protein, 331 aa, unidentified
MKNKEFVGIDVSKNVLDVFVLSAKFHFTVANSPEGFAQLLEIVSSKLKEAFNKVFFCFENTGRYSRLLSVFMQDGGFGFAALDALDLKRSMGLTRGKTDKKDARTIAVYAWRRRDELVTTKLAGPVLDQIRQLLTLRDKLIRHRTAFKNTSRDLHDGYFDGEFDFIKERQQSMLAHLQLEIDLVDKEINRIINLHEDILINYNLLRSIPGIGNVLAVYLIALTHNFSRFDTPRKFACYAGIAPFEYSSGTSVKGKTKVHPCANKHIKSLLNMAAMASIQLNGEYKMYYQRRLLEGRNKMSTLNIVRNKLVFRAFAIVKRGSPYIDLHKFAA

SEQ ID NO: 482613 - protein, 428 aa, unidentified
MDEVNRNRLEEFRQLRQEVRHSEKYLIVGIDIAKDQHHAFFGTATGKTLLRRLVFSNDHEGFRKLLDQAEVLRVRHGLKKVVYGMEPTADYHKPLGEYLITQGRMVVLVSGVTVKRNRESLDGRWDKHDVKDSANVADLISQGKCLYYEHPSAELRGLRGLLSLKRRLKKQEQGYRVRIRNHLIAQYFPEMDRDYERLGVEGLSIVRWCFPPSQITELDVDPFIERVTSRRIRLERRRRLEGIWEKAGGSIGCDGVPGVEHEARMMVEGLQQIRQMIKETEGKIQELCERFLEYKYLLTIPGFGPDLSAKVLGAIGDPDRFQNGKQVLKLAGLDLSADRSGKDSDKAIPEISKRGKSDLRYALYQAALIASTKNQDFMRYYVRKLEGRQKEKGIQTKMWVKLSAKMLLIAWTLMKKKEAFDPAYLNVE

SEQ ID NO: 482614 - protein, 345 aa, unidentified
MKKGITIGMDLGDKKHQVCILDKTGKIIAEEKVAGTRAAVTKFFKQYRGAVVAMETGTHSRWVSQVAATEGLDVLVGNARKLRMIWQSPQKSDTRDAVMLARIARMDPELLCPIHHRGEQVQMDLEIIRARDVLVRERTRMVSHVRSVVKNMGERLAPSSAASFGHKAKIPEALKEALKPMLEMIRELTKKIHAYDLMVKEAAASKYPETEQLSQVGGVGPLTALAYVLTLEEPERFAKSRMAGAYLGLVPRLDQSGQIDKQLRITKHGDGYLRRLLVGSANYILGPFGPDCDLRTFGLKLMQRGGKNAKKRAVVAVARKLAVLLHALWRSGQPYEPKRTQPLAA

SEQ ID NO: 482615 - protein, 423 aa, unidentified
MENTAARKRKQVPEGYLVIGIDPHKKRHAAVAITQDFTTRDKFKFANTREGLETMLRRARTEMVKSDCRGVMFAIETGGHYWRNIAYFLDERGIPFRFINQFTLKRRREGKDLNRRKNDYRDSEVAAQLLCTGEFTESKVPQGVYAELRTAHNAYRRLVKERTRIINLVKGLLDGLFPEFTRVFKDPCGLTALSVLSTCAIPSVIAGTTEEEFVATIEAKHQGRLMRKKLRALHCSARTSIGIDAGARSVSSEISFLVEKLELIRRHIRIIERKLVGLVDETEEGKYLLSIRGLNYTAVAGLLAELGCFKAYRSAKQMIKMAGSNPTESESAGKRSSHTPMSKKGRPVLRYCAWTAVIPMLRFNPDFRAWAKQRRERPAHANPLSGREIVGAALNRLLRLAFALVRDQTYYQVSKPELTLVAV

SEQ ID NO: 482616 - protein, 339 aa, unidentified
MKLYGAIDLHSNNNVTVLIDEQDKVVYEKRLPNDLGVIAQQLAAYQSSLEGIVVESTYNWYWLVDGLMDKGHQIHLANTAAIQQYEGLKYTDDHSDARWLAHILRLGVLPQGYIYPKEERAVRDLLRKRGQMVRQRTANLLSIQNLITRNTGSSISSNRIKTLDSETVDALLPNQDLALAVKANLAMIQCADGQIDILERTVTDRVKLRAEFSFLKTVPGIGQILALTIMLETGEIQRFSTVGDYASYCRCVGSQKLSNGKKKGKGNTKNGNKYLAWAFVEAANFAIRYNARIKSFYQRKKAKSHGVLAIKAVAHKLCRACYYIVKNRVAFDIAKAFAG

SEQ ID NO: 482617 - protein, 370 aa, unidentified
MDQIIRIGVDTSKSVFVLHGVNGAEQPCLRRQLRRSQVVTFFSKLAPTKVGLEACGAGHYWARQLEALGHQAMLLPPQYVKAYVRRNKNDAADAEAVCEAMSRPRMRFVAVKSTEQQAALMLVARRDGLVRRRTQLSNAIRGHAAEFGLVAAKGLDKIKPLLMRIATDAKLSDLAKEMFADLGEEYAELQKRISAFETRLKVWHRGNETSRRLAQVPAIGPIGASLLVMKVTDPHAFRSGRDFAAWIGLTPKDHSTAGKLRLGVITRAGDESLRSVLVAGATAVIQQVRKGRGRHSRWLVELVKRKEPKLAAVALANKTARIAWKLMVSGERYDAHKVESCFVHPTGSVALRSRRQGRFAPPSAVALGQP

SEQ ID NO: 482618 - protein, 457 aa, unidentified
MKHYKLRKLQIHRHFTHDRYLVGIDPAKTSHQAQILSPDGLPTGSTFSFKHSFSGFHHQLWKRLKARLPELNHLPRHELAEHLVFAVEASCNLWANLVDYLQGQGCRVVLVSPLSTCHARPAKSGDFSRTDPKDAYLVADLARDGRFHFHQIYQPDREAMHRLAITYDKLRKSLQQNYARLRALLEQVFPELLTVLTLDSLTAHHLLGSYLFPEDFLRLDLDTETACLMDISRGQHGRETLVKLQTRAQRTIGVAMTDVERRAHRLSAKAWLCLIKTLQAQIQGVSSELIGLSKKTPYHASLISLKGISSLMAALFIAELRDPAQVTHIKQIERLAGLNLYVHDSGTYKGHRRISHIGNSRLRWVLYRMASETTKYVPEVRCKYLRRRLKGQTNRSKNLVATIPNLLTLVMRLLREERPYRERPDTLAEMHRLEAQLEDKMPTRRPRRKPQTRQTAA

SEQ ID NO: 482619 - protein, 425 aa, unidentified
MNYKQNEKINQVKESTLVVGIDIGSTTQYARAFDWRGIELGKVFTFSNSREGFESFKAWMQHLQDKYKKLDAIVGIEPTGHYWFDLGAYLEDEGILLVMVNPYAVKQTKELDDNSQSKNDRKDPKVIAKLVTEGRYSAPYTPDGVYADLRIMVANRKRLIREMTQIKNRFARWFAIYFPEYTDVFGDYEAQSSMLLLKKVCTPEAIVELGAEKINQIWRDAKLRAVGMKRATTLCETAKRSIGLKKGSSAARYEMKLLLEDYEYKKAQMDAVMEEIEKLCRKIPESEQMLAIKGIGVITVAGFLAEVGDVRRFESPRQIQKLAGLSLRENSSGKHKGQTTISKRGRSKLRAVLFNAAIPLIAKNPEFKSLHEYYTTRANNPLKKKQSVIAISCKLIRVFYAILAKGVTYDAQKLISDIHRQPQVA

SEQ ID NO: 482620 - protein, 378 aa, unidentified
MNRIIKIGMDVHTTNYTLCIFEPSFEHDGTVHCITQVKPEIKKIIHVIEVFKKKHENEELNIVCGYEAGCLGYSLYHELKEKGVECVILAPTTMKTEKGGRKLKNDYRDAKMIAECLAYGGYSAVHVPTELDNSVKEFIRMRDDIKENLKSIKQQIIAFLTRNGKQFNGKNYWTKKHIDWINTISFSEPLLLDTLKEYMIEYNHLCDRVETLDKQIEEVSVKEEYVEKVQQLQCLIGIKTHTALSLIVETSDFNRFKKGKMYSAYLGLIPGDDSSGGHEKKLGITKAGNSHLRKLLVEAAQGYTRGKVGFKSKDLKSRQEKCSSEVVAYADRANERLRRKYYRMTLRGKKYNVAKTAIARELACFVWGIMTDHIDLCS

SEQ ID NO: 482621 - protein, 410 aa, unidentified
MVERFVGIDVALREHRIAVLDRDGEAVGPSFTIAASKDGVATLLRTLDARGATAAQTLIGLEASGHLWENLEAALIGAGYRVIVLNPRQTRRYRDVVRRQAKTDDIDAHVIAGLLRSGAAQASYVPDEQIQSLRELARLRARLMADRQDYLRQLVAQLDVVLPEHHAVLGDLLTARARGILAPFPTAQHLAHANPRAIRRAAAEAGARGFSLDDATGVRDSARRSLYSGKAAAARAHVVRTLVSQLERLTSAIDEVDCAATTLLPPSEPGTGPSDAELLQTIPGIGPQTAATLLGELGALTRFTDARALGAYVGFYPVINESGGRAATPHLSPVGSRIARHSLYLAAVNAVRRSGEWRTIYLRTKAQGKTAKQALIVVAVKLLHAVYAMLKHRQPYNPSRLLVAPATIGS

SEQ ID NO: 482622 - protein, 452 aa, unidentified
MVAVMEPQEIDDEEHEQVLERVAAVDVAKASGMVCTRVPHQSRPGKRRTRVWPVDATTNAVLELADHLVAEGVEKVTLESTSDYWRIWFYLLESAGLDVQLVRAQDVKQAPGRPKSDKLDAVWLAKLTERGMLRPSFVPPAEIRRLRDYTRLRADLTCERTRHYSRLEKLLEDALIKVSAVASSLAAKSVRDMLEALIGGERDPKILASLARGRMRAKHDRLVQALAGRFDDHHGELARLLLDQIDTLSAQIGRLTTRTGELIAAIPPAQGIDADGTTGPAAGHGKNAPVLPAVDRLDEVTGIGRGGAQAIIAEIGLHMSVFPTAAHLVSWAKISPQTIQSGTRSRAGHTGKGNPYLRGLLGEAAAAAGKTDTFLGERYRRLVKRRGKLKALVAIARSILVIVWHLLDDPAARYHDLGAGYYASRVDKNRKMRNHVRQLEALGYTVTLTQAA

SEQ ID NO: 482623 - protein, 345 aa, unidentified
MTIVETRQIIGGVDTHLDTHVAAAVDGNGGLLGVWSFPTTTGGFSDLYTWLSGFGTLCRVGVEGTGAYGAGLARFLRGAGVAVIEVGRPNRQARRAHGKSDTIDAVEAARAALSGRANAVAKTADGNVEAIRVLLVAYRSGRDSRTKYLNQLRHLGFCAPDDLRERFRGVPAASLARDAAALRPNRNGDPVLYATKLAMHTLGRRVIDIDTDCAQLRGELTDLVKATAPSLLDLHGVGTHTAALLLVAAGDNADRITSEAAFGHLCGVAPIHASSGKVTRHRLNRGGNRQANHALWRIVFTRMSSDPRTRAYVERRLAEGRSKPEIMRVLKRYVAREVYRHLPGV

SEQ ID NO: 482624 - protein, 349 aa, unidentified
MQNKNLQYVGLDVHKKVVVYCIKNIEGEVIDEGRVPARAHNLEEWARSIEGEWSGCMEATMFSGWIYDLLKPYAAELKVGDPQKLEAIASAKKKSDRLDASTLSDLLRINLVPEIYMAPRNYRDMKSLMRYRNLLVRESTRFKNRLACRLMESGIEYNSGKLHNKGYFADLIRELGDISDEVKMILQLSRSEIEFLKAAQAMIEKELMKDDDITKRCEYLMSIPGVGINMALTWVCEIGEIERFTRRKDLISYCGLCGRYEESAGKEKRTPLSKQRNKYLQSILIEVAKLAPRYNADLAMVYSSAMRKGCNRNEATISVARKLVGYMFAVDRERRAFVTKDVNKCVQSV

SEQ ID NO: 482625 - protein, 337 aa, unidentified
MKNYIGIDVAKATLQVYIPKSDIDIEIKNSSDGLRKLYSKLKKQYQKEIKGIVFIYESTGAYSTILEQFCQEKEILCFKVGAYQSASFSKVIKNRSKTDKLDAQMLSQMYILAKEKDIKVPKRDDKAHQIRSYIKYYQALVKEHIRQSNYLEASTYNLEDKFILKQVKKKITAIEKEKAMIIERVLEIIKANPTYSQSYENITSIKGVAEKSGIILLYLFLRYPNASRQQITALCGLDPIQRSSGTSVQHKERISKQGLSLIRAILYMPTLNTIVYNPEMKLIYDRLVERGKPKMLAQMAIMRKVILLAHSLYKNNQKYDENRYLQFTQIKEVNMVE

SEQ ID NO: 482626 - protein, 409 aa, unidentified
MQVVHERCAGLDVHKKSIFGCVLWFDEKGNKQQEIRSFGAMTVQLLQLADWLKQHQITHVAMEATGVYWRPVWAILEGHFELILVNPHHIKAIPGRKTDAKDCEWLADLLQHGLVRGSFVPATEIQDLRDLTRYRVELTQAQNRVANRIQKVLEQANIKLSSVASDTLGVSGRLMIEAIIAGEQDGEQLSQLAKGRLRSRIPELQAALAGRIRSHHRFMLNEHFSEWKALAERIERVEKEIDKSMSPFEQAVTLWQSIPGVDRLTACSLVAEIGINMKQFPTAQHLASWAGVCPGNNESAGKRMATMTRDGNRWLRRALCQAAWAASHKKNCYLASQFKRIAVRRGAKRALVAVAHSILIIVYKILQTSKPYQDLGADYLQQIDKEQLRRSLLRKLQGLGFHVTVSAPA

SEQ ID NO: 482627 - protein, 351 aa, unidentified
MDTTTVGVDLAKNVFVACVADCTGRIVARREFNRAGFLSWLGTLPTATVIGMEACGSAHHWGRTAQRLGLAPRLMAAEFVRPYRKRQSVKNDRADAEAILVALLSPGMRFIPVKTEAQQQRLAWHSLRVGWVEERTALLNRVRGLLAEFGVIVDPGPKHLRALLAEREFDTALSPALRGLIQSVRDQLDALDARIGECDRQITAQQANDPLAKRARDLPGVGLITADAVTASVGDASMFRNGRQFAAWLGLTPSQSGSGGKTKLGRITRRGDDYLRTLLVQGARSVLAATLRKQRRESPEKLTRLQQWIVVLNGRIGYHKTLVAIANKHARQLWAVLAKGEAYNPQAWQRA

SEQ ID NO: 482628 - protein, 408 aa, unidentified
MAEVERCAGLDVHQASVTACVRFPAKSGERGQEIRTFRSTTAGLVTLRDWLASFKVTLVGMESTSVYWKCVYHMLEDDFECWLLNAQHLHNVPGRKTDVADAAWICQLLEHGLVRPSFVPPKPIRELRDLTRYRKTLIEERTREVQRLHKVVEDAGLKLASVASEVLGVSGRLMLDALVAGTHDPEVLAELAKGRLRTKIPALREALEGHFMGHHCILMGELLAHLDYIDESIARLNLEVERVIAPFVNDVELLQTIPGVARRSAEVLIAEIGADMTRFPSSAHLASWAGYCPGNNESAGKHHSGKTRKGSKWLHKTLTEAARAASRSKNNYLAAQYARLKGRRGDKKAIVAVGHSMLVIAYHLLSRQQPYSDLGNDYFHRRQSEVYKNRLVRQLERMGFEVALTPAA

SEQ ID NO: 482629 - protein, 339 aa, unidentified
MNEVTLIGIDLGKHSFHLHAQDATGRMVFRKKLSRQQLLRTLANVPSCRVVMEACAGSHWLARQLAGMGHEPRLISPQFVRPFVAGNKNDFGDAQAICEAACRPSMRFVSPRNEAQQTVSAMHRLRERLVRERTATVNQIHGFLLEFGISLPRGAALMSRLPTVLDHETLPPRLVGLVVRLHAQVHYLEEQLRQVVQDLKASLREDDKSRRLLEIPGIGPITASALAVELGDARQFANARQFAASIGLVPRQYSTGGKPTLLGISKRGDRNLRRLLVQCARAVMQHTASRTDALSLWVKTLSTRRHSNVVACALANKLARIAWAVLARGTHYQARALTT

SEQ ID NO: 482630 - protein, 457 aa, unidentified
MRRKSKRTRGIEEAHPFSGMSQVNPNAAGVDIGAIEIVACVAADEHTQIVKAFGNYTVDLQALACWMKSHNIRTVAMESTGVYWIPLFEELERQGLECLLISSRSMRRVAGRKSDISDAQWIQTLHSYGLLEGSFRPQAELVALRTLLRHRNQLVEHRSPHVQHMQKALLQMNVQLSQAVSDITGITGQNIIRAILAGGRDPQTLAAMREPGCKKSEEEIGKALTGTWREEHLFILKQSVAMYDFYTQQLQACDEEIARVYGLTRPDWETGEVQPYTRRKKNSHSKNIPHNPEGIRRHLKRISGVDLSVVDGFGVSLAQTVIMEVGTEMNKFPDEKHFCAWLGLAPKHEISGGKVLKNSTLKTKNRAGQAFRMAAHSVKQADCVFGVMYRRLRARLGPAQATVATAHALARLVYRMLKYQVEYEPLSVNEYQKHYEEQQIKYMRKKAAKFGFQLVPA

SEQ ID NO: 482631 - protein, 310 aa, unidentified
MKDTIGIDISKPVLDAFRLATGEHRQFPNDKPGCKALMRWIGQEPVRVVFEPTGPYHRILEQSLTRAGIAIVKVNPRYARRFAEATGELAKTDRIDAALLARMAVVLDLEARPARSEIHHDLRELSVARQALIKDRIAARNREQVAQNALVRRQIKTRLVQIEKQIGEIEQAMAAIVGADETLQRRREILASIPGIGPITAMAIVVEMPELGQMDGKQAASLAGLAPITRESGGWKGRSRIQGGRASLRCGLYMPALVALRINPDLRRKYQALKEAGKPSKVAIAAIMRKLIVLANALIRDNRKWSPNAT

SEQ ID NO: 482632 - protein, 390 aa, unidentified
MIYVGIDVAKTTHYAAAADSDGVVLVVPFAFDNDAPGFAKFISKIASFPKEQLIIGLESTGIYSENLICFLFDSGYKLAVINPIQTATLRKTNIRKTKTDKVDTLLIIKSLMVNSYRLYTEQDTQSLKLKSLCRFRQSLKKSKARLKIQLSGYVNLLFPELLSFFKSGIHISTCYTLLKRCSSPAEIAALRLDSLSRLLSNASRGRFSRSTAEALKSLAKSSVGVKNPYISIQIAQTIQQIELLEQQIDEIENVIKDTICKLDSVIMSIPGIGAIDGAMILGEIGNIDRFASPAKLLAYAGLDPTVCQSGKFKARSTKMSKRGSKILRFALINSAWQLTLKNDTFFNYYQLKLSQGLSHYGALGHVAHKLVRVIFTLLKHNVLFDPTRLV

SEQ ID NO: 482633 - protein, 389 aa, unidentified
MKKNTIARLQTGSKSKVNQIRRMAAEQRMTVGLDLGDRTSRYCILDEAGEKASEDKLPTTKAGLDLVFGKMPPCRIALEVGTHSPWVSRHLAAMGHEVIVANAHKVKLITQSVKKNDRMDAEQLARLARVDPKLLSPIQHRGPEAQGDLAVIRARAALVDARTELINSARGLAKPMGERLKKCDADLVKESLADGMGEAVQAVIGPMLKSVEAISKEIGEYDKKIEGIAKRYPEMKVLTQVHGVGTLIALTYILTIEDAQRFEHSRDVGPYLGLTRKQRDSGGSEPELGITKAGDQLLRRLLVQGAHCILRQGAPDSDLKAWGMARLQNGGKNGKNQKGSKNAKKKTIVAIARKLAVLLHRLWVTGEVYDPLYNRKAAEAAKGKGEAAA

SEQ ID NO: 482634 - protein, 369 aa, unidentified
MNHTTSIGLDVHARSIAAAALDPLTGEVVTKTFAYSPGEVASWALGFDSPKAVYESGVTGFHLCRELNALGLECAVGASSKMQRPPADVKRKNDLSDAQFLARLLATHNVTEVFVPDAETEAARDLVRAHADARADLTSARQRLNLFLMRHGHVFCEKGPTGAPVGSWTKAHWAWIRQISFPDEADEEALAFYIAQVRHMEGQKRELEKFIRAHAREPRWRGRVDALRCLKGIEEITAFSLVAEAGVFSRFDSARAFSTWAGLVPSEHSSGPRRRTGGITKTGNSNVRRLLVEASWHYARATAARKPAPSPDVPLRIENHAAKAVKRLVARRREMSARGKRPSVANCATARELACWCWAIGRMAEGADA

SEQ ID NO: 482635 - protein, 343 aa, unidentified
MDYFAGLDISVKETSVCIVDDAGRLVREVKVASEPDALLQVLTTPGLAFKRIGLEAGPLSQWLFSALAEAGLPVICVETRHMRAVLKAQINKTDRNDARGMAQMMRVGLYRPVHVKTLRSQKLRMLLTHRKLLQSKAIAIDNDLRASLRNFGLKVGLVGMAKFEARIKELVEDLPDLAVLVEPLLIVRRVLREQIGILHRRLLAIVRNDDVCRRLLTVPGVGPVVALTYRATVDIPARFRNSKAVGAVFGLTPSKYQSGEVNRTGAISRCGDEMMRMMLYEAAQILLVRSTKWSWLKAWAMKIARHRGMKKAIVALARRLAVIMHRIWVDGTEFRWTREATAA

SEQ ID NO: 482636 - protein, 383 aa, unidentified
MKSNTQNAKIEAITEKTLVLGIDVGSEMHYARAFDYRGIEYSKKPFKFSNTEAGFLTFKEWIRDIKERHEKDKVVSGEWNQRVIIGSIWEILQDNEMKPVLVNPHHVKKSKELDDNNPTKNDRKDPKVIAGLVREGRYMIPYLPDGVYADLRTASNMRFQLQAELTRIQNRISRWFNIYFPEYKTVYGQPDAKSGMMILKIAPLPEDILTLGIDGVNQIWRNAKLRAVGKARAKTLIEAAEHSVGSKEGALSARMEIRMLLEDYESRNARLQEVMALIEELVKQIPMAEKLLEIKGVGIKTVSGFLAEVGDISRFDNPKELQKLAGLALVENSSGKHKGKTTISRRGRKRLRYLLFEVAMSLVAKNPEFRELHVYYTTRNETL

SEQ ID NO: 482637 - protein, 366 aa, unidentified
MRVSVGVDLHKGQFTVYWMSEDRSLGSFERYGTNAAGFGKFEGELSQHLEAGRSVEVAVESTGNTRYFKNRVERVGVKVRVINTLKFKVVNESVKKTDRHDARTIAEFLEVGMLPEARLCSEASEELRRLLKSRSVLVRTVVALKNQVHGLLLGYGIEIRRGSLQSKKERRRILDVLAEHGLAGLAVKPLIETIDRVGEEVKKLERILAEKVRGDRVVELLMTIPGTGLITAATVRAYVDDISRFAGYKQFSAYAGLVPWVQSSNERERYGSITKRGPEPLRTALVQMVLGMVRNRRRTESYRLMVRYRAMKPHKGSGKTIIATARKLSKVVWYMIRRDESFDPLRMTDPAIRRVAFAMRAAVDAA

SEQ ID NO: 482638 - protein, 392 aa, unidentified
MVISVGIDVSKDKHDCFIVNSEGEVLTDVFTIQNTRDGFNFLLQKIQDCTTPQDKIKVGLEATGHYSYNLLGFLLDNGLPTYVLNPLRTNLYRKSLSLRKTKTDRVDARTIATMLLSDAGLKPYTDTAYHNEELKSLTRYRFDKVKERAKLKSSVSRLVCILFPELEKLVPSLHTASVYTLLEEFSGAKQIAAAHLTRLKTLLETASKGHYKRDMALEIRDAARNSIGSWMPAKSLELQHTIRLIRELDDEIAEIEKQIQAIMDELNSPITTIPGIGFRMAAMIFAEVGDFTRFDSPDKLLAYAGMSPSTYQSGQLKNCYPHMEKRGSRYLRYALYNATKYVCHWDPTFAAYLAKKRAEGKHYNVALSHATKKLVRLIFAMEKSRQPYCSAA

SEQ ID NO: 482639 - protein, 360 aa, unidentified
MKTVRSNELNFDGQNIYVGIDVHLKSWSVAILSEHSALRRFSQNPEPEALHKYLASNYPGATYFSVYEAGFCGFWIHEKLTSLGINNIVVNPADVPTMSKEKLRKTDAVDCNKLARELRSGSLEGIYVPGTESLEMRSLIRLRNLIVKDSTRAKNRIKSLLRFHGVEIPEEFTRCSIGWSKRFLNWLHSVELSTAYGKKTLELHLEQFVRLRRMLLQETRAIRDISRTEPFEKPIRLLTSVPGIGITTAATLMVELDDIARFSNAEHLASFIGLIPMCHSSGDNDAVGDITVRRHFMLRCLLVEAAWIAIRKDPAMTLAYGEYRKRMNPQKSIIKIARRLVNRVYFVLKHQKEYVPCVVK

SEQ ID NO: 482640 - protein, 413 aa, unidentified
MNEGYRRCCGMDIHKDTVVVCALPPVGEEGQKVRKVYGTFRNDLIRMRVWLKQLKVTEIAMESTGVYWRPLWSVLEEEGFRLLLVNPVQVKALAGRKSDGRDARRIAEYLQDGRLDGSFVPSPEIRQLRMMLRHRISLLEQRNEVHNQIRDLFETANFKLSSVITDLMGVTGRGIVEALIAGEDSPDRLSWKVRGSLRKKEKLVKESLKGYFNDFHRSMLESHYKHYQFLTKEVAVFEERIAKAMEPYASQVELLTSIPGIDRMVAWHLLAELGIDLKAFPDAAHCCSWAGMVPGENESAGKQKSSRCRKGNKTLRRVLTQAAWAVSHCKAGYLRAFFHRVKARRGWAKAIVATSHKILVIAFQVLKTRTPYVELGSDYFDRLNPARTARKLIQRLEALGLQVQLLPIAGSNA

SEQ ID NO: 482641 - protein, 405 aa, unidentified
MNKRVALQEPSIKEVHFMEGERAEVGIDVHKRTYSVTLWSEQRDEVVTRWTQPADPSGLIRSMTPFKEHVNRVVYEAGPTGYGLVRALRAEGFRADVIAPSRTPKSTGQEAKSDRLDSRRLSMWSAKKLLKAVRIPTLEEEGDRQVFRTRDDVVAKRRRVKQQIKGFLLQHGIAEPDGLRTWARRGIESLRRTKLSPQLRFSLDFLLADLEHYGSQVRKADAALKSLAATKRHKRASEALQTVPGVGTVTAVAMRTELIAPERFEKGRQVAAMVGLAPLVSGSGETTRQGPLMKCGNVRLRKILIEAAWRWVARDDWAAVRYGRLVRNTGDRKKAIAGMARRLAIILWRISVTGEPYRPRPVEEPAPGSRTVRKGCQPGLPDKNIKRKRAPSTSRQRPMSVQPPR

SEQ ID NO: 482642 - protein, 338 aa, unidentified
MPLYGGIDLHANNSVVVLLNEQDQVIYQRRFANHLPEILEPFALYQADIQGIVVESTYNWYWLVDGLMEAGYRVHLANPTAIQQYSGLKYTDDHSDARWLAHLLRLGVLPEGYIYPKAERAVRDVLRKRAHLVRQQTANVLSLQNIIVRNTGVRLSAKRIHALTVEELERLLPVPEHVLAVTSSLVVVHCLAQQITTLEKTVQKHLKHTSAYAQLQTVAGIGPILAQTIVLETGDIGRFPTVGNYASYCRCVGSTKISNGKRQGQGNVKNGNPYLAWAYMEAAQFAIRFNPMVQRFYQRKQAKSHLMIARKAVAHKLARACYYIMRDLVPFDVHKAFG

SEQ ID NO: 482643 - protein, 411 aa, unidentified
MEVIYKRCCGLDVHKEIVVACLLIREGGKVVKEIHTFLTMTVDLVVLHDWLKAHQVTHVAMESTGIYWRPVFNLLEEDFTVLLVNAAHIKTVPGRKTDVKDCEWIADLLSHGLLKGSFIPPEPIRDLRDLTRYRKALSDERVRDVNRLQKFLESANIKLSSVATDVMGVSGRAMLEALVSGGTDPQALSELAKGRLRKKLPELKKALEGRLRPHHRFMVAEILSHLDYLDESIERISHEVSSRTIPFSTKLDLLDLIPGINQRVAEGVLAEMGVDMNCFPTDGHAASWAGLCPGNNESAGKRKSGKTRKGDRWLRRYLTEAAWAATRKKGSYLSALYHRLVVRRGKKKAIVAVAHRLLVIIYHMLKDQGTYRELGSDHFNKLNAAYVQRHHVKRLESLGFKVILEPLSKAA

SEQ ID NO: 482644 - protein, 403 aa, unidentified
MEVLYPRCAGLDVHAETVVACVRTAAGSTVHREHLTVATTTRGLLTLAEWLTEHQVTHVAMEATGVYWKPVWHVLEGQFTLELANATHIRNIPGRKSDFNDATWIADLLALGLIRGSFVPPAPIQELRDLTRTRTQLVREIRRHTQRLQKILEDANLKLTEVISDILGTSGRAMLQALIAGQTDPEQLAALAHPRIRASRAELAEALQGRVTQHHRFMLRLHMDQITRLEQTVAAVEARIEEYLEPFREAVDLLLTIPGVRATAAAVIVAEIGTDMARFPTAGHLVSWAGLCPRLDESAGKRRSTRTRRGRWLKTLLVQVAWSAARTKDSYFHAQFLRLKSRRGPKKAILAVAASILADIYVMLRDRVCFNDLGLERNRSHASEAHADRGQMATRCHRSPVPL

SEQ ID NO: 482645 - protein, 375 aa, unidentified
MSEITRAMTARVGVDLAKRVIQVHAVDGAGQRVAARVVKRDQFIAWCAQLPAGCLVAMEACSSAHHWARKLRALGLDARLIAANFVSPYRMEGKSGKNDMTDAAAICEAASRPSMRFVPIKSCEQQGVMSVHRVREGFKQERTACINRIRGVLAEFGLVFAQSPKALRAVLAEVIEDASNELSTTARLVLQRAFDHWRELDEHMRWCDAQVGQHVRTSAAAKRAAKITGIGELGASALTAGVGDFKQFKAGRQLGAWLGLVPGQNSSGGKTSLGRITKRGDDYLRTLLIQGAKAAVMSAGKRDDPTSRWLVQLTARVGWQKACVAMANKNARILWAVMTREQGFEAKHVSDKPPAKRPAHERIAAPAPSQSACAA

SEQ ID NO: 482646 - protein, 346 aa, unidentified
MNHYAGIDVSLECSSVCVVDASGKILREARVASEPEALVAWFGSQGLNFERIGLEAGPLSQWLFAGLKAAGLAVELLETRHVRKAFEAMPVKSDRNDARNIAQLMRLGWFRPVHCKSMEAQEVRAMLTARKLVQSKLQDIENSLRGILRGFGLKVGKTTKRSFAGRISELVAGHPALETIAKAILAIHTVLMREFNGFEKRVRTMSLLDARAKLLMSTPAVGPIISLTYASAIDDPSRFTSSKRAGPLFGLTPKKYQSGETDYSGRISKNGDASVREALYEAAHIILTKPIKGCTQLKSWAMRIARRAGMNKAKVALARKLAVIMLRMLKDNVPFNPVAKATAAAF

SEQ ID NO: 482647 - protein, 348 aa, unidentified
MTEPLFAGIDLHSNNLMIGIVDQSGQRIKYQKLACNLPQVIQFLEPFKVRLKSLAVESTYNWYWLVDGLREQSYPVVLANPAGIDQYSGIKHADDKNDAFFLAELQRLNILPTGHIYDPQLRPVRDLLRRRLGLVRQRTTLMLSFKSLFTRTTGQPMSLKRLKSMELSETKTLYEHPANCLIAAVQKEHIEQLDRSIERMEKAVLRSARKLPSYRQLTTLPGVGRILGMTITMETGDIERFASPGDFASYCRTVGSKRVSNGRNKGDNNRKCGNKYLAWAFVEAANFAKRYDEACRKWFDRKAAKTSTVIATKALACKLAKAAWHVMSQDSGYEEKRMFPELAMKQKE

SEQ ID NO: 482648 - protein, 372 aa, unidentified
MNKKLIYVGLDVDDTQYHGAAFDKETGEIVSFKCRPTLKGLVSQLEKIQKYFSVESLKLCYEESYIGHCLQRDLMQAGFNCDVISPGSIPRKGSKAIKTDRIDALDLAQFYANDLLTIVQIPDAETEQDRDLLRSRQQLMKQQNDLRRHIQSLLRRNGLHYKAETNNKTHWTKHHYCWLERTVEGCSGSLGTNLQLLLRQLKSINEIVGAYSEEIELMAKQPNYQQAVSALTCYKGIKNLFALTMITEIGDVKRFAHPRQLSAWVGMDIREYSSGGKHHRFGITRQGNRYLRTAFIEANQRAYRTTKLSREIKARRVNTNPEYIVIADRCLKRLSKKGNRLLEAGKHPNKVKVACAREMIGFVWESLNKVAA

SEQ ID NO: 482649 - protein, 402 aa, unidentified
MNAVGIDVSKGKSMVAIMRPFGEIVSSPFEIKHTTSDINSLVELINSVEGESRIVLEHTERYYEVLAHQLSKANLFVSAINPKLIKDFDNDSLRKVKSDKADAVKIARYTIDKWQNLKQYSVMDELRNQLKTMNRQFGFYMKHKTAMKNNLIGILDQTYPGVNTYFDSPARSDSSQKWGDFASTYWHVDCVCKMSKNAFINHYQNWCKRKKYNFSQSKAEEIYGKAKELVPVLPKDDITKLIIKQAVDQLNSVSTTVESLRTLMNETASKLPEYPVVMAMKGVGTSLGPQLMAEIGDVSRFTHKGAITAFAGVDPGVNESGSYEQKSVPTSKRGSSILRKTLFQVMDVLIKTIPQDDPVYQFIDKKRAQGKPYYVYMTAGANKFLRIYYGRVKEYLSSLPES

SEQ ID NO: 482650 - protein, 466 aa, unidentified
MKNVIKNPKKQNTKKPNIDQCWELINPDAAGLDIGAREHCACVPPNRVEKNVRNFGTFTTDLEALADWFQECGVKTVAMEATGVYWIAVFQILERRGLQVMLVNPRQTKNVAGRKTDVKDCQWIQRLHTYGLLQGSFRPEDPYCVLRSYMRYRDELVAARSTQCQHLQKALQQMNVCLHHVLSDVTGVSGLAIIEAILDGQRDPVKLAAMVHRRVRASQEMIQKALMGDYRAEHLFVLKVAFDLHHTYAEKILACEEQIVLETARLPDRVDLAVKPLPDRKEGRPAGKDKMAGQDMREWLCRKLSVDLTAIEGIGITTALVFLTEVGPNLGRFPSEKHFSSWLGLCPDNRISGGKILSTRTRLVTNRLADALRMSATTLERSQSALGGFYRRMKARLGSAEAITATAHKLARLIYRLIKHGENYVRQGLEDYERKFQERKMHGLKKAAMMMGFDLVPKQATTPAVS

SEQ ID NO: 482651 - protein, 338 aa, unidentified
MKLNRIGLDLAKQVFQVHGVDSHEQVKCRKQLKRQQMLDFFRQLEPCLVVMEACGSAHYWARELRVLGHEVRLIAPQFVKPYVKSGKNDANDAEAICEAGSRPSMRYVEVKSAEQQANQSVHRIRSRVVRSRTALVNEVRGLLAEFGLVEPRTGVAAARELLRQAIDTQDNGLPGPMRELLRDLSEELQGHDERLANLEKLIQRQAREDERVKRLMKIEGIGPISATAVVSAVGDARQFRSGRQFAAWLGLVPSQHSSGGKERLGSISKRGDKYLRTLLVHGARAVLKHCQEKTDKRSDWLNKLLCRRNKNIATVALANKNARIIWAILSKGEQYQPG

SEQ ID NO: 482652 - protein, 346 aa, unidentified
MAAVMIGIDPHKGSHTAVAIGAGEEPLGQLRVRASAAQAQRLLAWAAAWPERTWAVEGASGLGHLLAQQLLSAGEQVLDVPPKLGARVRLLAAGAVNKNDPNDARSVAVAALRSASRREVAADDHAAVLKVWAKRHRDLGRTRTQVACRLHAVLCELIPGGVSKRISAAQAGPLLEGIRPSGAVETARCELAAEFLADLRRIDAQMRDAKNKLTVAIRASATTLTEVFGVGPIVAATVIGEARGVSRFASRDHFAAYNGTAPIEVSSGRRKIYRLSRRGNRRLNHAIHMAAVTQISHRHSPGRAYYERKLAEGQTPKEALRSLKRRLSDVIFARLQADARQAATGR

SEQ ID NO: 482653 - protein, 326 aa, unidentified
MQGKEAIEQESTTQSSIGIDVSKGWLDVHVVPGDHRLRVPNTRQGLSQLKRWLKRFDVAVAVVEATGKWHRAVQRSLFAAGLPVAVVDPYRVRAFAKAQGLFAKTDRLDARMLAQFALVMNPAVRAPAPQALEDLGELVTARDSAVAEQTMLKNQSAAARTAFLRRQLKRRMAQLAKHIAALDGEIARLIAADPGLARRYAILTSIPGIGPVVAATLIAGLAELGSLSAKQAAMLAGLAPVADDSGERQGMRIIRGGRAGVRRALYLAALTASHWNAELKAFYDRLVGKGKSAKLAVVAAARKLVVLANTLIRDNRMWEPVAPHHA

SEQ ID NO: 482654 - protein, 344 aa, unidentified
MNFYTQQHRYYCGIDLHARSMLDAAGTIVVHKDLRAEPESFLRVIAPYRDDLAVAVECIFTWYWLADLCATERVPFVLGHALYMKAIHGGKAKNDKIDSHKIAVLLRGGMLPTAYVYPAAMRATRDLLRRRCHLMRKRAELLTHIQNTTSQYNLPALGKKIAYKANRAGVAEHFPDPAVRASIEMDLALIDHYDALLTAVELTIVRSAKQHDASVFHRLRSVPGIGKILALVILYEIHDIARFSRVQDFVSYCRLVKCAKESAGKRLGSSGRKIGNAHLKWAFSEAAALFLRQNLAGQRYFARLERKHGKGKALSVLAHKLARAVYHMLTRQQAFDLQRFLSAP

SEQ ID NO: 482655 - protein, 428 aa, unidentified
MNGEDLSRLEEFRQFRREVRGSDEYLLVGVDIAKDKHYAFFGTAQGKALFRRLVFENNLEGFQKFLVQARAMRDQNGLKRMVFGMEPTGNYHKPLGEHLIRCGHLVVLVSGVAASENRKTLDGRWDTSDPRDAANVVDLMSQGKCLFYEFPVGPLQDLRNLLSLKRRFKRVEHGYRVRIRNHLVAKYFPELDRYYEQSPVTSLAIVRWCLDPSVIAGLEYPEFSQRVGTGRRRVAQEKRLQAIWKLAVDSVGCEAGPVVEFEAQVMVEGLKQIQKALEEIEEKIQEVCSSFPEYECLLSIPGFGPDVASKVLGAIGDPLRFENGRQVLKLAGLDLSAKRSGKKSESVIPVISRKGKTDLRYALYQAAFIASIRNQDFMVYYTHKLRGREREPGIKIKMRVKLAAKFLLIAWTLMKKKESFNPDYLANQ

SEQ ID NO: 482656 - protein, 464 aa, unidentified
MTIRKKRSVPKKKGGAPPPTSLPTIRPMVAGLDVGSSQHWVCGPARADGNPNVQVFDTTTSQLNELADWLTEEGVESVAMESTYVYWIPIYELLESRGIEVLLVNARQLHNVPGRKTDFSDCQWLQLLHSCGLLRGSFRPGEAITRLRALQRQVANLVAERTRCVQWMQKALDQMNVQVHRAVTDITGLTGMAIVRAIVAGERDPVRLALHRHGRCHKSAKEIAQYLTGNWRDEHLFNLASALRLFDALEKEIATYEARLLEEVEGLQLPERREDPVPPHPNPAKERAIKARGEQQARTTLWRFAGVDLTRIDGISAGVAQVVLTEAGPDLTAFPTEDNFVSWLRLCPRTPISGGKPLKKRRNGLGANRIAGALRMAATSLQRSRSALGASFRRIARHKGGAVAVFATARQLARLIYRMLRYGHDYVDIGEKAYERQFHTRRLAAITETAKSLGYKLVPEAGAA

SEQ ID NO: 482657 - protein, 439 aa, unidentified
MRDANEREIEFAAYIGIDWADQKHAWTLQTCSDSDVEQGTLLHKPEAVEAWAAELYRRFGGRPIAIALEQSRGSLLFMLLKYEHLVLFPVNPSTLVNYRKGFRPSGAKSDPSDATLLVDLLVRHRERLRQLRPDSEQTRTLQFLVEGRRKFVHEKVRYGNRLTAYLKMYFPQVLDWFSAVGSPIVGDFLLRWPTLEKVQKARPDTLRKFFRQHHSSRSDSMERRVQEIRDAVPATHDRAVIRSCSQAALSFARMLREIRAAIRSYDQDLETLTREHPDFALIDSLPGVGPALAPRLIAALGTQRDRYQSASELQCYSGIAPVLASSGKQSWVHWRWACPKFLRQTFQEWAVHSLACCAWAKDYYQQQRAKGKPGNTVVRALAYKWIRILFRCWKDRTPYCESTYLQGLERRQRFTRKGSPVKLQWKTSAGFRKIEAATS

SEQ ID NO: 482658 - protein, 324 aa, unidentified
MKSKSLELFIGIDICKDRLDVADDGESSPWSVANDDAGISSLVDRLKALQPALIVMEATGGLETLLYAALTTAGLPAVVMNPRQVRDFAKAMGTLAKTDALDARVLARFGAAIQPAVRPMKDDTTQELTALVTRRRQLLAMLTAEKTRLQQAAKWIRKDIKAHTKSLEKRLKTIKGYIAEIIKKTPGWKEKDSLIRSVPGAGNVLSMNLLSSLTELGTLNRREIATLVGVAPLNRDSGNFRGKRMVWGGRAQVRAALYMAALSASRHNPVIKPFYQRLIAKGKKPKVALTACMRKLLVILNTMLKTQTAWNPNQFLPLDFNHGC

SEQ ID NO: 482659 - protein, 412 aa, unidentified
MIYCGIDWAERTHDVALVDDTGQPLAKRHITDDTVGYKMLLELLAEYGDSKENPIPVAIETSRGPLVAMLRTGTRKVFAINPMAVARYRDRHSVSRKKSDPGDALVLANILRTDMHAHRPLPDDSDLGRAISVPARAQQDSLWNRQQLANQLRSLLREYYPAALAAFAAWTNGLCRPAARELLKAAPTSARAARLTRTQIQAALKRAGRQRGIEAEADRLREVFRDEWAHQPPLAEDALGKQMIALLIQLDAACTAADNLAEAVEEAFPQHPDAEVLLSFPGLGVQLAARVLAEVGDDRTRFADARGLKAHAGSSPVTRAAGKKSAITRRWVNNDRLNHAGYLWAFSALRHSPGAGAHYRRRREQGDWHAAAQCNLFNRMIGQLYHCLKQGTAYDESLAFGAPPTEAVVTAA

SEQ ID NO: 482660 - protein, 408 aa, unidentified
MEPIYTCCCGLDVHRKSVAACVRRLEAGGRLHQETRTFGTMTRDILELADWLAAEGVTHVAMEATGVYWKPIYNLLEDRFTLLLVNARHVKHVPGRKTDVQDCQWLAQLLQAGLLRGSFIPARPQREFRELTRHRSQLVAEKSRVANRVQQVLEDANIKLGTVATDILGASGRDMLRALIAGEQDPEKLADLARRQLRNKIPELRRALEGKVTDHHRFLVGQLLAHVEHLEGQIEALSRRIEEVSRPFASANKAVSSLPGFEQRSTQNVLAEIGADMESFPTAAHLASWAGVCPGNNESAGKRKSGRTTHGNRWLRTALVQSAWAATRKKDSYFAAQYRRLAARRGKKRAIFAVAHSLLTVIYHMLKTGSTYKDLGGDYFDKLNSKRLLPHLVKRIKDLGYQVTIQAA

SEQ ID NO: 482661 - protein, 390 aa, unidentified
MQVIADQAEAPSAIRSNLDAIFVSLELSRSTWLITSLLPGGSEKMSKHSVPAGDICALLARFSELRQKAFTRTGKSFPIIVIQEAGLDGFWIHRVLQNEGIESHVVDPASIATSRRHRRAKTDRIDGETLLRTLLAYKRGEPRVCAMVKVPTPEEEDRRRLCRERKVLIAERVQHVNRIKGLLLCQGVSGYEALRRDRRQRLDELKTGDGRALPDHLKAQISRELARLELLLEQIKAMEAERDALFAAAKATMPASGPVAMLLEIKGIGPEFAAILWMEAFFRSFANRKQVAAYAGLAPTPWQSGSVDREQGVSKAGNPRLRTMLIQLAWLWLRHQPQSALALWFKERVSRNGGRFKKTTIVALARKLLVALWKYVTAGVIIEGAVMKPA

SEQ ID NO: 482662 - protein, 405 aa, unidentified
MISVGIDVSKGKSTICILKPYGEILMSPRDFTHTQSELKILVDKLCKYDDEIHITMEATGTYHLPIAQYLKTAGYIVYIINPLEMKRYRCQGIRNPKTDRIDATIIAQYGIDFWFRPYHDTAIENKRNELKLLGNQYRSFMNTRIERCLALCNILDRTNPGIYGSIDDFNRNTGKDKLCDFAHDFYHRDCITKYSMKKFIERYQAWTKKKGYRFSESEARQLYSIAKESIPTLESTESTKIVVQETTLVLKEVNASLFSILTRMNELAKQMPEYNTVMNMKGVGDSIGPRLIAEIGDPRRFHSAKALIAYAGIDAPPYQSGKFTGTDRHMSKRGSKIMRKLGFEIMDAINKHQTTYAGDPVCEYFLKKRAEGKQYKVAMFAAYNKFLRIYHSCVSSVLNEIESTI

SEQ ID NO: 482663 - protein, 437 aa, unidentified
MEEVTDEPLYRDRVCGIDIGKAGMAATIRVPSDNDPARRAAETRSFGTTKKEVLALADWLRSWQVPAVVMEASGDYWKGPFYRLEAEGLECVLADAKQVKNLPGRPKHDPGDSRWLAACFERGAVTSCFVATPEFRIIRLHTRYRRDLTDERTREKQRAEKLPGSAAVKLSSVVTDLHGVTGRDIMDHLIAGERSPKVLAQLARARARRKIAELEEALEGAEFFTAEHAALLAAMLARIDRVNAEITRLSEVIERLLAPYEEQLAQAESMPGWGRRAAEDALAETGTDMSRFRTGAHLASWSGRTPLDNSSGKRKGKAKSKKGNRYLGGLPGETAVAAGKTQTREGARYRRLARRRGKAKALVAVGNTQLKVYHKLLSSPGMRYEDLGPDYYERRAEISRQVRHHVGKLGALGFDVTLCRIPEPGPGPGGTGNSQPA

SEQ ID NO: 482664 - protein, 321 aa, unidentified
MMTEPAKIQSILGLDVSCDTVALFDSRTHRSITIANDPDALRAALQPYQASATLAVCEATGGHEDTVLGVLLELSIPAHRADPAKVKAYIQSFGKRAKTDPIDARWLARYGQDRAEALPQWQPKDPIRQRLTLLVARRLDLVAMRVQEQNRLKAPRGSFLADDINAHLDELNRHIAALNAEIDSLITQDHDLTLRAKALRSVPGIGPVLMPMLLALMPELGSLNRRQVASLAGVAPHPKDSGKVSWHRATFGGRRTIRPALFTAALTACRGDGPLATAYKAMVKAGKPKRLALTALMRKIITIANARVRDALKPKTEKMPA

SEQ ID NO: 482665 - protein, 326 aa, unidentified
MIVIGIDVSKEKIDCAWLRDIATGKIKTKVLKNRPEGFNTLIDWAVRNTKHPIDAIHFVMEATGIYHEALAYALHEAGATVAVVNPAHIHDYAKSRGTRSKTDKKDSVIIAHYGVTQQPAAWCPEPREIRHLKALIMRYDTIEKDLQRETNRLEKAETTQVSLEVITSINNVIEELNKEKRRIRRLIDDHIDQHPKLKQDRTLLESIPGVGTVISQQMIALVRSRHFSTAKQCSAFIGLNPVIRESGSSLRGRSHMSKKGDARIRAKLYMAAVVATRYNPDIKRQYDRLLKNGKTKMAALGAAMRKLVQICFGVLKHQCPYQPQLE

SEQ ID NO: 482666 - protein, 412 aa, unidentified
MKWVAQVGVDWADKKHDWVLKDGKGRRDGGVFLASPEAVHEWVRSIRAQYPEGKILISLEQSRGALIHALRQYDFLILLPINPRALSLHRQSLYLSGAKSDPTDADLLCDFGADNFERMRVLVADDVQTRKLGLLAEARRGLVDQRTSNIQALTAACKQYFPQVLEWFGGAGEQLTLAFLQKWTTLEQARTIRRDSLRTFVRAHSRWSEEKIDALCSAIRSAEALTPDEAIVESYALQAQSIASVVLVLNEQVSRYDKRLATLTQAHSDYEVFNSFPGAGPVMIPRLIPAFGTNRNRWQDAREIQTYSGIAPAVDASGKHRRVFARWHCPKFLRQTFHEFALASIPHSEWAKAFYRQQRDRGAGHHAAVRSLAYRWMRILFRCWKDEELYDEERYLTQLRLKKSPIIGRLAS

SEQ ID NO: 482667 - protein, 469 aa, unidentified
MPDLFIGCDVSKGHADFVVLDEHRQVVEESFRFDDTKRGHTALEQFLEKLVRKYPESVLHIGFESTGCYENNWLRKAQELSVKFPLKSARINPCGIKKFKEAELTRCSTDAVSAVAIASYMQTHPDKVMYDQDDPFYTARRQWKCISLLKKMSVQLQNSLQMQLYTANPGLLLYCKHGMPRWMVPLLSKYPTAKELERARLESVMKCARLTEAKARGIINAVKASVCSTTDETTAINIKHLLIQITSVEESIGVLEAELSKRWADHPLVKLVNTINGIGVFSALGLLINIKDIGLFPSVSNLVSYFGVHPSYRQSGDGSYGFHMSKKGRVEPRIILFMCTLSAIVHNPVIKECYARCLKKKMPKMSAIGVCMHKLLRIVYGVLKNQTAFDPEIDRRNREKGRIVSAIDPEVQRQKKICRYQPMDEFAPVSARQAKKRKGNGSQSNAITENGITTPFEEKNSEKMVLVQN

SEQ ID NO: 482668 - protein, 325 aa, unidentified
MGQPTTFVGIDVSKDTLDACLLAPGGRTRQASFPNDACGHAALIRWADQHAAGPCHFCLEATGPYSEAPALALAEAGRPVSVVNPARVKYAGLMRGRGNKTDPADARLIAEYARDSNPPPWQAPTPEVRALQGLVRRRDDLREMAAREKGRLASPALPRAARRSVERTLRFLEREADRVQAQADELIAATPALQADRDLLASIPGVGPQTATTVLAELPSVERLPSAESAAAYAGLAPREFRSGSSVRKRTRLSKAGNARLRKALYLPTRTAIRFNPLLKGFFGRLVAAGKPKLQAVGACMRKLVMLCYGVLKNRAPFDPAWGSK

SEQ ID NO: 482669 - protein, 341 aa, unidentified
MPGPRARIRKVGQPDVPSTSRKEPVKSESEVFVGIDVSKARLDIHVLPSHQAWSTANEGPHLDALVARLAALKTTLIVLEATGGLERRALALLLAAKLPAVAVNPRQVRDFAKATGHLAKTDTLDAAVLALFAERIRPEVRPPLDEQTQELDALMVRRRQVVDMITAEKNRLAAAPPSKRVVRAIRKTISCLQKQLDEIDTDINSAIRNSPAWKAKDDLLRAVPGVGKVVARTLLAQAPEIGSLTRKKIGALIGLAPLNCDSGTYRGRRRIWGGRAQVRAVLYMGTLSAIKHNPVIAAFHARLIAAGKLPKVAIVACMHKLLTILNAMLRSNSPWSPEISS

SEQ ID NO: 482670 - protein, 337 aa, unidentified
MRRAREEEPVKYEHYIGVDLHKAFFQACAVTADGARLWEGRWPRSADGIAALRAQCTAGTAVAVEASTPTFHFADALAGSAGQVVIVDPLKTRLKAGYAAKTDRLDARRLADALRRESVVSIYHPPPAIRELRELCRSRHTLVQARTALTLRLGAVLLRQGIGETPRQLYRPRALAWIDQQALPVEAAASVQRLRRLVERVTAELDAVEADVARAAASDPIVAALDPIMGIGPTLGLLIRAEIGTITRFPTPGHLASYAGLVPRVEASAGRVRHGRITRRGSPWLRWALIEAAIHGPKRRDAEGRWARRLAVRKGALKARVAVARRLCDEIVARWPR

SEQ ID NO: 482671 - protein, 345 aa, unidentified
MTHHPTTVAVDLSMTVFEVGIADRQWRIIERRRLNRRQFARFLADQPASHVVMEACGTAHYWGRVAQGHGHRVSLLPVRYVKPYLRGNKTDRADVDALLDAVRTGHIPPVTVKTAAQQEIVALHRIREQWMATRTARINALRGFFREHGIPLPAGPRASLAAVPALAEQLPPQLARAVTRGYEDARALEVRIVDIERQLKAVTKDDAVVQRLLEIPGIGLLTATALVGSVGRITAFRRARQFASWLGLTPREHSSGPRRRLGSITKRGDVYLRCLLTHGARAVRLTAQRQAAARKPLTGLQPWAVQLVARKGHNKTTIAVANKLARIVWAVWARDVAYTAAPAAA

SEQ ID NO: 482672 - protein, 343 aa, unidentified
MHVKTIGVDLAKNVFQVHGVDSTGKVVITRQLRRKQVLDFFSKLPGCLVGMEACGTGHHWAREISKLGHTVRLMPPSYVKGYVKRSKNDAADAAAICEAVTRPSMRFVPIKSTDQQALLMLHRTRDLLIRQRTQLINALRAHLAEFGLVAETGREGVAKLGAIITDEGNHEVLPSAMKQALQAIVDQLAALELQVGALDRAIHAHHRANDMSCRLETVPGIGVIGATAIASTVTDPSGFKSGRDFAAWIGLVPRQHSTGGKERLGGISKQGDRYLRRLLVIGATAVVRQARLHPQKHPWIMRLLAKKPAKLVAVAVANKMARIAWAIMATGGHYRAPELAAAA

SEQ ID NO: 482673 - protein, 386 aa, unidentified
MPQLNDLSRSLVVLEQDATLIAVIEMGQSNWLVAGIVPGVERSPLKKLAVDESALLKLLNRWREEAEKAGHRIERIAIAFEAGRDGFWLARWLRARGIEAHVIHASSVAVSREHRRAKTDRLDTELLKRAFLGWLRGERDHCKMVAIPTLAQEDAKRPNRERESLVGEQSRIVNRMKAALARLGIRGFNPKLKKAVERLDGLRTPEGEPIPPNTLAELKHDMERRRLVRSQIRDIEGTRLERLKQTPGDGPHVTVRLLARVIGVGVETADMLVQEVLSRNLRDRRAVARYGGLTGSPDESGKKRREKGLARSGNARVRRGMIQLAWRFLMFQKDSALAHWFYARTKNAPQTRKTMIVALARKLLIALWRLAREGAIPEGIVLRPAL

SEQ ID NO: 482674 - protein, 475 aa, unidentified
MNLKGTKKKNQVSNVNIFEQQELLKKIEVVRENLTASTWRELETKGKFDKNAKLSFICDDMLILGCDVGSETHYLRAIDTRGRELSKSAFSFSNNADGFSKAKEWAVKIAAEYDKKQIVLGLEPTGHYWFCLATWMISNGLSVVQVNPYAVKQTKELEDNSQLKDDKKDPKLIANLVKDGNFGMPYLPEQLYADLRRLSMFRDQLNEDRIRSINRLHRELKIYFPEYKEALGKTEGTFSLELLKQAPFPDDLAALKEDGIRQIWHNAKLRGRGYSRAGEILEYAKASVGLREGKETGKLVVQWFVQKILELDAELALIETQINQKCLEIPHTDKVLEICGIGENTLSGMMAEMGDISRFDDVKEIQKLSGLGLVASSSGKHKGETKISHRGRKRLRYWLFQAAKSAVVHAEEFKELHVYYTTREQNPLKKMQSLIAIACKLLRIIFTILKKGIKYDPRKMLKDIRRESRQESLAA

SEQ ID NO: 482675 - protein, 347 aa, unidentified
MTEGYDGRQVVGMDLHRRRSVLVRMTEDGRKLETVRITNSPAALRAVIARAGKNPRVVIEAAYGWYWAVDVLEAAGAEVHLAHPLGVKAYSCRRVKNDERDASDLADLLRMGRLPEAWIAPAEIRELREISRYRHQLVKARTSLKDQVHGVLAKLGIPVTHSDIFGVHGQAWLDELPMPQPYAGKVASLRQLAGELSAEITLLDAVLGDLLAGHEGYAAIQALPGIGPVLAAVIVAEIGDIRRFPGPGQLASWAGLTPRHYESDTKVIRGHVTKQGSRMLRWAVVEAIQRQPAGSRPRQVKDAIIARRGKEAKNIAKIAAARELLTLVYYGMRDGRVRRAAPPGQAA

SEQ ID NO: 482676 - protein, 457 aa, unidentified
MRITIPRKRLTRAGKGTTVCRTRKRGARIAVSVTDLRRSQRLTKEALVQTLVERGCGRDVHQASVTACLLLVLRDGRVQKQIQTFGTTTRELLRLREWLLSEGCTHVAMESTGVYWKPVYALLEGALEIVVANAQQVRKVPGRKTDVKDAEWLADLLCHGLLRPSFVPPPPIRELRELTRYRRKLVETQAAERNRLLKLLETANIKLASVATDVFGVSGRQMLRALVEGQATPREMTQLAKGRMRQKLEELEPALEGKLEEHHRFLLQLQLQRVEAAEKDLAILEQRIQEKLQPYAAQFALLQEIPGVEATLAAVIIAELGVDMTVFQSAAQLASWAGVCPGNNESAGKRKSSRIPKGNVYLKTALVEAANAAARAKGTYLRDKFYRLKARRGYKRAVMAVAHKILTAIYHMLSHGVCYHELGDLYLDKLNQHHLTRSLIRRLERLGYTVTLQTNAA

SEQ ID NO: 482677 - protein, 411 aa, unidentified
MHNRQNYLYVGVDLHKEHHTAVIINCWQEKLGEIQFDNKPSAFSKFLLEVETYVSAGITVVFGLEDVGGYGRALAKYLVDHEQVVKEGNPALSFLERKSHVTTQKSDSWDAECVARILINKLNQLPDAKPNDLFWSIQQLVSRRNALVKAQSALKNQLHIQLNHHYPSYKKFFSELDGKTALAFWQQYPSPFCLEGANIKQLTAFLLDVSNNTCSVKKASDILKLVKEDGQTMKEYQETRDFLVRSIVRDIEFKKKEMKYIERELKRLVNLLDYQLETMPGIELVTASALIAEIGDVRRFPNANKLARFAGITPVYFGSGGKGKTHKSKQGNRALHALFYNLAVQQVQVAKGSKLPRNPVFHAYYQKKLKEGKTKGQALVCIMRRLVNIVYGMMKYKTAYELPVVEEKEVV

SEQ ID NO: 482678 - protein, 343 aa, unidentified
MDVSTIGLDIAKSFFQVHGIDAAGEVVVRQRLRRRQLVGFFEKLGPCLVGIEACATAHHWGREIAALGHEVRLMPAHYVKAYVKRGKNDAADAEAICEAVQRPTMRFVSLKSTEQQSMLMLHRTRELLVRQRTMLVNALRAHMAEFGIVTRVGLPQIKELLAVIADRDDHRLPLGARACLESLGRQFLSLHEEICAADKRLHAWHRSNPVSQRLATIPGIGPVTASALAASIADPEVFKSGRELAAWIGLVPRQNSTGGKQRLGKISKQGDRYLRWLLVAGAMTVIRHAKRRGATNQPWLDDLIARRPTKVAAVALANKMARMAWALLRHGGAYRQPVVTASL

SEQ ID NO: 482679 - protein, 352 aa, unidentified
MANGITTMLTIGIDLGDRRSEVCVLGSDGEVVERFGVATTREGMERKLGRRDRARIVVEVGTHSPWVSRWLEAKGHEVIVANARAVRSIAESDRKTDRNDAEQLARLGRVDPKLLHPIRHRGEAAQRHRMLLTVRDHLVRTRSSFIVQARGLAKGLGERLPHCKSETFAKRMHEAPWAQLFPAMDVIVTTVEQLDAGIAALDEQLEALARSTYPETLLLRQIAGIGVITALAFVLTLEDPARFRHSRAVGSFLGLTVRKRQSGSRDPALRITKAGDFYLRRLLIQCAHFVLTHGRDCDLRRFGDRLMARHGRKKAAVAVARKLAVRMHRLWTTGELYEPLYDAERKALLAAA

SEQ ID NO: 482680 - protein, 340 aa, unidentified
MQVSTIGLDIAKSVFQVHGIDSAGEVVIRRRLRRAEVLSFFSHPKPCLVGLEACAGAHYWARELRALGHAVKLIAPMYVKRHAHRGKSDAIDAAAICAAVVNPNTRFVPIKTPEQQASLALHRVRQQLIGQRTRYINLLRGQMAEFGFVANTGPKHVADLMAIVADEADLRLPTQARIALGELAATLTELNLRIAAIDQTIVVGHKADATSQRLATQPGVGPIIATAFAASVPDPRHFRSARHFAAALGITPRNHSTGGKERLGKISKMGDRYLRMLLVLGATSRLAQAKRYRRPEDAWILRLLARGKPPRVVITAIANKMARVMWVLLARGETYRARTA

SEQ ID NO: 482681 - protein, 365 aa, unidentified
MKQHSKKPSRSANRKPERIAGLDLGDRYSHYCVLTSDGELVEEGRLQSTEAGLRRQFGGDPRMRIALEAGTHSPWVSRLLEGCGHEVLVANPRKIRAITASESKNDRNDAEKLARFAACDPKLLSPIRHRSPQRQQDLNLIHARSSLVRARTGLVNALRGLVKSAGGRLGVCSTRSFPDKTRASIPPQLQPACAPLVEQIAQLNLAIAGMDRQVEALGNKYPEIPLLRTVPGVGPIVAACYVLTLDRPDIIQDNRQAGAFLGLRPRQSQSGDKNPQHGISKTGNTCLRSLLVQAAHYILGRFGPDSALRRWGLGLAVRGGNRGKKRAVVAVARKLAVMMHSMWRNRRPFEPFPATAAPVQAAVAA

SEQ ID NO: 482682 - protein, 323 aa, unidentified
MNKYIKYFGIDISHLVFDVTDSDGNYYQFKNSLIGFKKFMKLLDFNSHCVMEATGYYHYQLAYYLQENSVVLSVENSLSVKRFIQMKLSKIKTDKSDSKLICEYAKQVDLKLWQGNSKHQLECLQMTRLLSVYTKQSTMLKNKLHGEAVLGQPSKLVVTSLKRSLRQLKKEIDTIEETLLLLVNEVHKDVLTRLKSIPGIGKKTSLMLVVLTDGFDRFKSGSELCSYAGLTPIIRQSGSSVNGRARISKIGNQKLRNLLFMCSFNACKYNKACKAIYDRIVAKGKRKKLALIAVCNKLLKQAFAIAKSGLIYDDTYRSTLVKN

SEQ ID NO: 482683 - protein, 394 aa, unidentified
MKLVGIDVGKNSHHFCVMDKETGEFNVAPSSFSNNKEGFDFLINSLKPYSKKSILIGMEDTGHYHVALLKFLLSNGYTVALINPKTTDLARKMEGGITKNDKLDTITICDVLDTPERKKQYRITKVDRFDLYEQRQLTRHHHNLKEELNVYCNRLQKSIDLVFPEFNTLFSSKYSIVYMNLLKTFGSAEAIASTDIRTIRKCFEIKGRGNRISLTPEKLKECAKNSIGISSEVETIQIKHLVSQITLIKEQIAEIDKKIEEFSITNNSPILSIPGISHFSGTSILAELGDIGNYSKPSQIIKFAGVAPYHYESSQFTAQHTAITKKGSKYLRKTLYQIILSVINFNPVFKEYYQLKISQGKGHRCAQGHCIRKLLRIIYHLLETGQSFDPALLR

SEQ ID NO: 482684 - protein, 343 aa, unidentified
MNISRIGIGLAKNVFQLHGVDHHGKVVWKRRLKRDQWLKAVLNQAEPGCEIGMEACGGAHHWARELESRGYTVKMMAAQFVKPYVKSNKNDANDAEAICEAMNRPNMRFVTVKSVGQQDIQATHRVRSELMSQRTAKANQIRGLVAEYGLVAPQTLCALRAAIPCWLEDAENGLTDHFRSLLHGVWTDLVTLDDRVRELDRGIEKLANSNEVTLRLQQLRGVGPLVATALVATVGDARQYHRGRQMAAAIGLTPRQNSSGGKDRLLGISKRGDVYLRSMLIHGARAVVSQAKHRDDRLSRWAIGIATRRHPNVAAVALANKTARMAWAMLRNETDYDPDFDMS

SEQ ID NO: 482685 - protein, 355 aa, unidentified
MLIVGCDYHPGFQQIACVDTDTGELSERRLAHREQAEQFYRELKQQNLVVRVGMESSGHSRWFERLLHELGFELWIGDPAEIRTRRVRKQKTDRQDAQLIVQLMLENRFPRIWVPDAENRDLRQLLWHRHRMVQMRTQVMNQLHVVPLNEGLRRKKALWRPAGRKELESIALAPWASRRRQDLLDLLDQLTPKIQELTRALEEEVEKRPVTRLLMTHPGVGPLTALAYELVIGTPERFHCGKQLASYVGLVPEEKSSGDRRRLGHISKQGNVLLRFLLVEAAQVTVRTQPEWRSKFFHLAMRRGRKIAKVAMARKLAVHLYWMWRQGCDYGQRQKLGSQGRKFSSHAVALNGSTR

SEQ ID NO: 482686 - protein, 373 aa, unidentified
MTTPREVFVGIDVAKLRNAVAIADAGRDGEIRYMGEFDAAPESMTRLVRRLATKNEKLHFCYEAGPTGYGLHRLITELGHSCVVVAPSLIPRKPGDRIKTNRRDATGLARLLRAGELTSVWVPDPAHEAMRNLIRSRTAAVETIRAQKQQVSAFLLRHSRIFPRQKQWGARYRRWLQEQSFEQPADQIVLQEYIEAVRLGEERLGRVEKAIAEFLPDWHLAPVVEALQALRGIDLVVAVSFVVEIGDIRRFSSPGQLMGYLGLVPAERSTGETIRRGSITKMGNARIRQLLVESAWTYRFPPRVGVKKQRKLDQVSPKIREIAWKAQSRLTARFRAFVARGKRSTVACTAVARELVGFMWAIAMEVQPASPPA

SEQ ID NO: 482687 - protein, 354 aa, unidentified
MKYYAGLDVSLEETAICVVDETGQIMKEARAASEPEALDAVLSNLGLPLDRLGLEACSLTAWLHGELKATGWPAICIETRQAKAAMGAMPNKTDRNDARAIAQIMRTGWFRAVHVKTSTCRSWRSLLVARRTVLNEMRSIENVVRAILRETGLKLGTPARKDFVVRAKELIGGEDGLAHMIEPLLTILGVMLREFARLTKEVLDVVRDEPICRRLMSTPGVGPLTALAFRATIDQPEQFRKSRDVGAHLGLTPRRYQSGETDIQGRVGRCGDELARTALYEAAHSLLVCSKKWSALRAWGMKIAKRRGMARARVAVARKLATILHRMWVDGTEFRFRSEKAAAAGASKMIIATA

SEQ ID NO: 482688 - protein, 370 aa, unidentified
MEIIIYVGMDVHKETYSVCCYDPRTDKYMYEHKMKATTTNVLKYLKSVKEQIGEDTVFVCGYEAGPTGFGLCRELLRADISCVIMAPTSLKRSSCKKVKNDRVDAKHLAKALFTKDYSPVHLSSKKEEAIKEFCRMRRSLMNELKTAKQVLLLFLLRQGKIFEKTYWTKEHRLWLKKVTFDELYLQEAFNEYLISVNTLESRLKAVEKRLEDISKDEEVKSKVERLICFCGIDTLSAISIVSEVGNFMRFGRAWDFSNYVGLTVGESSSGEKEKRLGITKSGNRYLRRLFMESAKSIKRSNPRGEKSKRMKQRQEGQNPLVIAYADKCRLRLRNKILRLEMRGKPANVASTAGARELACFVWGMMTDHIA

SEQ ID NO: 482689 - protein, 321 aa, unidentified
MDHFAGLDVSVKETSVCIVDDTGRIVREVKVPSEPEALLQVLRNPAYHFKRIGLEAGPLSQWLFSALAEAGLPVICVETRHIRAVLKAHINKTDRNDARGIAQMMRAGLYRPVHVKTLRSQKLRILLTHRKLLQSKAIAIENDLRATLRNFGLKVGAVGTVKLEARIKELIENLADLAVLVEPLLIVRRVLREQIAILHRRLLAIVRDDDVCRRLMTTPGVGPVVALTYRATVDVPARFRNSKAVGAVFGLTPSKYQSGEIDRMGSISKCGDAMMRTVLFEAAQVMLTRTIKWSWLKAWAMKIARHRGLKKAIVALRVGWP

SEQ ID NO: 482690 - protein, 471 aa, unidentified
MWLFLRASDSVKKIMAGAIAVQQHDDVVNLSTISHKKNGYRFAFGKYVIQVSLWHLFGERSSISNQPSLYKGGSMSVVHKKHENLATFHALHRSAIGIDVHSNLIVATYQNREYGSSSLFNENRESGASKTELDAFASWCKAKEAEVLIMESTGVYWQSLYEALENVGFTNKQIVVVNARDVKNKRCSKTDLADAIHLAEVARQGTYRASFVPAKEFRQLRCLWRSFFTLKISRKKFLNIMHKQLCQVGCRASSVFSDIRGKKATKIIDCLINGEHGETLYNHIIEITSCKQGKLKATPQQIYDALQADMESEVWFAIRQNMEHIKYLDVQIVEAETNLRDNLKPYEHLMKLLTSIPGIKDITAMGIICELGDDLSQFTSIRRFCKRIGLAPGNNESAGKKYSGRTTPGNKYLKALLVEVASGIGLMKNGFLHEVHQRFKERRGTKKANVALAHKMCRIIFSVLTHGTAYQ

SEQ ID NO: 482691 - protein, 342 aa, unidentified
MNYYAGIDVSLECSSVCILDGSGRIVREAKVLSEPDALIAWFGSLGFGLERIGLEAGPLSQWLFAAMKQAGLAVELLETRHVRNAFKTMPVKTDRKDARGIAELIRLGWFRPVYCKSVEAQETRALLTARKLVQSKLHDIELSLRGILRGFGLKVGPTTPKLFEARIKELVEGHPSLQVVAQALLAVRTVLVREFNGFEKRVRSMARSDARARLLMSTPGVGTIVALTYASAIDDPKRFKSSKMLGPYLGLTPKKYQSGETDITGRISKIGDASVRTALYEAAHVILTRPVKGSGLKSWAARIAKRAGMKTAKVALARKLAVIMHRMLVDDKPFNFAAAAAR

SEQ ID NO: 482692 - protein, 469 aa, unidentified
MADYFGNLLIEPQTVQHRGVCFQLAVELVREAQRENDIQDTIVVVERTGNYHLPPKRAFTNAGFETRVIHPFATKQFRMPADPGNKTDETDLYAQHRAAVAGFGLCEYELESPYRELQLRARHRRNLVQKASAIACQIREHLHLGMPGYANLFDHLFEHQTALAIAARCDSPAKILQLGQTRLSGHLRKNKIRHQIRTIDKILAWAAQATSDNVPDGPLHHAIWTDLHELYRHFRQRITALERELASDLVKTPYVRLLAIPGINAVSAAELAAEMGPMTRYANANAITGRSGLYPSRHQSDQVDHASGPIIRQANRRLRCVLMRIADNLACHCAYYRGQAAVDQTRGIDKRLSRVKIAKRFSRLALACVAGDEPMRHPCFREPDSILEKLRNFHHEHETPVDRLLADLEAAVEQLPYNTRNCEAVIVAKVLDEHAHRRVGVTTIGDLLPAVLARLRIHTNKETENGDRS

SEQ ID NO: 482693 - protein, 430 aa, unidentified
MTKRNLTPPDAVLVAIDMSKHRQEVLIERPEGGRRRRMTVMATKTDYDRFASDLADIGRPVVVGFEATGNYHRTLAHRLLSVGFDLRLISSVALARTREALHNGWDKNDSKDAQVILHMLRIGATQRYVDPLAAGINDLQEMSKTHEAISKAKTQTWHRILTHYLPLYFPEIERFAGNSRSDWFLALLERFPTPGSMMRLGQEDFTREAWTLVGRKVSKARLLNDIYETACASVALPIEEDSIAIAMFRMVIAQARSLIRQRDEIERTAHAMLSENRDYQLLRMIPGIGPINALTILAEAGDLRRFAHHRQFLKFCGLDLATCQSGTFRGRTKLSKYGNARLRRTFWMATQVAIRQRDNSFRDKLGRYVAGHANDPDRRRKAMTALTAKMARVAHAVIKTGTEYRPFLERADTRWKDPSLWSREGAAATL

SEQ ID NO: 482694 - protein, 383 aa, unidentified
MAKVVIGVDPHKRMNAVVVINGKGQVLARQQFANSAGGFRELRTFWRQWRPRTWAIEGCNGVGKYLAQRLVAEGETVFDVSTRRAALVRVFAGGNGRKTDDTDAHSIALAALHGTDLPQVRPDAMTVTLRLLSNRRSELVGLRTQAVCRIHRDLVVLLPGGAPRSLTAKKAKGILSRIRPRDEIGRLRRKLVADQIVDLVSIDKRLDVVNREIKAAVAAAPTRLTRLFGVGPVTTARVLGEVGDMARFKSRHHFASYNGTAPTDHSSAGPCPPRVNTKGNRKLNHAIHIVAVTQKRSVNSAGHAYYRRKLAEGKTEKEAMRALKRKVSDAIYRQLIDDEVLRGPGGQAGTTPKTSVTGSNPNAGASVKPQPEPRRKATRHTVH

SEQ ID NO: 482695 - protein, 372 aa, unidentified
MSEHSEVFIGLDTSKLKISVALADGERNGEVRFYGDISSEPGSVASMVGKLAKGGARLHFCYEAGPTGYDLHRQILGLGHECTVVAPSLVPKRPGDRVKTNRRDAVSLARLHRAGELTAVWVPDEAHEAVRDLVRAREAASEALKRARQQLQSFLLRHGRIYTGRKPWTRAHTRWLTQQAFAHPAHQIVLAEYRQAIEDAGVRLDRLTRQVTETAATWSMAPVVAAYQAMRGVAFMTAVTFVVEIGDVRRFDNPRQLMAYLGLVPSESSTGERVKRAGITKAGNMRARRVLVEGAWTYRFPARVGPTIQARLDGLPRTVREVAWKGQIRLCARYRKLILAGKRKTVVVTAIAREMAAFLWAIGQEVAPATQE

SEQ ID NO: 482696 - protein, 347 aa, unidentified
MRPKLLMENDYILRQCVGIDVSKETLVVTMCMFSFAEKAHYSDVKTFKNNKTGFNQLVKWSRKEAYTDKPLRYVMEATGVYHEELANHLVKIGCTVIIMMPNKAREFAIWEGMISKNDTIDSRVLALVGCVKRSMRPWQPSKEIYHELRAMTRFAQDTKKLRLALKNHLEALEHSHQAEKSVVKHYEAMVSYLDKRLEMNLKNMKEKVASDEALNKKVENIITAPSLGFTSVITVIAETNGFALIQNRKQLTSYAGFDVKDNQSGNVKGTSRISKKGNSRIRAILYMPAVQAQLRSKHLKEAYDRIVQKHPDKKMIAVTAMERRLLLLIYALWKSDKPYDEDHNKKK

SEQ ID NO: 482697 - protein, 336 aa, unidentified
MVYVGVDLHRKTAHVVALDQGGTAILSRRVATRPDELLRVFGELDHQPLEVAFEATFGWGWFADLLADAGIPAHMAHPLATKAISSARVKNDSVDAKTLAHLLRTNLLPEAWIAPPEAREARRLARMRTSLVRVRSQLRCQVHAVLAEHGVHAEVSDVFGKAGRALLEDLALSPVSKARVDANLRLIDAVSEEVVQAERELRALFRGDDRIKRLTAIPGVGLITAATVVTEVWDITRFPSADRLWSWAGLTPSEHSSGEHTRRGHISKQGSRWLRWVLVEAAARPQADPGLRAFVDRIASRRGTKIARVALARRLLTLSFYALRDERGCRAFPVTR

SEQ ID NO: 482698 - protein, 403 aa, unidentified
MNSVGIDISKGRSTIAVMRPFGEVVISPFEVRHTGSELSKLAKQLKSLDGETRVVMEATGNYHASVAKLLHNAGLYVSVINAKLVHGYGNNELRRVKTDRKDAVKLANYGLDRWLTLPRYIPEEDTRLLLKNCYRQYRQYFKVQTVLKNNLISLLDTVFPNANRLFSSPIRGDGSEKWVDFVAEFWHCRCVSEKSERAFTSKYLRWCRKHGYNFREAKAHTIYAEASGHIGVMPKSETTKLLVEQAVAQLRATSTALAALKHEMQSLASQLPEYPVVMDLFGVGPTLGPQLIAEIGDVRRFYSKKALVAYAGLDAPPNDSGDVTGRHKSMSKIGASSLRRTLFLVMSVYLQTAPLDEPVYQFMDRKRAEGKPYRVYMMASANKFLRIYYATVKAYLESLEHTA

SEQ ID NO: 482699 - protein, 349 aa, unidentified
MGEVSTIGVDIAKSVFQIHGVDAGGTVVIRRRVGRARVLEFFADLPPCLVGMEACATAHQWARELKKLGHDTRLMPPTYVKAYVKRGKNDAADAAAICEAVTRPSMRFVPIKNVEQQSVLMLHRTRDLLIRQRTQLINALRAHLAELGLVAAKGREGVHQLVTVVTECGGERLPSNARFACQAIVTQLHAVQIEISGLDKRITQTHRVNADSKRLDTIPGFGVILSTAVVATMTDPKAFKTGREFAAWIGLVPRQNSTGGKDRLGSISKQGDRYLRRLLVVAATSVINSARARPYKYPWVIELLGRRPTKVVAVALANKMARIAWAVLAKGEPYRAPTRSSKAVVPAAA

SEQ ID NO: 482700 - protein, 442 aa, unidentified
MTPPPYDLVIGLDRSDKKADLCLINPRTGQRRSEVIDTAPEALWEWLAALRQQHPSARVGLCLEQPAVHLIAFLEAYEWITLHPINPITLQKYREAFVTSRAKDDTKDAEYLADLLLTHQAKLPMWAPQDSATRAVQQLVFHRRAVVDERTALSNRLIALLKQYFPQALELCGQDLWRPLATAFLLKWPSLPAVQKVKPPALKQFYYLHGSRSTKLLDQRLALVAKAVAVTHETAVIASFVLRVQLVCRQLQLVQHSVMEFDRQIAAAYAVHPDRALLASLPGAGAVLGPRVLASLGAQRERFDSAASLQCYTGVAPVTKRSGGSCHIHRRYLCPKFHRQSFHEYAKESILWSRWAAAFYLQQRTKGCPHHTAVRALAFKWQRVIWRCWQDRKPYEEKIYEAALRKSGSPVVALFDRVELGKSPWKNPAKKNKKTIDGLPQR

SEQ ID NO: 482701 - protein, 390 aa, unidentified
MEARTVNNLPPAATHDDAVRCLLAIELSKKSWIVAVNTPLSDKVSRHTLKPCDGKELLDLCERIRTRVARETKQRVEIVSCYEAGYDGFWLHRLLEAHGIRNYVIDPASLQVDRRARRAKTDRVDVERLLRSLMAYLRGEPKVWSVVRVPSVVEEDDRRLHRERDRLINERIQHSNRIKGLLAIHGIYECQPLRRDRMQQLERLRTADGQTLPPRLKAEILRELQRLVLVIGMIKTIEAERDTIASAKTEAEHTSAKKIQDLAKIKCIGPEFANSLVGEVFYRSFDNRKQLASYVGLTPAHFQSGAMSRDQGISKAGNAKARTVMIELAWLWLRHQPDSPLSIWFRDRVGKLKGRIRRITIVAVARRLLIALWRYLKTGLVPEGAILKVK

SEQ ID NO: 482702 - protein, 294 aa, unidentified
MEYYVGLDVSLKEISICVVDRDGKTVARGVCPADPGGVAGWFRNRELTPRRIVHESGMLSIWLQRGLAGLGLPATCIDARKAHKSLSARLNKSDAADAEGLAQLARTGWFTPVHIRSEEADRLRSLVGARERLIRLRKDLEGHIRGVLKTFGIRMIGIGQGRQRQAFRDQLAAAGETDQVLRVIADAFIATHAKLCQVADDLDKVVRKTAKVHPVARRLMTIPGVGPVNALSFIALVDDPGRFNRTSDVGAFLGLTPKRHQSGEMDWSVRRDKQGETPASIRMRTRGWGLVGRA

SEQ ID NO: 482703 - protein, 345 aa, unidentified
MRPRSRFQVVVSHSRLFFHKSVLMNKYNEIFGVDISKDVFDVYGSKSGHDQFTNDASGFKSFLKSLPKESLVIMEATGYYHYRLAQFLFKQSVLVSVVNPLSVKRFIQMKLAKVKTDKSDAKAICEYGKINEVPLYTALTNVQSECLQLFRLMDSFLKKRTATKNKLHGEDVLGIPSSWVYRSLKRDRKHLDKELLGIEKRLISLVKQDQQVQLTLLQSIPGIGLKTALFLIVVTDGFSKFETASQLCSYVGITPTIRESGSSVRGRSRISKVGNRKLRNLLFLCSFTACKHNKGCREVYERILNKGKSKKLALIAVSNKLIKQSFAIAKSGLPYDETYVSVLSK

SEQ ID NO: 482704 - protein, 451 aa, unidentified
MKMLYDRCAGLDVHKKSVSACIRISKGKETSQETRTFGTFTADLEDLRDWLLKHKVTHVAMESTGVFWIPVWNVLEQCEANFVLTLINPQHVHALPGRKTDRKDGERIAELMQYGLLKGSFIPPPAIRELRDLSRRRTHLQGERNRVINRIRRLLETANIKLGSVVSDITGKTARLILGEICRGNCTPEELAKLAQASLKNKRAELIGSLKGFYSEHFRWLLTEAVQDLAYLDRKLEPLDQQLAKRLLPHGDLIRRLCTIPGVDFTTAAVIIAEIGLDMSRFPDAAHLVSWAGGCPGNNESAGKRFSGRVRKGNRYLRRVLTQSAWSITHKKECFLTSLFWRVAARGGRTKAAIAVAHRVLAIAWHIIKNEGEVYREVGGSHQDRLRPQRSARRLVHRLEQLGFEVNLKAKAREAAPAPESVTLPASPESPKSPFSLVDAGITSEARSGRG

SEQ ID NO: 482705 - protein, 487 aa, unidentified
MRSIFRKRNPDVEALFQGAGLASKVMCVAFDYAKKIHTAIVCDGTGRQLRGVFNVENNRQGLDFLLGIVAGLCRKHKIRREHVFFGGEDCGSYAFNFIHALISRDFLVVGINTKQAKDERESSKASTDLIDTVGVAGMMIKMKGRTIGAASEHIHGLKRLRRQRGAILKAHSGSAHRVHRIVDELFPGFLTCSESGIDPFSRASLWLMEDRFSAADIHARRRPALTRKLRDFCVQDPDGAVDKLKALAESALPPAPAMVPALQRSLREELNLYGLLNTSLHSMDTDIAKLLTSTPGAMLTTIPGISLRWAPGLYAELGDPIRRRNVDSMAALGGITPGLKQSGGPDKPAVVSHRSKACCTFLKHALMGGAVSISQYGHPEMREAYQTDKALGRDARARMAQKLLRVALYIIDQQTFFLPPSLHQAGTHDQVRAYYAHTWPKVLIKWRDAGAIKQATAEGTPLRQWRDMAQELYDLELDLRSPQTGRK

SEQ ID NO: 482706 - protein, 350 aa, unidentified
MIVIGADPHKQTHTFAAIDAATGEQLGCETVKASGAGHERALGFGRGLGPERVFAIEDCRHVSGRLERFLVARGERVVRVAPKLMAGARLSSRERGKSDPIDALAVARAALREGIERLPGAHLDERALEIRLLLDHHDDLVATRSDDQRRLRWHLHDLFGEQDIPAGALDRAKWLDRIEGRLKRSEQGARVRIAREQVRSIRAASKRVRVLEVEIASLVEAYAPQLLAERGCGALTAAKLIGELAGAERFATDAQLARTAGVAPIPASSGRRDRHRLDRGGNRQLNCALHRLAVNKGRWDPESAAYLARKQAEGKSRMEALRCLKRHLARRIHKLMTHNPNAPATTPALT

SEQ ID NO: 482707 - protein, 331 aa, unidentified
MVYAGIDVHRKRSQVSLIDVDGRELLNRNVDNGSEAMLDILEDLEPGTPVAFEAAYGWGWLADLLEERELEAHLVHPSACKAIASARLKNDKVDARMLAHLLRTELLPEAWIAPKEVRDLRVLLRHRASLVRVRTSLKNRIHAVLADEGLKVEGEKLWSDEGQQWLAGVCVRDMHRLVIDDCCGMLDALAIPIGRLETDIRKQAKTDPRVEALCVLPGVGLITAMTLVSEIGDINRFPTARKLCAWAGLTPSVRNSDNKVRHGHITKAGPAAVRWVLTEAGYHARRFPPFNSTFEAMTKRRGKHIAGVALSRKLLARSFHILKSLEAAKTQ

SEQ ID NO: 482708 - protein, 415 aa, unidentified
MKVVFPTCCGVDVHKTFLVATIITTPADSLQPNYQKKRFSTFNSDLNRCADWLLEHNCLDVCMESTGKYWVPVFNILEKRGIRVVIANPKWVKAVKGNKDDTKDSKWIGDLFRIGLVKSSFIPDLNIRILREFTRYRYKLVSMKSSEKNRFQNAFTVCNVALDSVVSDMFGKSATAITDYLTSDESFDAEHCVSLLQRSLKKKAEQVLESIEGFSIADEQKARIKIIREHHDFIEEMIATVDTRVNEMVAKYEGNINLLCTIPGIDRRSAITIISEIGTDMGQFGSSKRLCCWAGLTPGNNESAGKKKSVRISRAGVYLKPALVQVAHAAVKDNDHPYYKLKYERIAKRRGKKRAIIAIARMILTAVYSMFCTGEVWNPVDLYKVDMPGCLKEQQLAQAIKQATRFLEKQGLSVA

SEQ ID NO: 482709 - protein, 450 aa, unidentified
MEQPQEVEDEEHERVYQRVAAVDVAKASGVVCTRVPADEPGGRRRVRVWTVKATLGAVTELGDHLRCEGIEVVTLESTSDYWRVWHAGLEACGLRVQLVNARSVKNVPGRAKTDKKDAVWLAKLTERGMLQPSFIPPYDIRRLREFTRLRADLVHDRTRYWARLEKLLERALVKVSSVASTLDTQSVRAMIEALIAGQRNPRALADLAVGKLRARRAELAEALAGRFEDHHGTLARILLDQIDALTRQVAALDEKISALIAQIPAAQGVDADGTTGPDAGRGPDAAVLPAVARLDEIAGCGAVAAAALIAELGLDMTVFGTPGRLVSWAKRCPQTRQSGKKNTAGKVPKGSPWLNGVLGEIAASASRTDTFLGERYRRLARKRGKRKALAAIARSILVIIFHLLADPAARYHDLGPDHYDNRVSRDRKITNHRRQLEALGLTVIIIDEAA

SEQ ID NO: 482710 - protein, 341 aa, unidentified
MNQVTTVGLDLAKTIFQLHGADSAGTVVFRKKLRRGQLLAFLATLPPCTVAMEACGSAHYWGREIAKLGHTVKLIPPAYVKPFVKRQKNDMADAEAICEAAQRPTMRFVALKSANQQAAAVVFRTRDLLVRQRTQAINALRSHLAEFGVIAAKGPVHTSKLIAALEDPASDLPQAARVILAVLVEEFRSLDERVAVLDREIARHAKDNAVARRLMTIPGIGAVTAAALTALAPPAQTFRRGRDFAAWLGLTPVQRSSGGKERLGRTSKMGERTLRRLLILGASAVARWAARKGVPAGSWLARMMSRKPPLLVRVALANKMARVVWALLAKGGVYRAPVVAA

SEQ ID NO: 482711 - protein, 319 aa, unidentified
MAMNTQAIQIGIDVAKEELVIYRQDLDQVDSLPNTLPSIRRWLKTLPEHAALAVEATGTYHMPLTEQAHRAGHSVFVIDGYQLKHYRESVRARAKTDPCDARLLARYLAREGDDLRAWTPPPKAYRTLQSLLRRRSKLIQARVALQQSLGQEPSLKAPLKRLVAQINRIDQLIQKRMHQAVRQAGLTEQVARCEAVEGIGPLSACALVMAFLRGDFRNSDAFVAFLGLDVRVRDSGKQVQRRRLSKRGDPEIRRLLHNAAMAARRHPYWANVYQRYRDRGLKTTQALVILARKLARIAFALMKNQTTYQEKAKQACGTT

SEQ ID NO: 482712 - protein, 338 aa, unidentified
MRSYAGIDLHSTNSYLGIIDTDDNRLFGKRLPNELDTIRSALKPFGKGLTGVVVESTYNWYWLVDGLQSAGFKVHLANPSAVKQYEGLKHTDDRWDSFWLAHMLRLGILPEGYIYPRQHRPIRDLLRRRLLFVRQRTSQVLSLQSMITRNLGTHIAGNEIKKMKQASAQHLFDDPDLAFTAENNISTINFLKTKIRNIEKRILAKTKLSPQFVILTTIPGIGNILGLTIMLEVGDISRFAKAGNYSSYCRCVKSERTSNKKKKGEGNRKNGNKYLSWAYVEAAHFAMRFCPEAKRFYQRKMAKSNGAVATKALANKLARASFYMMRDQVPFDKDKLFC

SEQ ID NO: 482713 - protein, 317 aa, unidentified
MTAPEIFVGIDISQKRLDVAITPGDQALAYSNNENGIQKLVKRLRTLNPLIILLEATGGYEFFLVAALRGAKLPACFINPKLVRNFARSAGIAAKTDHLDAQVLALFACRMRPQPRPLPQTQHQELQHLMTRRRQLLGMVQMEKSRLDPAPFPRVQQSIQRTIASLEAQLADLNRDIDDFFRQNSLWVDLEKTLSNQKGVGHVTLLGVVAYLPELGRLNRREVASLAGLAPFNRDSGQWRGQRHIEGGRNPLRQALYMATLSACRFHPVISAFYQRLLQKGKPFKVAMVACMRKLLTILNAMAKELLLGRSFAPLNP

SEQ ID NO: 482714 - protein, 395 aa, unidentified
MQYTAGLDWGSVGHAACVIDEQGTVTAEGLKKLLADLARIAPPQELPIAIERPSGLVVDTLVEAGHPVVPIHPNVLKACRPRYHAARCKSDPGDAYILADVLRTDGHRFRALRPASDEIKALRTMTRTRDDLVAERVVVANQLRSLLDAFWPGAVAIFADIDSPIALDFLDRYPTPASTRHLGPKRLAAFMARNAYCGRRSPEELLARLHSAPNGLAGEAEEEAKGYMVKALVAVLRTLVEQIRCVTAAVEHAVAQLPAGQVVMSLPRAGKVNAAQILAELGEDPERFQTEDQLAAEAGVAPVTHESGKHRAVVFRFACNKRLRQALVTWADNSRHASPWANHVYALARAKGFRHPHAIRVLARAWVRVLWRCWRNNKPYEAALHGAAKPFLETA

SEQ ID NO: 482715 - protein, 320 aa, unidentified
MSETSVVVGIDVAKDQVDVSVLGAELGAEQFDNSSEGHTALAAALKPLKVSLVVLEATGGYEAALVCALQAAGLAVVVINPKQARDFAKSMGRLAKTDRVDARMLAELASVLLRREDLARFIRPLSDTHQKDLAALVTRRRQLLSMLTFERQRLQLAPQLIRPGIEAMIKTIRAQIDDLEAQMERHLREHFAELDQLLQSTRGIGPVASATLIAQLPELGKLDRGAICALVGVAPMANDSGTTRGRRRVKGGRFEVRRVLYMAVVSAIRFNPLIKAFYRRLRAAGKPPKVAIVACMRKLLVTLNAMVRDSTRWDPNHSRA

SEQ ID NO: 482716 - protein, 316 aa, unidentified
MDQLSVGIDVSKATFVVAVTPTGERWVTDTAPAAIDALIARLQGMTPAVIVVEATGGYERALVAACAAAGLPVAVVNPRQVRAFAQALGHTAKTDAIDADVLAAFGARVQPVPRPLADAATQALAALMTRRRQLIEMIGMERRRLEQAPPTGRITRDLRNHIRWLERRVSDVDDEIGTAIQASPVWRVQEDLLRSVPGIGPITARTLLAELPELGTLDRRAIAALVGVAPMNCDSGQHRGQRHIWGGRRAVRATLYMAAVSAVRHNAQLAPFYRRLRAAGKPAKVALVATMRKLLTIVNALLKHEARWNADVAATV

SEQ ID NO: 482717 - protein, 337 aa, unidentified
MTQVHILAIDLAKRSFQVCGTDRGGAVLFNRVLSRARLQQFLSEQSPCIVAMEACATSHFWGRFARSHGHDVRLIPPIYVKPFVKRQKNDAADAAAIAEAALRPNMHYVAVKSAEHQARAVAFRTHQCFVRQRTQLINALRGHLAEFGIVVAQGPANLSAVAGILAEEAVDLPDGVRVIGQLYLDQIGMLSEKIDELSLKLREATKSNEDMRRLCTVPGVGPVTAGAILAFAPDLRAFKSGRNFAAWLGLVPRQHSTGGKTRLGGVSKMGQTDIRRLLIVGAMSLIRWIVRKGVLPDNWLGHILDRKPRMVAAVALANKMARIIWAMMTREQNYRMA

SEQ ID NO: 482718 - protein, 313 aa, unidentified
MITEEVYVVGVDVSKATLELGCFSLTLPPSIPNTPAGFKILLKSITKCITPVHIICEATGPYHGPLVRFLHQAGIKVSVVNPRLTRDFARARGKLAKTDAIDALLLADYGRTMQPDPTTPPEEHVVLLDELVTRRAQLVEDRARERNRLEQASAPDVAASLRLHIRHLDEQIKKLFKRIAEVVEKHPSLKAKVSLLAQVHGIGTLTASVLLATLPELGTLSKNEVTALAGLAPFNRDSGAFRGKRSIHGGRIGVRCAIYMSALCASRGNPILKSFYQRLRAAGKPHKVALVAVMRKLLIYLNSLLKEHSLSPA

SEQ ID NO: 482719 - protein, 402 aa, unidentified
MPMLSIGIDVSKGKSTVCGMKPGGEIVYTPFEIQHTREGMSELVSLLRSSGEEVRAVLESTGSYHCPVVTALLENGIFVSVVNSLRMKRFCSQSIRKVKTDRIDAMQIALYGLAYWQELQPTRLPEDTYRELQLLARQYYQMTSLLIKAKVDFNAICDQVLPGMQELMSDHAGRHKLSDFVLRYCHTTHILEMGETRFRKDYCKWAEKKGYRNCERMAALIFATAQNGIPVLPNAPSTQIVITEAIRVLHTVEASRDAILTQMQALAKTLPEYSLVREMPCIGDTLAPRLIAEIGDVRRFHSKRALIAYAGIDAPPYQSGKFCANNRHISKRGNRYLRKTGYEVMQSYVMHKPANDPIFTFIEKKRGEGKSGKLAMVAGLNKFLRVYYGKVTELYRSLPAIE

SEQ ID NO: 482720 - protein, 344 aa, unidentified
MTDIAVIGLDLAKSVFQIHAVNQQGLPVLKRQLRRAELLKFFQKLPPCLIGMEACGSAHYWAREFKALGHTVRLMPPNYVKPYLKRGKTDARDAEAICEAVTRPTMQFVPVKSVEQQSVLMLHSSRDLLVKQKTMLINALRGHLSEIGLIAPKGVVGAKSLGGLVHENQDSWPNEIRTVAHAFLDQLRMIQTQIEKLDDRILQWHRNNENSMRLATVPGIGPIVASAIAASVPDPKLFRSGRHFSAWLGLTPRVHGSGGKDTLGRITKAGNGYIRRLLVVGVTALLRIDRKKTPSHLWGQMLREKKPRRVVSVALANKTARIAWALMSRAETYRGTSAVPCAVC

SEQ ID NO: 482721 - protein, 358 aa, unidentified
MGTAKTSAEKKISYFIGVDVSKNKLDFAVLMDRQFLLHRVIDNNQEAVTAFMEELGKLERFRIQNALFCMEQTGYYCNPLLEALQKLKATIVVENPVQIKSSLGVLRGKNDKVDAIRIAQYAQRHRDELRLWVPRREVISRLVNLFSMRNRLLGVSVALKMPLKEELKFIKKGAQLENKLSCRESLKAITADLAQIDQKIASVIAQDSYLEALMEIICSVPSIGPVTALQIIICTNEFRDISDPKKFACYAGVAPFKNESGGSAARAKVSHIANKKMKSLLHICAMGSLRYDKEMQSYYKRKTADEGKNGMVVINAIRYKLILRVFACVRQGRLFVKDYHRDNILTGELIDAAGSETY

SEQ ID NO: 482722 - protein, 695 aa, unidentified
MQKQRLKNKIALVTGAARGIGFGIAEKYVEEGAKVVIADVLETEGSNAAKKLGTAAGFYQIDLRSRSSIFQMADRIHEEYGHIDVLVNCAGIARPCPTMKLSEEVLDEVIDINMKAPLFACQAVGKYMRKDGGGSIINISSGNTRMINVGRTPYGITKGAVNLLTQQLGAEWALYNIKVNAIAPGWIKTEMVEKPLRQGILNQEEILSVSPIGRFGKVAEVANLACFLASEESDYIVGQIIFADGGWNTGIMPNALNYIRENDKVSEMNYNTQNAKIASITEKTLIVGIDVGSETHYARAFDWRNYEYSKKPLEFSNTESGFLTLKAWMEDIAEKHGKTAVIPGMEPTGHYWFALGKFLQDSGMKPVHVNPHHVKKSKELDDNNPNKNDRKDPKTIAALVNEGRFSYPYIPTGIYAEIRSLSNLRFQTQEELTRIKNRIARWFSIYFPEYKDVYVDLKAVSGRMVLKAAPLPEDIVKLGAEGVNQIWRNAKLRGAGMKRAKTLVSVAEHSIGSKEAPEAARIELKNLLNDMDVYAARLEELLRSIEEKLKEIPYIDKLMAIKGIGLVTVSGFIAEVGDIGRFDNPKQLQKLAGYAIVANDSGKHNGESRISYRGRKRLRYVPYEAAISLIGKNAEFREIHEYYRGRKENPLKKMQSVVAIACKVIRVFYAILTKGVDYDAEKLIGDIRRPQMQAA

SEQ ID NO: 482723 - protein, 349 aa, unidentified
MLADELDYVVGVDTHRDEHVLAVLAAPAGAVIAKQAVAANAGGYRAALRFAEQHADGRRMWAVEGAGHYGAGLARFLAGRGEPVCEVGRTPRNERRLRGKDDSLDAIAAARAALASETLALPRAGQRREALRLLLITRRSAVDVRREALVQLRSVIVTAPDRLRNELRALPVGRLLERCSHLRRSRSASAEELATRLVLRSLARRIEAATIEAGELEAEILGHVRALAPQLLDEPGIGPIVAAQLIVAWSHQGRVRSEAAFARLAGVAPIPASSGQTTRHRLSRGGDRQLNRALHTIVLHRRQHDPATKAYIARRVADGKSRRDATRLLKRYLARHLYRLLQNQEPLMT

SEQ ID NO: 482724 - protein, 370 aa, unidentified
MGEYSGAFVGFDTSKTKHAVAIAEGGRGGEVRFLGEIASSPARVERLVGKLASRYDKLHFCYEAGPTGYGLYRQIRELGHDCAVVAPSLIPKRPGERIKTNRRDAVTLARLLRAGELTAVWVPDAVHEAVRDLVRARAAAAQDLRGKRQQLLSFLLRHGRIFSGRQHWTLAHRRWLAEQSFAHPAQQVVFQDAVEAIAEALARLQRLEQQLVAIVPSWSMAPVVEAYQAMRGASFLVAVTFAAEIGDVRRFDNPRQLMAFLGLVPGERSTGETIRRAGLTLAGNRHARRVLVEAAWSYRHPGRVSPTLRARLEGLPKPVRDTAWKAQVRLCARYRRLSAAGKKLPVVIAAIAREMAAFLWAIARHVAPAV

SEQ ID NO: 482725 - protein, 419 aa, unidentified
MKPLSPHPFTAYVGIDWADTKHDICLQAADSDRREFDCIPHQMPDIDAWAKTLHQRFGGCIAVALELAQGPIVYALQKYDFFVLFPINPLTLAKYREAFTPSRAKDDPTDAELALDLLMRHPERFAPIHPQSAAMRTLVNLTEHRRELVGDKIRLSNRLINTLKQYYPQALDWFEQHDTVLFFDFLTRWPTLAHAKRARVQTLKAFFNAHNSRRVNVVEARLESIKAAIPLTEDRGVIDPCRLHALMLVKQLRVTLEGIDQFERAIAQLAPTLPDYYLFQRLPGAGEQLAPRLLAAFGEDRQRFAAADALQKYAGIAPVTERSGKKQWVHWRWQCPKFLRQTFIEWAGQTINKSFWAGAYYRQQRDKGSSHSAALRALAFKWIRILYRCWKTRTPYNETTYLNALRKRGSPLLKNLITT

SEQ ID NO: 482726 - protein, 377 aa, unidentified
MGDYSEAFVGFDTSKLRNAVAIADAGRGGEVRFLGEIENTPAATAQLVRKLSAKYKRLTFCYEAGPTGYGLHRQIKDLGFECVVVAPSLIPKRPGDKVKTNRRDALSLAKLLRADELTAVWVPDGGHEAMRDLTRARETAMLDLRTKRQHVSAFLLRLGRPYPESRKTWTKAHVSWIVSQKLEHPQQRLVLEEMMLAIRQAQERLQRLEQAVAAAVPEWSLAPVVTALMAMRGIDLVSATTLLAEIGDLSRFRTPTELMAYLGLVPSENSTGDTVKRGRITKAGNRRARRMLVECSWSYQHPPRVGQAKQPKVDAAPPAVREIAWKAQCRLYRRYRALIRNGKRKTVAIVAIARELAGFIWAVARAVSATRIAAATT

SEQ ID NO: 482727 - protein, 347 aa, unidentified
MKHHNTIGVDLAKNVIQVSVVSPHGKQLQNKSLSRKKFAEFLANQHPGLVAFEACSTAHHWARFSKAQGHTVKILPVLSVYPFRQGHKTDENDALAVAEAAMRPSIKEAPLKTVEQQGLQSIQRSRELLVQDRTALSNHMRSILLEFGIVIPQGFSALHRQIPEVLEEGDNELPDSYRATLNLLYRRLCDLREDIRFLNEEIDALVKKNVACHRLTALEGVGPIGAILLYATLGTGEAFKNGREFAAYLGLTPKQYSSGGKVNLVGISRRVANKRLRAVLIQGARAYINHVKEPKTTKDQWISTLVQRTGYGKASVALANKNVRTAWAMLTQGTVYQKTQLAVKLAA

SEQ ID NO: 482728 - protein, 348 aa, unidentified
MIEYEHFIGIDLHKSILQVCVLDKDGEIIKERRFKGGSLIDGLAVVNWLLQWRQSGRFCVEAVGMNRWFVNACLDHGLQIVVVDPTKMNLRMLGKKTDRRDAYELARRLRLGDVDRNAATYFADETEFAGRKLVRIRHRLTQVRQQIVNQIRALFASYRVDAPLGHLYAKRSLEKLRKMALSNEDQTLCLQALVSSLDALQRSIESLSKRIATRARDEQSAGALALLPSVGPLTAMTLVVELGDLSRFRNSKAVASYAGLVPRVANSADKSHHGRITKRGNRELRWILSQWSVRLLSFNSIAKEWAKPLLLRMHRNKVRMALARRLLIGIYIMLTRGEVFSLERCLAR

SEQ ID NO: 482729 - protein, 388 aa, unidentified
MFCGIDVSKNKSQACILKDDNTILKEFQIEHTKQGFEELEKHLAPDATIAMETTGNYSKAIYDYFKARYDVVYVDNGQMHMFAKLHFSHMKTDKIDARLIAKYLSFGLKRVNPIKEEELKDLGRLYEKTCYQMAKYKHMFKNQINIIFPELETNFHLTKAKALTTLLLQYPTPQAIAKLSDEELEKALTANFKKSGHLRNKQKFITELKEIARNSIGIKEYPTECFVQTIKILKFYEQTIEDIKAKIKVAIMSCPYNRLLNEFGYDDVSLVSIVGEVGDIRRFPNHKKFVAYCGLNVSEKQSGKSQSKNCYITKRGNRLLRHTFYLMVLAYLKYKKDGHHAQFFNKLRGNGKHPKQCMVAVARKLAIKCYYDMQKCHGDEQKDLNSNC

SEQ ID NO: 482730 - protein, 344 aa, unidentified
MKISTMGIDLAKNVFAIHGVDEAGNELVKRTLRRTQVLPFFRKLEPCLVGMEACASSHYWARELTRLGYRVKLMPPAYVKPYVKRGKTDGADAQACCEAVTRPSMRFVPVKDEAQQSVLGLHRARAALVGQKTQTANLIRSLCAEFGVIAAKGAAPLGDLAAMICNAKDARLPADARLALRPLVHHLEHLACNIAALDREIVSRSRSDESCRRLEAIPGIGPITASALIATVGDAARFKTGRHFAAWIGLTRRANSTGGKDKGGPISKQGDQYLRRLLVQGGAAVVRTVRNPHSSTASPWLRELLSRKKAKVAIVAQANKTARIAWAVLVKEQEYRADYAGAAK

SEQ ID NO: 482731 - protein, 281 aa, unidentified
MGEPKSIIWAGFDVGKTSFVAALDEATASERRKVTSLPCREFKRNQDEVKKFFRWAKEEFPEAEVRIVMETTGCYSQHLAGWISQLRPDVPVTIETAGSIHAFIQSLNLPHKTDRLDAQAIARFGTERQPKPTNRPSKTVLALKELTHTRAALVRAKVEFENRQETLTDPFSANINKKRLKLLEEEIEEINQEIKRCATLPGVRFVSACDIIAELGSLKQYSARELSALSGLAPRIRESGSSVHSSFMSRRSLLFFQGRGAVGTGPGCRRTANRAFFGKTP

SEQ ID NO: 482732 - protein, 360 aa, unidentified
MTYFLGLDVSQKIAAICVVDDTGRRLWRGQCPTNPEQISILVRRHAGDDARIGIETGAMTPWLVHELRNLGLEVVCLDARHARAALEMQINKTDQNDAEGLAQIVRTGWYRSVHVKSFESHRARALLGARTQLIGMTTRLSNHIRGVLKTFGLLPGAMRGLPFDRKVEALILHRSDVALIVRPMLVAWRQVREQIAVFDKAIRVLVRSNSACQLLMSVPGIGVLSALAYVSTVEDPGRFSRSRSVGAHLGLTPRQYQSSEVDRSGRISKCGDTLARTLLHEAAVVILTRLKKAASLKDWGHAIAKRSGNGKARVAVARTLSVILHSVWRSGQPFRWATRTCAGSCDVMHVITTKSEPIGR

SEQ ID NO: 482733 - protein, 426 aa, unidentified
MIPAVVERCAGIDVHKKFVTVCVLIGAAHMEPEPQRRRFGTCNAELRQLRDWLLAAKCQKVAMESTGPYWRPVFNVLEEAGFAVVLANPQQVKNLRGHKTDMKDCWWLAHLLRHGMIRPSYIPPRTIRELRDLTRRRKQLIRNGATERNRVQKVLEEANVKIGSVLSDVFGASGQDMLLALVEGQATAKEIAQLAKRQARKKIPELEAAIEGHRMTETQQQLIRQCMSHMAFLEQQIEEVDKQIQDKIGAFQFNEAYGLLQTVTGIRAEAAATVLAEVGDTVAAFPSAAKLSSWAGVCPGNNESGGKRKSTRTTKGNPYLRDALLECAWAASRRNNSQMQHLYRRLQHRLGHKRAIVAVAHALAQAIYQVLSTRRSYIDTAEPPRSTPKVKRLIRHHTRRLRKLGCWLQYTTQQAQRSTEQYQRIT

SEQ ID NO: 482734 - protein, 310 aa, unidentified
MIIHPGYVGIDISKAHLDIFDASRGRQQRCANTAKDIASLIRSWKRQPPFILFEATGHYDALLRRRLAKAQIPFARVNPARARDFARAAGYLAKTDSIDAKMLAAMAQCLHPEPAQPVDIDRERLARLHKRRDQLVAMRQQERTRASECACPDTNADISRHLTWLDREIDTIEARIETLIAASTNLAAAADLMRSVPGVGPVTAAALLALLPELGARSPKTIAALAGLAPFNVDSGQCRGLRRISGGRKRVRDALYMAAVAASRSKSRFATFYKTLRNAGKPPKLAFIALARKILTTLNAILRDQIAFQP

SEQ ID NO: 482735 - protein, 319 aa, unidentified
MAQNDLVVVGIDVAKDKVDACVRALSLRQTFPCTAEGRRKLISWLRKHKVTAAVMEASGGYEREWARAMREKAVEVRIVDPKRVRNFARSAGQFAKNDAIDAEMIAWFAETFGEDSRQAHDAAREKLVQIVNARCALIDLQIKLQNREEHPAPEPVRKMQARLLRQLAGEIAGLEAAIAAEIKATAHFAELAEIIESVPGLAKITSAGLIAAMPELGQVSNQAISALLGVAPYDDDSGKRRGERQIKGGRRKVRNLFYMACLGAATRHNPVLKAFYRRLVAKGKEPKVALVACMRKLIVILNTMIARRQKWDLSRYALS

SEQ ID NO: 482736 - protein, 404 aa, unidentified
MVFLGVDWAEEHHDVWLENEQGEMLGKARIANDVGGVRQLHELVAEHAHDPSQVVVGIETDRGLLVTALVGAGYQIYAINPLSVSRYRDRHGTSGAKSDRADAKLLADLVRTDRHNHRRLAGDSELSEAVKVLAREHQDLVWTRKRFINRLRSTLREFYPAALEAFGTDLGALDALAVLERAPTPWQGRQLSHAKIVSMLRKAGRQRNLEPKAAEIQRALRSEQLQAPAQLQAAMAIVVSSCVAMIKSLNLQLEQVASEMTASFEGHPDAEIYLSLPGLGVVLSARVLGEFGDDRARFADAKARKAYAGTAPVTQASGTKKIVLARFARNRRLADACYCWAFSSLTRSPGANRYYRTLRTRGKTHHQALRGLANRLVGILHACLAAGQTYLESLAWPQPYEIAA

SEQ ID NO: 482737 - protein, 461 aa, unidentified
MRKARKVAGRRGKKRVDVTANLEILHPHAAGIDVGNAQHYAAVPVGRDPQPVQTFGSFTADLHRLGQWLRACQIETVVMQATGVYWIALYEVLESYGFKVYVVNAKHTKTLPGRKTDVLECQWLQKLHTFGLLNNSFLPPEEIRVLRTYLRQRENLVAGAGTCIQQMQKVLTQMNVQLANVLSDLSGKSGLEILKAILSGERDPYRLAALADPRVQASRKEIAQSLEGHWREDLLFVLRQVHDLYFFHLDNIAECDRRIQAHLQTLESKVDLASQPLPQPTSLPRRKHIPQTNLQEELYRIAGVDLTRIDGIQVQTAQVVLSETGVNMTHWEDEHHFASWLGLSPNHQITGGKVIRRGTKKVLNRATTALRLAAQTLHHSQSYLGAKYRRLRAKLGAPKAITAMAHQLARLIYRLLRFGTEYHDKGMEHYQRQYRKNQIEWLKRQAAQLNMQLIPNTGVAG

SEQ ID NO: 482738 - protein, 342 aa, unidentified
MQVTTIGLDIAKNVFQVHGIDAAEKVVVRKQLRRGQVLAFFEALPPCLVGMEACATAHYWARELTKLGHQVRLMPAKDVKAYVKRNKNDAADAEAICEAVRRPTMRFVLVKSAEQQSQLMLHRTRDLLMRQRTQVINALRAHMAELGMTAAQGKAGLRELLAIIAGSANERLPAEAHASLVVLAAELQAMRTLIASIEKRIIAHHRLDEASKRLRSIPGIGLVGATAIVATITDPKAFRSGRDMAAWIGLVPRQDSTGGKQKLGPISKQGDRYLRRILVVGAHAVLKLARQKPEKYPWLTQLLARKPFKVVAVALANKMARIAWALLVKGGPYRARALVTAV

SEQ ID NO: 482739 - protein, 429 aa, unidentified
MNYTQNNKIKQVDEKTLVVGVDIAKETHYARVFDNRGIELGKVIKFKSNIEGFRKLEEYIKEIKRREKKEKIIIGIEPTGHYWYTLANYVNKRGMKLVQVNPYHVKQAKELDDNTPSKSDRKDPKTIAMLVKDGRYNIPYMPVGIYAELRKTNEIREVIKRKIYAIKNRIERWLDIYFPEYKKVFKGIYGKASMITLQTMATPTQVLNYTAEEILEIWKKDVKRAVGIKRANKLINIAKESVGITEGLLMAKYEILYLVKEYKKVEQELNEIEEKLKILVYKIPGIEKALTIKGIGIITISGFIAEVGNINRFSHPKQIIKLAGLNLKETSSGKHKGKTTITKRGRKRLRSLLFKAILPMVAKNNEFKLIHKYYTNRTKNPLKKKQSLIALMAKLIKIIYTLIKKNIEYDPSKLINDIHGNKKIQFLTV

SEQ ID NO: 482740 - protein, 376 aa, unidentified
MSQAKSTTLLVGLDVHKETISVAYTVAGTAEPPVYVGAIGSRDADLKVVMRRLHSKAATLVFAYEAGPTGYGLYRDLTAKGYRCVVVAPSLTPRRPGDKVKTDRRNAEDLSRLLRSGDLTGIWVPTVEDEAIRDVSRARDATRCGLKRAKQRLKSFLLRLGLHYVGRADWTAAHRRYLAKVVCPTPAQQIVYQELLHAVDEHTARLGRLEDELHSLVPGWRLQPVVAAVQALRGVQWLVALTVLAELGDLTRFTSARQLAAYVGLIPSESSSGETRRQGGLTKTGNSRARRALVEAAWAYRHPAKVSVQIQQRLEALPPAIQAIAWKAQVRLCRRYRRLLARGKHANTVIAAIARELVAFMWAIAREVPLPSASHV

SEQ ID NO: 482741 - protein, 379 aa, unidentified
MKKNTRFVGLDVHADTIAVAVAEPSGEVRSLGTIPNRPESVRRLLKRLEPTKQLRVCYEAGPTGYALYWELTGLGVDCTVVAPTLVPVKAGDRVKTDRRDAEKLARSFRSGDLTAVWVPDQAHEALRDLVRAREAAKKDELRAKHRLSKFLLRHARRAPEGTKAWTTGYWKWLSGVRFEHAAQEATLLDYRTEVEHAASRIERLERAIDAAVEQMPPEHREVIEALQCLRGVAKIVATTIVTEVGNFSRFARPKQLMGYGGVVSSENSSGTRTSRGGITKTGNNHLRRVLLEAAWTYQHRPAISHRLTKQHRDQDEKIKEIAWKAQTRLHCRYWRLLSRGKPAAKAITATARELLGFIWAIAVYVEKKQAEHTQQKKAA

SEQ ID NO: 482742 - protein, 416 aa, unidentified
MKKHNNSPKKSEPTSKRAKSRGPVQREPKEVLAELLGKLREKLDPRVVAASAGEEHPRGELRPNFDRLTVGVDLGDQWSHYCILGLEGETLAEGQLPTTAQDVAGFFEGLNAARVVVEVGTHSAWVREVIRGCGHEVVVANPRLMEGSKRRKRKNDRIDANKLARLGRVDPQSLHPMQHRSPGVRQDLVMLRARDALVAARTELINATRGLVKSMGARLPKCSSPSFAQKVEEAVPAEIQEALLPLVRLTAALSDCIQGYDEKIEKLASEKYGHTALLRQVKGVGPITALAYVLTLENPERFAKSRDVGPYLGLVPKQEDSGESQPQLGISKAGDTMVRRLLVGSAQYILGPFGPDTDLRRYGLRLCERGGKNAKKRAAVAVARKLAVLLHRLWVTGEVYEPLRHGRSERMVRAAA

SEQ ID NO: 482743 - protein, 347 aa, unidentified
MDQVIIGVDTHKSNHIAVAMNTQGARLGGLTIPTTCQGYLDLEVWGSKFGSIKAFGIEGTGSYGAALSRDLLAKGHTVLDVMRPNRQLRYLHGKSDSLDAESAARSVLNGQATALAKTQIGACEMIRHIKMARDSAVKSRSQAMITLKALIINAPAELRGMLDQIKGPISLIRHIAALRPGKITSPTASAKAAMRAIARRWLNLHEEIHVHGQELERLVREKAPGLMNSHGISTMTAAEMLTLVGDNPERIKSEAALAKLCGVCPIPASSGKTNRMRLNRGGNRKANAALYIVAVTRMRGHEATKAYVIKRTAQGKSKREITRCLKRYIIREIYRQLCVPNGAKSTH

SEQ ID NO: 482744 - protein, 356 aa, unidentified
MGEGSWVGLDVHARSVVAGVIDQASGEVRSLRVPAGSEATVAWLQSLPAPVRVVYEAGPTGYRLARACVDAGISCVVAAPSKIRPAADRVKTDRRDAERLARLLRLGEITPVRVPGPEEEAARDLVRAREDARGDLMRARHRLSKLLLRHGLVYDATAWTRAHDVWLRRQRFQGGPLAVVFDECYSRMVDAKARRDTLDNAIDALAATPPYVDVVERLVCLRGVSTLTAFALTVELGDWRRFRPESLGPFLGLTPSESSSGERRRQGAITKAGNSHARRLLIEAAWHQRSPSRRSVTLERRRTGKSLAVRSRADASGRRLHERWQALERRGKPRTIVVVAVARELAGHCWALATMD

SEQ ID NO: 482745 - protein, 379 aa, unidentified
MTKGNRYVGLDVHADTIAVAVAEPDGEVRSVGTIPNRPAAVEKLVKKLGGAKGLRACYEAGPTGYVLYWQLTQLGVACEVIAPTLVPVKAGDRVKTDRRDAEKLARSYRAGDLTACWVPDAAHEALRDLVRAREAAKKDQLRARHRLGKFLLRHGRRPPEGIKSWTLRHMTWVRQLQFDQPAAQAALRDYFLEVAHACERIERLEHELDTAVEQVPPKMRAVIDALQALRGVAKLTATTIVAEVGELSRFARPKQLMGYSGAVPSEHSSGGRVRRGAITRTGNAHLRRVIVEAAWSYCHQPHIGPLLRRRQQGLDDDVKAIAWKAQHRLHGRYRRLLGRGKLKQQVVLAVGRELLGFIWAIGVHVERQYSKKEPARAAA

SEQ ID NO: 482746 - protein, 352 aa, unidentified
MRRPKHPEATDEELFVGIDLHKHRWHVTIRTVDLELFSASIPGIWEALQRGLARYVEHRLQAVYEAGYFGFRLHDRLVAHGIPCLVTSPSLVPQEYGNRVKTDRRDSSKLAHLLAKGMLKRVWVPSEEELYHRQVIRRRRQLVRDRVRTQSRIKAELRFYGIQLEEPRGNWTQIYFETLRRLRFGNRWMQESFNRLLDQYEFLSAQFDKQTQLLRELSETARYRERVEILQSIPGIGIISAMELLLELQDVSRFRRAEQLAAYVGLTPSQYSSADKVRMGRITGIGKNTLRSLLVEASWTLIRKDQAMREKYDRIKIRSGGKRAIVAIARTLLLRMRRVLLDNQAYVLDLAA

SEQ ID NO: 482747 - protein, 391 aa, unidentified
MSMYFIGIDISKYKHDCCIISAADQTVVSKFTVKNDKAGFEQLLTIFHSLSNPQDIRIGFESTAHYALNLELFLENANHSFMEINPVLIKEYKKSTSLRRTKTDSVDCESIARWLMTVEYKPHSKGFYHAYSLKSLTRLRDRLVRQRSFYLVKITNVLDHTFPEFKPFFHDRLSKTALYLLENYGSAEKMARMNSASYEKLRSLSRGKFSPQQFLRLKELAANTVGVNNSIFDVERNSLLTLYQSLVKEIDTLETEINKLIEEVHPHYMSVPGIGPISAAVIYSEYGDISNFSTPAQMLAFAGIEPGVNDSGTESRGGRMVKHGSPGLRYVLINCCLPLIRFDMTFAAYYAKKRGEGKPHRVAITHVAKKLVRVIHALERQGVDFNAQKLQ

SEQ ID NO: 482748 - protein, 388 aa, unidentified
MNITTDQPEAPTAIRTDLGAIFVSLELSRSSWLITSLSPGGGEKMSKHAVRGGDVSRLLERFSQLREKARARTGKVFPLIVIQEAGLDGFWIDRVLQNEGIESHVVDPASIETSRRRRRAKTDKIDGETLVRSLLAYKRGEPRVCSMVKAPTPEEEDQRRLCRERKVLTAERVLHVNRIKGLLFCQGICGYEPLRRDRRDRLEELQTGDGRPLPPHLKAQVERELDRLELLLKQIKTVEGERDALLAVAITSMPAPAAMLLDIKGIGPEFAAVLWSEGLFRHFDNRRQVAAYAGLAPTPWQSGAIDREQGVSKAGNPRLRTTLIQLAWLWLRNQPQSALTIWFHERVLRNGGRLRKTTIVALARKLLVALWKYVTTGVVIEGATMKAA

SEQ ID NO: 482749 - protein, 325 aa, unidentified
MQGKEVSEQETRKCTAGIDVSKSWLDVHVLPSSESLRVANTTGGIRQLKRWLLRRKVELVAVEATGKWHREAARSLSASHFAVAVIDPYRVRMFAKAQGILAKTDRLDAKVLAMFAAMMSPSVREPAPQALEAMQELVTARVSAVNEQVALKNQLAAAREAFLKRQLERRIRELGGYIQAIEKECLKQINQDEALARRFAILTSIPSFGDVVAITLIACLPELGLLSDKQIGALGGLAPIADDSGQRQGVRVVWGGRGAVRRILYLAALSAKTYNNDMKLFYRRLIERGKEAKPALIAVARKLLVLANLLIAQDRLWQPTAPQNA

SEQ ID NO: 482750 - protein, 451 aa, unidentified
MASKKTNRTRRKKSNPTPKTTHPDAAGIDLGANVHYVAVPADRDAQPVRHFGTLTGDLNELADWIKDCGITTVAMEATGVYWIPLFQILEDRGFEVCLVNARHVKNVPGRKSDVQDCQWLQYLHSVGLLNASFRPPAAICAVRSLMRHREGLMRAACQHLLRVQKALDQMNVQLHHAVTDITGQTGLAILDAILAGERDPEALARLRHFRCKKSEAEIARCLRGDWREEHLFTLRQSLEAWRFHQLQMAECDKRISKHLDALDDRGEGSAPQSPKQGANAPDEPIRQELYKKFGVDLTAVEGVSIQTVLAFLGEVGTDVEKFPSAEHFASWLGLCPDNRITGGRTHAAHTRKVNNRLATALRMAAQSLHRSKSGLGDWFRRLKSKLGTKAAVTAAAHKLARILWAMVKHRRPYNPERLGNHELARARKERYLRRQAEQLGFALTPVEGEVS

SEQ ID NO: 482751 - protein, 412 aa, unidentified
MTITCGIDWAEQRHDVAVLDHDGRVLARRRIDVGMSGFTELVGLLTDLADSEPGQGVLTVPIAIETDKNLLVVALQAAGFTVFPINPLAVARYRERHGQSGTKSDAGDARVLADILRTDAHRHRTLPAVTEHGREVKALARQHQEAVWAMQQTANRLRSVLLEFYPQALVAFPNLLHKAAQAVLAAAPTPAHGTRLTAKRVVTLLHRCGRRNDPDLVEHILGALSTPAMRQPPAVEAALGVGAQTLLTVLAAQQGAVQTLQTALGERFNAHPLAPILRSAPGLGPVLGARVLAEIGDDPARFDSPAGLRAFAGTAPVTRASGRSHYVKARKIRNKRLGDACHWWAFAMLTKSPGARAHYDRRRAAGDHHNAALRNLANKLLGRLWWCLKNHQLWDDDAAWTTAPPTPTAAAA

SEQ ID NO: 482752 - protein, 347 aa, unidentified
MVTFGGDCHKRTHTLVAVDDNGHELGVKTVSAVAAGHLEALNWARQWPERRWALENCRHLSRRLEADLLLAGEAVVQVSPKLMAGARRSAREWGKSDPIDALAVARAALRESELPVARLEGESREVKLLLDHRDDLVGERTRVQNRLRWHLHELEPSFDVPDRSLGRKVVIKQVEKVLAVHRGVAADIAVELLERVRQLTERINELEGQIRALVTRLAPNLLELDGCGALSAAKLIGETAGITRFKTQARFAMHNGSAPIPVWSGNSERHRLNRSGNRQINAALHRIALTQMRLRGRGHDYIQHRRACGDTKKEAIRALRRRISDEVFRRMWQDSKSATNDCARLVA

SEQ ID NO: 482753 - protein, 345 aa, unidentified
MKKIIKQVVGIDVAQKELVVSLSRMDEQITVEVFANKVFANNPKGFTALMGWVEKLTDAQVYLSYVMEATGVYHERLAYFLEEKGQAVSIVLPSKISNYARTLDVKTVTDKTASEAIARFGAERKLDTWKRPKAIFKKLRQLTRERDQVVADRTVAKNQLHAELAEAEPGKSSVVRIKKKISFFDKQEKEIMTELKVVMSVDEDLKRMVALICTIPGVGLLTAIIVLAETNGFELIRNKRQLVSYAGLDVREKQSGTSVRGKPRISKKGNRFLRKAMHFPALSAISHDEKYKAIFARLVSKHGIKMKAAVCVQRKMLEMIYTVFKKQEAYDRMYYMRQAEVEARG

SEQ ID NO: 482754 - protein, 343 aa, unidentified
MEQYAGIDVSLESASVCVVDATGRIVREAKIASEPEALIAWFGQLEATPTRIGLEAGPLSQWLYAGIREAGLSVELLETRHVRAAFKAMPVKTDRSDARGIAQLMRLGWFRSVHCKSLPAQELRAILTARKLVQSKRHDLEMSLRGILRGFGLKIGQTTPRSFEARVRELIEGHATLLAVADALLSARAVLAEQLGKLQKRLVSLARQDPRARLLMSTPGVGVLVALTYAAAIDDPARFRSSKATGAHFGLTPKKYQSGETDVTGRISKIGDAGVRAALYEAANVILTRPVKGSSLKSWAMRVAKRAGMRKAKVALARKLAVVLHRMMVDGTEFVAGKAAAKA

SEQ ID NO: 482755 - protein, 400 aa, unidentified
MRSIGMDVHRSFAQVAVLDRGKVTEEFRVDLDYDAVVAFGQKLRKDDEVILEATGNTSAIVRLLTPFVAKVVIANPLQVKAIAHARVKTDKVDARILAQLHAAGFLPEVWAADDDTLNLRRLVSERAALVRSVRRVKSRVQAVLHANLVPKYSGHLFGKDGRDWLSKAPLPKAERDLLARHLDELDWLKAKLEKLDGAMARIALDDTRTRKLMTIAGVNSVVATAVIAAIGDISRFPTPDRLASYFGLTPRVRQSGDRGAIHGRISKQGNAIARTMLIEAAWSAASVPGPLRAFFLRIKDRKGLNVAAVATARKIANLIWQLLTKEAPYRWARPAFVAMKMRKLELRAGAPKAHGPAGPARDYWIKEIRHREMELVAQAEAAYAAMVEAWRDRPPKPQKG

SEQ ID NO: 482756 - protein, 400 aa, unidentified
MCAVFGIDVSKTSSEVAILVNGEKVHGYTILNDAIGFNRLLGDLKTVHNPEILFEATGVYSRRLQAFLEEYSYAYTRLNPLEAKKQLDSLRVRKTDKIDAEKLAKSQLVHNRKPTYVQEEVYQHLRDLSRFYQNMTEDLVRTKNRLHKVLQVTFPELENLLSTPTGEQYWNLVMAFPCNEFVLSLSQSNLCEIIRQSTSKRISEKRVAYLADKLVELANKSYCAVKKTSPMLEEVRYYAQELLRLSERRQVVLSDMVALAQPLPEYDILRSIPGIAETTATSIIGELGNIRRFQSTNQINAFIGIDLKHYESGNFLAKEHITKRGNPYARKILFKCIHNIASASHTNPCHIADFYEKRKRQSTIASTKPHTIASIHRLIRTMYYLITHNKLYDYSLTQNR

SEQ ID NO: 482757 - protein, 350 aa, unidentified
MNRIYIGVDFHARQQTICYLTTEGGEIQLHELKHQHKQEVRAFYAQFQGQVIVGLEASGYSPWFERLLEELGCEVWLGHATEIRRRARWRQKNDRRDAELILDLMLHDEFPRLYLPPLQSREVLRMLRYRQKLVKIRTMGKNSLQALALQSGLAKGSHLFSKAGLQELRTAAMSPAMQWQREQWLQLLEPLNQRLLETMFWLKQQSQDDQRIIRLRTHPGIGLLTSLCLVHSLEPVTRFRNQRKVVAYAGLEPLERSSAERIRFLGISKAGSRILRYLLVEAAHVAVRKDEELKRFYQRLAARRGRAKAKTAAARKLLIRAFIMLRDEIDYAEFRRRAVAARLARQITKA

SEQ ID NO: 482758 - protein, 361 aa, unidentified
MALRERCACDVHDTYHKVCCITQEGEVLEYDINNDKEGRRELRDLVADHAPATVTMEACTGAYELHALLSPAAELVTLLHPGDFRARFPKRGKKNDRIDAQALCEAARIGVKGIWIPDEEIRQRRILSTRRVSLTQKRTAAMSSLKALFREYNIPLPKGAWSDIGRETIRARLDLFPETVKLCARLELDLIEHFNEALEEIDQRMAELASDDGNIRLLMSIPGICYYSAFVITSEMGNFSRFACAKQLTAYAGLCPRLSQSGMSKARLGSITKNGRARLRWMVVECANSAILCNQKIQRLYWRVKKRSGCSSKAKVAAGRKLLTLCYHILKSGQVYSESIEEKHRGKLRKMEGTAKKRKAA

SEQ ID NO: 482759 - protein, 352 aa, unidentified
MKVNTVSIDLAKNVFQLLGMSDTGKKIFSKRLSRQQFIEFIPQLESCHVVMEACMSSHYWARCFVSQGHQVDLLPAQYVPPFVRGNKNDKNDCMAIYEASRRPDMCFVPIKSETQQSIMALHRQRERLIAARTACVNQTRSLLLEFGVIIHAPLKAFRQALLEQLDNHALPPLFRLSLNEVIDELVALNGHLERILRLIKQLNDQSEAAQILLSLPGVGPIIASAFSTCIDKGQAFSCADDLPVWLGLTPRQHASGTVNRLGNITKRGDSYLRKQLIHGARTVVSHAHKKQDDLSRWATAIKARRGVNKAVVAMARRLARLMWILLQRQTLYQPQYSQGSCQGLSQGACHGV

SEQ ID NO: 482760 - protein, 314 aa, unidentified
MFIGINVSKARLDVAIRPSAEKLSVSNDEAGIQALVTRLSEIKPALIVLEATGGLERSVSGTLGSAQLPVVVVNPRQVRDFAKALGQLAKTDRIDAEVLARFAEAIRPPLRPLPDKVSLELRSLIARRRQLIEMMVAEKNRLSTASKAVRKRIEAHIRWLETELDRADKDLDHSIRQSPIWCENEDLLRSVPSVGPVVSRTLLAELPKLGRLNRKQIAALVGIAPLNCDSGTFRGRRGIWGGRATVRAVLYMAALVASRRNSVIRNFYKRLRDKGKAPKVALVACMHKLLTILNAMIKHKTRWSEIIPQTSLDF

SEQ ID NO: 482761 - protein, 335 aa, unidentified
MKKIHVGIDISKEKCNLCYRSGLEIVCEEECANDVKTLKKAFKAALKALDASMEEVLVCAEYTGRYIYPLTVACQELDVFLWMDDPTRIKNSMGLTRGKNDVIDAARIAEYAYRYSDKAVRYCIPDAALVSMKNLLSDREFLLIDRKRYQSQLSDQKKYMAPCDFKHKNSRWKKVIKSIDEQIAAIDAEIESFIAANPVLARQKELLVSIDGIGDRIAINMIAITGGFTRFQNARQFCSFAGLTPYKYESGTSVRSKAKISKRANQTMKALLHMSAVNVATRMKAGEYKDYFERKLKEGKHVLCILNVLRAKLVHRMFSVIKRDTEYTKEYKPAC

SEQ ID NO: 482762 - protein, 415 aa, unidentified
METQRNKVCGADIHKKFLVATIISRDGIKMTKRFGMTLEDLLEFKSWVVENQCEQVAVESTGVYWIPIHAVLEDAVDLIVANAYKIKHIPGRKSDLIDSEWIAELCLNGMIEPSRIFPKEDRELRRLTRAREGYVTDMTREKNRIHHALESCGIKLSSVLADVFGKSGRYLLNSLLDGVELEEMIKGIPVKSIRKKADQIREAVRGSLETTQIILIRGGLEQIESIQRRIDELEGEIKNRIASRREDLKIAMSIPGIGFTSAVTILAEIGDFKDFAKAEQLAAWAGLVPAVYQSADKLVTGSITKHGSKHIRWILVEVAQAIARTNKSELKRFFRRVQAKKGYNVAAVALARKVLCILYHLLMNQEMYQEDEVIKTKSIGIDPSSLPTKMGFEEMIQVLVKAGYEIRKTSSGTGG

SEQ ID NO: 482763 - protein, 304 aa, unidentified
MVHYVGLDVSLKQTSICVVNQAGSVVREDVVDSDPEAIDAFVRSKAPGAVRIGLETGPTSTWLWTELKRLGLPVICIDARHAKAVLKMQINKSDRNDAAGIARIMQTGWFKQVRVKDLDSHSVRALLASRALLVKIKRDLENQVRGLLKNLGLVIGRAKFNVFAVRAEELVEGRPELTAAVKPLLEARKAIEQQVDDLDRKVLKLARCDTQVRRFMTAPGVGPITALCFKATIDDPTRFRRSRSVGAYVGLTTRRHASGEIDWSGRISKCGDAMLRMYLFEAAGVLLTRVPKWSALKAWGTRLV

SEQ ID NO: 482764 - protein, 383 aa, unidentified
MRIVCGLDVHKDSVFVCILNEKGEKFESKYGVLTPELEELHQLLLTHEVKEVTMESTSIYWHPIWRVLGDIECLKLVNPYFIKQLPGRKSDVRDAAWIAECTMKDLIHGSFVPDATVQRMRQYNRRIFDLNKEKVYKLTKLDALLHRCNIRISNYVSSIDSKSYKEVVRLLSEGIVDAERLMEAIHGRTVNRVGKDVIKAALTGIVNEVDIDLIRLYREELQIDDKHLKECQNKLTEICRNEFPKEFENLQTIPGVKERSATSILSELGADMKMFLTASALVSWCGLKPRNEESAGKIKSRRITHGNKYIRKTMIECAWGASRTQDCFYSNFSYIQTKVRRKNAMKVKVAIARKMLVAIWHVLGENVPYYDYKKPKAIADGNS

SEQ ID NO: 482765 - protein, 341 aa, unidentified
MKKASIIGLDLAKRSFQAHGALADGSVAFRKKLTREKVLGFFAERPRCIVAMEACGSAHHWGRAIRDAGHEVRLIPPAYVKPFVKRQKNDAADAEAIAEAASRPTMRFVAVKTEEQQGRAMLFRTRDLLVRQRTQLINALRGQLSEHGVVAPQGPANVAILAQAIDDFPSLPLLVVELARVYLDQIDGLSQKVAGLEKAIACEAKRGGMTRRLQTMPGVGPITAMAIETFAPPMEVFRRGRDFAAWLGLVPVQHSTGGKQVLGKTSKMGQRDIRRLLITGAMVIVRWACRKGAQEGTWLHRMLGRKPRMLVAIGLANKMARSIWAMLTKGEDYRGPVAANL

SEQ ID NO: 482766 - protein, 358 aa, unidentified
MNSHRIQEFVVENKEIFVGLEDSKRTWKIAVRCEKMLIHQTSMEAKYPILIKYLRNKFPKCRIHLIYEAGFKGFNLYDQLTEDGIECVVIPPHIVTEPKVNKVKTDKRDARRLAKILENQDYKFGCHVPDKERREDRQISRTMEAVKKDIIRTRNRIRKFLDFHGIILPFKDSPKWGRFEFMTLKNLSLSDPLRKSLDILLEMLESLWKHAKELRKYLHELCRKERYHKAYEIAKSMPGIGWYTAIRFVLEFGEDLSRFTSGKQIAGFVGLGCSEYSTGETENRGRITGVGSGFIRATLIENSWVAIRKDPVLLDKYNRVYRNSGSKKKAIVAVARMLIVRFRACMMSGKPYVIGVIQ

SEQ ID NO: 482767 - protein, 413 aa, unidentified
MAFKIFRKNCCGLDVHKTWIYACIGITDPNGRTEYKQARFSSFSKGLQELADWLAKYSCTDVCMESAGKYWIPVFNILEKTCFVTLAHPKYTKPQKGNKTDRKDAKWICDLFMCDMIKPSFVPSPEIRHLRDLMRYRFKLTNMLSGEKNRAQNCLTVSNLKLDDVFSDVFGKSARSITAYILDHPGEPFDVAPFVDRRCKTPVSEIQAAVDGAISPEQAVKLRQCLAHIDELEAHRREIEREILLIAEPFSAILDFLFTLPGLDRNPMTAIAILSEIGPDMSVFPSSKHLVSWAGCCPRNDQSNGKVKSTRISRAGCYLKPLLVQLANALIHSKKHPEFKERYHRIKSRRGHKKAIIAICKMLLTAIWNMLSKLEPYNPEGFLEHRPINKSKVLTKAQALELLRLRGYTITND

SEQ ID NO: 482768 - protein, 361 aa, unidentified
MEIERTFVGLDVHARSVVACALDDVTGELSKARLVPDNETILTWLRGLNGPVAVVYEAGPTGFGLARFLIDHAVRCVVAAPSKMHRPSGDRVKTDARDALLLARLLRLGEITPVTVPSLAQEAARDLVRVREDVRADLMRARHRTSKLLLRQGIMWSGGTSWTGAHQQWLGRQHFDLPGLQAAYDTTLETVLLAQSRRDRLDKSITEMAHEPQWWPTVSRLQCLRGISTLTAFGLAVEVGDWTRFTGARIGAFLGLVPTEDSSGEGRHQGSITKTGNTHARRLLVEAAWHHQRPYRPTKTMRDRWDQAPAAARARGHSGNQRLHERWVSFQQRKKRPVIANVAVARELAGWCWSLATLEAS

SEQ ID NO: 482769 - protein, 372 aa, unidentified
MPTNLRYLGLDVHAETIAVAVAERDGEVRPLGILPHRPDAVTKLIRKLGPREHLRACYEAGPCGYVLYWQLTKLGVHCDVVAPTLVPTKPGDRVKTDRRDAAKLARCYRAGDLTPVWVPDAAHEALRDLVRAREAAKGDQLRARHRLGKFLLRHGIRPPAGAKPWTQGHRRWLDTLHLELPALAATLADYLHEVDHAAARLDRLEQALDAAIQAAPAPLRAVIAALQTLRGVRQVTAATIVSEVGPLSRFTHPRQLMGYSGTVPSEHSSGTSVHRGAITKTGNAHLRRVLVEAAWAYRFPPKCTKALRTRQRGQPDAITAIAWKAQHRLSTRYRRLLGRGKPTPHVITAVARELTGFIWAIGVAVERTAPAA

SEQ ID NO: 482770 - protein, 391 aa, unidentified
MIYIGIDVAKDKHDCFITNSDSEVLFKAFTIFNNLDGFNDLYQKIESVMDDVTKVKVGLEATGHYSYNLLGYLIDKGLLTYVINPLHTNLYRKSLSLRQTKTDKVDARTIASMLMSDVNLKSYSDTSYHNEELKSLTRYRFDKVKERAKLKTSVSRLVCILFPELEKLVPTLHMASVYALLSEFPSAKHVATAHLTRLTNLLSESSKGRYGKDTAITFRDSARASIGSNMPAKSLELKHTIKLIQELDSEIDEIENEIKIIMDEINSPILSIPGINYRMGAMIIAEIGDFNRFDSPDKILAYAGFSPSTYQSGQLDGAYAHMEKRGSRYLRYALYNATKYVCHWDPTFAAYLAKKRAEGKHYNVAISHAVKKLVRVIYHLEKTKQQYIKAA

SEQ ID NO: 482771 - protein, 347 aa, unidentified
MNFYNNMHPYYCGIDLHARILYVCILDQEGNTLTHKEIPANPEKLQKILEPYIGNIVVGVECMHCWYWVSDFCHEIGVDFILGHALYMKAIHGGKAKNDRIDSYKIANLIRGGNFPLAYVYPKEMRATRDLLRRRTKIVQHGADLKAHVVNTTSQYNLPPNKVNLKNISAREQLKSTFPDVSVQKNINLDMEILDCYAEQLNKVEWFIEQQAKQHKPVHLHVLKSITGVGRILSLTIIYEIGNIDRFDSVQNFSSYARLVKCKAESAGKSYGTQGNKIGNAHLKWAFSEAAVLYLRGNDKAKRYLLKLQKRMSKAKALSALAHKLGRCIYFMLKNETVFDESKFLKR

SEQ ID NO: 482772 - protein, 412 aa, unidentified
MQVVHPVCCGIDVHAKMLVACLILANGEKKKRTFSTMTAELLQLRDWLVAVQCTHVALESTGVYWKPVFNILEDALTVILINPEHAHALRGRKTDVKDAEWLADLLRHGLLQPSFIPPPVIRELRELTRYRESVIREQSSVANRIQKLLESGNLKLGQVASDALGVSGRMILKALAKGESDPRKLAALARGKLKEKSLSLEQALQGRLTVNQRFVLGELLSRWEQLEAADARVTGEIDKYVQANPKLARARELLDSIPGIGPRVAEVIMAEIGIEMASVFADAAHLASWAGMCPGNKATGGKRLSGRTRKGNTYLRSALVQAAWGASLKKHCYLSSQFHRLVKRIGRKKALVAVAHSLLVIIFHVLQNDQTYTELGGDYFDRRHVEQQRDYYVRRLQMLGLKVTLEELPQAA

SEQ ID NO: 482773 - protein, 380 aa, unidentified
MGQNSEVFVGIDTSKLRNAVAVAAAGRGGEVRYLGEIDTTDAATRKLVAKLGAKHSKLTFCYEAGPTGYGLYRLIKSLGHDCMVVVPSLIPCKPGDRIKTNRRDAENLAKLLRAGELTAVWVPDERHEAMRDLSRAREAAMDDLKRKRQQVSSLLLRLGLHYPGKTTWGKAHRNWLRSQKIAHREQRIVFEESLGAESQAQERANRLEAAIREAVPEWSLAEAVMALQALRGIDLIAAVTVLAEIGDLSRFASPRELMGYLGLVPSERSTGDSVKRGPITKAGNRRSRRILVEAAWSYRHPPRIGREKQAKVDAAPKAVAEIAWKAQTRLSARFRALGKEGKRPTIVATAIAREMCGFIWAIDRVMTSARTRTGASQEKR

SEQ ID NO: 482774 - protein, 392 aa, unidentified
MYIIGIDIGKNHHEASIVSPEGKQIGHSLRFATTHKGADSLMSFIFNNIGNSSCIFGMEATGHYWYPIYSFLKARGYTIYVINPIQSDSLRKMYIWQTKNDSIDSFLIAEVIRFGQFTTTSMADESILAMRQLCRYRDSVISSRTEIKLRISTIMEQIFPEYEKQFSSLWLSTSMGILEKYLTPENIENAPIDELFEIIKDKSHNKLTMKKAISIREAASDTFGIKIAQDAFSFQLKQLIDRMNFLDKQIEALDCQILEYYEKFDCYLHTIPGIGMIAAATILAEIGDINRFKSSSALVAFAGIDPTVRQSGEFSSTHNHMSKRGSPYLRHAIFLAATTCSFHNSPLNAYYKKKREQGKHHLTATGAVARKLTTIIYAVFRDGKPYEPKKFC

SEQ ID NO: 482775 - protein, 375 aa, unidentified
MGEHSEAFVAFDTAKLRNAVAIADAGREGEIRYLGEFENSGATTAKLVRKLAAKHRRLTFCYEAGPTGYGLYRQITSLGHECIVVAPSLIPKKPGDRVKTNRRDALSLVKLLRAGELTAVWVPDQHHEAIRDLTRARGAAVFDLRRKRQQMSAFMLRQGLHYSEKRRTWTKAHLNWLMSQKLVHAEQRLVFEETMLAMRQAQERIERLEQAIAVAVPDWSLAEVVTALMAMRGMDLVSATTFLAEIGDLSRFATPRQLMAYLGLVPSEESTGDKIVRGAITKTGNGRARRMLVECPWSYQHPPRVSRDKQPKVDAAPQLVRDIAWKAQYRLHHRYRALLRRGKLKSIAITAVARELAGFIWAVARATNNVRAVDK

SEQ ID NO: 482776 - protein, 360 aa, unidentified
MAKARSLVGLDVHATKIVAAVLDAESGQLQTFGMGGDPGAAAGFCAGLPCPVRVVYEAGPTGYGLARALIGRGMECVVAAPSKIPRAPGDRVKTDRRDAELLVRLLLAGKLHPVRVPGDEEEALRDLVRAREAVRVDLMRCRHRLSKLLLRHGIRFDDGRAWTERHSQWLAQVELPWIAAQATLLDARGAIDALTHRRDALEREILGMLADSPWAEQVGRLRCLRGIDTLSAVGLCAEIGDFERFARAEQLMSYIGVVPCESTTGQQRRLGSITKTGSAHARRLLVEAAWHYRARPNIGRGLSDRQEGQPPQAVAVAWSAQRRLHRTWTRLEARAKRRTIIAVAAARELSGFCWAITQIE

SEQ ID NO: 482777 - protein, 380 aa, unidentified
MEHLAIDLGGRKSQVCLRSSDGQILTEAKVLNEEIQTWLEGSEPRRVIVETCTEAFGIADLALSLGHDVRVVPSRLVRLLGVGARGKKTDLLDARALSEASCRLDLPSVHLPSAWSRRVKSMCGMRDVLVQSRTMMVNSARAWSRTQLTAVRRATLKTLPLRMREQAASRGEKLPDFVERLLVSIEQLTEQIKAATKELTGLAEENDVCRRLMTVPGVGAITSLRFVAAIDQVGRFSNAHQLESYLGMTPGEDSSSERRRITSITKAGPSAVRWTLVQASWAALRCAPNDPLQRRVSDLVKTIAARRRTTAPAPTSANSRLRQLVAAVPDRQASRSGMALLRIALLLTGQPLHSGARAPDLFRPPKGATSTSSALTPGCR

SEQ ID NO: 482778 - protein, 322 aa, unidentified
MSAPVLGIDIAKQRIEVALLVDGKVKNKSFKNTIEGFEALALWLKKLGISQVQACLEATGNYGEDLAIYLHEAGHLVSIVNPARIKGFAQSELIRTKTDKIDAGIIARFCLAMKPEPWIPPSPEVRLLRALVRRADSLIGMLTQEKNRLATAHESVLPLIKDHIGYLNKEIKKVRGQIADLIDQNPNLRQKKELLASIPGIGKATIAVILAELDHLEKFNHVRELVAFIGLAPKETLSGSSIKGKPRLCKVGHVRLRKALYMPALVSIQCNPVMIAFYKRLKERGKNGKVIVCAIMRKLVHIIFGILKSGKKFDPNYKPVFA

SEQ ID NO: 482779 - protein, 399 aa, unidentified
MKLPCIAIDVSKDSSHVQAFISNNKNFSEVKVIAHDDNGFNNLKALINELSLFTSKEVIVAFEDTGVYDKSLQMFLTTNEIRYAPINPLVSARARKTSLRGVKTDAKDCANIAKVYFNSDVRYKLLESEYRHRLRKLNRYYEESVSHLRKYKVNMHESLDVIWPMYSKVFKNLFTNLSLRVIEEYGHPYNLKRKHHKTIKRFILNNSNHRDTWCDKKAFELLNYANSCYPGCLEEGIDVEILANKVIDIRVCLKRVDATLDEIIDQAKLDPNFKVLVSIPGIAENLASRMIAEIGSIERFDGSKQLVAYAGLDPRVYESGKYKGRFAISKKGNKRLRCLLYLAVSCSLRIKSQPNSIRDYYKRKTQQGKLHGVALIASCNKLLRIIYSMCITGTTFEYN

SEQ ID NO: 482780 - protein, 351 aa, unidentified
MQTQSKRIDFSRQNFYCGIDTHKKSWAVTIDTDDIVLKTFSQEADPELLVKHLRKNYPGGNFIAGYEAGYFGYGIQRQLESLGINCVVLHPADIPTSDKDRDQKRDPRDSRKIVKAIKNNEVSPIWVPPVSLEQDRQLLRTREKLSRDKTRIKNRIKAFLQIYGIKYPLTFSQPGSHWSARFIKWLETIQLNEPTGTEALRSLVRCLRFQRGEILTVSRQIRKLSQNDKYEQQYLRLIKKPGIGMITAMTILTETGDINRFKTADHYRAFLGIVPRAHDSGDKEHPGKITKRANTHLRYLLVEITWTAIRYNPYYLNIYKSYRQRMKENKALVRTAGKLTNEIYYCLKKEA

SEQ ID NO: 482781 - protein, 369 aa, unidentified
MDDITFVGLDVHKATICIAVAEGTRGGEVRQLGVFENRPEILRKVVSRLSKGGRRLSFCYEAGPCGYGLHRLLSGYGHECVVVAPSLIPMKAGDRVKTDRRDALILAKLHRAGELTAIWIPDAAHEAVRDLVRARATAVRVLVKARQHLQGFLLRHERIYRGARAWTLAYRRWLSTVRFDHPAQQIVLQDYIHAVQEAETRRDRLTQQIEELLPNWSMASVVAALQSMRGVALVVAVTVVAEVGDFRRFVNPRQLMAYLGLVPSEHSSGSSVRRGGITKAGNALARRVLIEGAWTYRMSARVSRKLHDRLEGLPAAVRDIAWKAQLRLCARYRRLAATGRPKVVVTTAIAREMVGFIWAIARVAQPALV

SEQ ID NO: 482782 - protein, 343 aa, unidentified
MKDNIYDHYIAIDWSIKNMAIARMTKKSNKITAIDVPSDIEDLQVYLKNLRGTKILAIEETTTSQWLYAELKEDVDRILICDPNRNKLLNEGPKTDKIDATKLVQLLKAGLMKEVYHSTDKFLYLRRVVSGYEDLVKSGVRLKNQRYALLRACGKRGKEKIGSTIDSQGEQFVLDCLDRQIEAYKKEKQCYENEFERLARKNPEIKHQKSLPGIGTINAVKIVARVVTPHRFSDKGRYLSYTGLIKLEKTSGGRSYGKRSPRYSRQLKSVYKSGVLAAIAGNNPINDYYDYLIQENGYPEHNARHKACRRLAILSLGVFKSGRKYQPYRRNYIKNNKEDTSGL

SEQ ID NO: 482783 - protein, 343 aa, unidentified
MQMVTTVGLDIAKSVFQVHGVDAAGQVVIRRQLKRRCVLAFFQKLPACLVGIEACASSHHWSRELKALGHTVRLMPPAYVKPYVKRQKNDAADAEAICEAVTRTNMRFVATKTPEQQSGLTLHRTRHLFIRQQTAVINVIRAHLAEFGIVAPVGRKGVEALLNVVTDSSDKRVPVVARMCLASLGAQLRRLKEQILEFDRLIMAWHRSNEASKRLDAIPGVGPVLATALTASIADPKAFRSGRNFSAWIGLVPKQHSSGGRDRLGSISKQGDRYLRSLFMAGALAVIRYARIHGTKHRPWLTALLARRPTKIAAIALANKIARMVWAMMTRGERYKEPVALAA

SEQ ID NO: 482784 - protein, 325 aa, unidentified
MVHVGIDLDKHSSQIAILTEDGEVMQQRLANDVTRLEEFFRDLPPHTPVAIEASGTWWWLVDLLERLGHDPILSHPKQTKAIAAARLKNDRVDAERLALLLRGDLLPKVWIPPAALREARELVRHRIQLVWVRGVIRNRLQAMLARRNLQPTSGQSWLTQRGQRELHRLPLPTAAGRIREDCTAVLPMLDAQIRRLDAELLARWGQDPRVQRLTTIPGVGPFIAIVLILELGDITRFATAKQVASYVGLTPRVRASAGRVHAGHISKEGNRLLRWVLVLAATQAIRRPGPLRTWFHAVKKRRGKKVARVALARRLAEIVFHVWKH

SEQ ID NO: 482785 - protein, 322 aa, unidentified
MDNDILGVDISKDTFDVALLREGKFKHKKFRNTASGFKELSVWLDRLKVTSLHVCMEATGTYGEALAQYLFDANHQVSVVNPARIKGFSQGELMRTKTDKSDASLIARFCLAMKPMLWSPEPYEIRLLRDLSRRYESLLEMRQQEVNRLKVSGEELQIDIEKHIAYLDSSIAETKKRIRDHIDDNSDLKRQKELLGSIPGIGEVTINVVLSEFADISRFDSAKQLASFIGLAPRHRLSGTSVRGRASMSKIGNAKVRKSFFMPALVGMKHNPVLIEMRKRLLKAGKPKMLIVGAVMRKLIHIIYGVLKNNQPFDPEFAVKNT

SEQ ID NO: 482786 - protein, 359 aa, unidentified
MPAIADAGQARLVTGGVDTHAEVHVAGLAGQAGRVLGTREFPVSAAGYQAALAWMRGHGELVKAGVEGTGSYGAGLARYLAAEGVEVTEVIRPGRQARRRRGKSDAAGAVAAALAALNGEACGTPKSGDGAAESIRALQVARRGAVKARTQAGNQLRALIVTAPQQLRDKLAALTTAQRVTLAARLRPGGLTSPAEAAKAAMAAVARRHQVLTAEIAELDTCLEALARHAAPAGFLARAGVGTQVASILLTTAGDNPGRLRTEASFAALCGSSPVDASSGKQRRHRLNRGGDRQASAALWRIVFTRMACDPRTQACVARRTAEGKTRNEIMRCLKRYVAREIYKALVTQTRNPAAGPAA

SEQ ID NO: 482787 - protein, 318 aa, unidentified
MLPTNQHDHHFGIDMAKAKFDLIHFQTGEFRTAVTTSAGHKKTARWIASHNNSLVVIESTGRYQAGLVDALHEVGVDLAVVNPLRVKRFAESLGQLAKTDKIDAAIIAKFAQYFEPRPQAAKSNSRKTLDELTTRRRQLISMRAAEYNRREQARDAWAVESLGRILETLIVEIKAIDEEIHRLIQAEGELATRMKLLKTLPGIGPVIAAMLTIELPELGHCNRQEIAALVGVAPMNCDSGTLRGKRIIRGGRKHVRTGLYMAALSASRHHPVLKLLWQRMREAGKPAKVVLVAVMRRMIVMLNSMVRNNWTWEQLRAH

SEQ ID NO: 482788 - protein, 423 aa, unidentified
MNDNSPTLNQSIALFVGIDWADQKHDCHIIDSQGRESAMELPHTPEAINQWIAKMTEKAKGGKIAIMLEQSKGPLIHALMFRQNIVLYPINPKQLSRYRESYPGGDGKSDPTDAMYLARLLRERIETLKAWLPDDEQTRLLNRLCEQRRFIVGSQTKLRQQLISVLKQYFPVVLELFGKSHQLDLLLAVLKRWPDPRQLRRADRRLIVRVLREHGVRNEERQEEALDAIRSSPLLCDDSALITPMSMTVKHLAQQIEGSIKTIEQFDQQISESFKAHGDAHLFSSLRGAGPALAPRLLCAFGSQRDRWSDADELASFSGIAPITRQSGKQRHVQRRYACPKYLRQTFHEFAAAARTWCPWTKARYQMLRAQGMKHHAVLRKLARSWIRILYRVWQTRIPFDCGRYIETLKRRLPGIVPYLENS

SEQ ID NO: 482789 - protein, 385 aa, unidentified
MLVADRPPSPAAIRIDLGAIFVSMELSKSTWLVTSLSPGGGERMSKHSVCAGDVAGLMARFAELRAKAAARTGRDFGIIVIQEAGLDGFWIHRVLEREGIESHVVDPASIATSRRRRRAKTDKIDGEALVRALLAHKRGEPRVCAMVRVPSVEDEDRRRINRERKVLITERTRHINRIKGLLFGQGITGYEPVRRDRRERLEELRTGDGRLIAGHLRMQIDRELDRLELLMEQVKAVEAERNQLVTAQACDTPAAMLMGLKGIGAEFATILYSEGLFRHFDNRRQVAAYAGLAPTPWQSGSIRHEQGVSKAGNVRLRTTMVELAWLWLRNQPDTTLARWFHERVERNGGRLRKPMIVALARKLLVALWKYVTAGVLIEGAVMKTA

SEQ ID NO: 482790 - protein, 316 aa, unidentified
MSKIICGVDVASASLQARISREGAEGCFPNTENGIAELAAFCRQHQVELVAMEASGGYEKLPFALLWAQGLEVAILNPRAVRQFAEGMGLLEKTDRIDAGKIAWFAEVKHVAPTQPHSAEQQRLKALVVRLRQLTELQAAQRNQQLLVEDALVRKSFTRLLTVVKSQMRELEKAIADLIAADPLWAKLNQAFRSIKGVAKRTVARLMAEMPEIGTLSNKAISKLAGVAPLARDSGKHQGKRVVRGGRRGIRAILFVVSLVVRRYNPDFAAFHQRLTAAGKAKKAVRIALAHKLLVRLNAKAREVRHELATTAVSTV

SEQ ID NO: 482791 - protein, 391 aa, unidentified
MLTENDIEENCDAVVVAAKRSVAATTTATGDRSIPLRSGDAEIVGKPDRRWSFENSPNSRQSQHSVPSSYLQGRDTSMMTFESVIGIDVSKNKLDVADWPESFTSQATNDKTGHQQLIKKLPQPKSCLVVIEATGRYEKAVALALVDAGYLVSVVNPRQVRDFAKALGILAKTDRIDARVIARFGEQVRPRALAQMHEKQDELDQLVTRRRQLIASRTAEKNRTGTVTAKVVRKSLQKIVDQLSKEIRRIDSEIARLIKSDEEWKGRSELLQSAPGVGEVTATTLIAEVPELGQLNRQKISALVGVAPFNRDSGQFRGRRTIFGGRRAVRSALYMAALAARRCNPVIREFADRLEAKGKLPKVILVACMRKLLVILNSMVKTNTHWNHESV

SEQ ID NO: 482792 - protein, 413 aa, unidentified
MDVLHARCCGLDVHKSSISACILLREAGRVQKHQRRFGAMTQDLRELAEWLRQLGVTQVAMESSGVYWKPVWNILERQFTVVLANAQHIKNVPGRKTDQKDAEWIAQLLQYGLLRPSYIPCEIIRDLRDLTRMRASLSQEASRISSRIQKVLEDANIKLASVATNALGKSGRAMLEDIISGEDDPEHLASLALGHLRVKIPQLRLALEGNIRSHHRFLLRRLLDQMQFVEHEIALLEERLEDIGRQRPELLQAVARWDTIPGIDRVAAWALLAEVGDNMAQFPTAEHLASWAALCPGNHESAGKRLRGATRQGSPWLRRMACQCAWAAARTKNTYLSSQFRRLAARRGKKRAIIAVAHTLIVIGYHLQKNQSNYDDLGGNYFDRIHSDGLKRYLVKRLQQLGLKVTLQPIEAA

SEQ ID NO: 482793 - protein, 347 aa, unidentified
MNYIGVDCHISTLDFAVVSEKGTVKNKARVKTSVKGFMEFVKTVPKPRKIFIEEGTLASWLLETSMRYGETLIITDPKTNKWIGKSMAKDDEIDAEKLAHLARGGYIKAVYHPVNKKRRFKELVFAYHDTVKSQIRIKNKLKARFRTEGIPCNGSTVYSEHFRNEWRSKLPDNAIARLIADELWKQLDQLHEAKKAIKESIGIESKQYPEIKRFMKVPGIGLIHASTIYAIVDTPYRFSNKKKLWMYAGIGLAKRGSGGKVYSIKLTREYNRQLKNAIKKAVESAIFAKDNQFKRQHLRLTLKQGLPSHKAKLTVARSILATLYGMWKSGEEYDPDIDKKRKEGNKK

SEQ ID NO: 482794 - protein, 417 aa, unidentified
MEDLEFFVGIDWGSESHQVCLMDRQGSVLGERAFRHGGAGLAELANWILDATGAQPHAVGMAIEIPHGPVVETMMERGFMVHSLNPKQLDRFRDRFSPAGAKDDRRDARTLGDALRTDHHAFRHLNPAAPEIIELREWTRIANDLTGDRTRLVNRARQQLWRYYPQLLKIENDLTKTWIRELWSLAPTPDKARRIRVKTIAGLLKRHRVRRITAETVLERLREPAIAVAPGTTEAAVAHVEVVFAQLTVVGQQLARAYHEMDRLVTALSQTEASPEHQPEITAQRDVEILNSLPGVGRIVLATLLAEAHDPLLRRDYQALRCLSGVAPVTRRSGKSLIVVRRLAAHNRLQDAVHHWASVAVQHDAVSKTKYAALRSRSHGHARALRSVADRLLCVACAMLENQTMFNPDSSRHSRAA

SEQ ID NO: 482795 - protein, 358 aa, unidentified
MQAQRKELNFEGQSIFVGIDVHLKSWNVSIFTEKLHHKTFNQPPKAEVLLEYLKINFPNASYLSAYEAGFCGLWVHYKLKELGVNNIVINPADVPTTQKEKMRKSDPIDSNKLGRSLRSNELDEIYIPRPETLEDRSLVRIRSAIVKDMVRIKQRIKSMLYFYGIEYPVEFQNSNTHWSKKFLKWLKEIELRYPTGTAALGLLINEAELQRKLLLEATKKIRVLSKTEQYSKNMELITSVPGIGLITGMEFLTEIENINRFENSDKLAGLVGIVPNCSKSGEIEKDGEMTSRGHSFLRKGLIESSWIAVRVDPALSLAYYNYCKRMEPNKAIVRIARKLLNRIYSVLKHQKKYVTGIV

SEQ ID NO: 482796 - protein, 341 aa, unidentified
MLSVKHFVCCGMDVHKKFIVATIAVTDYRGVTSYIKKRFATFNSDLKALKKWLLDHNCTEVCMESTGKYWIPVFNILEDSCHVVVANPKYVRAIKGQKTDDKDSAWIADLFKFDIVPSSYIPCKEIRALRELFRYRQKLIGHRSSEKNRFQNALTVSNIALSSVLTDTFGKSATAIVDYILTCDVFDPEHCKSLLLKKAKDKADDVIKSILGYELRGDQSLKIKVCRKHFGHINECVDTLEKAISDLSKPYHKFIELATTIPGITQKSASFIIAETGVDMAVFKSSKRLCSWAGLTPQNNESAGKKKSVHISRAGVYLKPLLVQCANAAIKDKKNPYFKYK

SEQ ID NO: 482797 - protein, 423 aa, unidentified
MPYRIAGIDVHKKKLAVVVADVEVEDEYQFERRWYGSNPEQLRVLSEWLIEQQIEEVVMESTAQYWKPVWGALERYWKPRCQSREGAGRMSGTLHLAQALSNRGRRGRKKDFRDAERLVKRLVSQELVLSFVPDTEQRMWRTLTRTRYQRTRDKVRLQNQLEALLEEAHIKLSSLVSDLLGASARRMLKALAEGETDPAALAALADQRLRATPTQLQDALGACTELNPVYRRLVKMTLEGLQFVEQQIGQLDQEMASLLRQHQDAVERLAVVPGLGVDSAQQIIAEVGAKAATFPSAEKLSSWVGACPGEEESAGVNRSRHSPKGNRQMRRVLNQAANAAVKHKGSIFEIVYRRLVPRLGHNKTIGVIAHRLCHLIWIILHKGVRYEERGPAVSEKSRQRRTARMVRTLRILGYRVEPLANPT

SEQ ID NO: 482798 - protein, 320 aa, unidentified
MSQSLPQNGVSVGIDVAKNHLDVNFAPTREPLRLANARDGHTELVARLSSMEVRIIVLEATGGYERELVAELATAGLPVVVVNPRQVRDFARATGRLAKTDQIDAAVLADFGLAIQPPQRPLPDEQTLQMREKLARRRQLVEMIVAERNRLQRARAASVRRSIEAVLELLQTQLRQVDDELDQAIRQSPVWQEKVQLLQSVPGIGPQTALMLLFCLVELGLCSRQRIAALVGVAPMNNDSGQFRGRRTIRAGRAELRCCLYMATLAAIRRNPKIRRHYEKLVAAGKPKKLALVACMRKLLTILNAIVRDGKPWQTAPATT

SEQ ID NO: 482799 - protein, 342 aa, unidentified
MEHYAGIDVSLEYSSVCVVDASGKIVREGKAVSEPDALINWLKSLGYELSRIGLEAGPLSQWLFAALRKAGLAVELLETRHVRKAFEAMPVKSDRNDARGIAQLMRLGWFRPVHCKSMGAQEVRAVLTARKLVQTKLLDVENSLRGILRGFGLKVGKTTARSFAGRIQELVKGHPNLEAIGKALLSVRAVLLREFNAFEKRVRAMARSDARTKLLMSTPAVGPIVALTYASAVDDTARFKSSKQTGPHFGLTPKRYQSGETDYSGRISKIGDASVREALYQAAHVMLTKPVKGCSQLKSWAMRIARRAGMSKAKVALARKLAVILHRMLANATPFNAAAAAA

SEQ ID NO: 482800 - protein, 360 aa, unidentified
MEVTTIGIDLAKSVFAVCGADSSGRIVVRKQLRRAQMLGFFRRLKPCVIGMEACGGAHWWARQLSALGHTVKLMSPALVAPYRKGSKHDANDAAAACEAVGRGNMRFVAIKSVAQQDLLALHRLRTLLVRQSTAWSNQLRALLHERGVVVAKGSAALKRMLAQLPQDNPELSGELRTLLVTTGQWWQQAQARVAQLDAQLKRKCADDERCRRLDEITGVGPLTATATVATVGNAAEFKSGRELSAYLGLVPRQHSTGGKTVLLGISKHGNRYLRTLLIHGARSALRTCGRRDDAHSRWMHATLLRRGPNVAAVAVANKHARIMWALLASGDRYRAVVGPAPSAAAVVKRVRDQPLLILKD

SEQ ID NO: 482801 - protein, 339 aa, unidentified
MKLHCGLDLHSNNTYAGIIDQNGKRVVRTKLKNIPENIVHFLDPYKEDLASIVVESTYNWYWLVDLLMDEKYKVHLANPSAIQKYSGLKHSDDTDDAFWLAEMRRLGILPEGYIYPKAERPIRDLLRKRGHLVKLRTSLIISLQNIISRNCGVKLSANDIKVIQEDRVAPFLSDQEELFLAGAVSKDAIDFLGGKIRYIETEVRNRSRLKEPYTLLRTMPGVGTILSLTIMLETGPISRFSKVGDYVSYCRKVPSLWTSNGKKKGKGNQKNGNRYLAWAFSEASELSRRTDENARAYYNRKRQKTNLMVAHAALAHKLARAAYYIMKDQVPFMPEKLFR

SEQ ID NO: 482802 - protein, 322 aa, unidentified
MESVESSLVVFVGIDVAKATLDAWIDSTEQAGRFANDPQGIGRLIGWLRPLNVKLIVMEATGRYERRVACELLDAGLPVAVVNPRQVRDFARAMGKLAKTDRLDARVLAEFARRMGPPVMARPAEKQLLLEQRITRRRQLLVMRTMESNHLEAGADRLTATQVRKHVRLLDQQIEELDREIAQMIERDEDWRGKDRIVQSVTGVGPVTSATLLAQLPELGRCNRQQIAALAGLAPLNRDSGTFRGRRSIWGGRAVVRTALYMAALSARRHNPVLRAFADRLAAAGKAPKVILTACMRKLLVLLNALLKTSQLWDPQFALPSS

SEQ ID NO: 482803 - protein, 344 aa, unidentified
MKEVITIGVDLAKNVFQIHGVDDAGNVVIRRQLRRSRVLPFFEKQPRCLVGMEACATAHHWARQLIGFGHEVKLMPPHYVKPYVKRGKNDASDAAAICEAVTRPTMRFVSVKGTEQQSVLMLHRTRELLVRQRTMLINAIRAHMAELGIVAPVGVPQVKKLLRIIADTDDARLPALARTCLESLTRQYQSLHAEIHAAEKRIHAWHRSSEVSRRLETIPSIGPIIASALAASITDPEVFKNGRELAAWIGLVPRQNSTGGKQRLGKISKQGDQYLRWLLVAGAMSVIMHAKRRGTTNQARLADMIARKPAKVAAVALANKTARIVWALLRHGGTYQKPVAVRAA

SEQ ID NO: 482804 - protein, 408 aa, unidentified
MDILCERCCGLDVHKKTITGCIITPEGKAIATFGTMTKDLRALVEWIKEKGCTHVAMESTGVYWIPVYNLLETENLDVIVANANHIKNVPGRKTDVSDAEWIADLLRHGLLKGSFIPPREQRELRELTRYRRSLTAEHTREVNRIQKVLEGCNLKLSSVVSRITGTTASRILEALVHGEIDPEVLARFAKGRLVRKKRELMDALDGFIGPHQQQLLAIQIDHLAYLEKQITALDEEVAKRLRPFEADLAHLDTIPGVGRRNAEDILAEIGPDMDLFPSAQHLSSWAGMAPGNHQSAGKWKSGRTTKGNRYLRVTLCESAQAVGRMKPNFLSTQFHRIAARRGRKRAAIAVGHSILVICYHLLKRKTDYSELGESFYDQRKEESIVRHVLKRLQSLGYAVSLEKVGASS

SEQ ID NO: 482805 - protein, 312 aa, unidentified
MGSQIMEATILGIDISKLKLDVSVGSNGKHFIVSNDEEGLTNLVSQIKKIGEVTVVMEATSGYEKELALTFADNGIKVGIISPKKVRDFARASGILAKTDKIDSQVIALFGEKMEIRLFQDNRNKKLDELLTRRRQIASMLRDERNRLQIASTEMKRDITEHIKWLTDKQKEIETLLSEKIKENSEWNELSVLISSIPGVGPVMTFTIITELTEIGKLNQKEISALVGVAPLNKDSGKHRGNRFIWGGRAQVREILYMCTISAISYNPVIKEFYDRLRKAGKQPKVAIVACMHKLLIIMNSIVKKRQLWSCP

SEQ ID NO: 482806 - protein, 430 aa, unidentified
MKFNTQNKKIEAITEKTLVIGIDVGSETHYARTFDYRGIEYSKKPFKFSNTEAGFVTFKEWILDLKERHEKDKVVPGMEPTGHYWFNLGKFLQDNEMKPVLVNPHHVKKSKELDDNNPTKNDRKDPKVIAGLVKEGRYMIPYLPEGVYADLRTASNMRFQIQSELTRIQNRISRWVNIYFPEYKTVYGKPDAVSGMMILKQAPLPEDILTLGVEGVNQIWRDAKMRAVGKARAKTLIEAARHSVGAKEGTMAARMEIRMLLEDYESRNNHLQEVMTLIEELVKQIPMAEKLMDIKGVGIKTVSGFLAEVGDVSRFSNPKELQKLAGLALVENSSGKHKGQTTISRRGRKRLRYLLFEVAMSLVAKNPEFRELHNYYTTRRLNPLKKMQSLMAIAAKLIRVFYAMLTKGVDYDPKKMVSDIKRPAAYLQAA

SEQ ID NO: 482807 - protein, 393 aa, unidentified
MNKIIYIGIDVHSSNFTLCSFEPGYGVTEDKIFGQVQFKEDFINNTEKYISNLKKQRKDIEVVCGYEAGCLGYVPQRELAKKGIKCIILAPTTMSVQKGGKKVKNDYRDSIDIARCLANGSYRQVYIPDTEDEDVRDYIRMRDDHNIALKHIKQQLNAFCLRHGFKFEGKSKWTQKHFKWIKELTCTEKQREIINEYLATFESLNNKIDALDVRIEDFSKQERYAETVKKLTCIKGIKTHTALSFTTEVSDFNRFESAEKFASYIGLTPGEKSSGDNERKTKITKAGNRHLRRLAVEAAWTYMRGDIGIKSAELKKRQKDMPSNVITYADKASRRCQRKYYRLTKMGKESNKAITAVARELCCFIWGMATSHFDSSDAGTIKCDSELSMSSLD

SEQ ID NO: 482808 - protein, 413 aa, unidentified
MNPLYVGIDVSEDHNETFLMNSDGSKLSSFSVLNDRNGAKLLIERIISAMKSRSLSEVVIGLESTSVYGDTLVYALRESGGLGAFFRKIHVLNPKQVAKFKESYPELPKNDPVDAFVIADHLRFGRINAEVYMDDYRYKALQTLTRARFYAVQNLTREKQRFANYLFLKCCGIAQDAKLPNTSTTMLNLMEHYDTVDDIANASLDDLTNFVRDSGRGRFEDPEAFAKAVQKAARSSYRLPKTVNDSVNQVMAVSIAGMRALEAQIKQLNKAIESQFEIIPNTLISILGIGKVYSAGIIAEIGDIHRFKSQAAVAKYAGLAWSQHQSGRFEGEATHMIKSGNRYLRYYLLEAANSVRRYDSEYRNFYNRKFKEVNKFQHKRALALTARKLVRLIFKLLKENRLYTPPVGATTGQ

SEQ ID NO: 482809 - protein, 429 aa, unidentified
MDKISVIGLDLAKNVFQVHGANAQGKKVLSRRLKRTEVLEFFAALPPCRVGMEACGGAHEWARRIEALGHEVKLMAPQYVKPYVQGNKTDARDAAAICEAAAREGVPAVAIRSRDSQQMQALHRGREGWIKQRTAVANQIRGLLAEFGQVITPGMRHLRTEVSAWQDKARTELGMLCELVDELLTHLAQLDERLAKVDRQILQAHQDNAACKLIESIPGVGVMTATAVFSSFGRADMFADGRKFACALGLTPKERSSGGKQVLLGISKRGNGYVRKLLVHGARAVLRARMDKPAYADDWAVKLAQRRGHNIAVCALAAKNARRIWACCTAAKCSVPITRRQRASARNRHGWKDNQIKETEAAQPIAGAISSEWQDRSDRGGHSSPIALCIKHDKLIERPPANLIMCQQPICRLHQRPNVWLQSTPSGTT

SEQ ID NO: 482810 - protein, 355 aa, unidentified
MTSVKYIGLDVHKESISICVRNSVGKVVMESVIETKASTILQFIDGLRGDLRVTFEEGTWAAWLYDLLKPRVSGVEVCNPRKNALLKDGSKSDRIDANKLSEQLYMNNIKSVYHGEHGLRTLKELARSYLTINKDLTRVMNRVKAVYRSWAIPCAGKEVYAPRYRAEWLGKISESGVRRRAEFYYQQLDVLRLLRQEVRRDLLLEVKKHKAWKLLRQIPGIGPIRAAVLMAVMQTPHRFRTKRQLWNYCGLGLETHDSGEYRAVKGQLQRAKKQATVRGLNEDHNHDLKDIFKGAAMRASTAAGPLHDFYENLLAKGRKPTMARLTLARKIAAITLIVWKKEVRFDANYLKPQAA

SEQ ID NO: 482811 - protein, 338 aa, unidentified
MPTDQTGQTYALFVGVDIAAQTAMVATQRPGAKASRSLTIEQTPEGYTSLLHQLQATGIVPGQVLVVMEATGSYWISLATRLVHEGFAVSVINPAQAHHFAKALLKRAKTDAIDAQTLAQLAMILQPEPWTPPPQIYYALQQRLAQRDDLLNLRQQVRNQLHALVQHPEVIAEVRARMESLLATFESQLTEVESEITAALSQDSAWAAAATRLQSIKGVGWVTAAWTLVTTLNLTSCDTVDALTAYAGLAPMPRQSGSSVWHRPSIGHTGNGRLRTAFYMATLSAAQHNPVIKAFYTRLREVGKPEKVARCAAARKLLHIAWAVVTKDQPFDPHYALG

SEQ ID NO: 482812 - protein, 392 aa, unidentified
MYIVGIDIGKNHHEASIVSPEGKQIGHSLRFATTHKGADSLMSFIFNNIGNSSCIFGMEATGHYWYPIYSFLKARGYTIYVINPIQSDSLRKMYIRQTKNDSIDSFLIAEVIRFGQFTTTSMADENILAMRQLCRYRDSVISSRTEIKLRISTIMEQIFPEYEKQFSSLWLSTSMGILEKYLTPENIENAPIDELFEIIKDKSHNKLTMKKAISIREAAADTFGIKIAQDAFSFQLKQLIDRMNFLDKQIEALDIEIMKYYEQFDCYLHTIPGIGIIGAATILAEIGDISRFKNSSSLIAFAGIDPTVRQSGEFNSTHNHMSKRGSPYLRHAIFLAATTCSFHNSPLNAYYKKKRDQGKHHLTATGAVARKLTTVIYAVLRDSKPYEPKKFC

SEQ ID NO: 482813 - protein, 334 aa, unidentified
MSLDLLAIDLGKQSFHIHGIDSDGVIISRKISRAKVISAIAELAPAVIAMEACASAHYWGRRFLATGHQIRLINPRFVKPFVKGSKNDAADAEAIYEAALRPTMRFVPVKSIEQQDLQSLHRARERVVCARTALINHMRGLLAEYGVILPQGAWRFTTQVTTAIEEAELSELTREIFMDMLDQFNDLNRQLDKLDAQLVTICRTNETCRRLSKVPGVGPVIATALVAAVDDGRHFRSGRELAAWIGLVPRQYTTGGKPRLGGIGRRANHYLRRQMIHGARSVVMRLAKHDDRRSEWLKGLAARRGFNRTIVALANKTARIAWALLTRNEDYVAA

SEQ ID NO: 482814 - protein, 367 aa, unidentified
MKKVSTAVQQQSKNLCPSKLTIGLDLGDRTSWYCILDESGSVLSEQRVSTNAKALGQVFAAMPRSRVALETGTHSPWISRLLSELGHEVIVAHARKVRLIGESRKKDDRLDAQTLARLARIDPALLCPVKHRSAQAQADLTVIRARASLVRARTALVNTARSLAKSYGQRLRGCNVRNMNPEKAEALSPELQSALRPLLAAIESLSAQIREYNQRIENLAEQSYPETALLKQIRGVGTLIALTFVLTLEDPRRFRKSRDVGCYLGLQPGRRNSGQSQPQLHISKEGDPYLRTLLVQGAQHILGPFGVDCDLRRWGLKLAERGGKSGKKRAIVATARKLAVLLHHLWVSGEVYEPLHNRGRITLSAAA

SEQ ID NO: 482815 - protein, 386 aa, unidentified
MPQLNDLSRSLVTLEQDATLIAVIEMGQSSWLVAGIVPGVERQPLKKLAVDESALLKLLNRWREEAEQAGHGIKRIAVVFEAGRDGFWLARWLRARDIEAHVIHASSVAVSREHRRAKTDRLDTELLKRAFLGWLRGERDHCKMVAIPTTNDEDAKRPNRERESLVGEQSRIVNRMKATLTRLGIRGFNPKLKKAAERLDGLRTPEGEPIPPNTLAELRRDMVRRRLVSDQIRQIEDARLERLEHAPGDGPHAMVRLLARVIGVGIETADMLVQEVLSRNMRDRRAVARYAGLTGSPDESGRKRREKGLARSGNARVRRGMIQLAWRFLMFQKDSALAQWFRSRTENVRGTRKTMIVALARKLLISLWRLVRDGVLPDGVILRPAH

SEQ ID NO: 482816 - protein, 403 aa, unidentified
MKHVIAFDISMGKSYMVVYNALKKCQLEKEIAHNRPGFMDLKKLIDELIEGYDEQPHIVFESTGVYSRTLERFMQENNYSYCLLNPLEAKLQCDSLRIHKTDRSDAHRLALTHFTHERRIETDSNDVYRQLKRLSRHYSELDDELSVTRSRLHKVVQETFPELENIFTTKSELFLNVVQLYPHPDLVLNHSKTIIKNRILANTNKRMAVNKAEEKAVELIEAAKQSYPAASSTDVVCDQVRIYAKRFQELLLQKEQCISKMESIAERLEEYSIIRSIPAIGANSAVRIIAEIGNIQRFDNNRQLNAYTGIDIRRYQSGKFIAKDKINKRGNKHLRKIMYLTVQNMIRQRRFGGNHIVEYYDKLKTQPYNKCHKVASVACVNKLLKTIFFLVTHNQNYDYRLAP

SEQ ID NO: 482817 - protein, 396 aa, unidentified
MEVVAESVAGIDVHQKEITVTVLIGSAESAKPKKVHARFQTVTFDLKACGAWLKQQAVKQVLMESTGQYWRPVWQILEPFGFNMILCNPRIIKNIPGKKTDQKDSEWLSELARYGLVSASYVPPRQIQELRESTRLSKSITQQMTRLKNQVHDILQRSNIKLTTYVSDIFSGSGRRILALLENGEVINLASIEQAGTGKRGYRLKATPKQILASLDGALSYNDRFLMAMNMNLLASYQRELINLESRIYEQLEAFSELYHRLQAIPGVGEGTAQIIIAEIGSDVSPFPDAHHLASWAGLCPGSYESAGKKHGAHTLHGNKYLKTAMITAAMAAKSTKQTGLRDFYWRLCSRMGKQKANVALAHKLLRIIYVMIQTGATYQEYKKSQRTEDTLTPKI

SEQ ID NO: 482818 - protein, 333 aa, unidentified
MNEQSVGIDVSKSKLDVCVLKGEKLKTKVFRNTRAGHVELSEWLRQRELLADTPIVLEATGPYSESVAIALTDAGWAVSVVNPARVVGFAQSELARNKTDKADARLIAKFGQRADLDIWVAPSPATRQLRALIDRLQALIDMRQQEKNRLEALDHGTPTTVRSMVDEHIEWLNNQIKKVQSEIDDHIDGNPELRLDAELIESIPGIGRRAAAQFLAYIGDVRRFHNAKALAAFIGVTPRQKQSGSSINGRSCLSRAGHASARKSLFMPGMVAKRYNPVVIAMAKRLEARGLTAKAIVGASMRKLVHLIYGVVKSGQPFDARIALSKLEFQEGI

SEQ ID NO: 482819 - protein, 424 aa, unidentified
MNNTQNKKIAQVTDKTLVVGVDVGGDKHFARAILARGFEVSKKPFEFANTRDGFEKFVNWSYHLATENRLTKIFVALEPTGHYWFNLADYLKAYDVKLVLVAPQHVKHSKEMDDNTQMKNDRKDPLVIAKLVTEGRYMFPYIPEDVYAELRAAFNRRCDLVEALTRNTNRMIRWFDIYFPEYREVYGKANAISGLMILMRAPLPSDILALGVDGICQIWREAKVRAAGINRAKKLVSAAERSIGRKGCEAVRQELWQLMEEHDLLSRQLSDMMQIITDLLGQIPGADKLLNVPGAGVVTVSGFLSEVGDISRFTDPKQIQKLAGLAVVENSSGKRKGLPGISRRGRKRLRWVLFQLARIVVKSNKEMKAYHQHYTTRKNNPLKKMQSLMAIAGKITRIFFGILKNGTEYNPAIVMKDLNKAVAA

SEQ ID NO: 482820 - protein, 390 aa, unidentified
MDVLYQSCAGIDVHQANIVVCILHGPLTSTRPKRKMATFDTTTKGLRACHDFLSQFHVEVVGMESTGVYWRPVWHALCDDFELILTQPAHMKAIPGQKTDKKDAHWIAKLTRIGLLPRSFVPDETIQELRELTRQRKHYVESRNRETNRIHKILQSGGIKLTTYIEDIMGLSGRNLLQLLVDGTPITPRIVHQSVYTSLKKKVPQLLEALDGYFSDHHRFMLKQSLEIYDFYQKQIELLEERITVYLSQYENHVEILDSIPGIDVITASVIISEVGVDMSQFPTSGHLASWAGLCPGNNESAGKKRSTKIRHGNSYLKKCLCQAAFAIKRQKGSPLAERFYQIQSRRGSQKATIALAHQLLKIAYILLKEQITYPEFLAQKKTTRDELVA

SEQ ID NO: 482821 - protein, 373 aa, unidentified
MTLSNILFVGMDVHKESIEIAMADAGSNTEVRRYGKIGGTQDALRKALRKLVSSGKTLHFCYEAGPCGYEIYRYLVSQGHLCIVVAPSLIPKQPGNKVKTDKRDAAQLARLFRAGELTPVYVPSREDEAIRDLSRAREDTMLNLKAARQRLKSFLLRHDIRYVGKTSWKEKHLRWLADEVRLPNPAQQIVFQEYVSAVTEAKQRLDRLVNEFEYFVPLWRLYPAVQALMAMRGVKMIVAVTVIAELGDLSRFSHPSQLMSFLGLTPCEYSSGERKRRGGITKTGNQHARRILIEAAWAYRYLPKVSPEIQARQEKLPVPIRDIAWKAQLRLTKRYKSMQFRGKPKNVTIVAIARELAGFMWAIGREVNLPNEQ

SEQ ID NO: 482822 - protein, 398 aa, unidentified
MGKVFVGIDVSKEHSTAQGIDSTEKKLFYLKFSMDSDGFAELNKAMKRCSENPDDISVAMESTGCYHINLFSYLCAEGIRCVVVNPLLISKYAQRSLRKTKTDKKDALTIAQFLLHNEKTLCAVTASEDAQDLKDLARERESLTWTISAMKIDLKRLLQTTFPELETFRTNLYSETMLNFLKQYPSARLIREAKKKDIDKVLNRSEDKRRRIHITVDELMAAAKRSVGSAGIAKEFIVSEKATTILYLEEKCGKITEALIDACRAMRVEELEIIKSIDGVNNITGSTFLAELGDPSDFKSYKSVIAFAGLDPSTRQSGQYEGPSRISKRGNRHLRRVIHLMTLCAVRSQNAFREYFLRRKAEGLPPMKALMATSHKLIRVIFAMLKNRMPFKKEVIDV

SEQ ID NO: 482823 - protein, 397 aa, unidentified
MKADSLHYKAVRIGSNGAPRMQKPSTIDIDPVIYLAIELSASTWLVVSKIPTSEKTGLHRMEAGNSQALIALIADLRKKVSAKLGVESAVMSCFEAGRDGFWLHRLLSEHGVINHVVEPTSILVNRRARRAKTDRLDAQGLLRILTAHAKGDHDVCSVVHVPTIEEEDAKRQHREREHLVQERVRIENRIAALLTTQGVRKRPSLRSWQKDMEEMRTGDGHPIPPLLRAEVNRLRRRLVMTLEMIREVEAEREQALQKQDDTASRTIQALRQLRGIGDNFAAVLTREVFYRSFENRRQIASYLGLTPTPFQSGGMDRDRRISRAGNARARKTLIQLAWLWLRYQPDSSLACWFRERVGNLQGRTRRIAIVAMARKLLIAIWRYATDGIVPEGAQISI

SEQ ID NO: 482824 - protein, 365 aa, unidentified
MKKVSRGTGRMEQPEITMGLDLGDRFSHYCMLNEDGDAIESGRIQSTEVALRRHFEGEPTMRFALECGTHSPWISRLLEQLGHQVIVANTRKIRAITASESKNDKNDAEKLARFAFCDPRLLSPIRHRSPARQQDLNLIQARATLVRARTMIVNALRGLVKSAGGRLPACSPQGFQERVEASIPPALAEAARPLLNQIVALNAGIQQMDRGIEQLGNRYPEIPVLRTVPGIGPLIAAAYVLTLDRPDAVQHSRQAGAFLGLRPRQSQSGDSDPQHRISKTGNVYLRSLLVQAAHYVLGRFGPDSALRRWGMKLAASGGKRGKKRAVVAVARKLAVILHRIWRTGNGWQAFPQSQNNTASKSACMA

SEQ ID NO: 482825 - protein, 351 aa, unidentified
MNIKHYIGFDVHKKSISYCVKTADGQIVEEGKLRATHQVLREWAQKRTEPWHGAMEATLFSGWIYDALKPFAAELQMGNPSMMKAIGAAKKKSDQLDARKIADLVRCNLLPVCYVASAEMRDLRRLLRYRNLVVGQAVQMKNRMSGMLMEVGAEYSKQRLHGKQYFSELLDQLEEVPASVKDLLRLSRSALDVFETTQRQLLDRLQKEPLLVKRVKLLRSIAGVGEVTALTWALEVCDPRRFPSIGDAVSYCGLCSALVSSADKAKRGPISKQRNAHLQTVLIEASKLAPRWNKQLAEVYDRELKRGDRNQATLAVARKLVAYLLAVDKSGKRFEVRTLPPAAPEEVAKVA

SEQ ID NO: 482826 - protein, 379 aa, unidentified
MEGKYSIGIDISKGDFKACFVLISNDQSIKIKGSRTFPNTLKGFESFKEWYTKYQKEIIPTVFVLEATGSYHEQLAWFLYEYKQELSIVLPNRAKAFMISLGIKSKNDKVDAKGLATMGAVQKLTPWKPISKQLYNLRQITRHLEDLQIIRTSLLNQREQTVYAMYVLKTVFKSINSTLKTIDKQIANCKKQIKLIIEKDEELNKKAAFITSIKGVSTITAAIVIGETNGFALITNVKQLVSYAGYDVKENQSGNRVGKTRITKKGNAHIRRAMHLPAFTSVKYLNSFKNLYERVFKRSELKMKGYVAVQSKLLRMMYTLWKNETMFDPNYQTSGIQESKLLCSVAARSGAEKTAPIAIGAALDELPCNQSPEALCSVA

SEQ ID NO: 482827 - protein, 342 aa, unidentified
MDAKRYIGIDLHRNCFTACMRLENGREYLKEWKLEDMAKFTAKLRSCDEVAVEVTGNTRLFHDAVAPHVGRVVAVNPSQFKVITHSVKKTDSNDARSLALYLAKDLLPEVRMKDKTQAQIASLTQTRDTMVKLRTALKNKVNNLCSAHGVNLNKESLGTEKGLRAVLAMRFDPLVNLELKIIIDQIRSLNQSIAELEETIGKEGQKLEGHKNLTSIKGIGGLSAGILLSIIGDIGDFPDEGKLAAYFGIVPRISNSNETEHSGRITKRGTKLGRTTLVQCALIAQRYSPYLKSYYEKKKSRGTGKAIIALARKFLGIIYRTLKNKWLFEDFPNFVLAEAATA

SEQ ID NO: 482828 - protein, 331 aa, unidentified
MALNAIGAYLGTITIPVSRDGYQRLEAWARAFGPVRAFGIEGTGSYGAGLARNLQTGGYRILEVNRPDRSARRRKGKDDTIDAEAAARAVLSGQATAQPKSGNSSVEMMRHLKVARDAAVKAKTQAMLTLKSIIISAPEELREQLEGFRGKVTLARHLAALQPGPITSTTASAKAALAATARRWLALRHEIEEHDRALETLVSTSAPDLITAPGIATATAAEMLLLVGDNPERIRSEGALAKLCGACPIPASSGRTSRHRLNRGGNRQANAALHRIVVTRMRLHQPTKDYVVRRTKDGKTTKEIMRCLKRYVAREIFGVLCKPSQAASIPA

SEQ ID NO: 482829 - protein, 419 aa, unidentified
MSQESNLVERVIGFDSHPDSFTAAVLRGPTPAQAITEKIFNKVPMSQLQSWARRQTTDQDLFVLEASGNSFEVVRALQRLGRKAEVLESCQMGKLKEAHANNDKISAVRIAKAYLAGTAKKVWVPDAATQERRDWFHAHRKAVKRSTQMRNRLLSYLSDNGVRLIKGTELTGQAKAEKQLRQAKDWTSRQWQVIAGMLMELRHADQQRRHWRSLIAQEVISDPLLLSLVRLCGIRDLVAFALGAIIGDINRFAQPRKLVKYVGLNPALDQSGQGQWEGGIGGHGRKDLRALLIESAQAILRSKDPVAKWGKKLLARKGSVSLAVAAMARKLTVAIWYLMMGRWTALEEFDPRLSRKAGKIISAVGTSALKTIGKTRKQLRQQIEQSLKTGRIYVLDLDKKFVPQKASQKQSLAADYGMV

SEQ ID NO: 482830 - protein, 322 aa, unidentified
MTRIICGVDIASSSLAARVGQDGAEATFQNSTEGIAGLAAFCHNHDVELVAMEATGGYEQRAFAQLSESGLAVTIVNPRAVRQFAQSMGRLEKTDSIDAGMIAWYAETKKSQPLCLAPQTQLELRARVTRLRQLTELRTTQLNQQRLVTNRAVQAGFRKMLAFVAKQIQELEKSIAALIDADPLWRELDQAFRTIKGVADRTVARIMAEMPEIGTLSNKTISKLAGVAPLAQDSGKHQGKRAVRGGRAAVREILFIVASVVGRHEPDFVAFQKRLRDAGKPPKVIRIALAHKLLVRLNAKAREVRQRLAILDPTASPLLAAY

SEQ ID NO: 482831 - protein, 348 aa, unidentified
MTHDIILSVDYHDQICVIRRLCRASGREEVASVPTEPQALRQFVAEAQRLAGSGGRVVWVQESTTGWARVQALLGDQVDFRLANVLQMPRPPKAHRRKTDKVDTARMQREYLAGSLPWAHQPPAAWRQLRRLVAFREGLVSRRTAVRNWVNRYLAHETWADRAGLWSAKGRRRLQALLGALPRTDTWLVQAKLAELDRLQGQLQEGEAELLAAYHACPAAQRLDAIRGVGVVAAVSIVARVGPVERFRNAEHLIAFAGLAPGVQQSNQTRREGRIGGGGTDCHLRHYLIEASVWARHLPRYRPAYERVARRRGQKIGRLVVARMLLRSMYKVLKDGVAFTQGGAAALG

SEQ ID NO: 482832 - protein, 452 aa, unidentified
MAKQSHRRCDQLPVLHPDAAGIDVGASELFVAVAADRDAQPVRRFPTFTRDLHALADWLQQCGVRSIAMESTSVYWIPIYQILEARGLDVCLVNAQHVKNVPGRKTDVSDCQWLQYLHSVGLLRASFRPPGVICAVRALWRHRGSLVQMAAEHIMHIQKALDQMNPQIHRVLTEITGLSGLRILDSILAGERDPLTLARLCHKRVKSSESTVAKSLEGDYRPEHIFALRQSLAAYRYYQQLVLETDQEIQRQMAELEDADRALAKIPKRTKRLPYQRQGHEPRVFDLRRELYRIFGVDLTNVPGISSMTAQTILCEVGTDVSRFRNASAFASWLGLCPEKKISGGKVLFTKSRRVRSRVAIALRLAARSLHHAKDYMGEFFRRICRKLGKPQAITATAHKLSRIVFHLLSTGESYNESVFQKCEEEALKRAEMRLRKQAAHLGFRIIPAEAE

SEQ ID NO: 482833 - protein, 407 aa, unidentified
MGITCGIDWSESHHDVALIDEHGTVVARTRIDTGAIGFHILLALIAEHGGSVDDTPIALETDKNLLVVALAKAGFTVYPINPRAVAHYRERYGQAGGKSDPGDAAVLAHILRTDRHLHRPLPAVSEEGRAVKALARQHQEAIWALHQTVSRLRSVLLEFYPQALQAFPNLKHKAALTVLAAAPTPAAGQRLTRGRVVALLRRSGRGNHPALVEQILTDLHTPALGQPPRVEEAYGHTVRGLVAIVIAMGQAVDDLETELAREFDQHPQAAILRSVPGLGPVLAARVLGEIGDDPARFDNPQGLRAYAGTAPVTIASGRLRYVKARKVRNKRFGDACHWWAYTMLTKSAGARAHYDRRRAAGDHHNAALRNLANKLLGRLWWCLVNNQPWDEHGAWPDHGHTENPTAA

SEQ ID NO: 482834 - protein, 361 aa, unidentified
MKKPSQHLIAEVPRSSSRVGMTIGIDLGDVWSHYCTLNEEGEVVDRGRFRTTPSGVEKWFTDVPRARVAMETGTHSIWVSEQLGEMGHEVIVANVRELRAISHSNRKSDTVDAEKIARYARVDPEILHPICHRTVAQQEALTLIRARNLIVRLRTAAVNSVRGLAKPCGYRLPASSTLCFAKRCMAVLPPGLAQALGPVLEQIAAMTVRIQQYDRTIQRLTETEYPETGALLQVYGVGQLTALTYVLTLGSKERFKRSRDVGCYLGLRPKRSQSGDRDPQLGITKAGNIYLRSLLVECANHVLGPRGRDSTLRQWGLHLASRGGKQSHNRAIVAVARKLAVLLHRIWVTQEPYIPFYAVAA

SEQ ID NO: 482835 - protein, 409 aa, unidentified
MDVIVERQGALDVHKEQVTACVRVPDEGGERISHVAEFKTTVRGLLVLRDWLKAHRVTQVTMEATGVYWKPVWHVLEDEFELVLVNARHVKQVPGRKTDVSDAVWLCQLAEAGLLRASFVPPKPIRALLQLTRYRKAQVSERQREANRLHKALEDTGLKLDCVATDILGRSGRAMLDALIGGTTDPEILADLARGRMRAKIPALREALEGRFEPLHALLIGAILAHIDFLEEQIQRISDAIEEQLAPFAPAIELLCTSPGIQRRTAENIVAEIGLDMGVFPTAGHLASWAGQCPGNDQSAGKRRSGRTRKGSKWLDAALKDAALAAIRTDGSYLQALYRRKKPQLGHGRAIGAVKHSIICACWHMLTTGEIYNDLGGDYFSRRDPERQIRRLVAQLERLGQNVTLQTAA

SEQ ID NO: 482836 - protein, 419 aa, unidentified
MFKIFRKNCCGLDVHKTWIYACIGITDTNGRTDYKEARFSSFSRGLHELSDWLAKFSCTEVCMESSGKYWIPVFNVLEKTCWVTLAHPKYTKPQKGNKTDRKDAKWICDLFMCDMIKPSFIPPPDIRHLRDLMRYRFKLTNMLSGEKNRAQNCLTVSNLKLDDVFSDVFGKSARSITGYILEHPGEQFDVAPFVDGRCKHPLEEIQAAVDGSISHEQATKLREILKHTDEIQAHKQSIETEILRLAAPYQALLNIIHTAPGFSSAPMTAIAIISEIGVDMSVFPTAKHLCSWAGCCPRNDSSGDKCKSTRISRAGVYLKPLLVQVANAVVKSDKYPEFKERYRRLKARRGHKKAIIAICRMLLTAIWNMLAKLEPYTNKGYLVEHNTPERRTLTTSQALNLLKSRGFIIKDELEDSLTA

SEQ ID NO: 482837 - protein, 344 aa, unidentified
MNQIIRIGMDTSKHFFQLHGVDAAERSVLCRKLRRNQVLAFFAKLAPTVIGMEACGAAHYWARELRQLGHEVKLMAPQHVKAYVKRNKNDGRDAEGLCEAMSRPTMQFVPVKTEEQQATLMLAGVRQQLIARRTQLSNAIRGYAAEFGLTAAKGLDKIEPLLAQIAQDQTVPEMARELFAFQGRDYARLQIDLKAIEVRLMAWHRANADSRRLAQIPGIGPIGATALVMKAPDPRLFPSGRHFAAWIGLTPKDHSTAGKTRLGKITRAGDEMLRSVLVAGATAVIQQAKHGRGRPSPWLIALLKRKPPKLAAVALANKIARIAWKLMVTGESYDGARMPAAFAA

SEQ ID NO: 482838 - protein, 466 aa, unidentified
MVVARKQKRMSAQVVEDEDYQLRYEIAAGIDVAKESAVVCVRMPPAAGRKHRTSHLQTVPATVPAITELAAELLTAGVQMVSMEATSDYWRIWFVVLEEAGLAVQLVSSSQARNLPGRPKTDKEDARWIARLTEMGMLRSSFVPPPEIRALRVYTRHVWDLTADRTRYWQRLEKLLEDALCKLTSVVSRLAGHQTARAVIEAMVAGERDPRVLAALGQGKMRNEKLPALAKALSGMRFGPEHAHAAASLLRAIDLLDAELRDLQERVAAHLAAIPGSWGVDCDGVTGPGAGRTADAAALPAAERLDEIPGLGRESAMALIAEIGLDMSRFPTPEALVSWAGLTPTARQSGPRSGRGKKGHGNTYAKRIAVLAAYAAANTDTFLGERFRRLSSRPGGGGRKKAGCAVGRSILIIVWHLLNDPAARYRDLGSDWHARHTDRSRKARNARRQLEALGYDVVITLREDAA

SEQ ID NO: 482839 - protein, 488 aa, unidentified
MEATYRRCCGIDVHKKSVMVCVLPPAGERKGEPRKRKFRTYTRDLKQLRAWLKNCKVTEIAMESTGQYWRPIWNLLEGHFEKLLLVNPQHIKGLNGYKTDPKDARWIADLLESDKLKGSWVPPRDIRELRDLTRQRVHVMEDQNRVKNRIEQLCQTGNIKVSSVASDLFGVSGRRMLKAIVEGKRDPGWMADYARGTLRGKKQELELALNGSFTDSQRWLLDKQLQHLEWLEKQVQGLEQEIERRVACQEEPMRRLMTIPGIDRKTAWTLVAELGVDMSVFADAQHLASWAGLCPANRESGGKRMSGRTRKANSYVRRAMCQSAWAASHTKRTWLHSFFRRIQVRKGAPKAVMALAHHMLIVAYNVLKRNEEYVELGGDYHDQRNKPKLVSRLVERLTRLGYHVDLKPVESHSSEQPNPVADLVPDLPSEQPQEMAAIANDTPAVAESTAPRKPKRGRPCKCIERGIICKHGSSIKVNSLKEQAHNGS

SEQ ID NO: 482840 - protein, 366 aa, unidentified
MKKTSTVQALQSENLKEQKLTIGVDLGDRWSFYCVLDEGGKIILEQKVQTTPEAMKQTFGKIPRSLIALETGTHSPWVSRLLTELGHEVIVAHAQKVQLITKSNRKDDRHDARTLARLARIDPELLGPVRHRSVQAQIHLTVIRARAELVSARTALVNAARGLVKSYGQRLPKCGTQQVNRELAAELSTELRDVLEPLLREVESLNERIKEYDERMEEIAKEVHPEVSLLKQVKGVGTQIALTYVLTIEDPRRFLKSREVGCFLGLRPGRRNSGESEPQKKISKEGDRYLRTMMVQGAHYILGPFGEDSDLRRWGLKLAARGGKNAKKRAVVAVARKLAVLLHRLWVGGEVYEPLRNSQKAMREVA

SEQ ID NO: 482841 - protein, 428 aa, unidentified
MNDIARFKLFCQLRRQIRGSDDHLIVGIDIAKDKHHAFFGTARGRSLWRRLIFTNDRIGLRRLVEQGDTLKAQHDLGKVVFGLEPTGNYHKPLIHWLTGKCYLVVLVAGKAVKDNRELLDGRWDKNDTKDSANVADLIGQGKCLFYENPDADILALRNLLSIRRHLKKETHRLRMRIRNGLLAKYFPEMDRHWGSCVAENLAIVRWYLDPRKIAATGFEVFVRHVTTTDRGVRQLRRLRKIHDAAACSIGVPVDAAAEHEAKILVERFKTVEAELAAVMEQIESICRGMPSYRLLLTIPGFGPYITPLVLSALANPNRFHSRKQVIRLAGLDLNASRSGKKSQQQVPVISKKGDAELRYGLYQAALIASYHNDAFRRVYNRMLEGRQGERGIKTKARVKIAAKMLVIAWTMLKNHMPFDPKHLLAEPV

SEQ ID NO: 482842 - protein, 411 aa, unidentified
MVTSAVPPIRFMGLDMHKHYVMVGAVNKAQEVLLRPRKFSWPEFDHWCRQHIGPGDAVVIEASGNAWHVYDQLTAQGATACVANPLLVKWIGAAPVKTDPHDTLKLAKLLAADMLPTVWVPPAHVRALRTLIGQRQRWIKQRTQARNRLQGLLQDHNLLPPEGDLFAPEQRAWWLALDLSAVERFLIAQDLLALDQLGPLVDQVEAAIQMQSTCEPWVVAVPWLLQQTGVGLLTAMTLLAAIGDIERFEHAQQLVGYAGLGARVHASGETFNTGGITKQGRRELRAAMVEAAWTAVRYNLHWKTKFARYEHRLGSSKAIVAIARQMLVSIWYLWHNHTVDRHTDALATAHKLWTWAENGGKAMRHGLSCSHFVRYHLDKLGIGQELTELRYGSHVYRLPAAGSVLSLPAAA

SEQ ID NO: 482843 - protein, 478 aa, unidentified
MEPKKYRRCCGIDVHKKSVTVCILAPEGKRDVGIRKRNFRTFTRDLKQLRTWLKNCKVTEIAMESTGQYWRPLWNLLEGQFEKLLLVNPQHIKGLAGRKTDPKDAQWIAGLLETGRLNGSWVPPRDIRELRDLTRQRVHLMEDLNRVKNRIGQLCETGNIKLSSVTTDLLGVSGRRMLQAIVEGKHDPGWMADYAKSRLRSKKKELELALDGSFTPRQRWLLDKELHHLEWLERQIEQMEQEIERQVAVYEEPMRRVMTIPGIDQKTAWMIVAELGVEMSVFGDAKHLASWAGLCPGNRESGGKRMSGKVRKSNPYVKRGMCQAAWGATHTKNTYLSAFYRRMQIRKGPQKALIALAHHMITIVFNVLSRGEEYVELGGDYFDRRNKPKVVSRLVTRLTKLGYYVSLQPIEADSPQDDAAVPTSIASTQLPTMSGVDETRRKRGRPCKCIERGIICKHGRAQDPNLNKAQGLPVAEFS

SEQ ID NO: 482844 - protein, 341 aa, unidentified
MKNKSFIGIDISKNVIDVSIFCEETPIKDFSHDVFNNSRKGFGEMCTWLKKNHVVLSNCLFGMEFTGSYSMELEKFLNARNYQFCMLSTHVVKHHPMGPKDKSDKIDSAKIADFLYRYDGTECVKPYKMPDKTMLRLKALTNERKFLVEQRTCFMNRRQLCTTKEDAQLYDGYIKKFSRDIENIELEEQKLLATDDSLLATYKNLLTIPGIGFVNAINVIVITRNFTAFETARQYASYVGVAPHSHTSGTSVKWRPRPSARCDGQAKADLSMAATVAVQYDAELQSFYNRKLGGKQDSDTKRKALNAVKFKLVLRMFAIGKQNRKWEPLDSKSSNEKLAIS

SEQ ID NO: 482845 - protein, 406 aa, unidentified
MLETMVRCCAGLDVHRRQVVSTVIREGSKEAREYSTFHRELQELAHWLQREQVELAVMESTGIYWKAIYAALEDAGIETRVVNARHVKQVPGRKTDVQDSEWLAELARCGLLRSSFIPPRDLRELRLLTRYRRKLTGMLSAEKNRLHKVLDDAGIRLGCVVSDIDGISARAMVEALIRGGSTPEQMAEKALGRLQKKREALQLALEGDISDRHRLVLKKILLHVKWLQRQIVTIDGQIVAAMKPYQEEWKLLQTIPGFDILSAAMLLAEIGVDMGRFAGRDRLCSWAGMCPGNQESAGKRKSGRTRKGNAYVRSLLCEAANSARKTQSQFQGLYKGLVIRRGHKRAIVAVGHKILQVVYVLLSRKEPYRDPEIDYEALVVHRNAPRWLDALHKYGYLESIKGSVER

SEQ ID NO: 482846 - protein, 317 aa, unidentified
MENNAIKFKMIGVDVAKLKLDIAFDDKHIITIDNQKDSFKQLLKLIADATQVCFVMEATGGYEKPLSNFLLAQGIAVCIVNAKRVRDYAKAIGRHAKNDRIDAQVIRLYAEMAQPKQLEQRSTGAHQLEAQMKRRDQLIKQRTMEKQHLEAANDADSIRSIKKFIKAFDKEIERIEVNIKKLIETDKALQDLRKQLTQVDGIGEVTISILMAQLPELGQLSNKQISALVGVAPFCKDSGTMKGRRVVWGGRASIRSVLYMATLSAIRYNKPIRTFYQRLVANGKLKKVALVACMRKLLVILNAMVKKGSEWDPDYVN

SEQ ID NO: 482847 - protein, 347 aa, unidentified
MNFYTKQHQFYCGIDLHAKSMYLCIINQEGGIVLQRDIRTNAEVFLKTIQRYREDIVVAVECIFTWYWIADLCAQENIPFVLGHALYMKAIHGGKAKNDKIDAHKIAVLLRGGMIPQAYVYPHEMRSTRDLLRRRIHLTQKRAELLAHVQNTNYQYNLPDIGKKISYKANREGVAERFPDQSVRKSIELDLKLLDYYDQLLPHLEHEISLIAKIHDPDSYFRIRSVPGIGRILGLVILYEIHDIHRFPTVQDFVSYCRLVKSAKESAGKRLGSSGKKIGNVHLKWAFSEAAVLFLRRNPEARKYREKLQKKHGKAKSMTILAHKLARATYYILKRKEVFHLNTFFKR

SEQ ID NO: 482848 - protein, 367 aa, unidentified
MKKVSTAATKQRRNISQQTLPIGLDLGDRNSWYCVLDETGQIQLEQRVRTTAKALQEVFGAMPRSRIAWEIGTHSPWISRLLSELGHEVIVANARKVRLIGESCKKDDRLDAQTLARLARIDPQLLYPVKHRSAQAQADLMMIRARAALVRARTGLVNAARGLAKSYGERLRSCNVRNMDPEQAEGLSPELQRALEPLLATIAELSERICDYNDRIEALAEASYPQVKVLKQIKGVGTLIALTFLLTLEDPHRFGKSRDVGGYLGLHPGRRQSGQRDPQLHISKEGDPYLRTLLVQGAQHILGPFGIDCDLRRWGLKLAERGGRNGKKRAIVATARKLAVLLHHLWVSGEVYEPLHNSSRMTLAAAA

SEQ ID NO: 482849 - protein, 481 aa, unidentified
MGEKKSAPRGKSGHGGKRRGRGVQKALQVVNPDAAGIDIGAESHYVSVPEDRSEEPVRQFGCYTPQLEEMAGWLIECGIKTVVMEATGVYWIPVFRVLESRGLEVLLVNPKHVKHVPGRKSDVADCQWLRQLHTFGLLRGAFVPPQDVAAMRTYWRQRRTLVEAASREILHMQKALTQMNLHLHVVLSDVTGVSGMKILRAIVAGEHDPVQLAGLAGTQVRASREEIAQALSGHYTGEHLFVLGQALELFDVFQAKIRDCDGQLAMHLSRFEGKAGAGAPPSNPKRSRRVSRRKNEPYFDLRAELWRLTGVDFNRIDGIDSLTAFTVLSETGFDVSAFATEHHYASWMGLCPNNSITGGRVKRRHTRRVINRAADALRIAAQSLWRSKSYLGAYYRRLAARMGAPKAITATAHKLACIMYRAVKYGQQYVDKGEQYLEEQHRKRNLKSLVHRAKDLGYMLVHSETGECLPLTNQPLTRCVS

SEQ ID NO: 482850 - protein, 418 aa, unidentified
MFKIFRKNCCGLDVHKTWIYACIGITDANSRTEYFQARFSSFSKGLQELSHWLDKYNCKQVCMESAGKFWIPVFNILEKTCLVTLAHPKYTKPQKGNKTDRKDAKWICDLFMCDMIKPSFIPPPAIRHLRDLVRYRRKLTNMLTGEKNRAQNCLTVSNLKLDDVFADVFGKSARSITEYILAHPGEPFDVAQFVDRRCKSPLSEIQAAVDGAVSPEQAVKLRQCLDHIDQLRLLRQRLEQEILRICEPFADILQLLRTVPGLGNDPMTAIAVLSETGGDMSVFPTAKNLCSWAGCCPRNDQSGAKVKSSRISRAGSYLKPLLVQVANALIHSRKHPEFAERYRRIKARRGHKKAIIAVCKMLLTAIWNILSKLVPYSPAGFLSTSHDLPPSKSLTVAQGLSLLRRRGFILTDDPLSAP

SEQ ID NO: 482851 - protein, 343 aa, unidentified
MKITINWRFIVGIDISKLILDIYLFDRQSGDGNSFQVPNTREGFRQLAEWMEDHKVTKSQTILISEHTGRYGEQLLRWTTNNNWPHAVVKTTALEKVSFEHHRKTDALDASQLAEYGVRFSDRLRLAEAPKPTAGQLKRLQAERRKMVDRRAALKSKLGEADFHDADMSQLTKMWNQQVHLLTQHIEQLEYTMDELIRQDPTLCKRHQTMRTAPGIGPVIGRFWLCLFAGKDQLNPRKISSRFGFAPHGRSSGSSVKSPDRSTGYGNSEMRRLMHQAARSVANHKPHYHDYYEQKIDEGKHELVAINNIINKLIRLYCAMWNNQAEYDPRHIQKMNKKYKKSA

SEQ ID NO: 482852 - protein, 346 aa, unidentified
MTIVESTRPVTGGVDTHADIHVAAAVDANGGVLGVESFATTPAGYRELCSWLETFGAPARVGIEGTGAYGAGLARHLRGQGLVVIEVDRPNRQERRRNGKSDELDAIEAARAALSGRASGIAKSADGDVEAIRALLVARRSGRNVRVKYLNQIRHLVFTAPDELRERLRDVATDQLAATAAALRPTVGSDTVVYATKLAIATLGRRILALDADGRRLDDALDALVRRRAPRLLEVYGVGTHTAAILLVAAGDNPHRLKNEAAFAHLCGVAPLRASSGKVDRHRLNPGGNRQANHALWRIVFTRMAGDERTRTYVARRLADGRSTREIMRALKRYVARELYPHLVAG

SEQ ID NO: 482853 - protein, 417 aa, unidentified
MLRKAELSGEADSENYLGCSSETMYYIGLDVHKKTISYCVQDAAGRVHQEGKMGSTRRELDVWIRTLPQPRMMAMEATIFTGWIYDHLLPHAEKVKVAHPLMLRAIAAAKKKNDRIDAAKIADCLRCDFLPECHMAPTAIRDRRRILRYRNLVVKQSVQMKNRVSGLLMETGVSYNKQRLHKVGYFADLMATNEEIHDCIRPLLRLSREHIDRAQKLDYALVSSLERDPLLEERLRRLRTVPGVGPITALTWALEIGDFTRFRSIRQAISYCGLCGDESSSADKVMRMPLSKQRNKHIQRVLVEAAKLAPKECHELAVVRQRELERGNPNRATLAVARKMVCYLLAVERRKTDFVPAEEFRPIAAAQKHSLRRKKHRDSSVRRLPGPADCRLSDGVELRRLSTNCFGSGREHKLNLR

SEQ ID NO: 482854 - protein, 405 aa, unidentified
MVDIMVSDFMKGRYNLMKIFVGIDIAKLNHFAAAISSDGEILLEPFKFTNDADGFQLLVSKLESFDKNSIIIGLESTAHYGDNLVRYLVAEFYQVCVLNPIKTCQMRKNNVRKTKTDKVDTFVIAKTLMMQDDLRFITFFDLDMMDLKALGRFRQKTIKQRTRLKIQLTTYVDQVFPEIQYFFKSGLHQNAVYALLKEAPSPKEIASMHMTHLANLLKVNSHGHFTKEQAKELRVLAQKSVGANDSAISIQITQTIQQIELLDSQLEKIEAEMTDIMKFNDSVIMTIPGIGYINGGMILGEIGDIHRFSNPNKLLAFAGLDPSVYQSGNFQAKTTRMSKRGSRVLRYALVNAAWNVVRNNATFKAYYDAKRAEGRSHYNALGHCAGKLVRVIWKMLTDEVEFNLE

SEQ ID NO: 482855 - protein, 355 aa, unidentified
MTSTKYIGMDVHKESTSIAVMNSIGKVVMESVIETKASMILQFIDGLRGDLQVTFEEGTSAAWLYDLLKPHVTKLVVCDPRKNKSMREGNQNDKIDARRLAELLRLDHLTPVYHGEHGLRTLKELVRSYLTITKDLARVKTRLKAIYRSWAIPCTGKQVYARCHRPEWLGKINEPGVRRRAEFYYLQLDALRVLRLDARRDLLAESKKQKAWKRLCEIPSIGPIRAAVLLGILQTPHRFRSKRPLWNYGGLAIEMHSSADHRRVDGQLQRSRKNVLVRGLNRNCNHDLKNLFKGAAAVASSKPGPFKEFYTALVARGMRPEMARLTLARKIATVVLIVWKKGVCFDANHLKPQTA

SEQ ID NO: 482856 - protein, 411 aa, unidentified
MRRVIGMDIHRTFAEVVFWEDGRLRWHGRVDMTRAGIEGFGRSLAKNDEVVLEATGNAMAVVRVLSPHVARVIMANPLQVKAIAHAHVKTDKIDAGVLASLHAAGFLPEVWLPDAETERRRRLVARRNQVVRHRTRVKNETHGILAAHLVPPCPHAELFNGPGRAWLAGQILPDDERAAIERHLRELDRLSEDLAVLDCEIAEATVDDPAVRRLLTIAGVNITVAAGLVAAIGDIRRFSSPQKLVSYFGLNPRVRQSGLGFAQHGRISKIGRAHARALLVEAAWAAAKAPGPLHAFFVRIRGRRGHQIAAVATARKMAVLVWHLLAKEADYLWARPALVAHKLRALELQAGRPMKKGNRRGAAYAYNVKALRNREMAIAEQAERAYEHFVGQWRQKPPTLRPRAAPVTGSS

SEQ ID NO: 482857 - protein, 381 aa, unidentified
MKQNTYYVGLDVHKENISVAIAEGGGSREVRHLGEISNDLHAIEKLLSKLRRVHEGGSFEVCYEAGPCGFGIARRLEQLGVTCLVIAPSLIPQRSGDRVKTDKRDSIKLARLLRAGELTSVYVPDPADEAIRDLCRARSDAVDDQRRSRFRLKAFLLRNGYRYQGKSTWGVAHMRYLRELVLPHPAQKAILEEYLMAIESARERISRAEASMELMKESWHLKAAVEALMAMRGFRLVAAMITVSELGDIHRFEHPRKLMAYLGLTGSEHSSGEKQRQGGISRAGNAHLRWLMVECAQHYALPPKVSKELSNRQQGVSREVLSISWKAQNRLHLRLMRLSARRVPRNKALVAVARELCGFIWAVLRSCPCYLRTQGEERMAA

SEQ ID NO: 482858 - protein, 409 aa, unidentified
MSTTFDCPTGPVAGIDTHTDTHTVAVISDTGRHIATDTFPATNPGYVAISEFMATYGVTTVGVEGTSSYGAGLTRHLRTQKYSVVEVLRPTRAVRRRDGKSDPVDAVAAARQVLTGEALSIPKDTSGPVESLRGLQITRRQLVMTAAKLMTTIKSLLVTAPDEIRRRYSAMSTLVMVEALSRCRPSADLADPRNGVLLALKTLATTYRDLQKQGTQLEKHISILVEMINPHVTSIFGCGSVVAADLIVSVGDNPGRIHSEAALAHLCGAAPIPASSGRTHRHRLNRGGDRRANSALHRIALVRMHHDQRTRDYVAKRTKEGLSKKEILRCLKRAIVREVYQVLCLGQAVLPTGQVEVDELKARRIERQLSQAQVAEKLGCAPARISDIETGKRPLPELRLAYEELLKSA

SEQ ID NO: 482859 - protein, 315 aa, unidentified
MTSTQVFVGVDISKAQLDLALRPEGQFSAPNNEAGFAQVLEHLNAVHPTLVVLEATGGLEIPLTGVLATAGMPVVVVNPRQVRDFAKATGRLAKTDALDAQTLAHFAEVMRPEPRPLPDEQTQALAAILARRRQLVEMLTAEKNRLGTAGKPVRKSLRTHIAWLERELSHTDRGLAHAIRESPVWREKEALLRSTPGVGPVVTTTLLATLPELGALTGKQIAALVGVAPLNRDSGTWRGKRTVWGGRAQIRAVLYMAALVAARFNPVIRAFYQRLCAAGKAKKVVLTACMRKLLIVLNAMLKHRTPWRAELVQCA

SEQ ID NO: 482860 - protein, 368 aa, unidentified
MTTENNQIDFSNQPIFIGIDVHKKSWTVTVRATELEMNTHSMNPLPDELGNYLKKNYPGGKYKSVYEAGFCGYWIDRRLKELGIENIIVNPADVPTKGKERANRNDSVDSRKLARELENGTLEANYIPTELNQELRSLSRLRSQLVKDQTRIKNRIKSLLLFYGKEIPENYKEKNWSGNFIKYLEGIQFSTNIGKETLSTYISELKEKKTKIAGILKSLRKFVVTNGLKETISNLTSVPGIGFTTAITLYTELIDINRFKTIDELCSYVGLVPSIDSSGDKEHVRGICKRHSKFLRNILIESAWTAIRKDPALTLSYSRLLTRMSSQRAIIRITKKLLNRIRYVWKNNKRYEKMIVITNKIKSKIDGK

SEQ ID NO: 482861 - protein, 337 aa, unidentified
MQPTVPLFVGLDYSQHKVQVCALDPQGKVLGNRAVPDSAAAIDQAVRRLGAVQGAALEACTGAADLAEELADRFGWPMHLGHPGFVSRMKQSPDKSDFSDARVLADLERVGYLPRVWIAPKQLRELRTRVRDRQQLVAQRRNLKLAITALLREHRQGCEHQRWTAAWRAWVEQQAQLPEQARWVMTQRLRRLEWVVAEVHAVERRLEEVTKDDGTVRRLRTIKGLGPVTAWTVRAEVGRFDRFRTGKQRARFCGLSPCNRSSGDKAADAGLIRAADPERRRVCVEAAWVLIRCQPRGRQRAQRLRAQGKPRTVVTAAVANRFVRWLDHEGVRQQAVA

SEQ ID NO: 482862 - protein, 343 aa, unidentified
MGEVSTIGLDIAKSVFQVHGVDVDGAVVMRKRISRAKLLEFFASLPACLVGIEACPSAHYWSRRLQALGHTVRLLPPSYVKAYLKRSKNDANDAAAICEAVTRPSMRFVATKSEQQQSGLMLHRSRQLLVCQRTMLSNAIRGHMAELGIISAKGRNGTAKLLEMIADEQDDRIPAAARFSLAILARQYAAIRAEIVAIEKRIHAWHRSSEESRRLEEIPGVGPIVATALVAEVGDWKTFSSGRSLAAWIGLVPRQHSTGGKERLGSISKQGNRHLRWLLVAGAMAVIRYARQHGTKRLWLARLMERRPIKVAAVALANKIARMAWAMMVRRERFKEPKLLPAA

SEQ ID NO: 482863 - protein, 343 aa, unidentified
MSIVGGFDVHRRQITFDYVDTDTGRVLRGRITPACRPVLRRWLAERFAGRTDVEFAVEACTGWRFVVEELERAGIEVSLAEPADTAAARGRKRRAKTDPADAAHLRQLLAGGRLPTSWIPPQQVREMRAVLELYKDLRDEHTAWVQRIHATLFHHGVPQLGTGGVASPAGRARLEAGEGLTPAAREAVAVALRVLDALDVELDALHRQIRAFAGAQPGCKALQAQYGVGPLTATAIWAMMGDTRRFSASRQAVRHTGLDVTVYSSDGKRAPGHLAKQGSPLLRWALYEAACLASHTRAPDHDFYASVKDRIDHKRATISVARKIARRSHHILRELGDKAYAAA

SEQ ID NO: 482864 - protein, 316 aa, unidentified
MNTIQNTSTTVGVDTGKAHLDIFVRPQGKAFRVRNNQDGIADAVARIQPFDPERVVIEATGRLEAAFVCAAQSAGLSVVVANPTHVRRFAQATGRLAKTDKLDAHDIAHYGEALKPHPTAIQDKHTQKIRDLLSRRTQLMEMRTMEKNRVSILPKALHISLNRHIKQLSDELSRIDKALDKAIAKVPAWTEKVELLTSVNGVGKVLAYTLLSDLPELGKLDRKSIASLVGVAPMNNESGARNGKRRIRAGRTRVRNMLYMAIMSAIQSNPVFKARYETLKANGKPPKVAMVACMRKLITTLNVMVKTGQHWNPGTT

SEQ ID NO: 482865 - protein, 410 aa, unidentified
MSLALPDALFFTGIDWAAETHAVCVTDAGGKIAAEFTIEHSADGIAMLIRRLARHGDPADMPIGIERPNGRLVDLLLEAGHPVVPVSPNAIKTWREGEVLSGAKSDAGDAAVIAEYLRLRQHKLRVATPYSGETKALRTVVRTRDDLVAMRVAATNQLSALLGAYWPGAKAVFADVESPISLAFLTRYPAPALAARLGEKRMTAFLVKNGYSGRRTAAELLARLHAAPAGTADETLTEALRDAVLALVAVLTALNTGVKDLGRSAAAHLGEHPDGKIFTSLPRPGHADWMLAEWGDCRQAYDGPDAVAALAGVTPVTKESGKHRAVHFRWACNKRFRKAMTTFADNSRHASPWAATIYNDARASGKDHPHAIRILARAWIRVIWPCWLHGTPYDPARHGAAVALTKPIAA

SEQ ID NO: 482866 - protein, 307 aa, unidentified
MILHPGFVGIDVSKHHLDVFEGGRTERVANTAEDVAELVARWHDRFVLFEATGHYDAWLRRALEAEGIAFARVNPARARDFARATGRLAKTDRIDARMLAAMAQSLSFARERESDPEREALARAHKRRDQLVQMRQQERTRLTECDDAALRADLQAHRQWLDAQIARWDAEIARLVEQSGALAQKARRLRSIAGIGPVAATTLLALVPELGALSPKKIAALAGLAPFNADSGQLRGRRRIRGGRKRVRDALYMAAVTAARHNPRLKPLYTRLRAAGKPAKVALIAVARKLLIIANAILRDQTEFKPV

SEQ ID NO: 482867 - protein, 342 aa, unidentified
MEQVSTIGLDIAKRVFQAHGADSAGNEVFRKKLARGKVLMFLASQPSCVVALEACGGAHHWGREIAKLGHRVKLIAPKYVKPFVKRQKNDAADAEAICEAAQRPTMRFVAVKSAEAQASALVFRTRDLLVRQRTQIINALRGHLTEYGLVVAQGPAHVAELIEYIKYPRCELPQEARSILCVLITSFTDLDEKITLLDREITKRAREDQVARRLTTIPGIGPIIATAIAALAPPVGTFKRGRDFAAWVGLTPLQRSTGGKQKLGATSKMGERTIRRLLIIGASAVVRQAVRRGAPQGSWLARMLARKPRMLVIVALANKMARIAWALLAKGEVYKAPVAVTA

SEQ ID NO: 482868 - protein, 344 aa, unidentified
MKHYAGLDVSVKETSICIVDEAGRICREMKVVSHPEDLLAVLCDPAWRLERVGLEAGPLSQWLFSGLAEAGVPAICIETRHAKAFLKAQVNKSDRNDARGIAQMMRVALFQPVHVKTLASQKRRALLAARKILQEKALAIENDIRGLLRNFGLKVGIVGVVGFEQRIHDLVEGVPELADIMEPLLAARRVLREKFAKLHRKVLLLARDNEVCQRLMTIPGVGPVVSLAFISTVDVPARFRNSKAVGPSLGLTPVLNQSGESHRVGRISLCGDEAMRALLYEAAQVMLTRVQKWSWLKAWAMNIAKRRGQKKAIVALARRLAVIMHRMWSDGTEFRWTREMAPTI

SEQ ID NO: 482869 - protein, 330 aa, unidentified
MNKITIGLDIAKNIFHLVWLSNSGKVLKKKKLKRTNMKEYFCNLEPAIVVMEACGSSNYWAQSIQNYGHEVKVIAPQYVVPYRKGNKNDFNDAEAIAEASQRVNMRFVPIKSVEQQDIQLLHRIRERRIKCRTALVNQTRGLLAEYGISLSQGVNQVRKSIPDILEDASNMLTPLSRRYIASLYDELIEVDKLITDLDSEIKALSHQIEQCQKLETMTGIGPIIATALYSAIGDGKTFKSGRHMAAWLGLVAKQHTTGDNPKLKGISKRGNTYLRTQLINGARAALVKSGSKADKVSLWANNLRERLPFNKAVVALANNTIYGLSPIARQ

SEQ ID NO: 482870 - protein, 353 aa, unidentified
MNSLTDLREVVDVVIGVDTHVHTHSAAAVDAATGGVLGEITVDATAEGYAELVEFAGGHATLRAWAIEGTGGHGAGLSRHLLDLAEIVVELDRPKRAQRRNGAKSDPLDAIRAAREALARTRLGTPRSGGERQALSVLLAARRSAVNAATEAQQQVFSLVIAAPEPIRGRFRGQKLPGMLATAASLRVHPSWDVETTTTVLALRSLARRARALTKEAAEHQKAILAIIRCWRPDLLEQFGVGPIVAATVLCAWSHPGRIHSEAAFAMLAGVAPIPANSGQVTNRYRLNRYGDRQLNRALHTVVQSRIRYHASTRDYVARRTTEGKTSREIKRCLSRYIARDLYRLLESGSATT

SEQ ID NO: 482871 - protein, 389 aa, unidentified
MIYLGIDVSKFKHNCYLADEDDFDKGCHFEIKNSKDGFEYLLRKLSDFDKDKIRIGLESTGHYHLNLSRFLLDLNFNIHFFNPYQTNLYRKADSFRNTKTDKVDAFFIAKLLRATDSNPIHNELYHNYELKSLTRYKSSLKNDRVKLKNTIAGHLDLIFPELAEVCKDIFCKYTLEVLIEYPSADKIAKANLTSLTNLIKKASNGSHSKEKAMEIRDAARRSIGINSPAVSFRLVQDIKALEFLIDQIDEVNEQIKLLLDCLDSPIMSIPGVGIEIGPSLIAEIGYIENFESPSKLLAYAGLDPSINQSGTMNSSYSNMSKRGSSYLRQALFLAAFLICQNDEVFRQYYEKKKSEGKHHYVALTHVSRKLTRVIFHLLKTNQKFLSQKN

SEQ ID NO: 482872 - protein, 339 aa, unidentified
MSKLLKNFVGIDISKTYFDAAIIKADDPYQRMHNQFPQTPIGFKKMMVWLKFQDVLFNDETLFCMEYTGLYNTGLVNFLVQGKAQLWVEMPLRIKRSAGFERGSDDKTSAIKIAAYAFRYQDKMQLWQPVDNSIEKIKRLTTQRERVVKAITELSVPVKELSECGCDKEAKQLEKVQRNALKALKKTKENIEQLIIKTVGQDAVLAKKIQQVKSIKGIGQVTAVSLLGYTKGFTSFSNGKELACYCGVVPFEKKSGTSVRFKPTVSPHANKKLKRLLHLCALSAIKNDAEIRSYFERKVAEGKNKMCVVNAVRNKLIHRLFAVIRDDRVYEENYVRRCA

SEQ ID NO: 482873 - protein, 388 aa, unidentified
MIGVGIDVSKLKSTICITNEYGEVLKAPYEISHTEMDLKELTKQIKGYGGKNDVRVVMEATGSYSRPVLYYLLDEGIFVSEINPLAMKKYRADINFRGVKNDSIDAMAIAQYTIEKWNKLKEYQRADKEYAAMKALSRQYLSYMKPHVALVQNLDHLIDQVMPGIKKEFDGYDPVTGKDRLADFLEEFRHYDYITSLGPKKFDERFSKWAKKKLAKEGIPTLAYDPTSRLLVEQAVAALKGLNQVLYQILTQIRELAEKRPEYEAVRAMSGVGDVLAPLLVAEVGDPRRYHSGDALIACIGIDVPPYDSGQFKASDRKITRKGSKQLRKLGYLLVKTLRKIKPAKDTAVYDYYLKKKSEGKKDKQAIVAAMNKFFRIYYARSMEAYRS

SEQ ID NO: 482874 - protein, 356 aa, unidentified
MKKFSKLDFTGQPIYLGLDVHKRSWSISIYTDFGEYRNFSQPPQVQVLVRYLQRHFPGALYYAVYEAGYCGFWIHDQLVKGGIHCTVANPADVPTKNKEQRRKRDRVDCRKLARGLRNHELEGIYVPPRTTLEDRSLVRTRLSMGGKQRRCKNQIKSMLFFYGVEIPEQREMGHWSRRFIQWVEGVRMERASGDLALKFHLEELSHLRQILVKINRAILALSRTEAYLPWVRLLRSIPGIGTLTAMILLTELGPIERFPSLDHLCSYVGLIPDTQGSGDKEHVGEITQRGHSHLRSLLIEASWVAVRKDPALMMAFHEYLKRMRKSEAIVKVARKLLNRVRYVLKNQAEYVPCVLA

SEQ ID NO: 482875 - protein, 369 aa, unidentified
MNKNILFIGMDVHKESIEIAIAEGQNQEVRRYGKIGGTRDAMRRTLRKLVSSGKSLHFCYEAGPCGYELYRYLISEGHDCWVIAPSLIPKKSGDKVKTDKRDAVQLARLFRAGELTPVYVPDREDEAIRDLSRAREDAMLVRKSARQRLKSFLLRHDIRYQGKSSWTEAHLRWLADEVHCPSAAQKIVFQEYVNTVTEAQHRLQRLNEQIEIFVKQWRLYPVVEALMSMRGVKMIVAVTVVSELGDLSRFDNPKQLMSFLGLTPSEYSSGPRQSRGRITKTGNGHVRRILIEAAWCYRYPAKVSREIQLRQDSLPLHIRDIAWRAQLRLTQRYQHMQRKGKPHNVTVVALARELAGFMWAIANEVKYPR

SEQ ID NO: 482876 - protein, 421 aa, unidentified
MALCPHHWKIGETICNDPQVCRIVDLPVYYELETNNGNRDYRIQIGGHYMNYNTVYVGMDVHKESFTLCSCKYEDEKASHYQRTPASYKNVLRYLAFLRTIYGEYTRFVCGYEAGCLGYSLYHQLENFNVECVILAPTTMLEQRSKRRIKTDKRDAEIIARSLAQHNYSPVHIPTETDNQTKEFIRMRDDHKAELKKIKQQILSFCLRQGYQYDGSGNWTAKHVKWLRSLKPTGLYKEILDEYLLTYTILTDKLNRLDQRIEELASKEEYKESVSKLTCFLGIKTHTALSVIVEVGDFQRFVSARKFAGYLGLVPGQHSSGDDRNGLGITKAGNTHVRRLLVESAQSYTRGKIGYKSRVLRSRQAGNSPQVINYADRANERLRRRYYKMVLKDGKKYNIAKTAIARELACFIWGMMTDNIY

SEQ ID NO: 482877 - protein, 397 aa, unidentified
MVNVGVDLHKTQFTVCVRGVGGNKFEKYPTTAEGYAAFLKRVSAWRRSGKEVRAGVESTGNTRYFRDRLEAAGVKVTVINTLKLKVVTESVKKTDKHDAATIAEFLEKDMLPEARLCSRESEKLRRLLKARTTLVRAQVVVKNQIHGLLTAEGMEDVKGSLQSKKGRQRVLDALNKCENGLEAQPLIETIEQLDKNVNAIEKRLRSLTENDRMVELLKSMPGCGEISAWTIRAYTDDIKRFASAKKYAAYCGLAPWVQTSNETARYGKITKRGPEELRTALVQVVMGIRRMKAKTFSWRMMRRYEAMKKGKGSGRAIIATARKLATIIWHMLSEEVEFDIGMMIDRKLAKKSETMSNTARLAEEAVYEKQYKPVPKKIPGKSIKKTGVAGKKRKKVG

SEQ ID NO: 482878 - protein, 343 aa, unidentified
MNHAAIDLGSKESQICIRQPDGTIIEERKVPTRKVTELVATWAPSRVVMETSAEAFKIADAALTAGHQVRVVPGTLVRLLGVGDRGVKNDQRDAQQLSKASWQTDVPSVHIPSKPARELKSICGARDVLVGTRTKLSNNVRGWMRTQLWKLRSGTTSTFADRVRGHAASLGETLPEHIERQLRMLSVVVEEVKAADNQLRKLAGEHPVCRRLMTVPGIGPLTALRFVAAIDEPGRFATAHQVASYLGLTPGEHSSSERERRTGITKAGPMALRRTLIQAAWAAMCLVRTSHPMIDWARRIAERRGRPVAAVALARKLAGIMFAMWRDGTTYQAKRGAEVMMRS

SEQ ID NO: 482879 - protein, 410 aa, unidentified
MTAVYSVGIDVALRSHRVAVLGGDGEAVGKSFTIESTAGGFAALVETLHARGAGAAQSVIGLEATGHLWENLEAHLTRVGYRVVVLNPVQTRRYRDVLRRKAKTDDIDAYVIAGLLRSGAAAASYVPAETIQSLRELARLRARLMRDRQNYLRQLGAQLSVVFPEHADALGDLLTARARGILRACPTAYHLAAATPRTIHHAAHSAGARGFTREDATRVRDLGRASIYSGKAATARGNVVRTLVTQLERLTAAIEDLDTAMAEELPPPAGGGPPSDAELLHTLPGVGTHTVATLLGELGTLSRFTSSKALVAYVGFYPQLAQSGARAAAPHLVRLGSRLVRRTAYLMAVNAIRGSAEFRTLYLRKKAQGKKPKQALIVVAVKLLHTMYAMVRDRHAYTAGRVLVAPPAGA

SEQ ID NO: 482880 - protein, 376 aa, unidentified
MREKLRFLGLDVHAETIAVAIAEPDGEVRSLGTIANREESIRKLIRKLGPAEQLRACYEAGPTGFVLYWQLTQLGVECAVVAPTLVPKKPGERVKTDRLDALKLARNHRSGDLTAVWVPDEASESLRDLVRAREAAKQDELRARHRLTKFLLRTGQRPPLGLKAWTEKYVEWIQQVHYTHPAREATLLDCLNEVQHMEQRVKRLEQSILEVVKLAPAPVQAVIQGLQALRGVAHISAVTIAAELGNISSRFESARKLMGYSGVFPSEDSSGERIRRGGITKSGNAHLRRIVVESAWSYRHRPSIGARLRKRQEGVPAQITEIAWKAQNRLYKRYMKLMAAGKDQRKVMTAVGRELMGFIWAIGVKAEATCTQQKAA

SEQ ID NO: 482881 - protein, 412 aa, unidentified
MAMEALVERCAGLDVHQASVVCCVLLGPPGCRPRKLLRTFGTTTHELGKLRAWLAEHGVTHVGMESTGIYWKPVYAALEGHFDLTVGNAHHIKNVPGRKTDVKDAEWIARLLRHGLIGKSFVPPPAVRDLRELVRFRRALIETRTAERNRLLGLLEGAGVKLAGVASDVFGVSGTAMLKALAEGAAEPAAMADLARGRMRRKLEALAAALDGRVRQHHRFLIAVQLRRLEAIARDLGELDARIEAQLEPFRAQHRLLMQIPGVDRVVAAGVIAEVGVDMGVFATAQRLAAWAGLAPGNHESAGRRKGAATRKGNVFLKATLFAAASAAVKTKGSYYRDKYHRLRARRGPVRALVAVAHKLLVAAFHMLRTGGPFRELGEDFLDRVSRKRSTTKLVRRLAALGYDVLLVPKAA

SEQ ID NO: 482882 - protein, 343 aa, unidentified
MEAKRFIGIDLHRDCFTACVRLENGREYLKRWKLEDMPRFADKLRPTDEVAVEMTGNTRLFHDQVAPLVDRVVAVNPTQFQVITHSVKKTDPNDARLLALYLAKDLLPEVRMKDKTQAQIASLTQTRDTMVKLRTALKNKVNNICSANGVNLNRESLASEKGLRAVGEMPFDPLVNLELKIIVDQIRSLNQSIAELEKVIGDEGQKLEGHKNLTSIKGIGKLSGGILLSIIGDIGDFADEGKLASYFGIVPRVSNSNETDHSGRITKRGTKLGRTTLIQCALIAQRYSPYLKTYFEKMKARRGAGKAIVALARKFLGIIYRTLKNKWVFEDFPNFVLAEEVTA

SEQ ID NO: 482883 - protein, 345 aa, unidentified
MEIHTIGIDLGKTVFHLVGLDARGEVVVRKKCSRDQILRFTVNLQVSLIGMEACGGAHFLARALREQGHDARLIPAKYVKPYVKTNKNDYIDAEAIAEAVGRARMRFVPIKTDDQLDLQSLHRVRERWVSARTAVINQIRGLLLERGITVRKGRSHIEESLPGILEDADNKLTGALRALLSQLRLEMQYLQRQIDECNKSILRISEELEDCRRILAVPGIGPMTATATIAAIGNGSAFKKGRGFAAWLGVVPGEHSTGGKQTLTGTGRRGNRYLRKLFIQGAHAVLQQRMKQSNGLNTWLAQLTSRKRIQVAAVAMANKMARMVWAVLSKGEAYRPPLLAGTVEA

SEQ ID NO: 482884 - protein, 339 aa, unidentified
MSIVMGLDQHRAQITAEWVDTDMGEVSRGRIVPADRVGVRKFLARFGGRELEVALEATTGWRFVVEELRRVGASVHLAEPAETSALRGNKQRAKNDRADARHLRELLMAGRLPECWIAPDHILDLRARVRLRHTLVDERGEWQQRMQAVLYHHGLPKRAGLLTSENRAWLQQLPLPAAGREQLTVALGMIDAVEVRIAPLDQELCSYARRQTGCRALIAAHYGIGALTSVVILAELGDCSRFSSSREAVRYGGMDITVHASDKRRAPGHLSRQGPPALRWALYEAAQAARRKTSPDYAYYRQAAERLGGNRACLALARKLLKRSYHTLRELGDEALAPA

SEQ ID NO: 482885 - protein, 409 aa, unidentified
MKLYVGIDVSSRDLATCIMDHEGNTCARFKVDNHLLGATFLRDQILLWANKRKPTEILIGMEATSVYSWHPAMFFHQQEELQAWNVKVFTINPKLIRKFKEAYVDLEKTDDIDAWIIADRLRFGRLKMTAVLKEQFLALQRLTRMRYHLVHQLTREKQYFLQYLFYKCSSFTQEVDSSIFGHAILELLLESWSFDDICQMDVKQLTDFLRQKGRNRFADPECIAQSIQKAARSSYRLSKCVEDSIDLLLGLSIQSIRSLQSQLKELDKAITRHLEGIPNTLQTIPGIGPVYTAGILAEIGQIERFHNQAALAKYAGLTWSKHQSGRFQAEDTSLIRSGNRYLRYYLVEAANSVQRHDATFRAYYRKKYEEVPKHQHKRALVLTARKLVRVIDALLRNGQIYTSRKGEDR

SEQ ID NO: 482886 - protein, 430 aa, unidentified
MDKIYDKCCGIDVHKKLIVACFRKGNQQEVREFGATTRELLELADWLKAGGCEMAAMESTASYWKPLYNILESSDLKAMVVNAHHMKAVPGRKTDVKDAEWIADLLQHGLLQPSFIPDKDQRELRELVLYRKSLVGERTRELNRLQKMLEGANIKLSGTVRDINGKSARNILEYLLTGETIDSAKYDEMYEQKVIAHNLKATKEQIIDDLNGVMTPLQRRMMKELLTHLDELNIHIKNLDEEIDNFMKPEEKQASKAIQDVTGIGNTSAQAIISVIGTDMDRFPSDRHISSWAGLCPGDNESAKKRKSGKTRKGNTLLRTTLITCAHSAVKNKKSYFYAQFMRISAHRGKKRAYVAVAHSMLIAIYHILKDGVIFKDLGAEYYNQFNKERKINAYLKKLKALGWERFQSIRQILIFPKDIDGNNGIWYTL

SEQ ID NO: 482887 - protein, 404 aa, unidentified
MWYVGLDWADTHHDIVVLDEAGRRVDSRRFAHSHDGLNELKQCLLSIAASPDQLACIVETSHGLLIAFLLEAGIPVYPVNPKTANQLRKAAGAKTDRIDAYLLAKTGRFDLADLRRLEPDSATVQELKTLTRDQDALIQTQTRLVNQLTACLKEYYPAALHLFAKLQQRSTLVFLQTYPTPQAAASASVEEITATLRMGKHTNPTQVAPKLFEELHRPQLIATEVIVRAKSRLMLSLVKQLLVVIQAIASYDEAIRPLFLTHPDHEIWRSLPRAGKRLAPRMLAEWGDDRSRYADASSVQTLAGTAPVPFESGNYAKAHKRFACVKPLRNALHQFAWQSTQQEAWALAYYRRKRAEGKTHSMAVRALANVWVRIIYRMWVTKTSYQTATFEAAQRAHAPRQHVA

SEQ ID NO: 482888 - protein, 316 aa, unidentified
MDDKHTMHGVDVAKAELVIGHGETEVLLRIANTPQAIAAWLAQLPTGSWVAMEASGHYHQPLAHMAHAAGMVVYVLNPQLIKHYGRAVGMRGKTDRLDAQLIARYVLREHSKLRIWEPPSPGADALSRLLVRRQALVNARQMLAQSLSGLTELKAPRQALMASFKRMLAQVELLMRTEIARVPAMAALHRRLVSIVGIGPIVAAQLVASLSALRFTRADSFIAYTGLDPRPDDSGQRRGRRRLSKHGHALLRCLLYNAGMAAARSKLFKPTYLQLRARGLQSTEAIVILARKLARIAFALYQSGTTFDAQRHVKPA

SEQ ID NO: 482889 - protein, 440 aa, unidentified
MCCFFDTKTRIHTFHNAATERSYLETILKKHKLDLVVMEACGPSGWINDLAMSHGFKTLVCSTNEDAWKWSNVKRKTDKDDALKLARMASMNELKAVHMPSEAHREFRSLVKYRKTLDGRMNKMKCIIRAWFVNHGIVIDAGDKAWHTGRERINSFRKPLAECEPNELWKGELDMELTQMDALSVHMDIVVKKLEAIGKTDPRIIRLRTIPGVGPRTAEILVACIDDPHRFANGRQVSAYFGLVPRQYQSGETDRNGRITKRGNPLARTILVECAWASLRYNPWAKSVYDRICGKQKTRKKKAAIALARKIAVLAWAMLRDAKDWDPKLMLEVTESFGRTNQALKDTLENMKPKENSDQRKSRLRREAREANAAAASPTSKTDKKPKPKSTPAVQVATRNPKPKALIRKPLAKPTASKEKATLTKPNPKPRRVRKLVSGV

SEQ ID NO: 482890 - protein, 341 aa, unidentified
MKRFIGVDLHKNSFTVCYMQKNGERDLKTFKVSPTDVEAFKQTLSKQDEVAVESTGNTGYFAREIKESVSRVRIINPIQFKIISESVKKTDEHDAVTIARYLSKGLIPEVRMRSKEEAKLASLIGTRDKFVKLRTTLKNKIHNILNASGIVTTKEMFSGDKSLDKLLSMGLDQADLFEIRIIVDQIKSLNKSIDEINKELTDRGKNLPGHKNLTSITGIGDLSATILLNTIGNVDDFSDDKKLAAYFGIVPRVAISNDTSHYGKITKRGNKIARTALVQSTLIAIRYNHYLRRFYFKLKAKKGSGKAIIATSRKLLAIVYRTLKNDWVFEDFNKFKLAVTV

SEQ ID NO: 482891 - protein, 374 aa, unidentified
MLNKACNHPGSTIYAAIELSKKSWVVAVMHPSKDQPSIHRIKGGAFSDLILKLRTAARGRERLLVCYEAGYDGFWLARSLQAEGIECQVLDPASLQVNRRARRVKTDRIDVLMLVRALMAVHRGDRHVCAIVRVPSVEEEDARRSHRERQRLVRERTAHINRIKGLLFAQGIRGVDPGLRRRIDFSALRTGEGLPLPARLRAELEREYARLDLVETQLRATETERDTADAQDPSVERKRAMLIHLRGIGPASAAILTREIFWRQFANRRQLGSYLGLTPSAYDSGSMTRCQGISKAGNSFARRVMIEVAWLWRKYQPDSALSKWYEGHAANQSTRIRRIMLIALARKIIVALWRYVETGLVPEGAISTNSPAPV

SEQ ID NO: 482892 - protein, 338 aa, unidentified
MLHSGIDLHKRDLVIATVNSSGTVVKSGRVPAARAPVAAYFRGLGAEQRAVVESTATWYWLADLLRAEGVSLTLGHSKYIKAISYAKVKTDAVDAATLAQLLRSDLVPEAHMISPELREPRDLLRQRLVLVAKRTRCQNAVSGLLAQYNVPSVAELPALMRFQAALHSEQRALLTRQIKPLEQLLQPTLVPNDQVQRLLWIPGVGKIAAFTLYLEIDGIQRFGAVRPFFSYCRLVPGAKNSGGKTRHKRTKDGNRYLKLASSHAAVRAIQYYPEIQRWYLAKRRTKGPMIARALVAKELARIVYYVLRHEEPFNGTFKGQPLSRTKQSQWPRRASPSV

SEQ ID NO: 482893 - protein, 402 aa, unidentified
MNAVGIDVSKGKSMVAIMRPFGEIVSAPFEIKHTASGINSLVELINSVEGESRIVMEHTGRYYEVLAHQLSEANLFVSAINPKLIKDFDNDSLRKVKSDKADAVKIARYTLDKWQNLKQYNVMDELRNQLKTMNRQFGFYMKHKTAMKNNLIGILDQTYPGVNTYFDSPARSDGSQKWVDFASTYWHVDCVRKMSLNAFIDHYQNWCKRKKYNFSQSKAEEIYGKAKELVPVLPKDDITKLIIKQAVNQLNSASTTVESLRTLMNETASKLPEYPIVMAMKGVGASLGPQLMAEIGDVSRFTHKGAITAFAGVDPGVNESGSYEQKSVPTSKRGSSDLRKTLFQVMDVLIKTHPQDDPVYQFIDKKRAQGKPYYVYMTAGANKFLRIYYGRVKEYLSSLPES

SEQ ID NO: 482894 - protein, 455 aa, unidentified
MPTQPKRVESIAIVHPNAAGLDIGAREIYACVPPDRDGETIKVFGTFTPDLEQLADWFVANRVDTVAMESTGVYWIPVFELLEARGLKLSLVNGRHVKHVPGRKSDVQDCQWLQKLHALGLLTGSFRPDGEMCALRAYLRHRADLVQHRAAHVQHMQKALQQMNLLLPQVVADITGETGMAIVRAIVAGERDSVTLAQFRNVRCKSSEETIAKALTGTWKEEHLFALTQALALYDFYTEQVAACDVQIERHYGVLKPRWEPAESEAPSPAPVPARKKRKNEPAFDVRASIIRVTGVDLAAVDGLGPNLAQLILSEIGTDMSKWATEKQFTAWLGLAPRNDISGGKVLRSRTLPSRNRAGQAFRQAATSVARSSSAFGAYYRRKRAQAGPLFAQVATAHKIARTVYHLLKYRVQYEDMGAEEFARKQQERDVIALRKRATKLGFTLVAPDEIQGAA

SEQ ID NO: 482895 - protein, 395 aa, unidentified
MDSLDRTRLEQFRQFKREIRGSERYLIVGLDIGKDRHHAFFGTATGRTLWKRWLFDNSQEGFQKLLLQTEALQVRHGLPQVVFGLEPTANYHKPLGEYLIRGAHQVVFVSGVAVKRNRELLDGRWDKHDTKDAANVADLISQGKCLYYEHPEQRIRDLRLLLSLKKRLKRQEQGIRVRIRNGLVAQYCPELDSSFSRLIAPGKESDLLSTMQQPSSIGCAAHPEVAFVAQVMGEELQQIRKVLKAVQERIQTLCSQFPAYPYRLSIPGFGPQVSSQVLGAIGDPSRFQNGKQVLKMAGLDLSADRSGKASERARPVISKKGKADLRYALYQAAFIASIRNAAFTAYYTLRLKARRQEPGIQAKRRVKLAAKLLIIAWTLMKRKEAFDPERLIIHR

SEQ ID NO: 482896 - protein, 412 aa, unidentified
MDVIVERAAALDVHKATVTACVRVPDEQGVREPHLTEFQTTVRGLLALRDWLAAHRVSQVVMEATGVYWKPVWHILEDDFELLLVNARHVKQVPGRKTDLSDAQWLCQLAEAGLLRGSFVPPKPVRALRLLTRYRKTQIAERQREANRLHKALEDTNIKLDCVASDILGVSGRAMLDALVAGTTDPEVLADLAKGRLRKKLPALKDALEGRFDRLHALLIGSILAHLDFLDEQIDALSDAIEEQLAPFGMAAVALLVTIPGVAERSAQNILAEIGTDMSVFATDKHLTSWGGQCPGNHQSAGKQRSGRTRKGSRWLNEALKEAALAATRTKNTYLQALYQRLRPRIGHGRAIGAVKHAILQAIWHMLSTGETYRDAGGDYFARRDPQRATRRLVAQLERLGHNVTLHEANAV

SEQ ID NO: 482897 - protein, 352 aa, unidentified
MALPTLPHPQVLVTLGVDTHADSHVAAALDQAGRPLGTRTISTTPGGYAALLGWARRFGTVDRIGVEGTGSYGAGLARWLRAHGQLVIEVDRPDRAARRRQGKADHLDAHAAARAVQAGTATGQPKAGDGTVEMIRSLRLARRSAVKARTQAANQLKALLVTAPDGLRAQLRCLPPAELVTTAARLRAATKPATPTDAAKLALRSIARRWRQLTQEITALDTQLERLVAMAAPALVAVKGVGTETAAVLLVAAGDNPERLRSEAAFAHLCGVAPIPASSGKTTRHRLNRGGNREANWALYLIAVGRMAWHRPTRVYVQRRTKEGKTTAEIIRCLKRYIARELYGILVSRPAA

SEQ ID NO: 482898 - protein, 416 aa, unidentified
MKCFVGIDVSSEKLDSCFLDDEKNILCQTSYVNDTLGATALKKQILQLHQIYDFDKVVIGMEATSMYSYHPAMNFHQDEQLQEIQAITTIENPHRIKQYAKMFDTDKTDTIDAFMIADYLRNQHYTTSPVKEEKYMALQRLTRARYQTVCQLVEVKQHFIENLSYKCNTLKKELRDAPGSTTVFSAAIMELFTQDLSMDDLAQLPLDDLADWLQKKGRGRFKDPQDLAKTIQKAVRTSYRLDKAVNQSVDIVLSVFVREIRGLEKAIKDLDKAIEDLVQAIPEYQCLTSIPGVGKVYAAGLLAEIGQIERFKDQANLAKYAGLFWKKHESGKHSRENTPLTKKGNRYFRYYLVEAANSVRHYLPEYQMYYRKKYQETPKHQHKRAIVLTARKFVRLVDTLLRNHQLYTPPRSVIEK

SEQ ID NO: 482899 - protein, 314 aa, unidentified
MSTLVFVGIDVSLARLDIAVRPGAVWSITHDEAAIATVVAQLHTLSPTLIVLEATGGMEIPLTSALATAGLPVVVINPRQVRDFAKASGHLAKTDALDAQVLAQFAEVMRPQPRPLPDAEARALAALLTRRRQLVERLTAEKNRLLSASSPIRKRVRTHIAWLDRELARTNSDLTQAIQQSPVWREKDQLLQSVPGVGPVLTSTLLASLPELGTLTHKQIAALVGVAPLNRDSGTLRGRRTVWGGRAQVRAVLYMGAIVAARFNPVIRVFYQRLQRAGKAKKVALTACMHKLLTILNAMLKHRTPWQEVGAHHA

SEQ ID NO: 482900 - protein, 339 aa, unidentified
MTIQSEKIVPELQSLFAGIDVGAEELILLIRKNGTPYKPQKFANTPADRARLVKKLVNLPGIIVCLEATGVYHFDLSIALHDAGVALMVVNPKSSHNFAKALMKNSKTDAVDAETLAQYAERMDFVAWARPSDEKIALRSFARRIDALTRQKAAAKNQLHALSASKENPEAVLRDVNLSISQLEKRIDCLSKEALVLIKEHADLERVFRLLTSVKGIAQTSAIALMGELLLLPQGLSHREWVKFAGLDPRAFDSGKSVHKKTRISKAGNRHIRSALYMPALSAKQHDPYVKAYFQHLMDNGKLPLQALCAVMRKLLHAIHGMLKYDKQFDNTRFYAIPA

SEQ ID NO: 482901 - protein, 366 aa, unidentified
MRNVRFVGLDVHKESIAIAVADADGSAPSVVSEIPNDTARLLKELRKLGKAAELRCCYEAGPTGFGLYRALNAAKIQCVVIAPSLVPKQAGVRVKTDSRDAVKLARFLRSGDLTPIHVPDAATEAMRDLERSREDAKNAERIARHQLSKFLLRQGRHFKGTTWTDKHLGWIRALQFAHEAHHRVLVDYVHAVEEARARITRLDKDITELVESWSLKPLVQALQGLRGVRLLSAVVIAAELGDMGRFSKPAQLMAYLGLVPSEHSSGESTKRGGITRTGNTHVRRILIESAWAYRFKPALTRTIRARNEPLSTGVRAIAWKAQHRLHGRYVRMLARGKNKQQTVTAVARELAAFAWDIARQPKLLAA

SEQ ID NO: 482902 - protein, 384 aa, unidentified
MTRKNTLKSLPTDTEFRVVGLDLAKSDVSVAAIPVDDNTPSLVDRMTYADLLDWAGKISPTLFAMEPCNGYSLLCLQLENLGHEIKVISGSTVSMWINTHLSGQKTDLNDAIALARLAVSDAELTPIRHKSITEIRIQTVQAVRQQLMSQRSKSIVSFKALAQQWGIPCAAGHRNLKKLRESIEAKVDLITRPVANAMLFLLDAVKSLDRQIGQLNQTLQELVMSDERGRLLQSVLGVGTQISARVITVVGNVERFNSPRSLVAYVGVAPRNFITGHKNLTKKKHGNCPDLSHKGQGKISRRGDKLLRSLFIQGAACLYMQFCKDQLPECQLKRWILKQLAMQKPYGKLIVSLAAKLIRIVWACLNVRGKIQYSESRHDTLYVE

SEQ ID NO: 482903 - protein, 337 aa, unidentified
MIVIGVDVHKHSLSAVAVDEVGRQLDCIETSDGEELISWSKRVGRRRLWALEDCRHVTRGLERTLQRQRQHLVRVPPRLTAPERRRGRVRGKSDLIDALAIARAALREPLLDSPRPEEARLRELKLLVDHRDDLVDERRRCQQRLRWHLHELDPSLRVPLGALDRTVWLDRLGRALARREQTIQVRIARQLLARCRSLSRSIGELDRELQAQTTTLAPRLLELPGCAALTAAKLLCEIGPIDRFRTDAQLARHAGVAPLDASSGKHQRHRLDRGGNRQLNCALHRIAITQGRVHPPAKTYLERKQAEGKTRREALRCLKRQLARTVYTTLKNEPLLT

SEQ ID NO: 482904 - protein, 386 aa, unidentified
MRGKTFTPTDYDVFAGLDVDKRSISVTFTNNQGFIRSLRMPYSVEHLLNHVRKHFPNQKIAFAYEAGPTGYGLYDGLVAQAYPCLIAAPSMIPKAPGQRVKTNRLDSRGLSENLRGGQLRSIHVPSAIYRELRHLTQLRDTFVSEMVAMKQRIKSLLLFEGIEFPPAPAGNGQWSFMVKDKLRKLPCSSTVRFKLDQLLESLEFSEKQVLKTTKEIRRFCRTDPELSQCIKYVMTVSGIGWIVASQLLARIGDWRELKNVRQLGGFLGLVPTENSTGDRTDRGSITHTGDGRLRSKLIQASWSAIRQDGELKEFFRSVCQTHPRHLASRVAIVAVARKLSVRISAVLMQQRPYVVREKVHSAPLTQEETVPQGTTRRQAEPGDKNS

SEQ ID NO: 482905 - protein, 302 aa, unidentified
MCLAIGIDVHSKKLTSFAVPQDEENINESEFCLEFNKEFKSTPADRTTLNRMAAWLNGREHLILMENSTKTYEVFWILTDLGCVVVVANASDLYRITMSVKKTDYHDCRELAHYARRYLDGEREFATCLIVTAEQLNRRQLCRIYAQASSGLSDLRRRIRSYMLARGIAVSIPERDIVSEASLRELEMVADTLMSLLIDEARRQRDRIKKIKNEILKEFNNDELFQLIYSIPGFGIVTASYLSAMIVDIGRFTSAGAFAAYYGVVPKQRESADHSVRCGINPQRRRYRKRDARGRNLPSHLD

SEQ ID NO: 482906 - protein, 414 aa, unidentified
MAAVMIGVDPHKASHTAVAIGAAEEPLGQLRVRASAAQAERLVAWAAPWPERTWAVEGAGGLGYLLAQQLVAAGELVLDVQPKLGARVRLLTAGDTNKNDPNDARSVAVAALRSAARREVSADDHAAVLKVWSKRHRDLGRTRTQIACRLHAVLCELTPGGFSKEITAAQATRVLAAVQPAGAVGTARCELAAEFLVDLRRIDAQMRDTRKRLNAAVKASGTTVTEIFGVGPVIAAIVIGCVVDASRFASRDHFASYNGTAPIEVSSGNRKIHRLSRRGNRRLNHAIHMAAVTQIRHRHSDGRAYYDRKLAEGKTSKEALRSLKRRVSDAIFARLQADVRRAAAAPAIEGPGGQPGNDSVASAAGLHPSAGTSEKSLPGPAAHDVTSGRPPHSPGRSRQPSSVPDRSRCQAHSA

SEQ ID NO: 482907 - protein, 355 aa, unidentified
MHARQQTLAMLDTTTGEVLEVTLKHEGDNVREFYSALPRPVRVGIEATGSMQWFVNLMEELGMECLVGHPAQIRAAEPRKQKHDRRDADLILKLLMENRFPAIWLPSKELQDLRSLLRHRHQWVRMRTRIQNALQSIALANGLRRGPALWSHDGQSRIASLSLAPHTAYRRSELQAMYKQFEAEIEKLNQRVEQQASQRPGARLLMTHPGVGPITALATEVFLGNPARFADSKALASYVGMIPREYSSGGRQRLGGLSKQGNPLLRFLWGEAGAHAARQDPELQRFYRRKLVQKGLGKASVAVARKLGIRLWIMLRDQIEYHEFCRRGQKQQKSSGACAGMPETPYGAKSHRPVD

SEQ ID NO: 482908 - protein, 320 aa, unidentified
MMAQNDLVVVGIDVAKEKVDACIRSLSQRHAFPNTAQGHRKMIAWLHKHKVNKAVMEASGGYERDWARVLRVAGIEVRIVDPKRVRSFALSAGRLAKNDTIDAEMIAWFAETFSAAPGQPHDAAREELRALVKARKHLLDLQMRLKSQNEHAAPEAVQKAHARILKSLATEVARLEAAISAKVKATPDFAERAEIIESVPGFAETTSANLIAGMPELGQVSDEIAAALIGLAPYDDDSGKRRGERHIKGGRRWVRNAIYMPCLGAATQNNPVLKVFYQRLIAKGKEPKVALVACMRKLIIILNTMIARRQKWDPSRYALN

SEQ ID NO: 482909 - protein, 357 aa, unidentified
MLIIGCDFHSRFQQIAMADTETGELIERRLEHRNGEAAKFYTSLQKPVRVGMEATGYAQWFERILAKLGHELWIGDAAAVRAAMVRKQKTDARDARHILDLLLENRFPRIWIPTPVERDLRQLLRHRHKMVCLRTSLKNQLQALALGQGTYRKQKLWTSLGRTELEALVLDPWAHRRRQELLQMLDQLAPLIAELDRAVAEEAAQRRDARRLMEQPGVGPVTALMFVLTIGPAERFRSSKQVVSYLGLNPRESSSGGRQQLGAISKQGNSLARYLLTEAAQTAARYDEELRRNYRRLKFRRGSAVAKVAIARKLAVRLYWMLRNQSAPPARMQGTSRKPAGRRTPIVSVIGGPASSS

SEQ ID NO: 482910 - protein, 398 aa, unidentified
MTESSDCESVLVFIGVDVGKDTHHAVAINRSGKRLFDKALPNDENKLRSLISDLKQHGQILLVVDQPATIGALPVAVARSEGVLVGYLPGLAMRRIADLHAGEAKTDARNAAIIAEAARTLPHALRTLKLADEQIAELSMLCGFDDDLAAQTTQASNRIRGLLTQIHPAPERVLGPRLEHPAVLDLLQRYPSPEKLASLGEKKLAAQLCKLAPRLGKRLAADIAQALAEQTVVVPGTNAAAVVLPRLALQLITLRKQRDEVALEVEQRVLAHPLYPVLTSMPGVGVRTAARLLTEVACRAFASAAHLAAYAGLAPVTRRSGSSIRGEHPSRRGNKALKRALFLSAFAALRDPLSRAYYTRKMSQGKRHNQALIALARRRCDVLFAMMRDGTFYTPQGS

SEQ ID NO: 482911 - protein, 271 aa, unidentified
MNDAKYIGMDVHTATISAAVRDSSGNPVMEATLETKTETILEFVHGLRGSLRVSFEEGTWASWLHDLLKPHVSEVLVCDSRKNALLRVGNKNDREDARKLSELLFLDQLHPVYHGETGIRTLKELARSYLTITRDLTRVMNRLKAIYRGWGIACAGQQVYAPRYRAEWLAKITEAGVRRRAEIYYQQFDALAALRQEVRRELLAESRKHPVMRLLRQIPSIGPIRAALLIALMQTPHRFRSKRQLWAYCGPALRTYDSGEYRFRGRSTETR

SEQ ID NO: 482912 - protein, 364 aa, unidentified
MEQITRGERGRVVVRVGVDLAKRVIQVHAVDAAGQLVLGRALARDRFIAWCAQLPGGCVVAMEASSSAHHWARKLCSLGLDARIIAAHLVKPYRKQGSSGKNDANDAAAICEAASRPSMHFVPIKSVEQQSMLCVHRLREGIKEERTACINRIRGLLAEFGLVFAQSPKVLRLALADTIEDASNEMGTLTRLTLQRAHAQWRELDEHLAWCDERIAEHTRTNEQVKTATTLLGVGPLTASAVVATVGDFRQFRNAAQFGAWIGLTPKQHSSGGKTRLGKITKRGDTYLRTLLIQAAKSAVLTAHRRSDRISNWLCTLRERSGWQIAAVALANKNARILWALMTKGEAFDANHLSIKPGMSSQQT

SEQ ID NO: 482913 - protein, 363 aa, unidentified
MEKVVSTRFGYHHRRSGERKMDKPRFFVGIDIASATFTSAVGVMNDKWQIVVRPETFDNEFDSFAKYLRWLQGHGVQPENSVICMEATGVYNEVLAHFLVANRYLVAIEPPLKVKRAFKPAGHKSDPVDSTQIAVYAYRFWDELSPWAPRKEVLEQIKTLLTVREQLVVQRTGHLNALHALKRKAIRTSLAETIHERTVVELKKHIEEIETEIRRLIEQDPDFRSLVGLLISVPGVGLLLAAHMLIILQSAPQPYSPKSLAAYIGICPYTDSSGSSINHTPTSRHYGPPALRKLLCLGARSVSTHNPHFRTYFLRKTQEGKPKRLVINNIANKLLDIMVAVVRSKTPYIPNYRSVSPGLLLRP

SEQ ID NO: 482914 - protein, 311 aa, unidentified
MATSSETYVGIDVAKDRLDVAVLGERQERQVDNTSQGIAQLVAWIKELQPELIVVEATGGYQRAVVEALFHAGLSVAVVNPARVRQFARACGLLAKTDKLDAQVLAVFGQRVQPKLYTGKSEAEKQLSALLVRRKQVEEMLQAEQNRLRTTSLSLKSSVEQVIACLKEQKKRLDEQIQQFLQKQQAWQAQTQILASAPGVGMVTTATLLAELPELGKMDRKKIAALVGVAPMNYDSGKKRGYRKTKGGRGDVRSVLYMSTLVATRYNPVIQAQYQHLLKRGKEKKVALTACMRKFLTILNAMMRDQQPFRM

SEQ ID NO: 482915 - protein, 348 aa, unidentified
MEVLHRSCCGIDVHKQFLVACLLIVDETGHQHKEIRRFSTMTGELLSCVDWLQTAQCTAVAMESTGVYWQSPYNLMEGHFAQVMIVNAEHLKRVPGQKTDQKDAEWIAELLQLGLLKASFIPPRFQRDLRQLTRLRTTLTQERTRLINRVHKLLEDANFKLSSVLTDIRGQTGKHILGAVVRGEEDPTVLANMALRRAANKRDALVLALRGRVSDHHRLLLRELLEMIQHHDQAIFRLDHDIEERLRPYDAQIQRLDAIPGLNRRSIEILFAEVGWDMSAFPDAAHLASLVGICPGNYESGGKRLSGRIRKGNHYVKAILVQAAQAAARTKHTYLCLCYAKGAHPHIK

SEQ ID NO: 482916 - protein, 316 aa, unidentified
MSISETFIGIDVSKEQLDCASRPNGTTSSFKNSVTGIDALIKQLQEQRPRLVVLEATGGLERALVAALVVAQMPVVIVNPRQVRDFARAVGQLAKTDRIDAAVIAHFGEAVKPEVRTLPDQLTQEMDALMKRRGQLVAMLGVERNHLVSATSPVSNHVKEHISHLEELIKRLDQEIDQMIGKSPIWKAKDELFQSVKGVGPVLSRTLLAELPEIGQLSRQKLSKLVGVAPLNNDSGKRKGKRSCWGGRSRVRAILYMSALSATRFNPVIKEFYQRLLAKGKIKKVALVACMRKLLTILNSMVKNNTPWDPSFAQRG

SEQ ID NO: 482917 - protein, 338 aa, unidentified
MDKYSGIDLHSNNCVVVVTDDEDRVLCEKRVTNNLQQIAALLAPHREELKGVVVESTYNWYWLVDGLQQEGFPVVLANTAGLSQYSGLKHTGDEHDAKHLAQVMRLGLLRTGYVLPPEVRALRDLARRRLQLVHLCTMNILAVETQVARQTGAHISSNVVRKLTTDQIDGWDWYDDSKLAVKANLALIEAISGQIKTIEQRLRQRIALHPHYTVLRSVPGVGEVLASTIMLETGPIERFADAGKFASYCRCVGSGRYSNGKKKGEGNRKNGNAYLAWAFVEAAHFAMRYNQGAKRFYERKKAKTNTVVAIKALAHKLARACYHMLKEQSLFDERRCFA

SEQ ID NO: 482918 - protein, 321 aa, unidentified
MPLSFLSVDKEYCILAYLPVFQACFYCAFRQPASALLNISPLLHLQPVAVFFLVSNQFQYVPLILAVYTQSCHCRDVCMESTGKYWVPVFNLLEDEINVVIANPKWVKAVKGNKDDTKDSKWIGDLFRLGLVKGSYIPCKIVRILREYTRYRYKLVSCRSSEKNRYQNALTVCNVALDSVVSDIFGKSSTSIIDYLLEQSGTSINHEEINDVDKMIENMISSNPDFENAVQFLCTIPGVKRDSTITIISEIGTDMSQFSSSKRLCCWAGLTLGSNESAGKKKSVRITRAGVYLKPALVQCAHAAVKSDKSPYYKTIPMKKP

SEQ ID NO: 482919 - protein, 401 aa, unidentified
MAVAVGIDVSKEFHWAEIKVAESGKVLLSRRFDNTPGAIGELIEQIGAAQASHGPATVGIDVLGGIAGLLEAMLLQANLAVVHVPGMAVNRARRATVGGERKSDPKDARVIADQVRMRDDLRPVRPGRQIDAELRLLVGRRAELVTNATRRAARLRDLLVSIHPGLERVVDVTGKLGLHLLTRFVTPAEIRAAGLEGVLAHLRQARHVKVSMARTLAQAAWDAATAQHVTVPGQAVAADIVRELADEALTGRERLKQIDARITEVLKRHPDAALILSLPGMGATLTAEFLAETGGIGRFPSADQLASAAGLAPVLKQSGKVRYLQRATAGNKALKRVFYQSAFIAISCDVASRTFYDRKRAAGKRHHQALIALARRRINVLYAMLRHRTPYDPGHVRATAA

SEQ ID NO: 482920 - protein, 343 aa, unidentified
MGHDTRIAVDVAKAVFEVAISDRPGHVVRRERLTRDQFLPFMAQQPVATVVMEACGSSHHWARQIGGLGHGVVLLPPHHVRPYIRGNKTDRTDAKGILEASRNEEIHPVPIKSLAQQVLTSLHRLRSGWVAERTARLNALRGLLRELGFFIPMGAEKVVPALHALIEDAESELPDGLRNILYDACQEIRDIEARIKKTETQLEATARQIPAVALLRTVPGIGPLTSTALVAFLGNIQRFPSGRHLASYLGLTPREFSSGLKRRLGRISKRGDGYLRTLLIHGARSVLLHARKTQPDHLRLWAHKLEKTLVHNKAAVAVANKMARILWAVWSRQTPYGSLTKAA

SEQ ID NO: 482921 - protein, 340 aa, unidentified
MFHVGLDIHNTRISICVLDEAGQVAHRSQVRTIEEMLRTLRGLPGPFEVGYEASCGYGHDHDLLHPLAARVLVAHPGRLRLIFRSKDKNDRNDAERLAKLLYLGETPAVHVPSPEVRAWRELINCRGQVVAKRTRAKNTVRALLRGAGVVPPKRPGLWTRAGLKRLRGLDLPTASQQLRRDLLLEEIDALTRQVRRIEEELNRQARKTPAVALLRSIPGVGARTAEAVAAFVDDPHRFRNAKAVGRYFGLVPCQDQSGERNRLGHITREGAPVVRQLLAEAAWQAIRRSATVRAFYERTHREDPQRQKVALVATAHYLVRVMWAMLRHGTAWRESTTRAA

SEQ ID NO: 482922 - protein, 392 aa, unidentified
MQELTTFVGLDVHKLEHSVAVYGPNQSQPVVWTVKNHPLEIAKMVQRVRKIGSPSMVFAYEAGVCGFALQRLIQSHGAVCQVIAPGLTPVRPGDRVATDRRDAVKLGHLLRAGLLTPIHPPTPQEEAVRDLCRCREAAMLDLRRLRQQVNTFLMRRGHIFREARNWTAKHHCWLAQLRLPLPQEQRVYESYLLELEHRQQRLADLDRELEELAVQEPYAQPVGYLRCLRGVDTLTALCLVAELYAIERFARARGLMAYLGLIPSESSSGPNRRMGPITKAGNSRVRRLLMEAAHCQSRPVRPSKLLRARRQGQPAWVVQIAQRAQKRLHDRYWRLVNRGKGPNKAAAAVARELAGFIWSILRGGAGSKALAGAVQAAPRRRCAATPGCQGGV

SEQ ID NO: 482923 - protein, 433 aa, unidentified
MLKINYMSTLFVGIDVSSKSNMVYAMDFEENKYFSSSFGNNQPGADELAGMIAQCMKRHSNLASIIVALESTSVYSVHIANFLSTSEILMPFKPYVFCVNPKATSNYRKSYIGMEKTDPTDAFLIADFARVGRTKKLEPWRGGQFIALKRLTRHRMHLAECITREKTYMVSNLYLKFSELQLLEGDDKPFGNIYGTTSSAVLTEFLSPQEIIDLSEEDLLAFLAEKSRNRISDISRTSELLRKAARDSYRLDQCMYEPLNISLASSFNCIHAYQKEIKLIEQAIEKCINGMNPNALIILQSIPGIGPVWASGILSEIGDITAFHSSDALAKYAGLYWPKGDSGDFTSEDNKMSKAGNPYLRYYLGEAANSIRKHIPEYAEFYARKYAEVTKHQHKRALALTSRKFVRLIFGLLVKNQLYTGEKLEAEYNIESN

SEQ ID NO: 482924 - protein, 402 aa, unidentified
MTATRKRHCIKRTPVVARPKAAGVLYVAFELSWKEWKLAFAAGPADNPRLRSIGARDTKAVLVEIAKAKARFGLADAAAVHSCYEAGRDGFWLHRFLESRGINNVVVDSSSIEVKRRGRRRKTDSLDAGKLVSMLIRWQQGERQVWSVVQVPSVDDEDRRQLHRDLLELKAERTQHTNRIKALLAGCGLALPSIDGQFPEVLARMRTWDGQPVPVELRQRLLREHERWQLVDRQIKDLENERARRIRTSKEERVGKVRQLLRLRGIGANSAWLYVMEFFGWRQIRNRKQLAALAGLTPTPRQSGDSDHEQGISKAGNRRLRTMAVEIAWCWLQYQPGSALSRWYQQRFAKGSSRQRRIGIVALARKLLVALWRYLETGELPDGAESVAWKKGLLTPEETSAA

SEQ ID NO: 482925 - protein, 387 aa, unidentified
MARKRTLSTLDTSIAYEAVGLDLAKEDTAIAAFGPDHEGPYLIDRMPYDKLYELLADMAPTLVAMEPCSGAHQIAEQIQELGHEVMMISGRHVQAWVKDHCNGQKTDLNDAFAILNLAYDRWLTPIRGKTREECRLLALQASYRQLKGQRTKTMVHVKATLHAWGFPIRAGSFNQKVLHELIDANREAFGDEVVETLHLMINRVRDLDHDIATVLKLLTEATKRDPRASLLRSIPGFGILTMSRWCAVIGDIARFDSPKQTMAFVGLVPNNRITGHHTETSSGREARGQGRMSKRGDKMLRSLCILGAASLCLMVRNDRLPDCPFVASIKERLASPRPWFKVLVYVAAKLVRIATALLKYGETFSYEKAGISKAVLKQWELEQAKAA

SEQ ID NO: 482926 - protein, 420 aa, unidentified
MDVLLERCAGVDIGKDEVVACVRTPGPGGRGRRKETRTFLSFTGQLEAMADWFAAEGVTDVVMEATGSYWKPVWYVLEERSFELKLVNAKHVKILPGRKSDVLDAEWLAELLEHGLLRGSFVPPAAVRELRDLTRYRKRLIQAHTSECQRIQKTLEDAGIKLDSVASDVLGVSGRAMLHALVAGERDPEVLAELAKGVLRKKIPELRQALRGRFRDHHALLIGLSLEHTAHLETAIARLDERVDAVMAANTNDSGVPFEQARDRLDTITGVGKRAAETIIAEIGVDMTRFPTGAHLASWAGMAPGNNITGGKRGSGKTTQGDVWLRDVLTQCAWAGARTRDTYLSAQFWRLARRIGKKKAAIAVGHSILVICWHLLANDCDYDDLGGDYFTRRAHPDHRRDRLIAQLHDLGYQVTLAKTA

SEQ ID NO: 482927 - protein, 259 aa, unidentified
MNKDKKIYGIDISKEVFDVFSIDSGHCQFKNDEKGFKALAKFVKKEALVVMEATGYYHYRLAQYLYKKRIGVSVVNPLSVKRFIQMKLAKVKTDKSDAKAICEYGQMNDLPMYTALTEVQSECLQLFRLLDNYLKKRTATKNKLHGEEVLGIPSKFVYRSLKRDLKHLTQEVEGIENRLLELVKQEQQAQLTLLKSIPGMGVKTALFLIVITDGFKKFDSASQLCSYVGIIPTIRESGSSVRGRSRISKVGNKKLRNAL

SEQ ID NO: 482928 - protein, 400 aa, unidentified
MKVYIGIDWSENKHEICFMHETGEVLLVREIPHTIAGFQQLDQARQSLGVGRQEVIIGLETAHNLLVDYLWDQGYEQIYVLPPSAVKSAQKRYRQSGAKDDAWDAHLIADLLRTDRQRYAAWKPDQPLTRQIRAEVRFAQQLGHELVRDGNRLRSILLRYYPSALEAFPHLDSVVSLAFFQTYPTFQQAQALSFAQLKVFLREHHHTQTRFWPTIYAGLHSEPPPSNPEVEAAYAPLALAQARILETLVRSRSECLARLGKLYLLHPDREIYDSLPKAGTLLSKLGDDRTRYPSPAILQAVAGTCPVTNRSGKHSRVYFRSACDHEFCHIVQQWARLTLEASPWAATYYRTVRPHCKTDSDAIRRLANRWLEVLWRLWVDRKPYDEAFHLKQHVLRMQVH

SEQ ID NO: 482929 - protein, 342 aa, unidentified
MSIVYVGLDLGSSNFQQVALNHHGVSKVNRDFSTSEANLVKAFSDLKGEIHVHLEAGELAPWAASVIAPLVTRVVCSHPQSNAWIAKDADKCDRIDAYKLAELLRLNRFKEVHYAPDQPRRNFKQLVQHYDELTAQQARLKTKLKARLRMQGVIVTGERLFSATGRKEVLARVESRDLRTAITQLYEVLDQSVAAQEQARLLMLRAAQAFREIKLLRTVPGVGPIGACRFSAYIHTPNRFSSKRKLWKYCRLSVSHRSSNGKPLRRPRLDRSGCGRLKDVSRKAFEVAVRSRQDNGFKRAYQRALETTHDATHARLTVQRKIVSTLRAMWLNQTPYCDELMR

SEQ ID NO: 482930 - protein, 374 aa, unidentified
MDTIYIGVDFHARQQTICYLKTETGELVTCELKHQDKQQVGAFYEQFAGSVIVGLEASGYSPWFERMLEELGCEVWLGHATEIRRRARWRQKNDRRDAELILELMLHDEFPRLHRGAVQSREVMRMLRYRQKLIKIRTMSKNSLQALALQAGVARRSHLFTREGKQELAAALMSPAMQWQREHWLQLLEPLNQQVLESMVWLKAQSKGDVYVARLRTHPGIGLLTSLCLVHTLQPLDRFRNTRKVVAYAGFDPVERSSAEHKRFLGISKAGSRLLRHLMVEAANVAVRRDEDLKCFYQRLADRRGKPKAKVATARKLLIRAYIMLRDEIDYAEFRRRAVAARLARLGHGPKVPEVVIGQPASAERQEPTHNRKK

SEQ ID NO: 482931 - protein, 371 aa, unidentified
MKEAITSYVGLDIHKDTVAIAVAAAGRIPPRFVGTINPFPAELCKALRRQRCTPANSLLVYEAGPCGYGWARYLRKQGWRCEVIAPSRITRQAAEKRLKTDRRDAILLARESRAGNLTPIAVPDARDEAMRDLCRAREDIVAARLKARQQLKAMLLRHGRVYVGKSSWTQAHERHLSTIRFEHPAQQIAFDEYRQSIKEAQERIDRLSQALREQCENWRMKPVLKALMCLRGIDFLAAVTLIAELGDLTRFAHPRSLMAYLGLVPSEFSSGANRHQGSITRAGNKQVRRILVESAWTYRFNPRVSRPIEVRQSGQPKVIRDIAWKAQTRLAYRFKKLNAGRKMAQNKCCVAVARELAGFIWDIARHVKLPA

SEQ ID NO: 482932 - protein, 310 aa, unidentified
MDAIFVGIDVSKDRLDVNVCPSGEAFAVSRDGKGLEELIDRLRILAPQLIAIEATGGFETIAAAALAGAALPLAIVNPAQVRHFARAIGKRAKTDPIDAAVIARFAEAVKPEVRTLPDAQARLLGELVARRRQIVEMTVAERQREQRTAIARVRNSILRHIKMLEKELAEIDNDVGTLVRGSPAWRDKEDLLVSFPGIGNTLARTLLAEMPELGTLTRREIACLAGVAPFTRQSGVWKGKSMIAGGRAPVRTALYMAALSAITCNPPLKRFYQRLLSVGKPKMLALIAVARKILVTLNAMLRERKQWQIA

SEQ ID NO: 482933 - protein, 343 aa, unidentified
MKLTRVGVDLAKQVFQVHGVDRAERAVWCKRLKRSRWIADLERDVEPGCEIGMEACGSAHHWARVLQGKGYRVRLIAPQFVKPYVKTNKTDANDAEAICEAMSRPSMRFVGVKTVEQQDLQAVHRVRSSLIRERTAKANQLRGLVYEYGLVAPREISALRRATPEWLEDASNGLTPRFRALLSGLYGDLRLLDERVRELDREIAAIAREHEPVARLEQLRGIGPLTASALYALVGDARQYRNGRELAVALGLTPRQHSSGGKERLLGISKRGDKYVRTLLIHGARSALRTAPGKTDRLSRWVLALAERSHPNVAATALANKMARVAWAMLRHGTNYEPERVVA

SEQ ID NO: 482934 - protein, 427 aa, unidentified
MNYTQNRKIAQVTETTLVVGVDIGSQWHYARAFDWRGIEITKKAFRFSNDLDGYTAFEKWVRETAKNSAKMEVLIGCEPTGHYWYTFARYVGLHGMKLAFVNPYHVKQSKEMDDNSPRKTDEKDPKTIAKLVTEGRYSFPYLPEGIYAELREAVSVRDQIVKAMNAAANRIQRWLAIYFPEYLKVYKVFDSVSGLTMLWQAPLPEDVVKLGADGIVALWHEKKLRAVGKKRAQTLIEAAKSSIGMPGGNCAKMNLHLLLEDYFTKKEQLERITAVLQEELLKVPNSEKLLAVKGIGIITVAGFLAEVGDLRRFTSPKQIQKLAGLEPKENSSGKHKGRTSISKRGRRKLRRLLFQAVLPLIRSNEDFREVYTYYSTRKDNPLKGTQAVIAVGCKLIRIFYVLLSHGADYSSTRFRADILRPGQAKAA

SEQ ID NO: 482935 - protein, 341 aa, unidentified
MTKITTIGLDLAKNVFQLHGVDGSGAVVLKRQLRRAEKFFAKLPPCLVGMEACGSAHHWARVIGRYGHEVRLMPPAYVKPYVKRNKNDGRDAEGVCEAVGRPTMRFVAVKSVEQQATLAVHSTRALLVRQRTMAANALRAALSELGIVAAQGYEGLRKLIVRLEEPNEDIPEVMRAALLVLAKHWQVLDADERVLEQQIAKQARCNQDARRLMEVPSVGPIIASTVLAKVPDAKLFRSGRDFAAWIGLTGKDHGTGGKHRPGRISKQGDRVLRTLLISGASAHLRQQKTRGVTDPWLCDLLARRPYKVAMVAFAAKTARIIWAMLVKGEPYCDRASAPAAA

SEQ ID NO: 482936 - protein, 319 aa, unidentified
MHQNQTSLNSFIGVDVSKLHLDLFVGSTGEHHRIDNTLRSIRSWLKKQASTEAYMIFEATGGYEKTLQTALRDHPHLTPKRIHPAQVKSFARALGKRAKTDKIDAEMLARAAQWLGDDLHDTTPSADIQQLRDLLMRKTQLQETLHAEQCRAKMPHLSPLIARNLAKAIKHIQNLIVEINQDIHAHIAAQRAMKERSERLKTVRGVGEQVAATVMAFLPELGTVGRKQIAALAGLAPITRQSGSMKGRARTGGGRQPLKKALFMAALVGIRHNPVLKTFYQSLLEKQKPKMVAIIATARKLLTYLNALEKNVRNVQKLA

SEQ ID NO: 482937 - protein, 343 aa, unidentified
MEYYAGIDVSLKDSSVCVVDATGKVVREVKVASEPEALVRFFDELGLSVSRIGLEAGPLSQWLHAGLVAAGLDAVLLETRHVKAALSAMTVKTDRKDARGIAQLLRMGWYRPVHAKSAPCKDTRALLAGRKLLQGKLLDVELSIRGILRGYGLKVGEVSRGRFEARIRELTTGHAILETVIGAMLTARTALWNEFTRLHREMLKIARADKICRRLMSAPGVGALVALTYRSAVDDPSRFGKSGTIGAYFGLTPKKYQSGETDRDGGVSKVGDAMARTALFEAAHIMLTRAVRFSSLKRWALDVAKRRGMKRAKVALARKLGVVLHRMWVDATEFRWSNAVPAA

SEQ ID NO: 482938 - protein, 317 aa, unidentified
MEVSLIFVGIDVSKAQLDVEIRPSGEKESFANDKLGIKALVKRLAKIGPTLIVLEATGGYERQVTRALVSADLPAVVVNPRQVRDFAKATGQLAKTDSIDAGVLAHFAEVIRPQLRPLPDAVTLELRALTSRRRQILEMIAAENNRLEMTSKAVRKSISAHIRWMEQDLDRANQELDRAIEQSPIWKENEELLRSAKGIGPVTSRTLLAELPELGTLDRKQIAALVGVAPFNRDSGSLKGRRSIWGGRAPVRCALYMATLVATRYNPVIRDFYNRLTAKGKIFKVALVACMHKLLTILNSMIKHKTRWSETFSLQTT

SEQ ID NO: 482939 - protein, 314 aa, unidentified
MSVSTCFIGIDVSKDQLDVAVRPTNEKMSFANEDDGIDMLIKRLLPFQPHLIVLEATGSYHQLVLGRLLACGLPAIAINPRQSRDFARAIGRLAKTDSIDANVLAEFADKIRPELRSIPDEATQQLDAICTRRRQLVTMLAAEKNRHHSGPAAIRSQIKKHIVWLEKQINELQRDLDKLIRSTPAWREKDDLLRSCKGIGPTTSHTMLASLPELGTLSRHRIAALVGVAPFNSDTGKYRGQRHVQGGRIDVRCVLYMATLAAIRSNPVIRAFHHRLIAAGKAKKVAITACMRKLLTILNAMVRTNTRWTANFGS

SEQ ID NO: 482940 - protein, 341 aa, unidentified
MSDYSYFCGIDLAKNYFSLHAVDQNGKVILHKSVTRSKLLTTIANMPLMRIGVEACGGAHYWARKLNKLGHDARIMAVKYVVPYRTKGKNDLNDAVAICEAVQRPSTRFVPIKSPEQQAILSVHRIREHWVRERTALMNRMRALLSEFGLIIPVGRSSLLKHVPLMLEDAENELPHLARTVIADAYHHFGELNQRIADTEQVFDSFAKVSANVQRVMKIRGIGPQTATAILASIGNGSQFDKSRDFSAWLGLVPKQYSTGGKPRLGRITKHGDKYLRTLLVHGARTVIANLGDKQDKLSQWCRGVLERRGMNRAIVALAAKNARIIWSLLRNQTEYENYAA

SEQ ID NO: 482941 - protein, 370 aa, unidentified
MAQSIRFRYVGLDVHADSITIAVADEGRDAAQALGAVPNDFTSLTKILRRLGPSASVLCYYEAGPTGFGLARQLTAAGWACSVIAPALVPKKQGCRVKTNRRDAAKLAHFLRSGDLTVVAIPDEATEAVRDLCRAREAAKRAERVARQQLSKFLLRHGRRFTGATTWGKAHREWIARQHFERPAQQAVLEDHIAAVDLASDRVQRLTLKLLEVVEAWDRAPLARALQALRGIDLVSSATIVSEVGDFGRFAKAPDFMGFLGLIPAEDSTGDEHRRGPITRTGNAHVRRILVEAAWHYRRPPLLSKALRQRSSTVAPAVRSIAWKAQGRLHRRMVRLLGRGKEPQKVAVAVARELAGFVWAIAREEVLVAS

SEQ ID NO: 482942 - protein, 368 aa, unidentified
MGKSSKLYVGMDVHKESIDVATGDDVGGEVRHYGAIGGEMNAVSRLSRKLESTGKVLVFVYEAGPCGFGIYRMLRARGHECWVVSPGMTPRSNADRVKTDRRDCLKLARLARAGELTPIHVPDEADEAMRDLVRAREDAVVMQRQARQRLGALLLRNDVRYNGRTLWSPAHRRFIAEIRLPHVAQHIAFEEYTQAVDEAGKRIERLEAAIGEELGRWRWRPVVAALEAFRGIRSIHAVRLVAELGDLSRFASPRHLMGFLGLVPSEDSTGNRRRQGAITKTGNSSARRALVEAAWAYRYGARVSVGIARRQSGLPKHVTDLAWKAQLRLCSRYRRLSARGLNRNKIIVAVARELSGFVWALGQQVKPL

SEQ ID NO: 482943 - protein, 405 aa, unidentified
MDQNATPNRRVIGLDAHPDTFTAALLQGRTPAEAVTEKMFNRVPLAQLQSWATKHTTAEDLLVLEASGNSFQIVRLLAAVERQALVLESCQMGKLKEAHANNDKISAVRIGKAYLAGTAKVVWVPDPKTQERRDWFHAHRKAVKRTTQVRNRLRSYLSDNGVRLKPGTPLAKGQAASEQLRQLQPWTPRQWQVIEGLLMELRHADEQRTHWRSLIAQEVLADPQLLSIVRLCGIREMVAFALGALIGDIHRFAEPAKLVKYIGLNPAFDDSGNDKWTGGIQGHGRKDLRGLLIESAQAIMRSKHPLAKWGHKLLRRKGALNLAVGAVARKLAVAVWYLLMGRWTPLEEIDDRLALKVGKILTSVGRTGLKHLGKTRMAFREEIYASLTAGRSYQLDPDKKFTPTA

SEQ ID NO: 482944 - protein, 464 aa, unidentified
MKNAGKSGKTRSAVSHGLKAIRPMVAGIDIGSREHWVCGPAGEDGAANVRVFGTTTVQLVELVDWLVAQGVESVAMESTSVYWIALYELLESRGIEAVLVNARQLHNVPGRKTDFHDCQWIQLLHSCGLLRGSFRPKDEIVAMRAVHRQLFNLVEERTRYVQWMQKALSQMNVQVHHAVSDLAGTTGMAIVRAIVAGERDPSRLSALRHPRCRKSAVEIARHLTGTWREEHLFNLGAALKLYDAVEEQIATYEARLAAAIAALQPEERKNASVPVHPNPRKEKDIRGRGDQAVRTALWRFSGVDLSRIDGVATGVAQTVLTEVGPDLSAFPTEHHFVSWLRLCPRRPISGGKPLNKTRNALGANRIAAALRMAATSLQRGKTALAAAYRRTARHKGASVAVFAVARKLAQLIYRMLRYGQDYVDIGEQAYEQKFQARRVAALRESARSLGYSLMEAPASQASPA

SEQ ID NO: 482945 - protein, 373 aa, unidentified
MDNSITFAAMDTHKKEHRVALIYPNDEQVIEFSVRNAPAEITKMVKKIKRNAPGPVKFCYEAGVCGFTLQRRIEASGCKCSVIAPSLTPRKPGERIKTDRRDAKKLLGLFMADMLTEVYPPNEQQEAARELTRCREAAQENLKRIRHQLQKLLVRHGYVFTDGEHWTQKHLRWMDAVDFEQPLLQEVFDFYFTEMRHCLQRVKTLDRELEKLAQSDVYREVTGALRCFYGINTLTAMSIIAEVFDFGRFASARDFMSYLGLTPSESSSGEKQHKGSITKTGNKRARRLLTEAAWHYRHAYAVSKALNERRDGQPQWAIDIADRAGVRLRKRYHRLVNRGKLPCKAVAAIARELAGFIWSVLIEYEARKKKKAA

SEQ ID NO: 482946 - protein, 344 aa, unidentified
MPSIVGGLDIHRKQITFDYLDAVTGEVRCGQVGPADRAHFRSWLARFENPAGVAFAVEACTGWRYVAEELQRAGMEAHLAEPADTAAARGRKRRAKTDRADARLQRELLMQGRLPECWIPPSHILECRALLELYHDLRTEHTAWVQRVHAVLFHQGAPAFHDLSRADAPAQLAELARGHLSPAGQVQIGIYLRMLAGLEAELAAVRRRLLAAARRLRGAKVLAESVYGVGPMTGLALTCWLGGAGRFSSARKAVRFAGLDITVYSSDGKRSPGHLSRQGPPVLRWAVYEAGKTHARSLAPDHGYYAAVKDRKDGKRAALSEARKILRRACHILSELGDDALAVV

SEQ ID NO: 482947 - protein, 356 aa, unidentified
MYGLKHQKEKRSMDHFAGLDVSVKETSICIVDDTGRIVREAKVASEPEALLQVLGNPIYRFKRIGLEAGPLSQWLFSALGEAGLPVICVETRHMRAVLKAQINKTDRNDARGMAQMMRVGLYRPVHVKTLRSQKLRMLLTHRKLLQSNAIAIENDLRATLRNFGLKVGVVGTIKFEARIKDLVENVPDLAMLVEPLLIVRRTLREQIVILHRRLLAIVRDDEVCRRLMTTPGVGPVVALTYRATVDVPARFRKSKAVGAVFGLTCAKYQSGEVDWDGRISRCGDEMMRVMLYEAAQSMMRSKKWSWLKAWAMQIARRRGMKKAIVALARRLAVIMHRIWVDGTEFRWTREQAATAA

SEQ ID NO: 482948 - protein, 325 aa, unidentified
MINTMPTTNTVIYAGVDVAKATLQLHVQGQQSEFSNTPKGLLHLCAQLKKVPSVHVVCEATGGYECALVKALQQAQIPVSVTNPARVRAAAQAQGQRAKTDQIDARGLTDYGERYQPAPTPPTSATQDQLVALTQWLKQLIDGRALAKTQAEHHQLPFVRRQHAKLMAHLQSQIEAVEKQIEALLKQDAPLQQRVHCLDEIQGVGPRTAWTVLAHMPELGQLNRQAAAALAGLAPWTRESGTMKGLRCIGGGRPEVRVALYMAALSAVRCNPVLRDLYQHLRAKGKLAKVALTAVMRRLLTYMNARLKALLADTATAGADQSKTA

SEQ ID NO: 482949 - protein, 321 aa, unidentified
MQPVTVTVYAGVDVAKASLQLHLQGRQTEFPNQPAGLAKLRQQLQTIPHVHVVCEATGGYERPLVQALHRAQIPVSVTNPAQVRAAAQAQGQRAKTDRIDAALLTDYGQRYQPKPTPPTSTSQDQLVALTQWLTQLVQAQALAKTQAEHHEAAFVCKQHTKLMAHFQSQIEAVEKQIRALLAEDALLQQRVECLDQIKGVGPRTAWLVLAHMPELGQINRQEVAALAGLAPWTRESGTMKGMRCIGGGRPEVRLALYMAALSAARFNPVLQPFYQRLRAKEKPGKVALTAVMRRLLVYMNHQLKALAATQAATKAKNAKIQ

SEQ ID NO: 482950 - protein, 389 aa, unidentified
MQIRPDQPQAPSAIRSDLGAIFVSMELSRSSWLITSLSPGGGEKISKHSIRAGDICALLTRFSALKQKALARTGKLFPIVVIQEAGLDGFWIHRVLQKEGIESHVVDPASIATSRRRRRAKTDKIDGEALLRALLAYKRGEPRVCAMVKAPTPEEEDRRRLCRERKVLIAERVSHVNRIKGLLFGQGVSGYQPLDRDRRGQLDDLKTGDGRALPKHLKVQISRELDRLEMLLEQIKAVEAERDALLDVQQSVPTSPAAMLLNLKGIGPEFTTILYSEGLFRHFDNRRQVASYAGLAPTPWQSGSIDREQGVSKSGNPRLRATLIELAWLWVRHQPKSALTLWFEGRVKRNDGRHKKSTIVALARKLLVALWKYLTSGVVIEGAVMKTSR

SEQ ID NO: 482951 - protein, 291 aa, unidentified
MSNHKYVGMDVHLATVVLAVLNAAGKCVMESVIETKGGTIVEFVGGLSGAVHVVFEEGTQATWLDDLIAPRVAEVVVCNARRHEKQAGENHADRVEAYKLANRLRLGEVRTVYQGERGLRALKELAHAYGYLVQDMTRVMNRIKALYRGRGIACRGRGVYQVRGRGVWLGELKEPGVRQRAEFLYRELDQLRELRREAKRALLREAGRHRDYEVLRRVPAIGPVRAAQILAAVGTPHRFRTKRQFWPYCGLAVVTHSTADYRFVGGQMTKRGRQAPRRGLNRNHNHRLKQV

SEQ ID NO: 482952 - protein, 327 aa, unidentified
MYLCILNPAGEILLHRNRRATPEAFLHAVAPYQDDLVVAAECMFTWYWLADLCAQEGIHFVLGHALYMKAIHGGKAKNDRIDAHKIAVLLRGGMLPQAYVYPPAMRATRDLLRRCLHFRRKRAELLAHIQHTTSQYNRPGFAKPLTYRANRTGVVGHFTVPSVQRSMQLDLDLLAHYDGVLRELDAFILRTATAHDPQTLARLRSVPGIGKILSLVILYEIQDIARFARPQQLASYARLVRCAHESAGKIRGAGGRKMGNAHLKWAFSEAAVGFIRLSPGGKRYYARLERKHGKGKALTVLAHKLARAVYHMWQRDQVFDEGKFLAA

SEQ ID NO: 482953 - protein, 452 aa, unidentified
MKVMHERVAGIDVHKDMIKVAIRSPGEKPWARKTEVLTFGTFYGVLREMARELRRRGVTHVAMEASGVYTEPVYYALMEEDFDEVLVVNPAHVKAIKGQKTDAKDCARIAELLECGLLQGSYLPPPELKEMRDLTRYRIKKVQARTSEIQRLGKTLESAGIKLGSVASDITGTGPLEMIESLVNGERDGVVMAGLARGKARTPQKMASLSMALEGRFTRHHAAMCRLIIDQVNALKAAVAGVEMQITAKAAAWEREIALLKTIPGFGDATAWTWIAEIGPAPHQWFATHEKLACWAGLAPGNHVSAGKRRYGRVSDAGTYIKPALVQAAWSAVRVKGRLQARYNKLVRRMGGPKNPAARKKAIVAIAHTMLKIAYSVLKSGRPYQDPGADFYARRESPAQRQAYHQRQIQKLYPGCTVTVTITPPPSGSTDAAPNAGQPGAPPPPGHVPEAV

SEQ ID NO: 482954 - protein, 394 aa, unidentified
MKLVGIDVGKNSHHFCVMDKETGEFNVTPTSFSNNKEGFDFLINSLKPYSKKSILIGMEDTGHYHVALLKFLLSNGYPVALINPKTTDLTRKMEGGITKNDKLDTITICDVLDTPERKKQYRITKVDRFDLYEQRQLTRHHHNLKEELNVYCNRLQKSIDLVFPEFNTLFSSKYSIVYMNLLKTFGSAEAIASTDIRTIRKCFEIKGRGNRISLTPEKLKECAKNSIGISSEVETIQIKHLVSQITLIKEQIAEIDKKIEEFSITNNSPILSIPEISHFSGTSILAELGDIGNYSKPSQIIKFAGVAPYHYESSQYNAQHTGITKKGSKYLRKTLYQIILTVINNNPVFKKYYRLKISQGKGHRCAQGHCIRKLLRIIYHLLETGQSFDPALLR

SEQ ID NO: 482955 - protein, 483 aa, unidentified
MLKLFERAGHPAKVLCVALDYAKAQHTALICNGVGDLLKPSFAIENTAPGAAQLLREVRACAQSRKVRGEHVFFGGEDYPSFAENFVRQLRQEQFLVVRVNAWEAKQQRDNFQASSDALDLLGIARCCLHRRGQPVRDLPQAYPNLRIATRDRDKLVRMRTAVSNRIHSYVDRLFPGFLSAAKSGLEPFGRASLELMEDRFSPAQLRRRPRQSLAQWLGRRGVTQAPEKADQLKQLAQQVLPPAPEQVVMLQQTLAQLVGLYRNLEQSIGRIDREVAYWLARTPGAWLTSIPGFGITLAAGWTAELGPPSQWHSVRQLCSYCGVVPKSKQTGGPDKEPVVGAVGQRCNKRLKNVVLQAAEKVIQYGPEELRQTAQQLEARGAHTAFALAKRLVRLGKYLATTGTVYRPKALMDPATPPATLAAHYQSVWEKLLPKWKAKADLREVFAPEHPLGQWRKMVQDLYALELRLPQQRAAQQSSAVTP

SEQ ID NO: 482956 - protein, 334 aa, unidentified
MEKITTVGIDLAKAVFSLHGVDRTGRMVLRRTVRRDQLVKLVAGLSPCLIGMEACSGAHEWGRRFQELGHRVRLMAPKFVVPYRKSGKNDGNDAEAICEAVTRPSMRFVPVKSLEQQALLAMHRVRQGFVVERTATINRLRGLMSEFGVVLPLRSIMVRRQGAAAAENLPELARRAIGDLLDQLRVLDERIHGYDREIEAQAKLCEPAQRLMKIRGIGPTTALAIVATVGNAREFKNGRQFAAWIGLVPGQYSTGGKTRLGHISKRGDAYLRNLLVQGARSVLHTAATHRDPVSRWALELQPRRGYYRTLVAIANKNARIVWALLAKNESLRTV

SEQ ID NO: 482957 - protein, 359 aa, unidentified
MEPAGLIPHAKHLNVMDKFKLFCGIDISKADFDVVYGTAGSFHHVKFSNDIRGISLLLKLLLSLEADHSRILVCCENTGSFMDKLACILKGEGIFLWAVHPLLLSYYSIELNRFKTDKADAHKIFTYAITNQSRAVDFHLPSQAARQLRELFTCRKNLIETRTAYLNRNEDKQQKSSCNTLVMEIEKQLISVLNGYIHMIDKAIHAAIATDKQIKRMYRILISIPCIGPVTAWHLLFVTDCFEKFDNSRALAAYIGCAPFPRKSGSSVKRKDKTSKKAYKPLKADLNQGALSVCTRPGQLFYTFYQSMIKNNKPHLYILNMVKNTLLKLVFKLIQSNTIFDKEIFIKNKISWQKYLVLS

SEQ ID NO: 482958 - protein, 460 aa, unidentified
MNRKQRREMLRRIQSEDLSLEVVHPDAAGIDIGNESHYVAVASTRDSQPVRRFGCTTAELKAMADWLKQCKIQTIAMQSTGVYWMSVYDILEEAGFEVYLVNANQTKNLPGRKSDVQESQWLMKLHTYGLLRNSFRPSQEIRTMRTYWRQRNDLVRAAGRHIQRMQKALTQMNIQLANVLSDVGGMTGQAIIKAILAGERDAYQLAALRNWRVKASEEEIARSLEGNWQEEQMFVLQQEQDGYQFCLKQMAECDQRLQQYLQQQEDRSQGASLPQEKRKERLKKRRNGNAPQFDMRTELFRMTGTDLTQIDGIDVTTTMTILSEAGWDMSKWKTEHHFVSWLRLCPDNRISGGKIIGKGRLPTNNRITNALRMAASTLRLSHSYLGAQFRRLRSKLGPPVAIKAMAAKLARLVYRMLRYGMPFIDRGEAFYESQHRTLQINYLKRKAANLGFQIIEAPAA

SEQ ID NO: 482959 - protein, 416 aa, unidentified
MIRKLMEAIHRCVGGLDVHKKMVVACRRRLVDEACAELETKRFKTTTVGLRELATWLSEWEVTHVAMESTGIYWVPVWNILQEHFKLILVNAHQLKKVPGRKDDVLDAEWIAQCMQCGLLRASFVPSLEIRQWRHLTRQRAKLTDHHTAVVNRLHGVLHQANVKLSDVASNIVGVTCRKILTAMSNGVSDPGTLAALGTGRLKAKPEDLVESLDGQMEDHDRWLLRRLMGQLAMLEREIAIYDERIRVQMKKYEYQIDLLDTITGIGRRLAETLLAEIGPDMSQFPTDNDLVSWAALCPGRNESAGKKRSSRTANGNKWVRRALVEAAWAAVRAKNTYLAALYKRLAPRRGKNRAIIAVARTILQAAWHMLSKDIEYKELGGNYFDMLNRDKTRNYFVKGLQRLGYLVELKEINAG

SEQ ID NO: 482960 - protein, 402 aa, unidentified
MRFSVGIDWASRAHTVCIIDQTGRVCWQGAVPHTAEGLTELLGRLRRFRGRGRLRVALERPSGLLVDTLVDAGFEVVPIHPNALKATRPRYSAAGSKSDPGDAFILADLLRTDGHRFPALRPPSDDTRALRALVRGRDDLVAQRIALANQLRALLERFWPGAAAIFADVDSTIALAFLARYPTPHSAARLGEKRLAQFLGQHAYCGRRPVAELLARLRLAPASQVGEAEAEASGDVVRALAAVLTPLVGQLQQLSAAIEAALPQHPDGPLLQSLPRSGAVNAAQILAELGDDRARFPTDEQLAAEGGLAPVTHASGKHHAVVFRWACNKRLRRALTTFADNSRHASRWAAVVYQRARARGCRHPHAIRILARAWARILWRCWQDRTPYDINRHRAAQAIAAA

SEQ ID NO: 482961 - protein, 355 aa, unidentified
MNDSKYIGLDVHQATISVAVLDSAGKLVMEAILETKAETILQFIHGLRGSLHVTFEEGTCAAWLHDLLKPHVAQVLVCDPRKNALIKAGNKSDRVDARKLADLLYLNKLNPVFHGETGNRALKELARSYLALTRDTTRVMNRLKALYRSWAIPCAGQRVYAPRYRSEWLAKISEAGVHRRAEIYYQQLDALRSLREQVRRDLLAEGRKHSAMKLLRQIPSIGPIRAVLLIALMQTPHRFRTKRQLWAYCGLALKTSTSGEYRIVEGQLKRSKKFLAIRGLNTNHNHDLKNIFKGAATRASAVPGPFQEFHAALVARGMKPTMARLTLARKIAAITLIVWKKGVRFDAQHLKQQAA

SEQ ID NO: 482962 - protein, 317 aa, unidentified
MTQTSTPTAGIDTSKDKLDIAVHGQSGCWEIANDLHGWRRLAQLLTKAGVRRVGIEATGGYERGVVEHLRAAGFIVLVLQPIQVKAFGRTRLRRAKNDKLDAALIAAFAASLEQVRDAPDPRLAELVEQLTFLEQAEEDIKRFKTRLEHIAEPGLRRIVLDDIARLKARRLSQISHIAKQIRAHHDLAVRFELVLSIPGIGERTALALLIRMPELGRVSREQAAALAGLAPFDNDSGQYKGQRRIAGGRARLRRSLFAAALPAAFRWNKAVMALYARLTATGKAHNAALIACARKLLIYANTVVQRGTPWTEKPIGV

SEQ ID NO: 482963 - protein, 349 aa, unidentified
MPNYNQAHQFYAGVDLHARSLFVHVLNAKGKTVFERDLPADPDAFLDAVGPFRKNLVVGCECMFAWYWLADLCEAKRIPFVLGHALAMKHIHQGKSKSDKIDAGKLAAMLRGGLFPLAYVYPRAKRQTRDLLRRRSFFVRQRSQLIAHIVNTNSQFNLPPFAKKLSYAGNRSDAIAQRFPDPSTKLMIATDLAMIDAYDEQIAEVERHLLKSAKVDDPVTFGFLRTVPGIGPILGLILLYEIDRIGRFPEAGNFLSYSRLVRCAHESAGTVKGFGGKKIGNAHLKWAFSEAACLMLRTCAPVKAWLARQEKKRGKRKALSVLEAKIGRTVYHLWRQQRAFDLQRFLRNG

SEQ ID NO: 482964 - protein, 343 aa, unidentified
MEKIVTVGLDLAKSVFQVHAVADDGSVVVRRALRRSQVLDFFRRLDPCVVGLEACGSAHYWAQAIQSMGHTVRMMPPAYVKAYVKRNKTDAADAEGICEAVTRPTMRFVPIKSREEQAAGMILKARELLIRQRSQTANALRSHMAEMGIVAATGMTSIAKLIAILRDEADARLPDAARLALKELAAQIEGLTTRIEKLDRVILATVKNDEAARRLTSIPGVGPLIAATVRAAVQDPSGFRTGRDFAAWIGLTPRAHSSGGKERLGKISKQGNRQLRTLLIVGATSILKLARRGLKLPAWIASLMSRRPFKVVAVALANKLARTIWALLVKGGTYRAPPIMAKA

SEQ ID NO: 482965 - protein, 347 aa, unidentified
MTDPRKGRPMAYKRISMDTSKHIFTIHAVDEAERPVLRRELRRPQIEGFFAKLPPTEVALEACAGAHHWGRRLSAMGHRVKLIPPQYVKPFVKRNKNDRNDAEAIGEAASRRSMPTVPVKSLDEQAATMIVKHRELLVGQRTAAINALRGHASEFGVIAAKGTANVEALLALLAAEPTIPAAAKAMFTAMGEHIADLDAKLAAVEKQLLEQHKRNPVSQRLGAIPGIGPITAITLALSVNPANFESGRHFAAWLGLAPRQRSTGGKHRLGRISKAGNERLRQLLVVGATSVVRVARPGRPSSSTWLLGLLARKPKKLAAVALANKIARIIWAMMVRGEAYRRQPSAA

SEQ ID NO: 482966 - protein, 356 aa, unidentified
MSYDVKYIGMDVHKEAIVIAVLNESGKLVMESVIETRASSILQFLHGLRGELHVTWEEGTWAAWLYDLLQPQVQHIVVCNPRRNALLKEGSKSDKVDARKLADWLRTGMLRPVYHGENGLRTLRELGRSYQTISKDLTRVMNRLKALYRGWGIPCAGTQVYAVRCREEWLSKIPQAGVRRRAELLYQQLDGLQALRRNVRPEFLAESRKHKAAKLLRQIPCIGPIRAARLIALMQTPHRFRSKRQLWTYSGLGIETHDSAQFRFVNGQLQRSKKPQQIRGLNRNHNHEMKEIFKSAATRASCGRGPFHDFYAGLLAKGMKPEMARLTLARKIAAITLTLWKKEERFDAEQLKTQAA

SEQ ID NO: 482967 - protein, 409 aa, unidentified
MHVMHPRCAALDLGKDELMAAVRLQDGASVERDCRTYRTTGRQLLGLSSWLVSHGVTHVVMEATGSYWKSVWHVLEGQFELTLANPVQVKNLPGRKSDVNDATWMADLLAHGLIRGSFVPPAQIDGLRELTRTRKQFVREIGRHTQRIQKILDIASLKLTGTITDVLGVSGRAIVKSLIAGETNPERLADLVDYRLRVKRERLIEALHGRLTVQQQRLLAMHLNLVETIESSIEQLDRDIEKAVDPFRDIVDWLKEIPGLSDIGVPALLGEIGVDMTRFKTHQHLLSWARMCPRLDQSAGKVHSTRTQKGAVWLKTLMIQAAWAAIKTKDSYLRAQFLRLRARRGAKKAIGAVAASILTAVYYVIRDRTPYKDLGIHYFHHRDRSHNTRRLVARLEKLGYHVHLTEVAA

SEQ ID NO: 482968 - protein, 405 aa, unidentified
MSTEIFVGLDWAVHTHAVCVIDAAGAVLERFEIAHDRDGLAELMRRLARFGERVRIAIERPSGLIVDALVEAGHHVFPIHPNAVKASRPRYRSHGAKSDASDAYLLADLLRTDGHRWRELSPQSDSIRALRALVRTRDDLVATRVALGNQLQSTLEAFWPGAACIFADITSPIGLAFLKRYPSPASAARLSEAALGRFCRSQHYSGRRSPAELMARLHSAAVGLAGPLTNEAAAQLVRSMVAVLHPLVEQIAQLTRRIERFVESLPDGQIIMSFPRAGHVCAAQILAELGDVRERFPSLDQLASEAGAVPVTYQSGKTRSVAFRWACNHRLRKAVTCLAGNSRHANAWARGIYTAARGRGCDHPHAIRILARAWLRVIWRAWTDRIPYDPGLHVSAQKLASDQGG

SEQ ID NO: 482969 - protein, 393 aa, unidentified
MLRTNLQKQNDFTGQDFYIGLDVHKHSWYVTIRSLGIEVGHFTQAPDAAALHQYLQRNFPAGHYHSAYEAGFCGTGGHEQLCQAGIDNIIVHAADVPSTDKQKKNKTDQRDSRAIADHLERGNLHGIYVLSQEQQELRSLFRLRECRVKDTTRANNRLKSFLMYYSIIMPERVSKRGDLTGRALAWLDLELRSVAGTIALQQYVAELKYQRKQLFELTKALRGQVMAYDKQTYANLITIPGMGSITAMGLIAELADFRRFENPDNYASLLGLCPWEESSGDCIKTKGMQPRCNPHLRPLIIEASWHSIRKSRNMFAYYSKHAGGKNGKKAIVKVARKLAMIARGVAMSGQPYQEDYNNDQSPVKKGKAERFSSGITKQHINKQPGYGRLPMPG

SEQ ID NO: 482970 - protein, 341 aa, unidentified
MEEKKTIIWAGFDVGKETFSASLDQIAENGKAKITLLPCRDFKRNPEGITKFFQWAEKFASEKELHIVMETTGCYSQQLTDWINQSHPEVNVTIENSRNIHAFIESLNLPHKTDKLDAQAIARFGTERQPHPTKRPSKTILTIRELSRERTALIKARVELQNRQDTITSSIVRKINAQTLATLTMQIKRIEKEIKACIVEDEEILSEVHIMTTMPGVNFVSAYSILAEIGSLKQYSIKELSAISGLAPRIQQSGSSVHSSFMSRRSSGRLRQILYLDSVPGVPKIPFLQDFQQRLLAKGKKKMTVRCACMRKMLLMLRSMVVHNRPFDENFLKNSQTALEL

SEQ ID NO: 482971 - protein, 384 aa, unidentified
MKLDRTDTPTAAEYGTVYVAFELSKAKWKLGMVVPGSEKMSRFTITGGDLAALAARLAAARAKAERHCKAVRIVSCYEAGFDGHWLHRWLLEHGVVNHEIDSSSIEVSRRARRAKTDRIDLDKLMRAFLAHLRGEPRACSVVHVPSAENEDCRRGTRERERLLKERTAHTNRIKGLLHGQGIRDAMPRKPGFIGSLADLRTGDGQPLPRRLEEEIEREHQRLCLVDKQLSDLEAVNRGELRAAAPGSNAGKVVQLAGLKGIGVAGGQKLVNEVFYKKFDNRRQVGSYLGMVGTPYDSGESRREQGISKAGNHRARETAIELAWLWLTHQPDSELSRWFRARVGDIKGRIRRITIVALARKLIVALWRYLETGVVPTGAVLHPSI

SEQ ID NO: 482972 - protein, 344 aa, unidentified
MTTAPMIVGIDLGKNWFHLIGLDRRGATVLRRKLNRVQLAEYAATASKCVVATESCPGSQYWGRVFTRAGHEVRILPAQFVKPYLKANKNDFNDAEAIAEAGGRANMRCVPLKTNEQLELQALHRVRRRFIIERTAVVNQMRALLLEHGIVIPLGRALFARRLPTIFEDADNGLSPRLVGLLHRLRQRWLAIDVEIDEATRDLTAWAEQSDLCRRAATVPGIGPMISTAVVAAVGNGRAFGRGRDMAAWLGLVPGQHSTGGKPTLGRISKRGNTYLRQLFIQGAHALYLHMKRDRSSLGEWLRHVERRSHRNVAIVALANKMVRICWKVLTSEQVYEPYPARIA

SEQ ID NO: 482973 - protein, 382 aa, unidentified
MQTIDTIKPTILLAIELSASTWLVAARVPGLEKPHLHRIDGGDTAALLALISSLQARAARGLDATIGVVCCFEAGRDGFWLHRLLTAHGVVYHVLEPTSILVNRRARRAKTDRLDAEGMLRVLAAYLRGDHQACSMVRVPTPEEEDAKRTHREREKLVQERQRIENRIEALLFTQGIRKRPSLRSWERDLAVLRTGDGREIPRHLRAELDRLRRRLVMTLELIREVEAERDQAAKTKPQDRACHKIAALSRIRGIGENFAAVLTREVFYRSFDNRRQIASYVGITPMPYQSGGMDRDRRISRAGNPRARTTMIQLAWLWLRYQPGSELAEWFRERVGTLAGRTRRIAIVAMARKLLIALWRYAETGVIPAGAEIRAEITVAA

SEQ ID NO: 482974 - protein, 411 aa, unidentified
MEATVITAVGIDVSKSKSTVAVRRPGGEIVLRPFEIHHTNSDLKKLASTLKKLGGDIRIVMEHTSTYWRPIALTLKEAGFFVSVVNAMLIHDFSDNTIRKLKTDRADALKIANYALTFWDTLPPFNSEEETRLLLKMQSRANERITATATALRNGLIALADQIFPRVNIAFDPNTKNANGHEKWVDFFLRYWHKDCVCQYSMEAFTESYRRWCKRKNYKFRTDTAHKIYLLAQEGVATLPKCESTKMLITQACKSLNAVCEAKQSTQLEMQRLAAMLPEYEVVMQMEGAGPITGPALMAEIGDVRRFKNKKALVAFADIDAPPFQSGAFESKSRHVSKRGSPHLRRTIFIVSNIILTRSNPENAVYCFMDKKRSEGKHYYVYTVAGSAKFLQVYYARVTEFLRSQPSSDAC

SEQ ID NO: 482975 - protein, 350 aa, unidentified
MIIGVDYHPSFQTIAFCVEETGECGEQELSHSDGQAEKFYRELKQRGVRARVGMEATGYSRWFERLLAELGFELWIGDPAEIQAKRVKKQKTDRNDARLLRRLMLENNFPQIWVPSPENRDLRQLLWHRHRLVQMRTRIMNQLQALAMNEGHRWKKKLFSEQGRAQLEKLALAPWASRRRQELLELLDRLNPTIEELTAAVEREARKRPEVLRLMTHPGVGALTALAYVLIIGTPTRFERGKQIGTYVGMIPSEDSSGGKQRLGHISKQGSSLLRFLLVEAAQAAARVHPDWRRRYSHLAIRRHKSIAKVAMGRRLAVRLYWMWRNGCEYSQSLEFGSHAGQLGTGHGVN

SEQ ID NO: 482976 - protein, 331 aa, unidentified
METKEIIGIDVSKDTFDAVFERTSAHSAFSNCLKGFGLFQKWIARQAGKDLSKVLVVMEHTGIYSLPLEKYLYGKQVAFSKVAGIKIKKSMGLVRGKSDAADAGMIARYGAEKIKALQVHQPLQDTVLRLKNLIALRDKMVREKAGWTARLNEQRQFLELAESDVLVRVQKAAIKSLEAGIDKLEAEIGALIEGDAAMSRNYGLLLSIKGIGPVIASYMLAATCNFTSFATWRQFACYSGIAPFPYESGKSIKGRTKVSNYANKKIKSLLHLAAMVSIKYNPDMREYYTSRTGKGKNKMGTLNAIRCKIVARMFAVIKRQEPYKVEWLDAA

SEQ ID NO: 482977 - protein, 371 aa, unidentified
MNACLTPKSTVVGVDVHKYSHTAVAMDCFGQEKARLDFSNERLNDYVLWLRELGDKEDIIVALEDVNGYGFHIVERLSKEKISMRYVPAILTERERKKSIHREKSDYEDAKRVGKVILTKFDETLPAKESIADDQERELSANLDLLTAERRILVQEKTILKNQLHAMLHQIYGDHYGEGFPKVFHKKAIKSFRQKLTQTKFDNPIRVALAGSSIRRFDRLALVEKQLKEIDGSINNIGQKSEAVLALSDNIHGCGIITAASIIAEVTTISRFCDKSRFARYSGIAPIDKSSGRHQRLYTSPFGNRKMNRALHTIALCQIACKGDDRGKIYFKKKLSEGKTKLWALRCLKRQISNKVFQALKEQKREETTAQ

SEQ ID NO: 482978 - protein, 440 aa, unidentified
MAMRKREDVVFPNAAAVDVGASSHWAAVAAHSTDAPVREFGAMTDDLNALADWLIACGVDVVALESTGVYWIPVYEVLEQRGLQVWLVDARQVKYVPGRKSDVQDCQWLQRLMSYGLLRAAFRPGADVCVMRAVARQREVLLTQQASWVQRMQKALVQMNIQLTEVISDVMGQTGQAIIRDIVAGERDAKALARHRHRRVKASEHDIVRALTGNWREEHLFVLEQALAVYDDLAKRLLACDAKLGELLAERSAASVDLGRAPRQGSKARAEYDARQQLANWAGADLTRINGLGLESVMKILSEIGTDLSHFANVKHFCSWLGLAPATKISGGKVISARTKRSANRMRQALKMAAMSLSHSDSALGAFYRRLCSRMDKPRANTATAHKLARMVYFMLTRGEAYVDEGQQRYEEQQRQRSVAALKRRAAALGFQLNPVGAAA

SEQ ID NO: 482979 - protein, 370 aa, unidentified
MSVRRILAKTIDTDLEYEAIGIDLAKNCVSAALLTTDGEVVCIDRLDYSELEKSAQALSPTTFAMEPCTEMNYLVQKLEAWGHRCLVIGGKNVQNYVENHYSGQKTDLNDAQALAFLAQDKQLRTIKAKDIEQQKYASLTTLREQYIKQYRQTIVSLKGICQAWGLNISKGISGKAQLKDLIENHAAFPEELRESLVDMVTHAQTTQKVLNKITKTLEVLAKNDKVCQLIQTIPGLGTICSCRLRATIGDIKRFKNPKDFPAYYGLVPRSIATGHNEKKGKITHRGDRTMRSLMVQGAGCVIRLATCGKLKSKQLTKWILKKQKEKMPWGKLVCAVAAKLLRIVRAVLISNKPYNSKIAGVAKCSLPKGS

SEQ ID NO: 482980 - protein, 347 aa, unidentified
MSFIGVDLHTNSFTACRREADGTERFETFTLSPAELQRFCLTLDAEDELAFEATGNSAWFRDQVLPCVGRVVVVNPSQFKVIRQSVKKTDRNDARALALFLAKDMLPETRAKTQAESELASLTQTRDLLVKQRTRLLNKIHALHNRHGIKLKRESLASKKRLLAITPQPFTRLEWVELEIVRDQALSLTEAIAKIDARIEEAASALDGYASLTSIKGIGPRAAAVFLSTIGNIQDFANADKLAAYFGIVPRVSQSNETDSRGRITKRGSRLARTALVQCTLIATRYSPYLKAYYDRIRLRRGSGKAIIAAARKLLAIIYDTLKSGRVFTDFAAFQFQLGHRPAGQSS

SEQ ID NO: 482981 - protein, 342 aa, unidentified
MTQPAPARITVGVDTHAEVHVAVAKDSFGRRLDAISVPTTPAGYGELLGWARRLGQIEGWGIEGTGSFGAGLTRFLHRHGQVVVEVNRPDRQTRRRRGKSDPLDAEAAARAVQAREGVIPKAGDGQVEMIRSLRVARATAMKARTQAINALKGLLVTTPDELREQLRALSAVRLVQTAAELEPGPVTTPAAAARLGLRSLARRYQALSAELTILDTELDRLTVTAAPKLLALFGVGSDSAGALLVAAGDNPDRLRSNACFSMLCGASPIQASSGKTQRHRLNRGGDRQANAALYRIVIARLRHDQQTRDYLDRRIREGKSKKEAIRCLKRYVAREVFAVLRP

SEQ ID NO: 482982 - protein, 343 aa, unidentified
MSIVGGLDVHRRQITFDYLEEGSGVVRRGRVPASRELLRRWLATEITARPARFAVEACTGWRFVVEELTAAGIEAHLAEPADTAAARGPKRRAKTDRLDARHLRDLLAGGRLPESWIPPAQVAEVRVLLELFKDLRDEHTGWVQRLHATLFHQGVPAAEGELLSPQARRHLEAGTGLSPAAHQQVRTALRVLDGLDAELVPLRRQLAAFARRQPGCRALQAHYGVGTITAVAIWAELGDTRRFSASRKAVRHTGLDITVHSSDDKRARGRLSRQGSPLLRWALFEAAKCAARPGSPDHAYYTQVRDRAGGNRAALSVARKITRWAHHTLRALGDEAFAPVAPV

SEQ ID NO: 482983 - protein, 459 aa, unidentified
MTPRQDNFPHPPRRRRRQLRVTNPDAAGIDVGADAHWACVPADRDPQPVRRFGTCTADLEALADWLRASGVTTVAMESTGVYWVPRYELLEARGFMVLLVDARQVARAPGRPKSDEKDCQWVQRLHSYGLLSAAFRPAEQVVVLRAYLRQRDMLVTYAGQHVQHVQKALEQMNVKLTEVVSDIAGVTGMAIIKAILRGQRDPCRLAKLRDPRCKESEATIARALQGSWRAEHLFALRQALALYEFYHRQIGECDQAIEAHLRTFQDLSAGQALPYRPRRRKREANEPRFDARTRLYCLCGVDLTAIEGIDETTALVLLSEIGTDMSRWPSLKHFCSWLGLCPQHKVSGGKILCRRVRRGSSRAKRTLRLAARSLHHSKSALGAFFRRIKARHGSAAAITAAAHKLARLVYSLLKHGTDYVAQELEQYEAKYRARKLRAIARQARDLGFDLVPAVAAAGG

SEQ ID NO: 482984 - protein, 338 aa, unidentified
MTIVMGLDQHRAQITYDLLDTETGEVRGGRICPADRDSVREFLRCFEGEQVEAALEATTGWRFLVEELQAVGAEVHLAEPAETSERRGRKKRAKTDRADARHLRELLLAGRLPESWIPPEHILELRSKVRLRHTLAEQRSEWQQRIQAQLYHHGVPRRRQLLTADNRAWLESLELPEAARLQIEVALRIVDQLRGELEPIERELRAFARRQPGCRALMRHYGIGELTAVTILAELGDARRFPSSRRAVRYAGLDITVSQSDQRRSPGHLSRQGPPALRWALFEAAQVARRPSSPDRDYYEQASDRLGSNRACLSIARKLLKRSYHTLRELGEEALQPA

SEQ ID NO: 482985 - protein, 323 aa, unidentified
MSKSTIFLGIDISKDVFDVTDSKGNHYQFTNNHQGFKLFLKKLTNISHCVMEATGYYHYQLAYYLLEHDIKVSVENPLSVKRFIQMKLSKIKTDKSDSKMICSYAQNIELRLWQGNTKNQIECLQIARLLSVYSKQSTMLKNKLHGEEVLGNPSTFVVRSLKRSLKQIQKELKTLELKLVNLVRIDNQDLLTRLESIPGLGRKTAIMLIVLTDGFERFTKASELCSYAGLTPIIRQSGSSIRGRARISKIGNRKLRNLLFMCSFTACKNNKACREIYQRITNKGKSKKLALMAVCNKLLKQSFAIAKSGLIYDETYRSVLVKN

SEQ ID NO: 482986 - protein, 283 aa, unidentified
MEQRSTVTIGCDLGDKRSEVCVLGDSGEVLLRRSVSLTRRSLKAFFTQYTGAVVVIEAGSQSQWIAEALTSMGCEVVVANPRQVKLIGQASRKNDRRDAELLARLGRADRSLLAPVQHRGRKAQQDLVWIRARDLLVRSRASMTSCVRGLLKTFGVRVKSCHTDNLTLEDPSHYKKSRDVGPYLGMTPRQRQSGDSDPQLHVSKQGDGYLRRLLVGSAQYILGPFGPDTDLRRYGLRLVARGGKKAKKIAVVAVARKLAVLMHRLWVSQENDVPIGYKPQMAR

SEQ ID NO: 482987 - protein, 328 aa, unidentified
MDDAGEIINEMQFRTSEQNLIEALKAVKAKVKYFAVEENTLANWIAQVVRPYVADVLIADPTENALISRSARKRDPDDARKLCRLLRLGELKRVYHAETDLRALFKAAAQHYIDLRDQQVTLKQKIKAMYRHWGVIDVEGKTVYSPKGRASYLPRVCHPVVRHQLLHLYALMDETERQEAAAARELRQLGRSFPEINQFRKIPGIGPINALIFDALIQTPHRFENKHRLWRYCRLGITDRSSDGKPLGYQRLDRSGIGTLKSISYWAWMAAQRGSNEVRKFFEASLARTHNSTNARLNTQRKIMAVMYGLWKHGGEYRAECFLGSSPV

SEQ ID NO: 482988 - protein, 347 aa, unidentified
MQVITIGIDLAKHVFQVHGVDANDKVVFNKPLRRSQVLPFFAKLAPCLIGMEACASAHYWARELKKLGHDVRLMPAKDVKAYVKRNKNDSVDAAACSEAVRRPTVRTVPVKTPEQQAELMQHRVRDLLVRQRTQAINALRSHLAELGIVAAQGYDGLKVLLVVIADCSDVRLPENARASLSALIAQIASCQAEIGAIEKRLLAQHRKNADSKRLETIPGIGVLGASAIVATVPDASIFKTGRDFAAWIGIVSREDSTGGKQRLGPISKQGDRYLRRILIVGAFAVIKQARAHPEKYPWLTQLLARKPAKVAAVALANKIARIAWAVLTKKEIYRVHPITATPASLGG

SEQ ID NO: 482989 - protein, 346 aa, unidentified
MRFYTKQHNFYCGIDRHTNKMYLCILNRDGETVLHRNIRTDPEIFLRAIKPYREDIVVCAECMFTWYWLADLCDKENIPFILGHALYMRAIHGGKSKNDKIDSHKIAALLRGGLIPTAYVYPQEMRSTRDLMRRRNHLMRKRAELLAHIQNTASQYNLPPLGKITKAKNREGLLECFDDPAVQMSVAANLDMIETYEHVLVQLEQEIIKCAKKHDPTALSLLKTIPGVGRIIALILLYEIEDISHFPRVQDFASYCRLVKCTRESNGKKYGTAGKKIGNAHLRWAFSEAAQLFLRTNDAGQKYHRKLVSKHGKGKALSIPAHKLGRAVYFMLKNRQGFDMNKFLAI

SEQ ID NO: 482990 - protein, 403 aa, unidentified
MLRDHLKHPTAIRVQFGAIFVSLELSRKTWLITSLSPGKGEKMSKHSVTAGGIAGLMARFADLHRKAAARTGKSFPLIVIQEAGLDGFWVHRVLQQEGIESHVVDPASIAVPRRRRRAKTDKIDGEALLRTLLAYKRGEPRVCSMVVAPSPEEEDQRRLCRERDTLTAERVRHVNRIKGLLFAQGIADYAPLSRNRRKRLEELCTGDGRPLPQYVKAQISRELDRLELVLEQIKIVEKERDRVLLSPAPVAAVSTGPQSTCDKPRGATGVAMLTALRGIAADSATTLWSEGLSRHFSNRRQVAAYVGLAPTPWQSGRIAHEQGVSKAGNPRLRRTMVQIAWLWLRHQPQSALARWYFTRVGVGATKARKKVAITALARKLLVALWKYVSAGEVIEGAIMKPVA

SEQ ID NO: 482991 - protein, 340 aa, unidentified
MGVFVGIDVSLENSAVCAVDEHGKLVKETKVASDPAALNACIRGMPGVVEAIGIEAGPLSQWLHKSLTDLGLPVVLMETRQVKAALKAAPVKTDRRDAAGLARLLQMGWFRPVHCKSLSAQELRVLLGARRSVQDAAINIEMSIRGMLRNFGLRLGRIGKVSFEDRVRELTEGNKLIQLSIEPMLRARAALRSELVRLERMARDITREDPVCRLLMTMPGIGSVVALTVRSSIDDPDRFRRSKDVGPAIGLTPRRYQSGETDIVGGITKAGDLDMRTALYQAATVVIHRSKKQTWLRAWAERVVRRRGAKRAAVALARRMGIILHRMWVDNTEFQAARQA

SEQ ID NO: 482992 - protein, 351 aa, unidentified
MNHNTTYAVDIAKSVFEIAVSNHPGHVCERHRLSRERFLTFFAQQKPGTVLLEACGSAHHWARSLSTVGHDVVLLPPHRVRPYVTGNKTDSADAKALLEAARNQDIRPVPMKSIDQQSLAALHRLRSAWIAARTARINTVRGLLRELGIFIPLGATRVRPTLTELLEDPDSALPHAIRPTLADAADEIGDLERHLANVETQLNALGKAIPDVKLLQTIPGIGLITATALVAFVGNVHRFPSGRHFASYLGLTPREHSSGLTRRLGAISKRGDTYIRMLMVHGARSVLWSAKGKTNPHPIQLWALEVERARGHNKAAIALANKLARIIWAVWKNQRPYERRSTSSVPPTTNC

SEQ ID NO: 482993 - protein, 339 aa, unidentified
MEKLYVGIDLHSNNNVISIIDGENKQIYCGKLKNSLNVVLEKLAPYKEGISGIVVESTFNWYWLVDGLMENGYKLHLSNPGANEQYSGKKNINDKNDARWLADLLRLNILKEGYVMDAKRRAIRDLCRKRMQLVRMRTSNILSIRNLFSRNLGAITAKEISKTESDQLIELFGDKNLVRAVSANKSVIHTLNAEIKDIEKIILNQINLAWEFQKLKTIKGVGDILAQTIMLEVGNIERFKKVGNFASYSRCVSADKISNGKKKGRGNRKNGNKYLSWAFTEAAISSIHWNPDAKKFYERKKKKTMTVVAIKALAHKIARASYYIMKDQVEFDSAKLFGH

SEQ ID NO: 482994 - protein, 347 aa, unidentified
MTTLTDTVDIVIGVDPHKHFHAAAIVAAGTGKKLAALNVNADPAGFNLLVKKADEYSKSRCWVIEGCGSWGRNLANWLIEAGEFVREIDSPKRPARRMGKKTDDIDATRAAREALGREDLAEPRSAGDRDALAALLMARRSAVQMATDTERQLHALASICPEVLAKRLRGLKTHRMVTLCARWRPRGDIAVVIIAQTMRNLAQRVRLLREESSEYENQIDILVRSWRPDLLELVGVGPIIAATALTVWSHPGRIRNEAAFAMLSGVAPIPASSGLTTRHRLNRRGDRQLNSAFHIVTIQRQRHDARTQAYFEKRRAEGKTDREIRRCLKRYIAREFYQILENPLDKQ

SEQ ID NO: 482995 - protein, 386 aa, unidentified
MFSPPAQLTRLFVGMDVHKDNHAAVAANCFGEKIWQEELGNSPADFKKLVGRVRLLSAERGLSPVFGLEDTSGSGNLLARHLFASGLEVKIVNPVLVKTLRKYETHPEKSDLQDALGVAKVLIEKIDTLPVFSITETSELARDLHALVKDRETIVREQTRLKNQLHNALHHSYGSPYKTVFKNIFAKKALEFWVELPSAKSLFATKKHIEKPDWIRQTKKEELPSTTVHLEHQVQRKARRLISIWNELNEIDKELKELVEQTGQKLNTLRGCGTVLSAAVLSEVKDIARFSTPAKFAKYAGIAPKRYESGKKKKCVKTKSGNRRLHKAFYQIALTQISNQGLPKAKEYFKKKVEEGKSKKHALVCLMRQISDIIYSMLKNKRAYYP

SEQ ID NO: 482996 - protein, 434 aa, unidentified
MTDSHSSATARILVAIDVAKAKHDVLVELPGTGRKKMIVRNQRDEFQRLAAYLKSLGGTCRIALEPTADYHRCLAYFLGSQGFEVRIVSSLAVARTREALHNSWDKNDPKDAQVILHLLRNGTTQRFYDPVIEQTNDLQELSKTHHQVSLRKTRLQHSLMNHYLPLYFPEAERFLCTTRAGWFARLLIAFPTPASVTQLPEAEFVATAAELLRTKHSKQAVLRSFHAKASESVGIPVSLDSQAVATFRLLLHEHSELCRQREQLERTAHELLKERIDYQILRSVPGIGPIIALTVLAEAGDLRRFGHVRQFLKFCGLDLSTAQSGAYRGRSQLSKHGNGRLRAALWLAATVASRMTENTLRKKFDRYVQSEPTNADLKRKAYTACTAKMARTVYGLIKHQQFYRAYHEDAVPEPDGRTRSHGPLRPAASAAVTS

SEQ ID NO: 482997 - protein, 442 aa, unidentified
MQQPVEVHVEEHESIVERVAAVDVAKASGMVCLRTPHEMIPGRRVTKIWPVAATTAALVELGDHLRCERVTRVVLESTSDYWRPFYYLLEAAGLTVWLVNAAQVKNVPGRPKTDKLDAVWLAKLAERSMLSPSLVPTEPMRQVRDLARARFDLVEDRTRVKQRIEKLLEDALIKISSVLTDVLGVSGRTMIEALIAGQRNPTVLAELARGRARRNRATLQRALHGRFTDHHARLTRLLLGQLDELSARIDEVTGLLDAAIRALPTPAADAQDNPAPAGYDSAVARLCAVPGGGPDSVRAVLGEIGLDMRVFGTSARLCSWARVAPRTVQSGRKTGRARTGKGNPYLKSALAQIATGAAKTDTFLGERYRRLIKRMPKAKALVALQRSILVIFFHLLADPTAEFTDLGSDFYAKRIDRARRTTHLLRQLHALGYEVRLAELSA

SEQ ID NO: 482998 - protein, 344 aa, unidentified
MQVVTTVGLDIAKSVFQVHGVDAAGQVVIRRQLKRRYVLAFFEKLPACLVGIEACASSHHWSRELKTLGHPVRLMPPAYVKPYVKRQKNDTADAEAICEAVTRANMRFVATKTPVQQSCLTLHRTRHLFIRQQTAVINVIRAHLAEFGIVAPVGRKGIETLLDVVANPTDKRVPVIARACLAALGAQLRRLKEQILEFDRMIMAWHRSNEASKRLDAIPGVGPVLATALVASIADPKAFRSGRNFSAWIGLVPKQHSSGGKDRLGNISKQGDRYLRSLFMAGALAVIRYAKIHGTTHRPWLTALLARRPTKIAAIALANKNARIVWAMLASDKFYEPKLSVQAA

SEQ ID NO: 482999 - protein, 368 aa, unidentified
MDKIYDKCCGIDVHKKLIVACFRCGKKQEVREFGATTRELLELADWLKDGGCEMVAMESTASYWKPLYNILESSDLNAIVVNARHMKAVPGRKTDVKDAEWIADLLQHGLLQPSYIPDKDQRELRELVRYRKSLVGERTRELNRLQKMLEGANIKLSGTVSDINGKSARSILEYLLTGKSIDGSKYDEMYEQKIIAHNLKATKEQIVVDLNGVMSPLQRRMMKELLVHLDELNIHIKNLDDEIDNFMKPEEKQASQAIQDVTGIGNTSAQAIISVIGSDMGRFPTDRHISSWAGLCPSDNESAKKRKSGKTRKGNALLRTTLITCAHAAVKNKKSYFYAQYVRISAHRGPKRAYVAVAHSHRKIYSLG

SEQ ID NO: 483000 - protein, 320 aa, unidentified
MRNAVGLDISKLTFDASAMVGNAEYSAKFDNDSKGLNQFSDRLKSLGCQNLHICMEATGNYYEEVADYFAQYYSVYVVNPLKISKYAESRFKRTKTDKQDAKLIAQYCRSAQESELVKRQKPTDEQYRLSRMIAAYAQIKSECAAMKNRHHAAKDEEAAKAYAQIIKAMNEQLEVLKEKIKEQTEKPNCKEGVKRLETIPAIGRMTAAVLFHHLTSSKFETSNKFAAFAGLSPQQKESGTSVRGKGKLTKFGNRKLRAVLFMPAMVAYRIRAFPDFIKRLEEKKKPKKVIIAALMRKLAVIAYHVHKKGGDYDPSRYKSA

SEQ ID NO: 483001 - protein, 310 aa, unidentified
MKSITVGIDVSKDRLDVGVHPSQELFAVERNARGLESLAARLLELSPRIVALEATGGFETVVAATLAAAGLPVIIVNPAQIRAFAKAIGQRAKTDPIDAAVIAHFAEATNLEPRPLPDEATRLLADLVARRRQIIEMIVAESQRQRRVTVPRLKKSIARLLKALEKELASLDTDIDDAVRGSPAWREKEDLLASVPGVGPVIARTLMAELPELGQLGRKQIAALAGLAPFARQSGQWRGKSFIGGGRTTVRSAVFMGAMVAKQHNPILKAFFDRLVAAGKPKMVAIIAVARKLLTILNAILRDGRPWQIA

SEQ ID NO: 483002 - protein, 363 aa, unidentified
MPMKKPAQHFIAEVPRSITKVGMTIGIDLGDVWSHYCTLNEDGEVVDRGRFRTTPSGVEKWFTDLPTARIAMEAGTHSIWVSAQLREMGHEVIVANVRELRAISHSDRKSDTVDAEKIARFARLDPEILRPICHRTVAQQEALTLIRARNLIVRLQTAAVNSVRGLAKPCGYRLPASSTLCFAKRCMAVLPPGLALALGPVLEQIAAMTVKIQQYDRTIKRLTETEYPETQALLAVYGIGQLTALTYVLTLGSKERFKRSRDVGCYLGLRPRRSQSGDRDPQLGITKAGNIYLRTLLVECANHVLGPRGRDSTLRRWGLHLASRGGKQSHNRAIVAVARKLAVLLHRIWITQEPYIPFYAVAA

SEQ ID NO: 483003 - protein, 374 aa, unidentified
MENTITYVAMDAHKKQHRIAMHYPFQEDIIEFTINNAARDIKKMVSKIKRHAPGQIEFCYEAGVCGFTLKRRIKALGCQCAVIAPSLVPTKPGERVKTDRRDAKKLLALFKAGLLTEVHAPDEHQEAARELTRLRETAKENLKRIRHQLLKFLTRHGYVYTQGHHWTKRHIAWLSTIEFTDPMLTNVFESYFNQMIYCIGRLENLDKEVELLADSQEYKEVVGLLRCFHGIDTLTAITIITEIFDFGRFESARDLMSYLGLTPSEDSSGDKQKKGSITKAGNKHIRRLLNEASWHYRHRYLPSKVLRRRRKEQPGWAVEIADAAGRRLSKRHRHLVIKGKMPCKANIAVARELAGFIWFMVTQYQARKNTKDAA

SEQ ID NO: 483004 - protein, 367 aa, unidentified
MKKISTVAAKQSKNFREQKLTIGLDLGDRSSWYCVLDEAGDVLLEQKLGTTPKAMKEVFGGMPRSRIALETGMHSPWVSRVLSELGHEVIVAHARNVRLIGESRRKDDRFDARTLARLARIDPQLLSPVQHRSAQAQAHLMVIRARAGLVRVRTSLINTARGLTKSYGERLRGCSPRNLNAETARQLSPELQAALEPLLAAIESLSQRIYEYNQQIAKIAKESYPQVARLEQVKGVGTLIALTYILTLEDAQRFRKSRDVGCYVGLQPGRRNSGQSEPQLHISKEGDPYLRTLLVQGAHHILGPFGADSDLRRWGLKLAERGGKNGKKRAVVATARKLAVLLHRLWVSGEAYEPLRNSRAVRLPAAA

SEQ ID NO: 483005 - protein, 379 aa, unidentified
MFENITYVALDDHKRMHQVAVLLPGMKREDASTWRVENTRAGIRKMVRKVMKMAPGDVRFCYEAGPNGYVLQRQISQFDRVSCVVVAPSKTPRRPGERVKTDRRDARKLVSLFRSGELHSIVPPLEEEEAIRDLCRCRRTAQKRATASRHQLDKFLMRNGYIYRDGKNWTRRYWEWLRSLKFDDWRRERTFQAYLFGIEQDEDRVKRLDLEIMRAAEEEPYRTLVGFVRCFRGLDTLSAMVLTTELYAAGRFTTAASLMGFVGMVPSEDTTGWDPHRGPITKAGNEHLRRILVEAAKHYRHPERVSKALAERRKGQPDWVIAIADKAQTRLHQKYWRLVLGKGKSPNIATIAVARELVGFIWAVLIEAATTVDAGQSVH

SEQ ID NO: 483006 - protein, 359 aa, unidentified
MSQNEIVTFIQQSGGSMKQDISVLGIDLAKNVFQIHGANAHGKRVLSKRVGRKELIELMSNFTPCVVGIEACTGAHYWARLFNSMGHTVKMMAPQFVKPYVMSNKNDRNDAKGIAEAVTRPEMKFVPIKTVEQQDVLLLHRARELCVKNRTAQSNQIRGLLAEFGVIINKGLSEVRKLPEILDLNKDKLSVKAIHIFERLYEQFKLYEEQVLLYEKDIEAHVKSEPLCKEILKIEGIGPMTASALVATIGDARVFKNGREVSAWLGLVPKQHSSGNKIRLGGISKRGDRYVRCLLVHGARSALRCVDNKTDKKSRWAANKKATQPMNKAAVALANKNARIVWAMMVTGECYRQDEAHVA

SEQ ID NO: 483007 - protein, 338 aa, unidentified
MELYAGIDLHSNNSVVSVLDEQDRTVFAKRLPNDLASIVDVLKSCAGTLRGVAVESTYNWYWLVDGLQDAGFDVQLVNTAAVKQYDGLKYSGDFSDARHLAHLMRLGILPTGYIYPREERAVRDLLRKRGQLVRQRSAQILSMSNLVARDLGAHASGNEIKRWQPEEIDAMPLLAEQKLALKANLTVMLCLDAQVTAVERAVLAKTKPRKDYQALTTVSGIGEVLAMTIALETGDIARFDGPGNFASYARTVNSRRESNGKKKGEGNAKCGNRHLAWAFIEAAHFAVRYDAAIKRWYQKKCASALAVVAIKAVAHKLARACYHVMKDGRPFDVSKAFG

SEQ ID NO: 483008 - protein, 407 aa, unidentified
MWFAGIDWADTHHDAVVIDAAGQRVGAIRVSHNAAGLAKLVVFLRGIGDGDSVTDPDRLACIVETSHGLLITALLEAGLPVYPVNPTTVDRHRKPAGAKTDAIDAYLRARTGRSDRADLRRLTPDSPLIAELKALTRDQDTLIQSQTRLVNQLTACLKAYYPVALELCGKLQQPTTLAFLRAFPTPEQAQAATAKQIARTLRAAGYAPADTKAAEIRQTLREPQLHAAPPLVRAKARLMLALVAQLRPVIDDIAAYDTKIDRLFRQHPDSTAFMSLPRAGARLAPRLLAEWGDDRGRYADARSVQALAGTAPVAVQSGNYARVRKRSACIKPLRNVLYQFAWQSTLAEEWAAEYYQRKRQAGKSHPMAVRALANQWVRIIYALWTTRTAYDQEVFHAAQQAHAPHAA

SEQ ID NO: 483009 - protein, 378 aa, unidentified
MKVTYQTCCGVDVHKSFLVATIVKTTGGIEPSYQKKRFSTFNNSILEFKQWLLDNHCHDVCMESTGKYWIPVFNLLEDKINVVIANPKWVKAVKGNKDDTKDSKWIGDLFRLGLVKGSYIPCKKVRILREYTRYRYKLVSCRSSEKNRYQNALTVCNVALDSVVSDIFGKSSTSIIDYLLEQSGTSINHEEINDVDKMIENIISSNPDFENAVQFLCTIPGVKRDSAITIISETGTDMSQFSSSKRLCCWAGLTPGSNESAGKKKSVRITRAGVYLKPALVQCAHAAVKSDKSPYYKKKYESLVKRRGKKRAIIAIARMILTAIYQMLSTGEQWNPSDLYKIDMPVALVEKQKAKAIKQAKKLLQREGLLPPDEPLAS

SEQ ID NO: 483010 - protein, 341 aa, unidentified
MMALALACRGEPMTKYCIGLDAHMKTCTYRVKDHQGNLVDGKTIPSTREDLDLLLLEHPNAAIVLEATTVSRWIYDHLKTNGANVHLIHPVNIRRTLGRKSDNLDAGFLADAFMLGALRECYVPPADIQVLRELARSRTFLVRERTKIMNRIHAKLRGRGITSPTGSIFSKKNRAWLLEQDRVELPHLAQLIDHLSLAIRNTDQDVVAAMKKTPEIQLLESIPGFGPLTSLVMYSEVGDVSRFPSAEHLCAYFGIVPGESQSSEVMHRGRITRRGSSLARYVLVQAAWMHVTHCPASSVTKSHKRLAKRIGKAKAIVATARRLVKVSYHVLRDKRSFKADW

SEQ ID NO: 483011 - protein, 454 aa, unidentified
MNARKKSSDQKTQKASPISIINPNAAGIDIGDTMHAVAVPDGRSERTVREFGTMTCDLELIVIWLKECNIDTVSMESTGVYWKPLFSLLLQNNIKVYLVNARHVRNMTGRKNDQQDVQWLQQLHSFGLLKSSYLPEEEQEGLRALVRYRHTLIQDSSRFVLRMQKSLELMNIKIHTIISDLMGKTGKAIIEAIVDGERNAENFIPFIDRRIKTDKATIVKSLQGNWREEHLFTLRESYRFYTFYLQEIKACDIAIENQLIHYEAFIQDGNIEEQQSQPVSKFKKTSKNRPGFNMVQYLQRIHQVNVMAIYGLSDISALEILAETGTDMSKWKDEKHFVSWLNLCPNNKISGGKIISSNILKKKPNLASQAFRTAANSICKSNHWLGDYFRRMRAKGGHKYAIVATANKIAAIYYKMLSLKKEFNPVDMVVYQQKYKTAKIAYLERKLQQLKNTA

SEQ ID NO: 483012 - protein, 478 aa, unidentified
MIPFGRVLRFATRTIGLGNPFQTEDHMARKRINKTKKVTLPVMNPDAAGIDIGATEIYVAIPPDRDAEPVRMFATFTRDLNALADWLQQREIRTVAMESTGVYWIPLMQILEARGLEVYLVNAKHVRNVPGRKTDVSDCQWLQYLHSVGLLRPSFRPAQDICAVRSLWRHREALVELATCHVQHMQKALNQMNLQIHHVISDITGLTGLAIIGAILNGERDTQKLALLRDPRIRASHETIAKSLEGDYQQEHLFTLRQSVEMYQQYRKRILECEAEIQCLMEKLEGQADPLSLPPAKDSVKKCKVMKPAKALTLRSEGYRILGVDLTTIPGISVLHVQTILAELGPDHSKFRNAAAFSSWMGLCPDNDISGGRVLWSGTRKVKNRIALALRMAAQSLQQSQSSLGEFYRRMRTRLGAPKAITAAAHKLARIVFRLLITKEPYDDSVFARSEESCRQRAKKRLAAQARELGFNLVPVFC

SEQ ID NO: 483013 - protein, 355 aa, unidentified
MDSRKYIGMDVHQASIFVAVRDAAGKLLMECIIETKAATILEFIQGLHGSLWVAFEEGTSAAWLYDLLKPHVAHLVVCDPRKNALLKAGNKNDRVDARKLSDLLRAGLLTPVYHGESGVRTLRELGRSYLTVTKDLTRVMNRLKALYRSWAIPCAGQKIYAPRHRSAWLEKLSEAGVRRRAEHLYQQLNILVRIRREARRELLTESHKHPANQLLRQIPRLGPIRVALLIALLQTPHRFRTKRQLWAYCGLALQTRSSGEYRFTGGQLQHSKKLPALRGLNANHNHDLKNLFKSAATHASASTDPLGDFYQNLLAKGMKPAMARLTLARKMAAIVLKIWKKGERFDPGQLKRQAA

SEQ ID NO: 483014 - protein, 364 aa, unidentified
MLTQSNKIDFNGQHIYVGIDVHLKSWKVTVLTEKLPFKTFSQDPNPEQLHHYLTRNFPNGIYHSAYEAGFCGYWIHNKLTSLGIKSIVVNPADIPTTDKEKVQKADKRDSQKIAKALRSGDLKGIHVLSSKTLEDRCLVRTRATIVQDLTRNKNRIKSFLNFHGIELPEKFKQTNHHWSKRFMAWLKSIEMAEPSATKSLNLYINEAEHLRMTILEATLGIRELSEREPYAEKIGLLRGIPGIGIITAMIIMTELETINRFGNFDKLCSFIGLIPTTHSSGEKENIGEITHRGNSFLRGALVESAWIAARLDLALNKSYHDYCKRMEPNKAIIRIARKLLNRIRFVLKNNQPYACAVVKENIVQ

SEQ ID NO: 483015 - protein, 423 aa, unidentified
MKYALVRVLPEVPPGGVCAGIDWASADHAVCVVDLAGQVADRFAAAHDRAGIAGLIARLRGRGAAEVAIERGDGVLVDALLAAGLTVVVIGSRQVKNLRSRYGSSGAKDDRFDAFVLADTLRTDRARLRPLVPDSPATLALRAAVRARRDLVAHRVSACNQLRAHLQVAFPGAVGLFSELDSPLSLAFLAAFPGQQAAARLDEQALAAWLATVPRRGNTAPAGVLAARLAAAPRGAAGADAAQAAVTTQLAAATAGLAGRVRALEAEIAAQLAAHPDQHIFTSLPRAGTLRAARLLAETGDCRARYPDPWSLAGLAGVAPVTRRSGTYISHEFRWNVNRQLRDAICDFADGSRHASPWAATVYAAARDRGKDHPHAVRITARAWVLIIWRCWQDGTSYDPAKHRALQDVLTRQAAAGTPQPHR

SEQ ID NO: 483016 - protein, 417 aa, unidentified
MLFVGDDWSEEYHDVEFQEGSGRKLAAARLPEGAAGIARLHAMIAEHLGEDAEAGQVVIGIETDRGPWVQALIAAGYTVYAINPLQVARYRERTRISGAKSDKADAHTMADMVRMDARQLRPVAGDSSEAAAVKVVARAHKTLIWDRTRHQLRLRSALRDFFPAALEAFEDLSAPEALELLVKAPDPVAAARLSIAQISAVLKRVGRYKVAARAEKIQRALRGEQLAQSAAVAAAYGATVRAQAEILLAVVGQVQALEEQVQAHFVAHPDAEIYLSQPGLGTILGARVLAEFGDDLQRYASAKARKNYAGTSPITRQSGKKKIVLARYIHQDRLVDALQMQAYCALTRSPGARAYYDELRRRGEGHNPALRKLANRLVGILHGCLKTRTPYNEATAWSHRAEREPDTVVKPSHPMAA

SEQ ID NO: 483017 - protein, 348 aa, unidentified
MNKFTTIGLDTAKKVFHLVGCDQRGKLVTRKMLRRAKLLEYFANIPSCLVGMEACSGSHHWARELARLGHTVKLIPAQHVKAYLRGNKNDYNDALAIAEAVVRPEMRFVRIKTIDQQDQALVVDKRQQVIDARTQHANRIRAILTERGIVLAKGLHHLKQALPGLLENSDQLLGERFIQVLHQDYAYLQHLDQCLVVYDLQIQCINRDSQVCRQLNTIPGYGPIVASAFSSHIGDGRQFSKGRDASASLGVVPAQYSSGGREVLLGISKRGNSRLRCLLIHGARSVVSKIGDRQDPLSQWLRQLIHRVGIHKAIVAYANKMVRIGWAVIRYGIVYDPDHAAKYGPQTN

SEQ ID NO: 483018 - protein, 388 aa, unidentified
MIFAGIDIAKLNHVASVVSSDGEVLVEPFQFSNDFEGFRSLSLVLDKYDRDKLLIGLESTAHYGNNLVEFLVSKGYRFCVLNPILTSASRKRNTRNVKTDKVDSFVITKTLMMEKHRLFEKQDLDYLHLKALGRSRQDLMKKRTTCKIKLTSFVDQAFPELQYFFNGVHHKAVYALLKEAQTPEQIASMHMTHLSNLLRVASHGHFKKEKAQELRVLAQRSVGSNDSSISIQITQTIEQIELLDRQIDDDEAKIEEIVKAMDSVIMTIPGIRYTEAGMILGEIGDIHRFPNYSKLLAFAGLDPIIRQSGKFNASHTRMSKRGSRVLRYALIYSAHNVVKNNETFRNYYDLKCSQGRGHYGALGHCAGKLVRIIYKLLSEDIAFDPARL

SEQ ID NO: 483019 - protein, 310 aa, unidentified
MAMVTVGIDVSKDRLDVHVLPEGVAFAVARDGAGLADLVTRLRPLEPDRVALEATGGFETVAAAALAGAGLPLVIVNPAQVRHFAQALGKRAKTDPIDAAMIARFVAATRPELRPLPDAATQLLSDLVARRRQIIEMIVSEKNRARRTSVQRIARSIARLIKALEKELAEIDAEIDTGVRGSPAWRETEDLLASVPGVGAITARTLIAEMPELGTLDAKRIASLAGLAPYTRQSGRWIGRSMIGGGRKSVRSALFLAALVAARHNPVLKAFRDRLIAAGKPKMVALIAVARKLLTILNAILRDQKPWQNA

SEQ ID NO: 483020 - protein, 401 aa, unidentified
MTTGTIDVTIGLDVGKTAHHACAMLATGEIIYDKPLPQDEDQLRKVFTDLQACGTVLVVVDQPNTIGALPIAVARDAGCFVGYLPGLAMRKAADLHPGRSKTDRRDAFIIADTARTMPHTLRAVDRDNEVLSALKMLSGFDDDIAKDATRTINRLRSVLTQIYPSLERALPCSIITRPLVLDMLSHYGGPTRLKKAGYQRVHTWMSNRSKKDPTKLVDAIFDGLKAQTVAVPGTTAAEVVIPQLATNIKALLEQRKTIADQVEELLAEFPLHQVLISMPGIGIKTASNILLAVGDCSDFRSAGHLAAYAGIAPVTRRSGTSIRGEFPARSGNKRLKNALFYSAFASIRFHEPSKTYYERKRAEGKRHNAAVMCLARRRCNVIYAMLTRAEFFREIPARVAA

SEQ ID NO: 483021 - protein, 436 aa, unidentified
MKQIVIGVDPHKLSATIEVVDQHERVLGSGRFATDKAGYAAMLGYVAQWSSPTWAVEGSNGAGRSLAQRLVADGEHVVDVPAKLAARVRLLDTGHGRKTDAHDAHAVAAAAVRAKKLRVLSENPELESLRMIVDRRDELTRQRVQTVNRLQRLLAELIPGTSKKDITVLQAKAKIASVRPRDLVGKTQRRIAAEELADLVAVEKKIKTLTKDLKTIVEASGSSLTTLAGVGTIVAARVLAEVGDVTRFADRNRFASWTGTAPLEASSGEQVRHRLSRAGNRRMNHMLHIAATTQIRLDTPGRAYYRRKIAAGKTRMEAMRCLKRRISDAVFRQLLADARADVNRPVGAGPGGHCGASQESSAVDLPPHIDTSDQPLPGPAHPTLPGTKPHANPCAASAPRPSRRRAGAVKVERPTGRTTLTATSAGAHSAAPKPPS

SEQ ID NO: 483022 - protein, 339 aa, unidentified
MQVITIGLDLAKNVFQVHGVDAEGETVVRKKLRRVEVVAFFSAVSPCLVGMEACSSAHHWARELIALGHEVKLMPPSYVKPYVKRGKNDVADAEAICEAVTRPTMRFVPVKSAEQQSVLILHRSRDLLIRQRTMLANALRGHLAELGIIAAQGLRKLPALVEAVCNEEDDRIPTVARQALSVVIGQMQDLQIRIQALERELLAWHRGNEASRRLATIPGIGVITATAIAATVTDPAHFKSGRQFAAWLGLVPRQNSTGGKERLGRVSKMGDRYIRKLLVVGATALIRFARNRATPLTAWADKLLTRRPARLVSVALANKMARVAWAVLARREPYRSAAA

SEQ ID NO: 483023 - protein, 316 aa, unidentified
MTEAGGFVGIDVAKAELEVVVRPSGARWTVTNNASGLAQLQERLQALAPALIVLEATGGYEVAVVAALATAALPVVVLNARQVRDFARATGRLAKTDAIDAGVLAHFAEVVRPPVRPLPDAMTQSLQAWLMRRRQLVEMLLAEEQRRSRAPRPIQRQIDQHVRWLRAQLGAVEKDLAQTLRASPVWREKDDLLRSVPGVGPVLTTTLLGDVPELGQLNRKQIAALIGVAPLNRDSGTYRGRRAVWGGRARVRATLYMASLTAARYNPVIRAFYERLVAAGKPKKVALTACMRKLLTILNAMIARRTAWKPPATVSA

SEQ ID NO: 483024 - protein, 348 aa, unidentified
MSKVRFLGLDVHAHTIAVAVAEPNGEVRSVGVIPNRLEAVRKMVRKLGLVHQLRACYEAGPTGYVLYWQLTRLGVACEVVAPSLVPTKPGDPVKTDRRDAEKLARCYRAGDLTPVWVPDAAHEALRDLVRAREDAKQDQQRARQRLGKFLLRHGWKPPQTIKKNWTQKHLQWLKAQVHFDQPALEATLLDYVYEADHAAERIQRLDQAIDQAIRVAPPEIQTVVQSLQALRGIAQLAAVSLVSELGSLSRFNSPRQLMSYSGLVSSEHSSGNRVLRGGITKTGNAHLRRIVIESSWCYQHRPNICGFLLKRQKALQLDPEMPLPGKLNAVSTSATNTWRPEARTNHRS

SEQ ID NO: 483025 - protein, 324 aa, unidentified
MIDGILDIDVSKNTLDASLSSRNRVRARSVANSSDGWRDLLDWLTTQKIRRVHACMESTGRYSLGIACALYEAGHIVSIVNPAQIRDFARTKLGRNKTDGVDAAHIREYCELFKPQPWAPPSEAHRRLAELQTIRSGIVAGLTEWKNRKGSGMVDSVAQSLADVTISHFSSQLEAVDEAIAQTIDNDSGLRRKRDLLLSISGVGETLAGVVLAELPGPDVLRSSAEVVAYAGLNPRQHQSGTSIDRVTRISKIGNAVLRAALYLPAMSAMRYNPAIVALVARLKSRGRLKPKQIVVAAMRKLLVLCFGVLKTGKPFDPAIAMGC

SEQ ID NO: 483026 - protein, 461 aa, unidentified
MAVRKPKTKAKTQAKVKVGKNQPALTITHPNAAGIDIGSASHYVAVPPDRDDESVREFPCFTEDLNELADWLTACRVDIVAMESTGVYWIPLYELLDARGFKVHLVNARHVKNVSGRKSDVLDCQWLQALMTFGLLSGSFRPEDQVCVLRSLWRQRDMLLKNQARSVQHMQKALTQMNIQLANVISDVVGETGLKILRAILKGERDGHVLAALKNGRIQASAEEIAKSLQGNWRSEHLFALKQALASFDFTGTQLAEVDKEIEDQLHRIETHEGTPGKPQKRPGHGRNAPKFDLRTHLFRLCGVDLTRIDGLDVTTILTVISETGTDMSRFPSDGHYASWMGLCPGTKITGGKVMSSKTKRCANRAAQALKLAAAALRTSQSALGAYFRRLCARMDKPKAITAAAHKLARLIYAMLTKGEEYTDQGQEYYEKRYREAMVKNLTQKAAKLGFTVVPAEQAPC

SEQ ID NO: 483027 - protein, 364 aa, unidentified
MNKNSLSTAVNNYKNNLEQYAHFIAIDWAQSNVALARMKPKQRETKVIEWDRSDLKAVKEYLFNLKGKKILTIEETTSTHWLYVELKDVVDRIVICDPYRNHLLSSGPKNDKIDSKKLCMLLKGGLLNEVFHTCDKLYDQRQLLSAYVDLVKAGTRMQNQRSAVYRSQGMKYTKHEKQEQKERIKSKGYAQLITDWQDRTIDSYFKEKVFFESEIRKVVKGRKEIKNLTQLPGIAYINAFKISALVVDPHRFVKKGSYLAYCGLVWLDKISGNRSYGKRRPRYNRQLKGVYKNAARIAIDGGNNPAYEYYQMLTEKKKLTHKEGTLMVARYLAKVSLAMMKSGKKYDPYRWRKDEIKAKPLRTT

SEQ ID NO: 483028 - protein, 344 aa, unidentified
MSEISMIGLDLAKNVFQVHGVDASGSVVLRRQLRRGAVEKFFAQLAPCTVGIEACGSAHHWARVIGHYGHQVRLMPPAYVKPYVKRNKNDGRDAEAIYEAVGRPTMRFVPVKSVEQQATLAVHTTRALLVRQRTMIANSLRAALSEIGIVAAQGIAGLRELMAKLEAPNEEVPEIMRGALLLLAKHWQALDADERALERQIAKAARADREARRLMEVPCVGPIIASTVLAKVPDATVFHSGRDFAAWIGLTGRDHGTGGKHRPGRISKQGDRMLRALLISGASAYLRHQRTRGVSDPWLRDLLARRPYKVVMVALAAKTARILWAMLVKGEPYREPANAPAAAC

SEQ ID NO: 483029 - protein, 406 aa, unidentified
MKNLNSNVACAGMDVHYKFSNVTFRDAQGEVVSRQRLDHPDRQKLCRRLSQWPAGLPVIMEASFGWGWLSDLMEAYGMKVSLSNCFKVERMRQARGGVKTNKKDADLLSLLGFEQTDWWKVWRAPSEVRNRREQMRFRADLVAMQTAVKSRIHAVFHRHGIFHCFSDLFGAKGRVFLNALCMNNSTHLPAEALAALRGHVKLLDHLRRQLADVTRVLHRQMARTPLTLRLKTVPGIGLILAHVLAAEIGRIERFRNHKSLAAYSLLAPRSNDTGEADPRHSPQGRHLGVRGNRTLKWAWIEAAHGAVRSEGRWRDLFEKVTDGGRKDRGRGHIKVARELVKVTYAVWSKGVDYRDVRPARGGRDTSRSKSKSKSKSMKKCKRKTRRKPSRSETGQLSHPMVHALLA

SEQ ID NO: 483030 - protein, 465 aa, unidentified
MGKGSGSGMTRGDRRRNARRERLRGLLPRDGAVVGIDLAEEKQALAVIDHDVRVLARKTVRVKAFRLGEALDWAVGQARAKGFAQVAVACEPTGPRWMQVQRLCAERGLPLVCIQPLVSHIAREQQDYTTHKTDESDCVMIARLAVELHCYVPEELDETWAHLRHLGRRRAQLITAQTASGQRIMDFLSVAWPAVTGTCVDPLESRTWLAALEVVTGRCGADPGKLAALGREQFTALVRGAVPGWGITRAHGPICARVFAALTDTEGVVGWSRRGLLRRVADELGDLRRTRSQLRQAGADMAAVLAGLGLSRLAGIPGLTAVGAAAILAETGDPRRYDTSSSLVKHAGMSPSDNASGAFWGQAHISRRGRPGLRLVVWRAVWPMLRYNPVMAAKYQVMTRAADTAAAAAGPQPGTAAAAAARARRAKARVACAASLLRWIYCMTVHGTSWDPAVAAGAASIPAAA

SEQ ID NO: 483031 - protein, 353 aa, unidentified
MKLDKYMGIDLHQATSVVVVLDANGKVVLETIVATEVGPIVRLLQSLNGPLHVTFEETTQAAWLYDVIRAYVQEVVVCDPRRNKLLGESSKADKPDARKLAELLRAGLLRSVYHGHEATRRLKELVRAYETLSIDTMRTMFRIKAVYRGRAIRTPGSGVYQLKQREQWLQRLTEPGVRQRVEWLYEELDHLRGLRKRAKQAMLTESRKHRAFTLLKTIPQLGPIRCALIVATLDTPHRFRTKHQLWAYSGLAVVTRTSAEYEIKAGRVVRSRKPIATRGLNRNGNRRLKDVFVAAAAGGTQAEPYRSYLRGLEQKGMRAEMARLTLARKIAAVTLSIWKKGETFDPKKLNWTT

SEQ ID NO: 483032 - protein, 383 aa, unidentified
MENRPLKFGARRIFGLDLSKKTLKACRLDEDSGFEKQNIFDEKMTDDGRHHLASRLRKGDYVAMEGGSSTSFLARYLMENTEAEVFVLNPCKLHIIFESACKTDRQDCIKIAKYIRDTNPSNWCLIPVPTYEETSLRSLINSHISTKQERTRAINQLHAFFNLNGISFLKKSDLGDSDRRHDLVDHYFSQDDLRGMQARLMLQDIDNIELSADGYEEMIRKALLSRPRESLIWMSIPGVGPLTALACVAYIGDGKRFSTPDQLRNYVGLVPRIDQSGIREAIYGVNHYGCMPVRRNIIQAAWSVSNLSFDCRFRQRWRELKAAGKKGQKIAVKVANDMLTIGWTLLKKGELYNGLGDFSYLKRKLRTYKMTAIDSSCFDECLK

SEQ ID NO: 483033 - protein, 376 aa, unidentified
MGDYSEAFVGLDTSKLRNAVAIADASRGGEVRFFGEIENTPAATAKLVRKLALKYKRLTFCYEAGPTGYGLHRQIKDLGFECVVVAPSLIPKRPGDKVKTNRRDALSLAKLLRADELTPVWVPDGRHEAMRDLTRARETAMLDLRTKRQHVSAFLLRLGRPYPESKKTWTKAHVSWIASQKLEHPQQRLVLEEMMLAIRQAQERLARLEQAIAAAVPEWSLAPVVTALMAMRGIDLVSATTLLAEIGDLSRFRTPTELMAYLGLVPSENSTGDTVKRGPITKAGNRRARRMLVECSWSYQHPPRVGQAKQPKVDAAPPAVREIAWKAQCRLYRRYRTLIRNGKLKTVAIVAIARELAGFIWAVARAVTTAGVAATA

SEQ ID NO: 483034 - protein, 384 aa, unidentified
MKTNSSAPQTLYLGLDVHKAETVISILESDRDAEPRHYGNISTTQFSLERAIRRIAKKQNRELSDLHVCYEASGCGFWIARRLLQMGVRCDVIAPSLIPVKSGDRVKTDKRDAMKLAKSLRSNDLVPVNIPDSVDEAIRDLCRARTDAVDDLRRAKTRLLAMLRRLGYNDTGKTHWTEAHLRYLRDLRLPDAAHNRVLEDNLTTVDFHHKRIARLEEAMLQLLSDWQRKPLVDALMAFKGFKLVAAMVTVSEIGTFSRFEHSKKLMAFLGLVPTESSSGKKQSRGGISKCGNPHARWILIEQATHYRVPPKVSAQLSKRQEGAKSWVKELSWKTQTRLSHRFSTLRKRQIHHNKIKVSVARELTAFIWELGTRIEAKQAATTQN

SEQ ID NO: 483035 - protein, 402 aa, unidentified
MNAVGIDVSKGKSMVAIMRPFGEIVSTPFEIKHTSSDINSLVKLIKSIEGESRIVMEHTGRYYEVLAHQLSEANLFVSAINPKLIKDFDNDSLRKVKTDKADSVKIARYALDKWQNLKQYSVMDELRNQLKTMNRQFGFYMKHKTAMKNNLIGILDQTYPGVNTYFDSPARSDSSQKWVDFASTYWHVDCVRKMSINAFIDHYENCCKRKKYNFSKSKAEEIYGKAKELVPVLPKDDITKLIIKQAVDQLNSASITVESLRTLMNETASKLPEYPVVMAMKGVGTSLGPQLMAEIGDVSRFTHKGAITAFAGVDPGVNESGSYEQKSVPTSKRGSSDLRKTLFQVMDVLIKTHPQDDPVYQFLDKKRAQKKPYYVYMTAGANKFLRIYYGRVKEYLASLPES

SEQ ID NO: 483036 - protein, 429 aa, unidentified
MNYNTQNAKIASITEKTLIIGIDVGSETHYARAFSWRNYEYSKKPFAFSNDEAGFAAFKEWMDDIVEKHGMEVIIPGMEPTGHYWLNLGAYLQEQGMKPVHVNPHHVKKSKELDDNNPSKNDRKDPKTIAGLVNEGRFSYPYIPTGIYAEIRNLSNLRIQTQEEITRIKNRMARWFSIYFPEIKDVYRNPDAVSGLMVIKQAPLPCDIRELGVEGVNKIWRDARLKGAGIKRATTLVTAAEHSIGNTEAPRSARKEIRNLLEDYEGYKKRMDELMEEIEETLCEIPYIDKLMEINGIGIKTVSCFIAEVGDIGRFDNPKQVQKLAGYAIVADSSGKHNGESRISHRGRKRLRYALYEAAISVIGKNKEFKKIHSYYRTREKNPLKKMQSVIAVACKLIRIFYTILTKGVDYDGQKMLNDIVRPEIQPAA

SEQ ID NO: 483037 - protein, 346 aa, unidentified
MDKFDYAGIEVSMKELLVGVSRNGKDVTTRTFTNTAAGHKQIARHLARKGRTTRVAIECTGVYSIDLGMALSSYDGIELMMANPRSVRDYARALLRRSKNDKEDTLVLVEYAKNMPFRRYIPPSETALKLRSISRQVNAFINQITQDKNRLHATLLDSTASKLVAKTLKKAIRDTEKLVSKLEAAAIELIQSDPELNHKFELLITVKGIAERSGIRILGELACLPEGLDPRQLTAMAGLDPVVYKSGQSVNKRRGISKQGISILREALFMPAFCAITKDKNVRAFYLHLVEKGKLRMVAVVAVMRKLLHSIWGMFKNNEPFNSAKFYASPATTFFVENSGFALSEA

SEQ ID NO: 483038 - protein, 469 aa, unidentified
MTKSSTVFVGMDVHKESIEIALAQEDEVRRFGRIAGDAASVDRAVRKLRSAHRDMVFVYEAGPCGFWLYRRVAGQGLKCMVVSPSMTPKRAGERIKTDRRDAVKLARLARAGELTAIYVPDERDEAMRDLVRAREDAVSMQRQARQRLQALLLRNEIRYPKRTAWTEAHRRWIAHIKLAQPTQQIAFEEYVQAIQEAGARLQRLSSAITAALESWRWKPVVEALQALRGIQELHAVRIVAELGDLTRFDSPRGLMGYLGLIPSEHSTGARRRQGGITKAGNSSARRALVEAAHVYRFPARVSRGIAKRQSALDARICALSWKAQVRLCGRFRTLSARGMQRNKVVVAIARELSGFVWAIAQPLRMAALRHSPIGFGWLAKHGIPKELTRSWLNPLLADRGVRRDVRKLLKGAVSPRSGMTLGMATVPSFSSVRPSSSVKASSAACAWAASAWAAARAAWWPEGVCCAAS

SEQ ID NO: 483039 - protein, 356 aa, unidentified
MTKVTTNFSDQTIYVGLDVHKRSWNAALYLNDQYLRNIHQPPSPQALYKFLQTNYPGAEYVCAYEGGKFGYWIQRQLNHNGVKCIVVNPADIPSTHKDEVSKTDPRDARGIAMALQCGQLRGIYIPPQQQEADRSLVRQRKKIWRDLVRCKNRIKGFLDYTGVELPDKFNNSNWSKNFLTWLKEIKFEYNSSRTTLDYMIKEMELLRKELLSISNDIRKLMRSKEHKKLYYLLRTITGIGPLTAALLITEIGDMKRFSNFYQLNSFIGLLPSEHSSGERESKGRLTIRRHRQLRSDLIECAWTAKRTDPALSLFYSEQLKRGKEPKLIIVKIARKLLSRIRYVWLSEKPYERGVVK

SEQ ID NO: 483040 - protein, 361 aa, unidentified
MTEAIRWVGLDVHATQTTVAVIDKASGELQRAKLRGSPSMVLDFIAGYDGRVIAVYEAGPTDMTLARQARALGIDMRVCAPGLIPRKPTDRIKTDARDAEILARQLAAGGLSFVRVPTIEEESLRDLVRAREDVREDLSRARHRLSKFLLRRDLRYTRSGTWTQKHLHWIAQQTFDDVSAQTTCAEYLNAVRVLIARRDLLEKTLDEALATAPYAQTIYRLRAFRGIDTLTAFGLCAEIGDFARFAKPGQLSAYLGIVPAEYTTDTKRRLGSITKAGSSHARRLLVEAAWHYRRPPRVGEVLARRQHGVDARVVAIAWRCQQRLYDRHRKLRDERRKPAGVVNIACARELACFVWEAATIT

SEQ ID NO: 483041 - protein, 337 aa, unidentified
MSKITLIGIDTAKQVFHLVGIDQHGRYELRQKRSRSKLLATLAQRAPCEVVLEACAASHHWARQIRAYGHRVRLIAPQHVTPYRRGQKNDYRDAEAIVSAALSPGMHFVGVKGVEQQAEQALHRVRSRLLSHRNAAANELRGLLGEYGYAFGKGLKSLRQGAIDFIDRGEAADLGLSELIRDVLEELDGLEARMKQYESQIRQRVRQDELSRSLRTELAGVGALSASALRVKVADVRDFANGRNFAAYLGLAPGHRGSGGAVRVGKLPRGRDRYVRQLLIHGARSVVSRLGSKQDIQSRWLRALVERRSFNTACVALAHKNARQAWAILARQQALAA

SEQ ID NO: 483042 - protein, 412 aa, unidentified
MEVIASRCAGIDIGKETLKATVRVQGGRGRKTRREVRTFDTTTGRLLELRDWLVAEGVTLVGMESTGVFWKPVYYVLENVMECWLLNAQHLKKVPGRKSDVSDSEWIAELVAHGLVRPSFVPPPGIRRLRDLTRYRTALTQDRTREIQRLQNVLEDAGIKLDCVASDLMGKSARAMLAALIAGERDPRVLAELALGRMRPKVGALQEALVVRFDDHHARLCSKMLAHIDDLTATICELTGEVQSEIEPFQHSRKRLKAIPGVSDRLAENLIAETGGDMSRFPTPQQLASWAGMCPGNNESAGKHFSGRTRKGNRWLRGALGEAAAAAARTKGTYLSARYRRLASRRGKKRAMVAIGHDILVAAWYIMRDDVDYADLGADYFDTHAMDPRRKATRLTEQLQALGYRVTLEHVA

SEQ ID NO: 483043 - protein, 410 aa, unidentified
MSYNVAAIDVHKKLLVVVVADAAEPDVTLQARRFGAGAAELRNLASWLGDLGVAEAVMESTAQYWKPVWMELEPHMRLHLAQAQSNRAPKGRKTDFGDVKRLLKRFVAGELMLSFVPGTEQRAWRMVTRGRLQLVRERVHLQNQIESLLEEGRIKLSSVISDLLGASGRRILRAMANGETNAEALADLGDQHLRCGREVLVDALTGSMGGIHRQLLEQHLDRIELVDRQIEELNKLAAAQMQEHQAAVVRLIEVPGIGAEAAQEILAEIGPAAAAFPSAAQLASWIGVCPGSSQSADHNHSGRSAKGNRFLRRLLCQAAQAAARTKGSRLESLFKRLIVRLGYVKAIWAIAHRLCRIVWNILHQGARFIEHGDAINPKAVQRCINHHLKALRRLGYQIPAATAPAVTVAR

SEQ ID NO: 483044 - protein, 405 aa, unidentified
MKQPTTLHYAGVDWATRTHAVCVVDHTGAIRARFEVPNTGKSFTGLCKRLGKLGVAGVAIERPDGPLVEAMLDQGLRVVVVTPRQVKALRSRYGASGAKSDPADAYLLADVLRTDGHRLAPLTHDSDPTKVLRALSRTRKDLQDARVALCNQLTSQLERCFPAAIGLFSELHSSTAIAFLRRYPTSHAAARLTKATLAAFLRRIHYPGRTPVATLLGRIQTAPAAGISPGEAAGRAVCVLALLDAIQVAARQERELQAEIVERLETHADAAIFTSLPKAGHGVRAAALLSELGDVRARFPDNDCLAALGGAAPVTITSGKRRVVKFRWACDKKLRNAIIDFADDSRHASPWAAKVYGDALARTGRHQHAVRILARAWIRVIWRIWQDGVAYDPAKHRGAVRLLAA

SEQ ID NO: 483045 - protein, 338 aa, unidentified
MKEQFYAGFDIHKKSIAICVKNQMGETIQEKSIRANPIAVARWVENAPKPFAAAMEATLFTGWVYDELCRYSDDVRVGNSVMLSYISKSKNKSDKVDAKKLADLLRVDLIPQVYMLPRYARDIREFLRYRNWLVRQSVRYKNKISGLLMMNGIEYNASKLHNKGYFYDFLDSLNNEKKLVELLRLSRSQLEILKEFERRTKKLLYKQPGIKERVELLTSVPGVGEITALTWALEIWDPHRFSSSEKAKSYCGLTPSQKESAGKEKRMPISKQRNKHIQWVVVEASKIAVHRVKEPELVQIYQKVAERKNRNAATMAVARKLVEWLLAVDKRNTPFRAR

SEQ ID NO: 483046 - protein, 324 aa, unidentified
MQGKEPSEQETMKITAGIDVSKAWLDAHVLPADEALRVPNTAVGIAKLKRWLVRHKVELVAAEATGKWHRLLCRSLHASQIPVAITDPYRVRQFAKAQGIAAKTDRLDARVLAQFALVMAPPVRPLAPQVLEELQELVTARQSAVAEATALKNQRGAAESVFLKAQLARRIVRLKTDIRAIERQCSKSIAADAVLARRLAILTSIPSFGRVVAITLIALLCELGALGKKQIGSLAGLAPVANDSGQRRGVRTIWGGRAAVRTMLYLAAVTASRCNTDMKAFYDRLTLTKPPKVALLAIARKLVILANTLLAADRLWQPTAPISA

SEQ ID NO: 483047 - protein, 351 aa, unidentified
MTRKTDAVVASTIGIDTGKNTLHLIGLDDKGAIVLREKLARGRIAARLANVPKCLIGIEAGMATHCVARELIALGHEVKQVPPVYARPFRQGHKNDFRDAHAVAEAVQRPSTRCVPVKTDDQLDLQALHRVRSRLISERTAVINQIRGFLLEHGIPVRQGLRFLRQQLPDILAKRIDVLSSRIIRIIEDLSGDWRRLDERIENVTEEIEELAHGTEGCRQLMTVPGIGPIIASAMVAAIGSGTAFARGRDFAAWLGLVPKQMSTGDRTILGRISKRGNRYLRTLFMQGARVILLRPANWAKHSFGPWLAAAAKRLHHNVLATAVANKLARIAWTVLVQARSYETRVTSEMA

SEQ ID NO: 483048 - protein, 354 aa, unidentified
MSIVAHSRPFVVGVDTHAKNHVYAIIAAGTGELIATRDFPTTGAGNNRSIAWVARHTGADLATLWVIEGAASYGALLAGAAGAAGYQVAEAARMDARHGVGKSDPLDAHRIAAAVLPLEEQQLRRPRLNEGVRAALQVLVTARESMTTERTRAVNALTALLRVNDLGLDARKPLTGTQIGDVARWRARQEPLAMSVARSEAVRLAKRITELDADIKTNNSRITELVEISEAAPLLQETGFGPVTAAICLTVWSHHGRVHSEAAFASLAGVSPIPASSGNTIRHRLNRGGDRTLNRALHLIALSRMIFDNETIGYVQKRQAEGRTKKEIRRCVKRYLARRIYRTLNAANPGICHA

SEQ ID NO: 483049 - protein, 346 aa, unidentified
MTIVEDTRVITGGVDTHADMHVAAALDSIGGLLGVREFPATAAGYAGLLGWLRSLGNLALAGVEGTGSYGAGLARYLAAAGVRVVEVDRPDRQDRHRQGKSDPLDAVSAARAAQSGRASGAPRGRDGAVEAIRALMVAKRSARQERTQAVNQARALIVTGPEELRARFAQRSPAQLIEAIAALRPRPGDVPGYATRVALRELGRRAQFLDGQLARLDELIGPLVTERAPGLLALHGVGPDTAALLLVAAGDHPERLRSESSWAHLCGVAPIPASSGKTSRHRLNRGGNREANSALWRIVITRLKSHPATLAYTERRSKEGLSKREIIRCLKRYAAREVYHQLRDGA

SEQ ID NO: 483050 - protein, 365 aa, unidentified
MKILAIDLGKDKSVFVEYITGSTDPKQHTYGTIPTDPQHVHDLLAKTRPDRLVIEACPSAGWVHDLAAAMDIQTQVANTNDERWQWRRAKKKSDRVDALKCAQMSEMGCLPTVHMPNPKVRQWRSLIEYRHGLVDRRTAIKNSIRSIFHRQGERLPSGQKAFGIAGIAQLKKEARPLNQCSALELWRGQLQVELEALESVQKQVLEVEAKLADLAKENQRVQLLKSAPCVGPRLSELVVAVLDEPGRFKNAKQVGAYAGLTPRQWQSGKSVREGHISGFGHPLLRELLVEISWLGVRYNTWMKSVYENVRRGSDKRKKVAIVAVARRLLIRLWAMLRDGTKWKEPQVKMRQVAQINDVTPQAVLA

SEQ ID NO: 483051 - protein, 324 aa, unidentified
MTTKAEVHVGIDVSKARLDLAVLEGKRIEQYSNTVGGIKELVEEMMELEPALIVVEVTGGYERAIVNALFEAGLRVARVSGYRARQYARAKGLLAKTDPLDAMNLADYGKHVQPRLFEAKSEQGQLLSGKLARRRQLGEMLKAEKNRLRLAYGEIGPSIERVIEFLQGELKQLDEEIRAYVDNDAEWLEQEQLLRSVKAVGPVTAVTLLAELPELGKLDNKQIASLVGLAPINQDSGKRSRYRKTGKGRPSVRSVLYMAVLTGIRYNPVIKKQYDGLVARGKVKKVALTACTLAPHASAGVRKLLTILNAMVRDQVPFRQTVMA

SEQ ID NO: 483052 - protein, 357 aa, unidentified
MPSSDVKYIGLDVHKEAISIAVLNGAGKLVLESIVETKASTLLDFLHGLRGELHVTLEEGTWAAWLYDVLKPHVQEILVCNPRRNALLKEGSKSDKVDARKLAELLRAGLLRAVYHGENGLRTLRELARSHEVISKDLKRVMNRTKALYRSWGIPCTGTQVYGRRHREQWLQKINEAGVRRRAELFYQQLDGLQALRRTVRGELLAESRRHPAVKVLRQIPFIGPLRAAQLVALMQTPHRFRSKRQLWTYIGLAVETHDSAQYRYVDGQLQRSKKPQQVRGLNQNHNHAMKEIFKSAALSATLRAGPFQDCYSGLLARGMKPELARLTLARKIAAITLTLWKKGEHFDAKYVKSQAA

SEQ ID NO: 483053 - protein, 344 aa, unidentified
MNYFVGLDVSLRSVALCVIDGEGAIVLERTLDCEVEAIDACLDKFGKQITKLGFEAGTMSQTLFHGLRAAGYDVVCMEARHVSAALSAMRNKTDKNDARGIAQVVHTGWYRPVHMKSRESHYIRAMLTSRKAVLSKCIDLENEIRGLFKVFGIRLPKTLAHHKFEDCVRPIIEADEGLSFALLPMLEARTAIYVHFREMDKRVKHFAAQDKVCLLLMTTPGVGPMTALHIKAAIDDPARFTSSRLVAAHFGLTPRRFQSGEMDNPGRISRAGDTDVRASLYSAANSMLTNTRRMSPLKAWGLRLVRKKGRKRGTVAVARKLAVILHRMWLDGTPYRWDDEEVAI

SEQ ID NO: 483054 - protein, 336 aa, unidentified
MQQKLIVGVDVSKATLDCCFKPSGVILQVNNDVKGFKKWLLELKLLCKSPEAVLVIMEHTGQYSIRFERFLRSKAISYCKVPAIQIKRSLGMIRGKTDKVDAVRIADYGWLRRDSLLADPLLQEDIEELRMLLSLRQKLVKDRSGYIQRLKEMKAAGNCQACDCQVSIQQQLIAYFNKQVAVLEARIKSLIDSSKELADNCRLLRSIKGVGWIVAAYMIGCTDNFNRFRCARKFNCYAGLAPFKHESGSSIKARARISHLANKTAKTLLNLAAFCAIRCDPGMNQYYHRRIAEGKQKMQCLNIIRSKIVARIFAVIKRQTPYQPFAVNIINPTLKN

SEQ ID NO: 483055 - protein, 351 aa, unidentified
MIVIGIDPHKRTHTAAAVEQVTGELVDELTRPAREQGHGELVAWACSLADQRLWALEDCRHVSGQLERFLLARGERVVRVPPKLMAGMRRSARSRGKSDAIDALAVARGALREPSLPAAQLEGRSREIRLLCDHRDDLVGERTRIQQRLRWHLHELCPELELPAGALDRQVWLQRVARRLARLEQTTQVRIGRELVRRISELSRRANELERELEALVRSEAPSLLELIGCGTLTAAKLVGETAGASRFASDARLAMHAGVAPLDASSGDQRRHRLNRSGNRQLNCALHRLAVNQGRWHPGAAAYLERKQAEGKSRREALRCLKRHLARVVYKLLVDVNQPTAAPPAAFALT

SEQ ID NO: 483056 - protein, 342 aa, unidentified
MSFYCGIDLGARESQICVINKRVKKVFEEKTRNNLEHIKQVLAPYKADLQIVVESTFNWYWLVDGLQAAGFKVVLAHTLGLHMITAAKVKTDRRDAFALAKLLLAGVIPTAYIYPAETRPVRDLLRRRARLVQVRAGEYGSLRRLLLRQGILSRQQQEIKRAEEADLEKWFTHPLVRLHASQELERISLYSQQLAKLETTILEQAKREWAFTQRQQLPGIGPIIALTIFYEMGELGRFATAKDFSSYCRVVPGVAQSGQMNRRGRGSKQGNPYLKWALSQAAVHAVRCYPGVRRYYERQLQRHRGRARQMVVYNIIAHKLAQGVYHVLKERTEYREELLFGR

SEQ ID NO: 483057 - protein, 412 aa, unidentified
MEPIYTSCCGLDVHKKSIQACVRRIGKDGKVQQEIRPFGTMTRDIAALADWLSDEEVTHVAMESTGIYWKPVYNILEGRFTILLVNARHVKNVRGRKTDVKDCQWIAQLLQCGLLKGSFVPDRSQRELRDLTRHRSKLVDQRSSVVNRVHKVLEDANIKLGAVASDVVGKSGMDMIRALVEGWQDSSDMADLARGKLRGKIPQLRLGLEGHVTNHHRFMLGQLLDQLDYLDRQIDQFSQRIEEVSRPFVEAIKEVARLPGLQKLASENVIAEIGCNMDQFPSADHLCSWAGICSGNNESAGKRKSGKTTKGSKWLRAALVQAAWAASRKKDSYFHAQYGRLAGRRGKKRAAIAVAHSLLVVIYHVLKNHTEYKDLGRDYFDKLNSRRLVPYLVKRLKNIGYEVNLVPIESAG

SEQ ID NO: 483058 - protein, 466 aa, unidentified
MTAGNKLWRNRKERKEWARRLRSEDPGLEVLHPHAAGIDVGNSAHYAAVRPDRDPEPVRRFECFTADLYRLAEWLQSCGVKTVALQSTGVYWIPLYEILEDRGFEVYLVNARHTKNLPGRKSDVQESQWLLKLHTYGLLNNSFQPPAEIRVLRTYWRQRAEHVSGAATCIQRMQKALTQMNLQLANVISDLSGLTGQAIVRAIIAGERNPQKLAELSHPRIEASREEIAKSLEGNWRPELVFVLRQEVEMYDTYQRRIAECDQQLQKHLASFGDTVLPQSPEAEPRKRKAKPTKNAPRFDLGSELKRITGVDLTRIDGIDVMVAQTLLSEVGIDMSRWNTEAHFSSWLGLCPDNRISGDKLLGKGTRRVVNRAATALRLAARNLIRNRSYLGAQYRRLRTKLGAPKAITAMAHRLARLVYRMLKYGQRYVDKGTEYYENRYRQQQIHLLQKKAAKLGLQITVAVQS

SEQ ID NO: 483059 - protein, 320 aa, unidentified
MTTIKPTLGIDISKNKFDVALFINNKLKHKKFPNHLKGYTALLDWLKHQTAANVHVCMEATGIYGEALAEFLYDAGLRISVVNPGRVKGFAQSEQLRTKTDKVDAGVIARFCAALEPDVWQPQPAEIRQLRDLVRRLEALHAMHQQESNRLEGAREFIAEQLQEHIDYLNAEIKKVKKMIQQHINNHPDLKQRKALLESIPGVGEATINVILSEFANIMQFKNAKALAAFVGVAPRIRQSGTSLRGRGTMSKMGRSALRKAFFMPALVSLRHNPIIIELKLRLTAAGKSKMAIVGAAMRKLIHIIYGVLKNGVPFDEKFA

SEQ ID NO: 483060 - protein, 392 aa, unidentified
MIYVGIDVAKDKHDCCIVDSDGVIINDCLRICNSSEGFELLYTSILSALSGQNISNVKIGLESTGHYSTNLQNYLYAKGFRLYILNPLATNLFRKAQTLRKTKTDKTDALVIAKMLFSDDAKSYSPVSYQIQELKSLTRHRYRMIGYRSKLKISITRLIDIIFPELPKHVWSIHQNSSYCLLTELSSPKDIASCHLTKLTNILNKSSQGRYGKAKAIEIKEAASCSIGMSVSSLSFELKQTIRLIQSVQTEIDALDAQINKVVIETNTPLMTIPGISYTLAAIILSEIGDIDRFTTPAKLLAFAGLEPSTYQSGKYNASHTPMVKRGSTYLRWAMLTASRTVTMRDETFALYLSKKRDEGKHYYVAMSHVAKKLTRTIFYLLKTNTAFVPQM

SEQ ID NO: 483061 - protein, 509 aa, unidentified
MQRGRITLWRVSVVGIARGRDWFRSSARILFGDAVGTVFPLGRLVLQKTIGLPLAGNVRKNIKLIAMKALPVLDPKAAAIDVGSEKLHVSIAGDTPKIFGTFTSDLEALRDWFKAQGVRTVAMEATGVYWLYLYEVLEAAGLAAVVVNGRHVQNVPGRKTDMADCQWLATLHAHGLLRGGFVPPADIRRLQDYQRLRADHITGAASQTQKMQQALERMNVKLHDVISDLTGVSGLKVVRAILAGERQPDRLLALCDEQIQKKKAAAVRESLRGCWKKEQLFALRQALELWETYQQKIRDCDRELEKLLQELAGPQSPVGGLGVGPVQLAPVKGPGKNGPVIERLGELLARICGGRDATQIPGLSTYMVLQLISEAGTDMTRWPTEKHFISWLGLAGGRKQSGKRKGSIKAHRNRAGRMFCAAARALAQSVDKALGGFYRRLRGRVGGLAANVALARKLAQLFYRLLRHGMQYVEKGLRDYEAKVLETEARLLRKLAKKQGFTLVAAAAN

SEQ ID NO: 483062 - protein, 381 aa, unidentified
MEMKVQENPEGLAELGHWLNQSRAEQVELWAAIEKPHGRIVDFLLDHGVVVYPVNPKVLDRARDRFRMSQSKSDPFDAWVLSDFLRTDHGHLRPLAPNSEQAQELKLLTRDQQRMVRHKTRLLNQLKFTLKEYYPRPVEVFGDLESRVAVDFLKQYSTPTALSKLSRKQWSRFAQQHPHLGQARSTKLWEELKKPQLVVPDHVVRAKAQLLEVLLDQLEASLRSIEKYSDKVERFFASTPAARLVEKLPGGKSGTLLPALWAELGDAPARWESFKHLQAEAGAVPVTKLSGKSRIVEFRFSCNKQLRYAVYWFAFISINRSEWAKAFYRDQRARGHSHPQALRALGAKWLKIIFVMWRDHKPYDETHHLANIARQKLRQAA

SEQ ID NO: 483063 - protein, 464 aa, unidentified
MRKARPWGKKQGQKIVEVTAGLQTLHAHAAGIDVGHAEHCAAVPAGSASPPVQTFGSFTADLHRLAKWLVGCRVETVVMQATGVYWLGLYQVLESYGLQVYVVNAKYTKTLPGRKTDVQECQWLQQLHSFGLLNNSFLPPEEIRVLRTYLRHRESLVAEAGRCLQQMQKVLIEMNVQLANVLSDLSGVTGMAILKAILSGERDPEQLAALAQPGVRASRKEIAQSLEGHWRDDRLFVLRQTHDLYFFYLESIRECDRQIAAHLQTLQAKVDVQAHPLPEAPPPQRLPRRKHIPQTNLRAELYRITGVDLTRIDGVQVQTAQVVISEVGVDMTRWPDEHHFASWLGLSPNNHITGGKVIRRGTKKVLNRAACALRLAAQTLHRSKSYLGAKYRRLRAKLGAPKAITAMAHHLARLIYRLLRFGTAYHDKGVEHYERQYRENELKWLQKHATRLKMQVVPSPELAG

SEQ ID NO: 483064 - protein, 319 aa, unidentified
MNPEIFIGIDVSKAWLDVAQLPRTEHSASLPVRVANEEGMRRVLVEQIRQLGVTLVVLEATGGFETALASQLCAVGVAVAVANPKRVRDFARAAGIVAKTDKLDAQVLAAFAQRMRPQVHALPDEAQQEITELVDRRAQLVSMRAQEKNRLATVRPVAVKSVREHIAWLDARIGQIERELDGRLKDSPLYQPRYELLDSVPGVGRVTITTLLGRLPELGNLDRKRIAALVGVAPFADDSGKRRGQRYVQGGRADVRCVLYMAALSAMRCNPQIKALYERLRAAGKLFKVALTACMRKLLLILNAILKTGQPWRATPVAA

SEQ ID NO: 483065 - protein, 346 aa, unidentified
MRYSTTVGVDLAKNAIQISVVSGRGKEPVNRSLTRKEFAEFLGKQKPSLIAFETCATAHCWARAAVRLGHEARIIPAKAVAPFRQGHKTDSNDALAVAEAARRPNIKDAPIKTIEQQGLQANLRARDRLIQECIAQSNHMRGILLEFGIAIPRGFVALLRTLPEVLEDSDNELPDFYRPTLHRMYHRMLELREDIDAMTREVGQLVKSHPVCGRLTDIEGIGPIGAMSLCATLGSGEAFNKGREASAYVGLTPRQYSSGGKANIVGPGKYVGNRKLRSVLIQGALAYVYRMKEPRSTKDRCLEALIERAGPRRAAVALANKNVRTAWALIAQRTEYQRRGQLEMAA

SEQ ID NO: 483066 - protein, 328 aa, unidentified
MGRICEPVFESPSSLLRRFYPVADCIGIDVSKHALDWCVGSEGRIQHTRNETRPIAGLVRRLVDLDPERIIVESTGGYERKLVLKLAEAGLPVVVVNPRRVRGLGEGMGILAKTDALDARLLALFGEKVEPPIRPIMQGTDRLLADLVARRRQLISIVVAEKNRRDTAAEPVKRTIDAVLQTLDQQIRQIDQKVDKMLLADAERAELSELLQTVPGVGPGVARTLLIDLPELGHLGRREISSLVGVAPFARDSGTIRGSRRIRGGRASVRTALYLAAMTASRFNPVLRDLYQRLRHAGKPPKLAFVAVARKLLTILNAIARERTAWQA

SEQ ID NO: 483067 - protein, 345 aa, unidentified
MDVHQAMTVVVVLDADGKVTLETMVPTEAAAIIRLVQGLSRPLRVTFEETTQAAWLYEVIRAYVTEVIVCDPRRNKLLEDGSKADKVDARKLAELLRAGLLRSVYHGHEATRNLKELVRAYETLSIDTQRTMARIKAIYRARGIQTPGRGVYQPKQREKWLELLTEAGIRQRIAWLYEQLDQLKPLRRKAKQAMLAESRGHRAVSLLRTIPQMGPIRAAFIVATVDTPHRFRTKRQFWSYVGLAVVTHMSSEYEMKAGHVVRRRKPVATRGLNHNCNRRLKEVFISAATGGSLHEPYKPFLERLKQNGMRAEMARLTLARKIAAVALIVWKKGVAFDSTKLNCTT

SEQ ID NO: 483068 - protein, 414 aa, unidentified
MPETAYVLYVGIDWGTATHQVAVLDAQRVPLGERAIAHEAVALQTLTEWLTELAGGDPARVAVALEAPRGAVVDTLLERGFHVFALNPKQLDRFRDRYTVAGAKDDRRDAFVLAAALATDQPAFRALAPEDPLIIELREWSRVEDELREEWGRLASRLREQLHRVYPQGLALCPAADEAWFWALLRLAPTPAAAQRLRRAAVVTLLREHRIRRLTADPVLAALQSPPLRVAPGTVKAASGHVALLISRLELVNRQRRDCARRIERLLDALATTGEHQGHRDVTILRSLPGVGRVVAATMLAEASRLLAARDYHALRTQAGVAPVTRQSGKRLLVGMRYACNPRLRNALYYWGFISVRHDPHSRQHYQFLRGRGHSHGRALRGVVDRLLTVLMAMLSAQTTYDPARRPPILALAP

SEQ ID NO: 483069 - protein, 347 aa, unidentified
MTEAYDGRQVVGIDLHRRRSVIVRMTEDGRKLETARITNSPAALRAVIARAGKNPKVVIEATYGWYWAVDVLEAAGAEVHLAHPLGVKAFSYRRVKNDERDATDLADLLRMGRLPEAWIAPPEIRELRELTRYRHKLVKARTSYKDQVHGVLAKLGIPVTHTDIFGVHGQAWLDGLKLPQPYAGKVASLRQLAGALTAEIGLLEQVLGDLLAGHEGYAAIQQLPGIGPVLAAVIVAEIGDIRRFPGPGQLGSWTGLTPRHYESDTKVIRGHVTKQGSRILRWAVVEAIQRQPAGSRPPQVRDDIIARRGKEAKNIAKVAAARELLTLVFYGMRDGHVRRALQRGQAA

SEQ ID NO: 483070 - protein, 358 aa, unidentified
MAKLSLSRLEAFVLGFVSTAFRVGIDVHKKSYSLALLREDGACMTWTGPAKAETLLGPVQRFGLRIKAVVYEAGPTGFWLARRLESAGLRVMVVAPSRVPRPVRAGAKCDRLDCIKLAEYADNRRARAIAVPTEDEEAERSLLRRRHALANGRRRCKQRIKALLLYVGVEAPEGLDHWSQRSVASLGGLAVKPSVRLTLESLIRELAFHKEELRQVEGQLLELLAKGSQGKHLCYLRTVPGVGFLTAATYMLELFRPERFTNARQVASYLGLAPMVHHSGGRKPRGKITPVGQSRLRSLLVEASWVWKSRDAYAAKLYNRYLSRTGISQKAIVAVARHLAIILWRLAIEHRAYRQNPV

SEQ ID NO: 483071 - protein, 404 aa, unidentified
MWYVGLDWADTHHDVEVQDEGGLRIGARRFAHSHSGLNELKAFLLGIAASPEELACIVETNHGLLITFLLEAGIPVYPVNPKSANRLRKAAGAKTDRIDAHLLAKLGRFDLAELRRLEPDSPSVAELKTLTRDQDALIQTQTRLVNQLTACLKEYYPAALHLFAKVQQRSTLLFLQAYPTPQAALAASIEEITATLRTAKHPNPRRAAPKIVAELHRPQLLASPVTVRAKSRLMLSLVKQLLVVIEEIASYDKVIRPLFLTHNDQELWRSLPGAGKRLAPRLLAEWGDDRSRYADGNSVQALAGTAPVPFQSGNYAKAHKRFACSKPLRKALHQFAWQSTLHEGWARDYYQRKRAEGKTHSMALRALANVWVRIIYRMWVSKTSYQTATFEAARHAHAPRQHVA

SEQ ID NO: 483072 - protein, 406 aa, unidentified
MIFVGDDWAEDHHDLHVMDPNGNRLTARRLPEGMAGISRLHELLAEHAGEPSEVVVGIETDRGLWVQALIAAGYRVYAINPLAAARYRDRHQVSGAKSDPGDAKVLADLVRTDRHNHRPIAGDSPQVEAIKVLARGHQNLIWARTRQTNMLRSALREYYPAALEAFADLHDRDALAVLGRAPSPEQGARLSRSTIRTVLARGGRQRNLDARAEQIQAMLRRPELAASTPVAAAYAATTMAAAGIIGELNRQIADLEAQLATHFEQHPDADIYRSLPGLGVVLGARVLGEFGDDPNRYADTKSRKNYAGTSPLTVASGRKRAVLARHVRNRRLYDAIDAWAFAAISTSPGCRAFYDQHRAAGDLHHQALRALGNRLVGILHGCLTHHTRYDEHTAWAHRNQDQQAAA

SEQ ID NO: 483073 - protein, 344 aa, unidentified
MMNDSEMNNAELRNSEINGSNGPALRFAGIDVSKATLELALEGEGKNTVFDNDARGIRALLAKLKEAGPLGAIVLEATGGLEREAALALCAAGLPVMVVNPRQAHDFAKALGYLAKTDAIDARALTQFARTLHHSDKREALLMRMPEPQRLALEVLVTRRGQLVAMRVAEGNRLPGAAKPAQKSILAVMKLLNREIAKLDRDIAASLGGHFAEKLKLLKGLKGVAAGTQAALMAGLPELGTLTRRAIGKIVGVAPLNRDSGTMRGTRTTWGGRADVRSALYMATLTAVRHNAVLRAFHHRLRSKGKPKKVALVACMHKLLSIMNAIFKTNTPWNPNFHNPTTIA

SEQ ID NO: 483074 - protein, 315 aa, unidentified
MLDTETGASEEHKLMHTSGEAEGFYRKLASPAIVGIETVGNDQWFVQLLQKLGHEVCVGDAAQIRASYVRKQKTDRRDAKHILQLLVEGRFPRIWIPDAEMRDHRQLLMHRHKLVQIRTRVKNELQHLMLNQGMQKKQKLWSPEGRAALASLPLQPWTDRRRKDLLNAQLESLNDAVTRVAKEYPDVHLLMSQPGVGAVTALAFVLTLGDVHRFPRGKQVASYLGLIPREHSSGGKQRMSGISKQGNRLLRFLLVEAANIAVRFDPELRKEYLHRCHHKHFTVAKVATARKLAIRMYWMLRTQTPYPQVLSSRVA

SEQ ID NO: 483075 - protein, 422 aa, unidentified
MISFPRRERAQTAAAVVGVDAGKFSHTLVVRPKGQADCKPFSFPTTRQGFEAAVAFLSQQAPSATPSTILVGIEFAGNYGFTFAHFLAQLGVPVVSVLPAHTKRWKDVAHNQPLKTDAKDAGTITDLLAQGHFVRFPFLAPAYADLRYLVAARERLSLLRRGAMTQLRSLLQVVFPEFEAIFPLLTKKTPFAILRAFPTPEDLLKAPKAKVLRVLHSASRGHLGAETYERLIVAAKATLGLPGAQGRLRQEIGLVLERLALFETQIKSLETAMVDALQGVPETPYLLSIPKVAPVTAAVFLGSIGDPRAYESSGQILRVAGLSLIERSSGILRGTKRISKRGRPLLRQAAYMFAVRSITKDGLFRAEYEALCQRNGGQKMKAVVAVMRSGLRLLYSVARDRRVFTAEPPVWRERPARQAVSA

SEQ ID NO: 483076 - protein, 405 aa, unidentified
MADARRVVVGGVDTHKDVHVAAVIDGQGRILGTLECKTTAKGHGRLLAWMRSFGELVKVGVEGSGSYGAGLTRYLAGAGIEVLEVNRPNRQTRRLRGKSDTVDAEAAARAVLSGEARVTPKSQDGIVESIRALRVAFTSARGARAGVINQIDALIVGAPGELRNALEALSTSERVGRCARFRAGGDPADPVEGTKLALRALARRYEALSTEMVDLGQMLGELTARANPALCGAHGVGPDVAAILLIAAGDNPGRLTSDSAFAALCGVSPVQASSGKTVRHRLNRAGNRQANNALWRIAMVRLTCDPATKEYLARRTAEGKTKREIVRCLKRYIAREVFRHLTAPASVPAGAELRAARKNAGLSLKTVAATLGTWPIRISELERGIIHNTHLARRYQTLLTTQHTT

SEQ ID NO: 483077 - protein, 342 aa, unidentified
MDHFAGLDVSVKDTSVCIVDDAGKIVREVKVASEPDALLQVLRNPAYCFKRIGLEAGPLSQWLFSALGEANLPVICVETRHMRAVLKAQINKTDRNDARGIAQMMRVGLYRPVHVKTLRSQKLRMLLTHRKLLQSKAIAIENDLRGTLRNFGLKVGIAGRTKFEARIVELLEDLPDLAALVEPLLVVRRALREQIAVLHRRLLTIVRDDEVCRRLMTTPGVGPVVALTYRATVDVPARFRRSKSVGAVFGLTCSRDQSGERDRPGAISRCGDEMMRAMLYEAAQCMLVRSTRWSWLKAWAMQIAKRRGLKRAIVALARRLAVIMHRIWVDGTEFRWTRQLTA

SEQ ID NO: 483078 - protein, 315 aa, unidentified
MVTGIDCSKDYFDIVVLKGDKTIFSSRFANDGNGFGAMLPHILGSHVAMEATGPYYFQLALFIHEQGIKVSVVNPLSVRRFAQMQMSRAKTDKKDAHLIAAFTRMTAPQAWTPPTKEVLMIRNLETYIEGVKKRRQLLGNQLHAFEASGTLDKALYRDIKSELESYDRQIGEKEKVIASLIAQHYRKLSDNLRSIPGIGPRSVSLLITLTDGLKMFDSHKQVISYFGLAPRVYESGSSVRGRGHICKMGMGHVRKVLYMAATSAIRCNRACKSLYERLRAKGKPYRVALIAAVNKLIKQVFAIAKSGEPYKVQLS

SEQ ID NO: 483079 - protein, 517 aa, unidentified
MLKNDKHDDFFQGWTPIELIASTIPVSDELPLQELLLLEEGIEVQASKAYGVGIDTHKMFIQVSVIVKRNLRTFEYRRTFETDWKSLTEAREWILAVIRTFSDPPVDMNQPLHYVIESTSTYHMPVVMAFGGTPSIINPQLAGASKRKTDVLDARLLAFHDLTGVWPQSYIPSVEVHELRLLISERNNYRRFARTASNRINNGILRFGYTLGRGGSVTMSKCVRAIIEDEISDSPSGSWSNICPNGVPVDVRPAFRDQYDLYDQLKIKEHDYDIRIVNKVCSMNWETSKDSLPGNNMIDILTTAPGIGEMTACIWLANIVTPLRFPNAKAVGAYCGLDPSLKVSAGKVTSTAKRGGHRDLHSALCMAASILVKNHNEMFGQWGYNIYKHTGRWKKATNAVARKLAVALWNMQRKAEPFTYDGYTLIQDSIVIDISLEDLVELNQEFKRYVKVLKANGIEKATQMVDQYYACKLKDYRGLGKKFYGLIRDFITNQKIYREQYYEQHHEEDSSSYVEQQ

SEQ ID NO: 483080 - protein, 533 aa, unidentified
MATKRNSRKSRTIRPAVLGKPNGVIQPRVQAVGPERFGVVAVDCAKARSKWMLCDFYGNVLVPPTVVEHGRAALQIAVFQLREALEKHDIRDHIVAVEMTGVYHRPVQRAFRQAGSETRLVHPYASRHYRLPAHADTKTDDHDLEGIFRAAVNGFGLLEPAWDETYLQLQLLTRHRRDLVEKRAKLQCQIRQYLERCMPGYAVLFPDDHLWVRPMPLFVARRGGLAEAIRRAAIPGVEQWLREEKLRAQSRTVERIVAWAADAAEPDPLASHLNRVWCALHDDWLAKTRQIEAVEREMAEILVKTPYVLLLSHPGIGVLSAADLAGEMGPIEHYAHAKAITGRAGLFPSRYQSDEVDRADGPLAHHRNARLRAAWLRVADNLIKCNAHFRGKFQLWKQRGVDARDNRCRVANRAARTVFQMVSGRRLYHHPSRLDRGYVLDKLLTFHREHGTTPLEILRDLRHAAGQIPRHEHAAEAVPLQRILRRAQFSRRPGPQTIGDIVVAVLARLGADRLQSEGEAPSLDADVFETSTR

SEQ ID NO: 483081 - protein, 363 aa, unidentified
MHYVGLDVHARRSSLCILDSCGKVVKRLEVKGSWPKLMERVAAEVPRPFSVCFEASCGYGHLHERLSALAERVAVAHPGKLRLIFRAKRKNDRVDAEKQAKLLYLDQVPLVHVPGADVRAWRGLIELRRKLVGRRTAVKSQLRALLRGAGCCDAPAGKALWSKRGLKWLAAAALGEADALRRDLLLEELAQADERVGRVTRELDRRADAHPGVALLRTIPGVGPRTAEAFVAYVDDVRRFARTRQVGCYLGLVPCQDSSAGRDRLGHITGDGPPTARMLLCEAAWQAVRRSPSVKAFFERVMHGEPGRKKIALVAVAHKLARSMAAMLRAGEAWREEVQEQGRGQGQDRGQGQDRGQGQEPGA

SEQ ID NO: 483082 - protein, 465 aa, unidentified
MTKRHQSQVRRNSGSKVSRSLTLLNPDAAGIDVGASEHYVAVPPERDEQAVRRFGAFTEDLHKLAQWLLQCGVRTVAMESTGVYWIPLYQILEDHGLVVRLVNARHVKHVPGRKSDVQDCQWLQQLESFGLLAGSFRPEAKICVLRSYMRQRQMLISNASRYIQQMQKALTQMNLKLHQVISDLSGQTGMRIVRAILQGERDRLKLAALKDPRVKSSSERIAKSLEGDYRAEHLFALRQAVELYDYYQQKIAECDQAIFKEMQSLETRAAPDSVLPTPLKRKARSRHNAIPFDSQAELYRIMGVDLTRIDGLNEATVQLILSELGLDLCKKWPSEAQFCSWLGLCPNNEISGGKVLRRGTRKVINRVTNALRMCAESLLNSKSALGAYARRMRAKRDSKIAISATAHKLARLIYRTLKYGQEYSDIGQAQYEAKYRINALKSLQKRARQLGVQLVDLHSTSVVVP

SEQ ID NO: 483083 - protein, 355 aa, unidentified
MNSVRYVGLDVHRDTISVAVLDESGRLIMQSVLATKASAILDFIHGMRSIVHATFEEGTHAAWLYDLLAGKVAKLVVCNPRKNALLKLGSKSDAIDALKLAELLRAGMLSPVYHGERSALEVQQLARSYTMLTEDTTRVMNRLKAVFRGQAVGCAGKKLYAKRHRDGYLAELGTGGLRRRAECLYQEFDALQQLRHVTKRELIVECRKHAATKWLQSVPFLRPVRAAVLIGRVQTPHRFRTKRQFWAYCGLALETRDSGEYRMVNGQVERRKKPVLIRGLNWNHNHAMKGVFKGAATSASICDGVFREFYLGLLNKGMLPEMARLTLARKIAAITLKIWKKGEAFDSEKMKIQAA

SEQ ID NO: 483084 - protein, 313 aa, unidentified
MTFLKRHQAFKQNAEGFKEFLNWLAYFKVTNDDVLICMEHTGLYTYGLIDFLEAAGLNLWVEMPLRIKKSMGLQRGGDDKAAAIQIALYAYRYKDQVSLWKPEQAIVLKLRQLSAQRDRLKLALNQLMIPLQEIADCCHDATIVKVQLKLQAPVIKAIEKSIASIETQIDNLIAADPAIQATIGRVSSIKGVGKQTAIHVFIYTKGFTTFSSGKQLASYCGVVPFTKSSGTSVRYKTQVSPFANKHLKKLLHLCAMAAIQHNDELRHYYNRKIEEGKNKMSVINAVRNKLVQRIFAVVRDGRNYVENYQYQRA

SEQ ID NO: 483085 - protein, 359 aa, unidentified
MLVERTCVGLDVHARSVAAAAIDGVTGELSQARLTPSHDHIRSWIEQFDGPVAVVYEAGPTGFGLYRALNPVGVRCVVAAPSKLQRPPGDRVKTDAKDAVHLARLLRLGEITAVTVPTVDQEAARDLVRAREDCRGELMRARHRLSKLLLRHGFVYSGGQAWTGVHDQWLRRQRFDHRATTMAFESGYEAVTAITARRGRLEKAIAELAAGSEFTPIVHRLGCLRGIATLTAFALAVEIGDWNRFTGSSIASFVGLVPSEHSSGASRVQGSITKTGNTHVRRLLVEAAWQHRPAYRPGKVMRDRWDLADPAARARGDAGNRRLHQRWVQFNLRRKRPVIANIAIARELAGWCWSLAVMG

SEQ ID NO: 483086 - protein, 401 aa, unidentified
MPELWAGTDAGKAEHHCVVIDTDGKRRLSQRVANYETALLKLISDVLELSHGEPVTWAIDLNAGGAALMIALLTDNGQQVLYIPGRTVHHASGSYRGDGKTDAKDAYVIADQARMRRDLQTMRRGDDIAVDLRILTSRRLDLAADRTRAINRLRAQMLEYFPALERAFDYKTSKAALILLTHYQTPEALRRIGKNRLSTWLKNRKVRNYQLIAATAVAAAEAQHTAVAGEKLAAAVVAKLAREVMALDEEIAETDALIEGRFRDHPHAEVILSMLGIGPVLGAEFIAHTGGDMSVFGSSDRLAGVAGLAPVPKDSGRISGNMRRPRRYCRRLLRVFYMSAMVAARCCPTSKAFYDRKRAEGKGHRQAVIALARRCLNVLWALIRDGRTFEVAAPPNPVALG

SEQ ID NO: 483087 - protein, 469 aa, unidentified
MTNKNGNTKAMLGPKEIRKRLEEGKGFPELNPNVAGIDIGSREHFVSVPGDRDSQPVRRFGCYTADHLQLVGWLKACRITTVVMESTGVYWMPLCAVLEEHGFEVFLVDARHVRNVSGRKSDVQDCQWIRRLFSYGLLSAAFRPKPEITPIRALWRLRGSLVQDCARQIQLMQKALELMNVHLHKVVTDISGLTGFRIIRAIVSGSRDPQTLAQMRDPGCKLSEAEFVLALNGNFRSEHVFCLRQAVDTYDFFQDQIQKCDQALQAYLSELPTKPVGQDQDLLPKKKSPRRRKNQPYFDLRSEQIRVSGVDLTRIDGIDMLTAQTILSEIGLDLDRFPTEDNFSSWLGLAPNNRITGGVVRSSRSRKVAHRVATALRLSAQALHHSRSALAAFYRRLASRMEKAKAITATARKLACHVYRMLKHGQAYVDQGEAAYLAAFEQQRLRRLQRQARRFGFELVNLQSGEVVS

SEQ ID NO: 483088 - protein, 423 aa, unidentified
MFKIILNNCCGLDVHKTRIYACIGITDTHSRTEYYEANFSSFPKDLRKLSEWLHKYNCVDVCMESSGKYWIPVFNVLEETCKVTLAHPKYTKPQKGNKTDRKDARWICDLFMCGMIKPSFIPPPAIRHLRDLVRYRVKLTNTLTGEKNRAQNCLTVSNLKLDDVFSDVFGKSARSITEYILAHPGEKFDVAPFVDKRCKTPLDVIQDAVDGAVSPEQAVKLRECLDHIDQLIAHRDRIEKEILSIAEPFSPQLTLIRTVPGLNRDPMTAIVILSEIGSDMSVFPSAKNLVSWAGCCPRNDRSAKHVKSTRISQAGSCLKPLLVQVANALINSKDHPEFVERYRRIKSHRGHKKAIIAICKMLLTAIWNILSTGEVYNPSGYLIQTPRPINDTKVLTQKQALELLRLRGYVIKDDPLEPKPLPA

SEQ ID NO: 483089 - protein, 379 aa, unidentified
MLVYHNSGLLRPSAPLKTLGERNEKSRNQIRRNRLWKKTLEVIRIGDNSLHQRQQFSTTEIGISKLINWLNPNDVVGLEAGSQSFRIAKSILNKGIQVIVLNPGDLATIYQSLKKTDKEDSLKIARLIQRFPIEELPVVPIPNDEEEDNRRLCTEQENWTRQLTQSKNRLRSLFTQAGLTHITKKHLRTKANREISVALLPSRYQKEAERILKVLDLVEQNLKLIEEEIKEALKKNKAYAQTIMSMPGVGMITSLAIMSYMGNCKRFSSAKQAAYYVGLVPRVDISGDSAYYGRIVNRGCHSIRRVIVQAAWSLVRCQYGGKIKEFYQRLYPKKGAKKSIIATSRKMIEILYTMIKTGELFDSMPEKVLNRKLTQYGLM

SEQ ID NO: 483090 - protein, 371 aa, unidentified
MPNASTFVGLDVHKNTITIALLRPGQVSPLEWSIVNETGAICRMIRKLGREAQGELRCCYEAGPTGYVLQRQLTRAGIDCRVIAPSLIPVKPGSAIKTDRRDARKLAELLRAGLLTEVTPPSEDEEAVRDLTRSRDDAQRDLTRARNRLSKFLLRRGCVYAVGRKPTWSAKYRAWLRALPFERPADQVIFEDYLLAVEQTEARRDALTDRIEGFAQQAPWAAPVQALRCFHGIDTVTALALVAEIHDPRRFAHPRQLMSYLGLVPREHSSGMRERRGGITGAGNRHVRRLMVEAAWHYRHKPIVGRALRLRRREQPPKLIALADRALRRLTLRQRRMLHQGKHPNLVNIAIARELVGFVWQVLHPGRLVQA

SEQ ID NO: 483091 - protein, 389 aa, unidentified
MLHDVAGFQSFVGVDLHKCTVTLKAVSAAGESTAHLTISTKSVEKIERWLRELPQPVWLAVEACPFVEWFIDRYRDCVARLDIADATELASRRGKRRKNDPNDALDIARRLARGECPLGFIADPVLMQLRKLGRHWRQLSRLISRSKHAMKSMLNAANLRGPKFDGAGAQRWLLAQGHLLKPVQHQAFSDYLDHVLLVERQREKLRRAIHWAARSETFSQTELLLESVPGIGDIWGLIIAAEIGPFDRFPNSDTLEFWAGLTADLKESAGRTQSGNITKAGSVTLRWALCQAAVTLCHCDARQEAIRQRLIRRIGKAKANVAMGRRLLRTLYAMVRDKKAYRCEQPIDRTTRLNKARAARKPKAEQAARRKIAQRYGFPQRESLAEPAA

SEQ ID NO: 483092 - protein, 429 aa, unidentified
MSYKITGIDVHKKMLAVVVSDVEIESEFQFERRMFASNPEQLRALATWLLEQEAEEVVMESTAQYWRPVWEALERYWKPICEKRAGAKRRSGTLHLAQAESNRGRRGRKRDFADAERLVKRLVARELTLSFVPDVEQRLWRTVTRKKFQLRRARIRLQNQLEALLEEAHIKLSSFVSDLLGFSARRMLKALAEGETNPAALAALADERLRATPEQLSDALGACRELNDVYRRLLQMALEECRLIDEQIGKLDQEMASLLSQHQGAVERLAEVPGLGVDSAQQIIAEVGPAAATFPSEKSLSLWVGACPGEEESAGVNYSHRSPKGNRHMRRLLNQAANAAARTKGSIFEIVYRRTVPRLGHNQAVGVIAHRLCRLIWLILHQAVRYEERGPAVTKRSKQLRTWKMIRDLRRLGYRIELPNPLPSQAPAQ

SEQ ID NO: 483093 - protein, 365 aa, unidentified
MEKISTVKTKGKKILKGQLTIGLDLGDRSSCCCVLDENGEIIREQKIPTTPEGMQQTFGKMARSRIAMETGTHSPWVSRALTELGHEVIVAHAQKVRLIVKSRRKDDRLDARTLARLARIDPELLSPVQHRSAQAQLHLTEIRARAGLVSARTALVNAARGLVKSYGERLRKCGTQQFGQETTSGLSAGLREALEPLMQEVESLNERIKEYDRRIEKMAKETYPETELLKQVKGVGDLIATTYVLTVEDPHRFRKSRDAGCFVGLQPERRNSGESEPQLHITKEGDEYLRTLLVQGAHYILGPFGEDSDLRRWGLKLSARGGKNAKKRAVVAVARKLAVLLHRLWVSGEVYEPLRNSQKAMSAAA

SEQ ID NO: 483094 - protein, 338 aa, unidentified
MKLYGAIDLHSTNNVTVVINEQDQVVYEKRLPNDLSLIAQHLSTYRRSLEGIVVESTYNWYWLVDGLMEKGYRLHLANTAAIQQYNGLKYTDDHSDARWLAHLLRLGVLPEGYIYPKEERAVRDLLRKRGQLVHQRTANLLSIQSLISRTTGNMISAKYIKALNIQRVDGVLPSPDLVLALKANLAVMNSADAQIEILEKTVQDRVKLRPQFKFLKTVPGIGPILALTIMLETGEIERFASVGNYASYCRCVGSQKISNGKRKGSGNTKNGNKYLAWAFVEAANFAIRFNSRIKSFYQKKKSKSHAIVAIKAVAHKLCRACYYIIKDQVAFDITKAFA

SEQ ID NO: 483095 - protein, 387 aa, unidentified
MFSIKNRSTMNLKYSLGMDVASKKIDVCLSVIDQLQKVRVVSSKSFLNTLNGFRDMGQWIDRNHREKDVDLYICMEATGVYHENCALYFYEKGFRTSIILPNKAKHYLISLGLKSKNDTIDARGLSRMGAEQCLDLWEPMGRYFYQLRQYTRQYQNLQEQKTVFKNQLHALHKAMYENKKIIKQQRATIKLFDGQLAELTKLIELHINSDDMVKQRFDNVIRIKGVGTLTLATVLAETNGFELFTNYKQLVSYAGFDVVERESGMSTGKTRISKKGNGHLRRAMFMPAFTAVRYSEKPLESLYRRTFDKHGIKMKSYVAVQKKLLVLIYHIWKKNEAYDPNHQQQNPKIKDQRKSEPQKCPTKNSPNQVEAIQDKYSNIEEGIFSQV

SEQ ID NO: 483096 - protein, 363 aa, unidentified
MNVAGIDAHATYLVVSVVSKQGERLVGPTRIENRQPDRLLELLEVHGPTEVVVETCPAWPWLHDLLTGTEHRFVLAHAKRLRGIAEQTYKRDEVDAELLARMRLAGLIPEVYAKSIEQRDQAVLVRHRVTLVRIRTAAANRIHGQIQAVGLRLARGWLLTREGRRWVREKAGPFFAPEQAHLVETHFELIDHLRERIRALDRRIEEVAAEIPAARLLQTIPGVGSYRSLLIATEVLPIERFPAPKHLVSYAGLAPRTRRSGLKPIRHGSTPAGANRWLRGALVRAVVSHRQNAPESWLSAYYDHHKERVGWPVARVAAARKLARAMHAMLRRGEAWRGERDESSAARGEFRASHVATTSHAAD

SEQ ID NO: 483097 - protein, 340 aa, unidentified
MSIITIGLDLAKNIFQVHGVQEDGSVAFNRPLRRAQMLPFFAKLDPCLIGLEACSTSHYWGRELSALGHEVKLMPPAYVKPYVKRGKSDAADAEAICEAVTRPTMRFVEIKSVDQQAILCQHRARTIMVGQRTQLSNVIRGLIGEFGITIRKGLESIRLFAEDIENGNAPDIPAVGQEVISSLCDQLLCLHRRVVQLDKDIASAGKTDHRIKLLQTIPGIGPINASAIVATIGSGHQFKSGRDLAAWIGLTPLNKSSGGKERLGKISRMGDQYLRRLLVIGMTSRVRSAMARPDRVDPWTKSLLERKPVRVATVAMANKTARIIWAVLTKNEPYTPQRTA

SEQ ID NO: 483098 - protein, 410 aa, unidentified
MELLHRRCCGLDVHKETVVACLRLVSNGKVTTEVRTFQTTTADLLRLSEWLATNECTHVAMEATGVYWKPVWHILDDGEFALVLANAAHVKNVPGRKTDVNDAMWLAELLAHGLIRASFVPDTQTQEMRNLLRTRKQLVREQSRHLQRVQKTLEDANIKLDSVLSSLMSKSGRAMIEALIAGETNPAKLARLADPRVKASPEELREALRGRVTKHHRFLLRLHLNQIDALTAAMATVDVQVETNLGPFRTAVDLIKSIPGFDDLGAHVVVSEIGIDMSRFPSEAHLISWAGICPRNDESAGKRRSNRLRKGAPWLKTTLVQCSWAAIKKKNSYLQAQYHRIKARRGPKKAIMAVAASILTAIYHMLKDGTMYQDLGYNHFNRRSTDQQKTRLVKRLADLGYAVEIKPLAA

SEQ ID NO: 483099 - protein, 359 aa, unidentified
MHTTTVAVDLAKNVFQLAVADQHWKIVERHRLTRGQFERWFANRSVGRVVMESCGSAHHWARWLSGRGLEVRLLPPRYVRPYVKRNKTDAADAAALLEALRCADIVPVRIKSLEQQALQSLHRIRSLWMATRTARINALRGFCREFGVTIPAGSRLGMAQIATVVADPGPAIPPLLRGTLPLLIEEIRLLEARIVQLEAQLTAAARQSPACTTLLSVPGVGLLTATALAAATGGTVAHFKSARHFSAWFGLTPREASSGTTRHLGRLSKRGDRYLRMLLIHGARSVLWAARAAQRAGRPLDALRQWALALQARRHHNTAACALANKLARICYATLRDQEPFNLGRLNRKINRHTYALPA

SEQ ID NO: 483100 - protein, 389 aa, unidentified
MKIYVGIDIAKLNHFAAAISSDGEILIEPFKFTNDADGFQLLVSKLESFDKNSIIIGLESTAHYGDNLVRYLVAELYQVCVLNPIKTCQMRKNNVRKTKTDKVDTFVIAKTLMMQDDLRFITFFDLDMMDLKALGRFRQKTIKQRTRLKIQLTTYVDQVFPEIQYFFKSGLHQNAVYALLKEAPSPKEIASMHMTHLANLLKVNSHGHFTKEQAKELRILAQKSVGANDSAISIQITQTIQQIELLDSQLEKIEAEMTDIMKFNDSVIMTIPGIGYINGGMILGEIGDIHRFSNPNKLLAFAGLDPSVYQSGNFQAKTTRMSKRGSRVLRYALVNAAWNVVRNNATFKAYYNVKRAESRSHYNALGHCAGKLVRVIWKMLTDEVEFNLE

SEQ ID NO: 483101 - protein, 321 aa, unidentified
MANTTTTVAGIDTGKYKLDIALLHGQAGLQVDNTKQGHKQLMAWLQHHNVKRIGIEPSGGYERTVIRYLRGEGLTVVLLNAAKVRAYAKFIGQHAKNDKLDAALIAECTHLAKDTDAPDPRLEKLQETMTFLEQIEQDMARAKTRREGFTDPQLLDRLKVESKRLNAQRTALIKHLKAELRKHKDLGHRLDLVLSIDGIGERTALALVIRMPELGALSREQAAALAGLAPYDKDRGTLKAKRQIAGGRAKLRKSLYAAALPAANFWNKELKQLYKRLKKAGKPHKVALVAVARKLLIFANAVVAKQTMWTKERPKTNGCSG

SEQ ID NO: 483102 - protein, 411 aa, unidentified
MNPVVGLDVSKGESQVQAFLEKGKPHRKSFSVSHTIEGLDLLIEYLDEIKNLTGKKPPVVMESTGHFHLPVVHYLEERDYLLIIVNPLVSYKARSSSLRKVKTDAIDAYHLCELYYKEELEPYKKRGIQLLNLRNLTRQHENITDLQVQAKLQFHALLDQLFPEYKGVFGSLYSVVSLLTLRRFSSSEEILNTDEEALAGTIAELCNSRSKKWAKEKAAHLKEAAIRNPFQKALYHSHILSLHMYIDLLLQYKEHLSKLAAEIDALAKEVEEYEIIQSIPGIGEKIAATIISEIGEIERFSAPQKLVAFAGVDPSVFESGKFRATMNRITKRGSSRLRQALFMAVKCAIRDCRRQKTSDEIIPRNKRLRAFYDKKREEGKPYKVAIIACVNKLLRWIFAMLTNKVAFQDIE

SEQ ID NO: 483103 - protein, 365 aa, unidentified
MFTERMSIGLDVHARSVVASAIDGVSGEVVSARLTPDHGHILSWIAERDGPCAVAYEAGPSGFGLARALSAAGIRCVVAAPSKLLRPAGDRVKTDARDAVHLARLLRLDQVSAVTVPSVGQEAARDLVRAREDARGDLMRARHRVSKLLLRHGIVYAGGPGWTGAHQAWLSRQRLDGPDGSPAAQAALESDHDAVLAVTARRDRLDVAITELAQASEFTPVVRRLGCLRGISTLTGFALAVEIGDWSRFTGATIGAFMGLVPTEYSSGASRSLGGITKTGNSHARRLLVEAAWHHRPRYRVGKTMLDRWALADPAARARGDAGNRRLHRQWERFIARNKRGTIATVAIARELAGWCWSLAVLDDD

SEQ ID NO: 483104 - protein, 358 aa, unidentified
MSTLAQLVDGVIGVDSHRDTLAAAALSPVGGLLGQTAARADTAGYRELLDFARGHVPGRRCWAIEGAGSYGAGLAVFLGANGEQLVEAARPKRPPRRSRAKTDAIDAVRAARDALGQEPHELAAPRQRGDREALRVLLTTRRTAMAARTAAVNQLKALLVGAPEELRGELRSLPTRRQIAVCAALRDRPTRSLEHQMTVRVLRSTARRIQALQAEAEELHGQLQRLIAAIAPWLLELFGVGPVSAAQLLVSWSHAGRFRSEAAFAALAGASPIPASSGKVTRHRLNRGGDRQLNQALHTIALVRLRDDLETRAYATRRTTEGKSPRDVKRCLKRIIARQLFRLLERYDQPGVEVLRAA

SEQ ID NO: 483105 - protein, 334 aa, unidentified
MKNYSLIIGVDISKLTLDVTGINGSNKSVLQHQVIDNTKTKIKSFFKKMITKYGKDEILVAFENTGVYGYFLAYELYTLGMDYCNLSALEVHKSVGIKRGKSDKIDALIIAQYILANGFKLQLSTFTELHLTELKVLHTQREKVIKAIRTFGNNKETELFLPKKIIKELTKTSTSIIKNLKKNLKLIDLQILKIINSNESLKRDYKLTISVPGIGPQTATYLLIVTKGFTTFNNARQLACYAGVAPFPYQSGTSISGRNKVSHLADKKLKSLLNMCALNAKRWDYQLKGYFDNKVKKGKNKMLVINNIRNKILHRVFAVIKRQQPYVNTHNFAS

SEQ ID NO: 483106 - protein, 311 aa, unidentified
MTLSTIGIDISKETLDVHRMSDGASRRFSNDKAGHKALIVWIGGDAARVVFEPTGPYHRAFEHALAKAGLPLVKVNPRQARRFAEATGKLAKTDRLDAALLARMGALLAIEPRPARSKALAELKELHIAREALVKDRTAAKNRAKIRTLALLKRQNAQRLDQIERQIAAIDAAILAFIEANAELAKRFAILTSIPGVSQITAFALLIEMPELGTLEARQAASLAGLAPVARQSGRWTGRAFIRGGRASVRQALYMPALVAARFNPELKAKYTQLVKAGKPAKLALTALMRKLIVLANALLRARRTWTPKLA

SEQ ID NO: 483107 - protein, 341 aa, unidentified
MMIIGCDFHPRTQQIAFLDKDTGECGERRLSHPEEAAEFYRSLCGRQVRIGMEATGNFRWFRRLMGELGHEVLLGDPSAIHASIPRRQQTDKRDARHILTLLAEDRFPVVWQPSVENEDTRQLLLHRCRLVRFRARIKNQLDAMAKNEGLLSKRVWCAMRRQQIEALPLSGWDVERRKDLVALLDELSRRIEPLDEAVKKTAEGNAEARLLMTHPGVGPVVSLAYVLTIDDWRRFPRGKQVASYLGLIPEESSSSDKRRLGHISKQGNTLVRWLLVEAAAKAQRYDAGWHRQYLRLSMNKHHGVAKVAIAHKLAVRLYWMLRSGQDYEQVRERGSHAGQSA

SEQ ID NO: 483108 - protein, 341 aa, unidentified
MIISVLGIDLGKNSCSVVGLNDAGAVVVRRRMRREGVIAFAAKQPVCVVAMEACCGAHHMGRILAEQGHTVRLMSPEYVRPYVKAQKNDDRDAEALAEAATRPTMRFVELKSQEQLDMQTLHRVRDRLICDRTSLMNQMRSLLLERGHIVPQGWAKLREHLARLLDLEGSPLTPRIRELLLDMRQRWEALNKRIGDLDAEFVEAGRADERTQRLLTIPGIGALNATALVAAVGDARTFNRGRDLTAWLGLVPRQATTGGKPRLLGITKRGSRYLRKNLIQGARASLPTLSKSQTRLGAWLRALAARAHHNAVVVALAGKIARIAWALLRHERPYEATPLAA

SEQ ID NO: 483109 - protein, 343 aa, unidentified
MDHFAGLDVSVKETSICIVDDTGRIVREVKVASEPEALLKVLGNPAYRFKRIGLEAGPLSQWLFGALAEAGLPVVCVETRHMQAVLKAQINKTDRNDARGIAQMMRAGLYRPVHVKTLRSQKLRMLLTHRKLLQSKAIAIENDLRGTLRNFGLKVGMVGKVRFEARIQELVENIPDMAVLVESLLIVRRALREQIVILHRRLLAIVRDDEVCRRLMTIPGVGPVVALTYRATVDVPARFRKSKSVGAVFGLTCARYQSGEIDWSGKISRCGDEMMRAMLYEAAQSMLRSKKWSWLKAWAMQIARRRGMKKAIVALARRLAVIMHRIWIDGTEFRWTREQAAAA

SEQ ID NO: 483110 - protein, 428 aa, unidentified
MDYTTQNKKIELITEDTIVIGVDIGSEMNFARAFDWRGREISKKVFKFSNTFGGFNFFDGWMTDMLQRAAKMQIIVGCEPTGHYWFPLAGHLKDRGILLVTVNPYHVKQTKELDDNSPTKTDLKDPKTIAKLVIGGNYGIPYIPEGIYADLREAISSRDRINKELNASANRIQRWLKIYFPEYLDVYKNFDSTSGLMVLEQAPLPEDVIALGIEGIVKIWRAAKMRAVGKKRATTLVESAHNSIGIKGGNCARLELQMLLEDYKTKKRQMEMIEEVLTKETMKVPNVEKLLAIKGIGIITVAGFIAEVGDIRRFDSPKQIQKLAGFELKRNSSGKHKGQTTISKRGRRRLRRILYQVVLPMLKSNPEFREVYEYYTNRVKNPLKGKQAVIAVSCKLIRVFYTLLSNGVEYDAARLRADIIRPIMLKAA

SEQ ID NO: 483111 - protein, 341 aa, unidentified
MDKELYFGVDVSKKTLDLAYYDGEIIDWKNAHIRVSNDDAGFKKIGSWVAKVGKDFDTFLFCLEYTGLYNQNFRLWLESKEYIYSMVEPRKMHRFEPDLDDDQRSLDRIKTDELDAFRIAIYCEQNHKKILRNPSKLPSPVYFKLKRLLAERKQNTKQSVLYKQQLHDICAYDTDLSVERKKLLLKDMKENQKAIDKEIDSYMNEDASISKNFNLLTSIPGIGLIIALETIVLTENFTAINNPRKYACYIGIAPFKKESGTSVRKKTGVSKKGFSEAKADLSIAVLSAIRNNPSIRDYWIRKRKEKCGGIVLNAIKFKLVLRMFAVIKRGTPYVETDAYKN

SEQ ID NO: 483112 - protein, 450 aa, unidentified
MGNGSGVSRGDRNRNARLARLRALVPVSNAIVGIDLADEKQMVVVTDHDSKVLARKTFRCRAWNLGTALDWAGKQATARGFIGATVACEPTGHRWRVVGQLAGDRGMPFVCVQPMLTSWARRSEDLTFDKTDERDAVLIARLTAQLRCYVPETVDETWGRLRHLVARRAQLLVESGRQVQQMRALLECVWPAALQTARQPFRSSTWTAAITVVVDRDGGDLARTRRLGAARWESAVRKEIIRRGRMRPCMRIVRLQFAALSDPAGVTAHRPGALERVALVLRDWLETHRRLTETEARMTAIVDELRLTELVTSIPGLSTIGAAAILAETGDPTRFASARALVKHAGRAPREKLSGAFVGRTKLTGQGRPGLRLAAWRAVWGAQRANPVYAARFAHLTTRAQNKLTVTQAQAVIAAAILRQLHAVVSTGRRWDPAIATRGITRTAVLPLAA

SEQ ID NO: 483113 - protein, 329 aa, unidentified
MEIQETYIGLDLHQKTIFGTALDKEGNVIVSHRFPNNKEALQEFLKPFHCATTKIAIEACGFWRSCHFMLRSIGFQATLANPLKCHQIAKDKKTDKVDSKILADLYRVNYLPKVYLPSDDILALRDITRHRQTLSNERVRIQVRIKSYLRREGIPYSANLWNKKGLQWLANLENEKVNDLLAIYSALSTRENQVLQKLKKYTMKKDISMLMTIPGIGVIGSTLIYAEIADILRFPSPKQLHAYAGIAPGIYQSGENSREITRKEVNKWLKWIVLECTGRAVMLPNEFQRHYFAIIAKGKDKKTARKSTARRMLTIVWHILKNQVPYRTS

SEQ ID NO: 483114 - protein, 444 aa, unidentified
MSRKQRKHIRGKRGEAFLQIVRGVDRARILCVSLDISKYFHLVMMHNAYGEIVTPSFEIDIFRSGFEHVCHVIDETAARIGAEVVLIGMEPTGHYFENIARHLHARYPHVYLINSLAVKENRGQKLMHHEKTDEEDVAAIGDLLCRGEGTPYRPAQGIYLEMQHLDRVRIAKLKMRSALKNQIIGHLDRIFPGLIMSHKAAQQRYSPVFTTSFWACQMAQALVRVCPDPHRLSQMTPQQLIHVFHAQGYRMGPRWAAKIIAFAQQALPPHPDVIAVRSQLLQRDLALLEQVEGHIAELEERLCALLSLTPGHVWTHLKGVSSIQVASLVAAMGDSSHYDYAAQVFRRSGLVSGRNDSGTRQGKGQGKHVTKVGDVYLRRALINLVETLSLHQPILGDYRHRLKGVKPHPGVARVATVRKAVGILFAIQRDQRINDLWVKKEPPM

SEQ ID NO: 483115 - protein, 309 aa, unidentified
MDGKYYGVDVSQDKLDVACDGRVMQIENDKRSIKSFAKKMPAGSFVALEATNIYHLAMADICHSYGMHVFVLNPRLTRRYREANGLRGHNDRMDALTIARYIEREHEGLREYVPLSADQRRLRTLVRRRWKLVGMRTQAAESFGSMKEFGRELKALLGKMDALIAKLELLIDKQLEGNTGRTRIATIKGVGPVVSAVLVADLDAYDFASADAFVAYYGLDPTPNDSGRRRGARKLSKQGQRLGRAMLYNAAMSAVRSKVWKPLYERCLERGLKKVQALIVVARKIARCAWSIHKHNTTFDPNRVYSALT

SEQ ID NO: 483116 - protein, 342 aa, unidentified
MLYVGVDIHKSNLQVCLLDEQGNRCINTRVENSADAVEAFFRGISLPASVGMEPTHNWGRLYDLLSMMGLEVKVCHPRDAKLIGLAQVKTDRTDAYKLATLLRVGLLPESYVPTQDGRELRCLVRGRAALKGVSTALKNQIHAILKANWIKHPYSDLFGKAGREFLADLMIESGYRDVMETKLEVLDCIDAQVRRLDKQIALRAGEDMRVQIVMTAPGFGCYRAVLVVGEVEDISRFRRAESFVCSIGLNPREDSSGETTRRGRITKEGSSWLRWVFIEAAHQAIKQEGKIRDLYLRVLERRGHNKAIVAAARELAVSVYWMLRRMEPYSPSGRRVVSSEAR

SEQ ID NO: 483117 - protein, 392 aa, unidentified
MVISVGIDVSKDKHDCFIVSSEGEVLADVFTIPNNMDGFHRLLQRIQDCTNSQDKIKVGLEATGHYSYNLLGFLLDNGLTTYVLNPLRTNLYRKSLSLRKTKTDRVDARTIASMLLSDAGLKPYTSTAYHNEELKSLTRYRFDKVKERAKLKSSISRLVCILFPELEKLVPTLHMTSVYSLLEELPGAKQVAAAHLTRLKTLLETASKGHYKRDMALEIRDAARNSIGSRMPAKSLELQHTIRLIRELDREIDEIEEQIQSIMGELHSPITTIPGLGFRMAAMILAEVGDFTRFDSPDKLLAYAGMSPSTYQSGQLKNCYPHMEKRGSRYLRYALCNATKYVCYWDPAFADYLAKKRAEGKHYNIAISHAAKKLVRLIFAMEKSMQPYCSAS

SEQ ID NO: 483118 - protein, 343 aa, unidentified
MEHFAGLDVSVKQTSVCIVDGTGRLVREVRVASEPEALLPVLTNPLYRFKRIGLEAGPLSQWLFSALAEADLPVICVETRHMRAVLQAQINKTDRNDARGIAQMMRAGLYRPVHVKTLRSQKLRMLLTHRKLLQSKAIAIENDLRATLRNFGLKVGVVGTVKFEARIRELVETLPDLAELVEPLLIVRRTLREQIGILHGRLLAIVRHDDVCRRLMTVPGVGPVVALTYRATVDVPARFRNSKAVGAVFGLTPSRYQSGEVNRTGAISRCGDEMMRVMLYEAAHTMLLRLAKWSWLKAWAMKIARQRGIKKAIVALARRLAVILHRIWVDGTEFRWTRETAAA

SEQ ID NO: 483119 - protein, 388 aa, unidentified
MQTVADRPEAPTAIRTDLGAIFVSLELSRSTWLITSLSPGGGEKMSKQVVRGGDVAGLLERFARLREKARARTGKVFPFVVIQEAGLDGFWIDRALQNEGIESHVVDPASIATSRRRRRAKTDGIDGEGLVRALLAYKRGEPRVCAMIKAPTPEEEDRRRLCRERKVLIVERVRHVNRVKGLLFSQGISGYEPLRRDRRRRLDTLQTGDGRLLPVHLKAQVCRELDRLELLLEQIKAVEAERDVLLAAQQVAAPAPAAMLLDIKGIGPEFAAILWSEGLFRHFDNRRQVASYAGLAPTPWQSGSVDREQGVSKAGNPRLRTTLIQLAWLWLRHQPQSALALWFEERVRRNGGRLKKKTIVALARKLLIALWKYVTAGVLIEGAVMKAA

SEQ ID NO: 483120 - protein, 411 aa, unidentified
MDVVYARCAGLDVHKATVVACVRSPGLRAETRHAETQTFATTLRGLGALTEWLTTHGVTHVAMESTGVYWRPVFAVLEGTVQVQLVNARHVKMLPGRKTDVRDCEGLAQLLECGLLRGSFIPPAAVRDLRDLPRLRQTLIRERGHHVNRIAKTLELANIKLGSVVTDIMGKTGRAILQALSIGRADPESLAACAQGRLRKKQAALREAVEGRLTPHYAFLLQQHLALIDTLDAHMATLDTRIEAAMVPFAETAALMQTMPGVATRAAEAILAETGVDMSPFPTAAHFASWARRCPGNHESAGKRRSTRTGKGATWLRATLQEAAWAAVHTKKSYYRALYYRLKARGGPKKAIVAVQHAMLVALWHMLKRRLSHQDLGADYFAQRNTERTLRHHVRRLEQLGYHVLLAKEAA

SEQ ID NO: 483121 - protein, 368 aa, unidentified
MEKGTTYVALDDSKRKIVAGILRPGAPAPELRELPNDPPHIRRLFERLKREGPVAACYEAGVSGYDLYRQITGLGVSCQVMAPALTPRRPGQRIKTDRRDAGKLVHLFRAGELTPIHVPDEAEEAGRDLVRCRDDVRRDVLRWRHRLLKVLDRHGRVYRAGKNWSRGHWTWIRDQRFDLPALQRAFEASLFALEQALARLAELDKEVEALAETAPYRDPVGWLRCFRGIDTLSAMILLVEVVDFQRFEHPRQLMAYLGLVPSEYSSGDTQRRGALTKAGNTHVRRALIEAAWHYRHRPTVGHALAARSQGQPREVVGEAWRAQQRLHRRYRHLVGHGKRPPVAVAAVARELVGFLWAAMTQRERQAAA

SEQ ID NO: 483122 - protein, 383 aa, unidentified
MNDLIRIGVDTSKSIFQLHGVNAAEQPVLRKKFRRRQFIEFFEKLPATRVGIEACGASHHWGRELSALGHEVVLLPPQRVKPYVERNKNDAADAEAICEAMSRPRMSFVPVKTAEQQAALMLVGVRDQLVGRRTQLSNAIRGYAAEFGLVAAKGTDKIEPLLIRIAGDENFPPLAKDLFATLGNEYVRLKPELRKIEARLMAWHRGNELSRRLAEIPSVGPIGATLSVMKVGNPHAFRSGRDFSAWLGMTPKDHSTAGKVRLGAITKAGDEALRSVLVAGATSVIQQVRKGRGRPSPWLVALVKRKPPKLAAVALANKTARIIWKLMVSGERYNPQRAPQRFVPPTDSLAPGTRRQGQAACGGDLRSALTAPALRAPSAPPSA

SEQ ID NO: 483123 - protein, 360 aa, unidentified
MCQTCSVITFKLNGEETNMNITVSGLDLAKNVFHFVGCNKAGKIIRKKMLRRNEVLSFFAKLPPCLVGMEACSSAHYWAREIEKLGHTVKQIAPQHVKAFLRGNKNDYNDALAISEAVVRPQMRFVVTKTQTQQDIQSIHIFRKKCERDRTANSNEVRGLLSEYGIAIPQGIHNVFKTLPKLFDKTEDNGLSDLFKTLLAQHYEKLVELNKHLDFYTKKIKVQSKSDECQRLQSIPGFGPIVASAFYQHVGNGSGFKNGRCVSASLGVVPKQYSSGGKDKLLGISKRGDKYLRTLLVHGARAVINTLKDKKTPLANWLNRLIVTRGKNKATLALANKLARIGWAILKSGGCHSAEHAAAN

SEQ ID NO: 483124 - protein, 312 aa, unidentified
MAKPVSQITLGIDVAKDELVIADWDTGEITTLINRPSEIQAWLGSLHGPVRMALEPTSHYHRVLADKAQAAGHQVYLVNPRQLAHYREAVGERHKSDPRDALLLARYLAHEAPKLRLYEPQSAAARELWTLLTRRATAVESCKRVRQSFLGTGISIQALRSEYRKVLKRIDRRMEALIDACGWQQSYQFCLSIPGIGPSNATALVAAFHRGAFSSQDAFIAYLGMDVRTRESGTYKGKRKLTKKGPSELRRLLYCAAIAGRSYEPFARYHQRQLDKGLPKIAANCILARKLARLAFVLMSRQENFKKGAVAY

SEQ ID NO: 483125 - protein, 344 aa, unidentified
MEGYVGQQFVGVDLHRRRSVVVRTDVAGLVLEAVQIVNDADRLVEVIGRAGRAPEVVLEATYGWYWAVDALRSAGARVHLAHPLGVKAFEYRRVKNDFRDASDLADLLRMGRLPEAWIAPPATRELRELVRHRAKLVALCSHCKAEVHAVLAKCGVQVPMSDLFGVGGTGLLDRLELPAPYAARIASLRRVMDDLDFETDLFNGMVRARLGADPGYTAVRTIPGIGAVLGAIFVAEIGDIGRFGTAPQLACWAGLTPKHHESDTHVRRGPITKQGSRLVRWAAVESVQTLPKTTAVGQLRDRVAARRGRNIGVVAAARRQIEYVYYALRDHHVRALHPIPVAAT

SEQ ID NO: 483126 - protein, 446 aa, unidentified
MSAVVGIDVGAYKHAAAVCRSGEREAERGVFRLSADRAGFDELDRWLERQGPVERVVLESSGHYYWPLASHLHRHGYGVAVVNPLQVKYFAKSRLQRSKSDPADARTLAAMGMSEEPRVKDPLLGAEAKEAARFWGGLVKEQAQVRQKLLRLVEIGFPELKECFEDPLCETALAVLREAPTARVASRKRVSSLADTTRPGDRRRLGENKARRLHELAERTVAPPELDAQMSFEVGMLIQQFDLLDKQIEIAEQRVAEVLDSELARRLQTIPGVGPALAASFIAEIGDIWRFDDFDQLASYAGVHPKELSSGTKGQNPETSWRMAKTGNAYLRSAALTVASCGDTLTEIRYTTLKDATTRLLQPLVFFSVSPSVWEKGLPYICKSVVCSYFSVFPDSVKVTLNASVLAFLSMNWVSATPLLWVLSVIVVPGAPSATTQTARGMQNVS

SEQ ID NO: 483127 - protein, 489 aa, unidentified
MKRAKKTSNTRTRSSSRKRLKALQIVHPNAAGIDVGASSHYVAVRPDAVPAGKPAVRSFGTFTVDLDALVEWLKECAVDTVAMEATGVYWKPVFEKIEAAGIEAILVNARHVKHVPGRKTDVKDCQWLQQLHSYGLLEGSFCPTQDICRLRTLVRHRANLVSDAAQAVLHMQKALTQMNVQLHHVINDLCGETGLRIVRAILNGQRDPEQLVKLRDCQITRSTPKEMEQALQGDWKEELLFVLRQSLKAFEFCHEQMDECDLEIEALLKSLPKATPVAKPEQAPAKDPLAAQDPKPKRPQSRKRNEPEQDLGPELARICGTDLTKAHGLRILSVLVIISEIGIDMNRWRSAKAFCSWLGLCPNNKISGGRILSSRTRQVVNRASTALRMAASGVAHTETWLGSFYRRMRARLGPAGATTATARKIATVVYHLLKNQEPFVDRDLELYEQRVYQNKLARLRKQARTLGYKLVELTQDQDVTTTATCELSE

SEQ ID NO: 483128 - protein, 423 aa, unidentified
METIESTKHDYASWIGLDWGSEQHAIALQAADSTCVDRCLLEQKPELLHDWVGKLQARFPGRKVAVAIEQSKGAVINFLLGFDFVHVFRVNPKSLSSYRDALYPSGAKDDPTDAELLMDFLKLHANKMKPWVPDTPESRALLRLVEFRRHTVDQRTALTNAMTQALKEYFPQALEWAGDLDTVMACDFLSKWPTLGKLQKTKPEKIRKFYTDHGSRRSELIDERQMQIRSAIPLTQDTAVVSTSVIVVETILVQLRPLLDAIGRIEKEIEAIFRKHPDSEIFDSFPGAGAALAPRLQAAMGSDRDRFDSAHEVQEYSGIAPVTRHSGKTRLVYHRRACSRFIKQSFHEFAGHSIPQCEWARAYYDMQREGGAGHHAAVRALAYKWIRIIFRCWKARVPYDDAKYMESLRRKRAPCLGFLPAAA

SEQ ID NO: 483129 - protein, 322 aa, unidentified
MVTPQGTIKTNTTVARGKLLALIARQPPALIFMEACGGAHDWARRFRVLGHEVRLLAPQHVTPFRRGQKNDPNDALALTEAGQRPHIPTVPIKSVEQQDIQALHRVRERRVKNRTALVNQIRGLLLEYGIVIPQGIARLRKRLPRVIEEADNGLSLGLRDLLQSLQSELIGLDTRVADVTRQLARISHDVEACQRLQEMEGIGPLSATALVAALGNGHDFQHGRQVAAWLGLVPRQHSSGGTARLGGITKGGNGYVRRLLIHGARSVISHVRDKTDAKSAWIRQLVTRIGVNKACVAVANKMARVAWALLHTGECYRKPTAL

SEQ ID NO: 483130 - protein, 331 aa, unidentified
MKNKDVVGIDVSKLTIDAYIQLSQVHAVFKNDSKGFKQLLKWIKRNVDCTMDELLICFEITGLYSLQLASFLGQRDINYIMENPIQIKRSMGLVRGKDDKVDSKRIAEYAYMRKDKLKLTTLPSDDLIKMQNILSLRERMIKQKAGYQASLKEYKRVLVQQHEKDFFQMLNSINGALIKQIKKAEKTLLEIIDSNKTLKDQYALLTSIKGVGIILASNLMVTTVCFTKFTDSRKYACYCGTAPFRYSSGTSIKGRTKVSQMANKKMKALFSLAARSAIQHDPELKQYFYNRMAKGANGMSTINIIRNKMIHRVFAVMKRGTPYVVMAKHAA

SEQ ID NO: 483131 - protein, 348 aa, unidentified
METIGLDLHKRESQLAIQAEDGTITERRIVTSQERFTAVLGHRPRARILLEASTESEWVACHLEALGHEVIVADPNYAPMYATRSRRVKTDKRDARTLMDACGQGTYRRAHRLSAPRRHLRAELAVRDALVRTRTRYVALAKALVRRDGLRVPSSTAERVGDRVQALALPAPLAAELAPLLTLLPPLNATIAATDHQLSALEQTDPIVALLMTAPGVGAVTASALVATLDDITRFPSAHQCEAYLGLVPGERSSGEQRRIGPITKAGNRRTRWLLVEAAWRILRAKDPESAALRAWTLRIAGRRGKPIAVVALARRLAGIVYAMWRDGVPYDGRKIRAPHHARGAQAG

SEQ ID NO: 483132 - protein, 337 aa, unidentified
MMYSGIDLHSNNSVVAVIDDADRVVAQKRLPNDITKIVGFLARWQDQLAGVVVESTYNWYWLVDGLQDAGFHMHLANTAAIKQYEGLKHSGDETDAQHLAHLLRLGILPTGTILPREHRVVRDLARKRMQLVQSCTTHVLAVENIMARQLGGRMTSNQIKRLTGDTIDSLPLAADVGLAIKANVAVIATLQSQIEVLEKRLQERVKPRAQYGLLPSVPGIGQTLATVIFLETGPIDRFAEVGNFASYARCVDSVHTSNRKKKGEGNVKNGNKYLAWAFVEAANFARRFCPEAKRFHERKKARTNNIVATKALAHKLARACYHILKEGKPFDVTRCFA

SEQ ID NO: 483133 - protein, 449 aa, unidentified
MRYVGIDLHKRLLVACILDQDGKVLERPRIEEVTRASLEAFCRQYLQPEDQVALEVTTHVWAVVRILARHVARVVASNPLATKAIAQAKVKTDKVDAHVLAQLLRLDYLPTVWAPDEALSQLRELTARRNRLVQDRTRRINRLRTCLAMRLLDCPYEIPTARGREWLERVELDDDGRAMIDSDLRLLDSLQAEIDALDQRLAQRVYQDERVKLLMTMPGVSQHVAEAVVAAVGDIARFPSPEKLAAYLGLVPSTRQSANHCYHGGITKAGRAAARWALVQAAHTVRGDLGPLGHFFHKLRRRKNYNVAVCAVARKLALLTWHLLTTGKPYRYAKPDTVAAKLSKLRVAGSGVKRRTGAGKGVNSRTLRAPEERNQKRTPGLTEVLRKEGLPAPSALTQGEERVLERTGTKAYFESLQQERVRPRQRKSQPLALPIELPDDDGQPIVLRE

SEQ ID NO: 483134 - protein, 314 aa, unidentified
MSPNNNPIILHVGVDVAKLSLQLDLAGRGHTLANDAKGHAKLLNLLRSQPAVQVVCEATGGYERPMVRVLQAAQIPVSIVEAGRVRHFAKAKGLRAKTDPIDAAVLSQYGRAFQPAPTRAPTAAQSRLSQLVQRRRQLLDTLLAETNRATHYTDKWLLRQSRQLLRLLEKQMAACELDITQLIAADENLKARAQRLDAIPGVGALTAATVLAEIPELGRMSDHATAALAGLAPYNRDSGNQTSPRHIAGGRKTIRCALYMATLSAVRFDTILKAFYLRLRQKGKKPKVALVACMRKLVILMNRLLKNNQFQLAN

SEQ ID NO: 483135 - protein, 285 aa, unidentified
MEEYVGLDVSMKETSVSIRRAGERIWRGKCASDPRIIAELIRKRAPAVRRVVFETGALSIWFYHSLRTEGLPAICIDARHAKAALDMATNKTDANDADGLAQLAEVGFFREVRVKGFDSMLTRTLVGARTRLVRITTELSNQIRGVMKTFGLLVPAGKGSIFEKNVRSLLTDQDGLASIVLPMLEAWRGIRIRAAELGRQLVRDARQNQACRILMSIPGIGAITATAFTTAIERPDNFKKSRSVGAWIGLTTRRYQSGEVDYDGHISDVATPICEDFSTKRRRSF

SEQ ID NO: 483136 - protein, 327 aa, unidentified
MNKTNALSPVIDIYIGIDISKDNLSIASDPPGSALDCIGIRAYTDDQIELLCAQLVEVGPAQVIMEATGRLEALLAYALQEHGISVAVINPVRARSFAQAEGTYCKTDPVDAGVLARFGRAMRPESRPLPESLANELQELVSRRRQLITMRDAERHRLNVRLPSVVRNDIVEHVNDLNRRLKSIDKDIDRLILTNKEWSELASLITSVPGAGPVLCRTLVSDLPELGRLNSKQIGKLVGLAPFDRQSGKYVGSKSIWGGRAKVRAVLYMAALNGVRFNPVLSSFYQKLVKAGKAKKVALTACMHKLLIILNAMVKSGKAWSHQTVTG

SEQ ID NO: 483137 - protein, 318 aa, unidentified
MSPSKDHKNINIGVDTGKHQLDIYIRPLDIYFTVANNDEGIAQALITIKEHCPTRIIIEATGRLEFDFIVACSKAKLPFVVANPAHIRKFAGALGQLAKTDKLDARMIAHYGEAIKPPLSSLKPAIMRSMSDLLARRGQLLTMQTMEKNRLQALPKALHSLIKPILTTIKNQIDKINLKLQKLIDSCEEYKAKNEILQSMPGVGNIVALNLLSNMPELGYISNKEAAALVGVAPINRESGNYMGHRKVRGGRHQIRTAMYMAMLSAIQCNPVFKATYNRLVAAGKPKKIAIVACIRKMIVILNSMVRDGLHWNPEIAK

SEQ ID NO: 483138 - protein, 422 aa, unidentified
MLEQAQDKHEIIERVAALDIGKATLVCCTRIPGQAGRGRAQEVTEHSTMTRSLQLMADRLLELGVTRVVMEATSDYWKPPFYLLEAHGFEVWLVNAKDVKHLPGRPKTDRLDAVWLCKVAERQMIRPSFVPPAPIRRLRDLTRYRVALIADRTREKNRVEKLLEDAQIKLSVVASDIFGVSGRAMMDQLIAGERDPRVLAQSARGSMRGKIASLEQAFVGSFGDHHAFLLRQMLGRIDALSTDIATLEDRIEEQIAPFAHAVNQLDEIPGVGVTAAQAIIAEIGLDMSRFPTPAHLASWAKFAPGVKESAGRNKGNGSTGHGDPYLARVLGEAAVGASRTDTFLGERYRRIARRRGKKKAIVAVGRSILVIVWHLLSDPDAHFHDLGSDFYDKRRGPERIKQTHIRQLEALGYKVTLEPTAA

SEQ ID NO: 483139 - protein, 367 aa, unidentified
MKKGSTAAVKASRKISQQKLTVGLDLGDRSSWYCMLDEAGVILREQRVSTTAKALGEAFGSMPRSRIALETGMHSPWVSRLLSELGHEVIVAHARNVRLIGESRKKDDRLDAQTLARLARIDPGLLCPVKHRSRKAQADLTVIRARAGLVRARTALVNTARGLAKSYGERLRGCNVRNMNPEKAEGLSPELQSALEPLLTALESLSEQIREYNERIEGLAEESYPQVKLLKQVKGVGTLIALTFLLTLEDPHRFRKSRDVGCYLGLQPGRRNSGQSQPQMHISKEGDPYLRTLLVQGAQHILGPFGPDCDLRRWGLRLAERGGKSGKKRAIIATARKLAVLLHHLWVSGEVYEPLHNNSRTTVAAAA

SEQ ID NO: 483140 - protein, 490 aa, unidentified
MGARRKTKQKPAMVEPVEIPDAEHELVVDRGAAIDVAKAAGKVCVRLPGKSGRRFSRVWDVPARTGAITELAEQLVELGIEKVTVESTSDYWRIWYYLLEDAGLDVQLVNSRDVRNVPGRPKTDKLDAVWLAKLTEKGLLRPSFVPPAPIRVLRDYTRLREDLIRERTRYWQRLEKLLEDAAIKVSAVASKLDTLSTRDMVEALIGGERDSRRLADLARGRMKTKRSELITALDGRFDDHHAELARLLLGQIDALTAQIGALSARIERLIDAMDESDHPTGDRGRSGGGGPQVTGAPSTGGQATAPARRTTTAIGVDSDTATVVEPQRLTAVERLDEITGVGQCAAQTIIAEIGLDMARFPTPEHLVSWAKLCPRTIQSGPVIRGGKTGKGNPYLKGALGEAAAAAARTDTFLGERYRRLVKRRGRLKALVAVARSILVIVWQLLSDPTARFHDLGPDYHTSRVVTERKIRNHIAHLTAMGFHVTLQPAA

SEQ ID NO: 483141 - protein, 351 aa, unidentified
MEKISTIGLDIAKQVFQVHGVNDQGQVVVQKRLRRAEVLIWFEQLEPCLIGIESCATSTYWAQEISKFGHKVRLIPPIYVKPYVRRQKNDRTDAAAICEAVSRPSMRFVAIKTVEQQSVQTLHRTRELLISQQTQAINALRAHIAEYGMIFPQKNPGVMRAIEAVRDQQNSLPAFVRQCLHSLIDQIDHLRKEINKLDRQMTIWHRANADSQRLATIPGVGVITATAILASIGDGKQFRSGREFAASIGLVPNQNSSGGKERLGHISKKGNAYLRTLLILGATAMLVKKYRTRAAGGMWFLNLLERKPARVATVALANKMARVAWAILTKGSVYVADDVTASTASMMAAVG

SEQ ID NO: 483142 - protein, 400 aa, unidentified
MLSIGIDVSKGKSTVCGMKPEGEIVYAPFEVQHTREGMSELVSLLRSSGEEVRAVLESTGSYHCPVVAALLENGIFVSVVNSLRMKRFCSQSIRKVKTDRIDAMQIALYGLAYWQELQPARLPEDTYRELQLLARQYYQMTSMLIKAKVDFNVLCDQVLPGMQELMNDHAGRHKLSDFVLRYRHTTHILEMGETRFRKDYCKWAEKKGYRNCERMAAHIFATAQNGIPVLPNAPSTQIVITEAIRVLHTVEASRDAILTQMQALAKTLPEYSLVREMPCIGDTLAPRLIAEIGDVRRFHSKRALIAYAGIDAPPYQSGKFCANNRHISKRGNRYLRKTGYEVMQSYVMHKPANDPIFTFIEKKRSEGKCGKLAMVAGLNKFLRVYYGKVTELYRSLPAIE

SEQ ID NO: 483143 - protein, 381 aa, unidentified
MSKSIPTVQRFVGLDVHAETIAVAVAEKDGEVRSLGVIPNRPESIRKLLPKLGPIGTWTACYEAGPTGYCLYWQLTQAGVSCIVVAPTLVPMKVGDRIKTDRRDALRLAKSFRAGELTPVWVPDAAHEALRDLVRAREAALQDQLRARHRLAKFLLRHGRRPKQPLKAWTQRHLDWIRTLLKDEQGSLRSTLEDYLAEVDHQAQRIQRLETAVDQAIEQAPPILREVVQALQALRGVRKMTAITVVAEVGQLSRFPKARQIMSYSGAVPREHSSGQSTHRGAITKTGNAHLRRVLIEAAWCQRYAPTLSRTLRLRQQGLSPAVIELAAKARHRLSARFRRLMARGKPRQQVATAIARELLGFIWAIGVLVERSSTARTKAA

SEQ ID NO: 483144 - protein, 319 aa, unidentified
MKEIAKNYKLHFGIDVSKDRLDIHCLEENKFWQIENKTATIKQFLKENTKQLQSAFIVIDMAGGYEKTACDLFITHSFSVHRAHPYRVKSYIRACGQLSKTDAIDAKMLAQYGKERKDKLTLYQSHSKHQLELKALVERRFDLIKMQTAEKNRLQAPTANSVIIKTCKAVIKVLQSQIKMLETKIDELIKSDEKTSLKAKVLETITGIGPQTIRSLIAIMPELGNMNAKQAASLAGLAPRANESGSRKGYRFIKGGRPLIRRIMFMAALVASRYDEKLSVHYQKMIKNGKKPIVAIIAIARKIIVIANAKIRDEVIKIN

SEQ ID NO: 483145 - protein, 335 aa, unidentified
MEAKKWIGVDIHKKQLTVCIILETGQKEVKRYERNSAGISDFLREIDKDTVIGIESTTWTWGLAKRAKERAKDVLILNTVELKNLMDKTKKTDRIDAAKIAVIIRRFEKEELSTCAIKTEKWALVKGLLNIREKLVRQKVETKNLIIATLDYWGIEIEKKLFISYKRDKAFLENIALEKELKEEIINQYELTEQFDSSIKEVDLKINGLCCSDKGYQAITKNINGIGITCGAYLTSKIENIERFDDQKKLVAYLGLAPKVNSSDDKNKGGHISGNTDKALLRVLVQAAWASVRYDPEMRYYYETLKLRMAGQKAIIAIARKLIVKVYYTMKEIKA

SEQ ID NO: 483146 - protein, 391 aa, unidentified
MFVGWGWASATHDVTVLDDAGAVVDRWAFRHTEQDLAAALDRLARLGEPAALPVIIERSGGLVVERLLAAGHPVVPVHPTAFWAARPRWGASGAKSDAGDSDKLADYVRTDGHRLRRLDPPDAGLQELQALVRLREDHVRARTAASNQLGALLEAYWPGPKAVFYRLASPIALAFLADYPTPQAAARLGEARMASFCKRHSYRGGKPPSVLLARLRSAPTAPVGIPPATLATLVHAQVQLLRTLLATIAELEAAIAKRVAVHPRAKLLASLPGVGTINLAQLLAEVGPILDRAGSAEHAAAECGAAPVTKASGKTSGVYFRWAANRRARKALTAFAHNSRLASPWAGLYADARARQAQPARHSHRRPCLAAGHLGLLAERDPLQPRRAPSV

SEQ ID NO: 483147 - protein, 310 aa, unidentified
MDAIVVGIDVSKNRLDVAVRPTGEVFAVVRDAEGLDALVARLKPLAPVAVAVEATGGYETVVAASLAAADLPVVVVNPAQVRSFAQALGKRAKSDPIDALVIAHFVEATRPEIRPLPDAETRLLGDLVSRRRQIVGMITAERQRQKILTGKRLQRSIARLLAALQKELSSLETDIDQAVRGSPAWREKEDLLASVPGIGKIIARTVMAELPEIGTLDRRQIAALVGLAPWTRQSGTWKGKSFIGAGRAAVRAALFLGAMVAARHNPELKLFRDRLVQAGKPKLVALVATARKLLTILNALIRDRKPWQPA

SEQ ID NO: 483148 - protein, 356 aa, unidentified
MSQNLDSKIAVIGIDIGKNSFHIIGQDRRGALVLRQKWSRGQVEARLANLPPCLIGMEACTGAHHLSRKLQALGHDARLMPAKYVRPYSKGEKNDYRDAEAIAEAVQRPTMKFVATKSAEQLDLQALHRVRERLVCQRTGIINQIRAFLLERGIAVRQGLNFLRAELPAILAKRTDVLSPRMLHVIEDLAGDWRRLDERIEALSDEIMTLARQDKGCERLMTVPGIGPIISSAMVAAIGSGDAFSKGRDFGAWLGLVPKQMSTGDRTILGSISRRGNRYLRTLFVQAAWVVLVKVGPERWERYGLKSWIEAAKQRLHRNVLAIALANKLARIAWAVLHKGRAFECVKTDATARLPA

SEQ ID NO: 483149 - protein, 346 aa, unidentified
MNATTYGMDIAKNVFQVHWVDGNTGEICRKKLPRGKVTEFFAVRPAGRIAMEACGGAHHWGRTLGPLGHQIELLPTHQVRPFISGNKDDAADARGIWLAAQHGDIRRVAVKSSEQQAMLSLHRMRTHWVSVRTATVNALRGLLYEFGVTLPRGRHSGLRQLAQQRAEINDAVPAVMVRLVDDQLLALADIERHVQAMEEEISLMLKSQESARRLRDTPGIGVLGATALAATLGDGTSWRNGREFACCLGLAPGHRGTGGKVRIGSISKRGNAYLRTLLINGARALASREHPAPWIVALLGRRPFNVVVVAIAHKLARIAWALVAHGRAYEASWKASAPPAASAGAV

SEQ ID NO: 483150 - protein, 332 aa, unidentified
MDNFYFIGVDVSKKKLDFCVLFEGKVLREEQVSNHQQAVARLIGELKNDLEMDNEQFLICAEHTGQYTFPLVCACKSVECKLWLENPSQIKYSSGMQRGKNDKVDAKRIAIYASRFGDKVKYYDLPTEEIERLKQLERERALYVTDLAKYKGQMYDQKDFMPAALYRKKTKRMKGLIQELQAAIDAITAEMEKIIGSTEVLARQMELLMSIDGVGKVVALNVIIETEAFSRFDNPRKFCCHAGVAPFSYTSGSSQHSKNKVSHRANKNIKKLLHMAAVSVTHRKEGELKAYYMRKVEEGKNKMSVINALRAKIVARMFAVIKRNEVYTPIYS

SEQ ID NO: 483151 - protein, 363 aa, unidentified
MRFYDRQHRFYAGIDLHARTMRLCILDSAGSVVFDANLPCRPDAFLAAIAPYRTDLIVGCECMFGWYWLSDLCHKEKIAFLIGHALYMKAIYGAKAKNDKIDANKIARLLRGGNFPLAYVYPKGMRETRDLLRRRNFFVRQRSGLFTHLQILNSQYNLPPFPKKLSFAANRQELNVAARFRDLSVQQNAAANLAVIDCLDEQIAQLELYLTRTAKIDDVQTFHRLQTIPGIGKILALVLLYEIHDIKRFASVGQFLSYCRLVRCQHESAGKVLGCGGRKIGNAQLRWAFGEAACLLLRASERAKAWKQKQQKKRGEGKALAILAAKLARAVYHMWRKGEAFDEARFWHAQQGSAKRPAKAGKN

SEQ ID NO: 483152 - protein, 321 aa, unidentified
MTYVGIDVSKLTFVVAYSSAKSSKTKTFKNTAKGIREFIKTISVDEHHCVMEATGNYSTLLVYMLSEFGFTVSLENPLKIKNFSKVMLSVIKSDEIDARLIALYGEKMQPSPYRMRSDSILVLKQKRTVLRQLKKQLVATSNLKGSMEVLPIYDSKCKKTIEKTIAFLGKQIKYMEEELASLVNDEFKKQMDLLTSIKGIGVTLAAALIVATGGFTYFDNAKQLTRYLGLSPTYQQSGTSVNFKGHINRNGDPILRSQLYVAAFSSLRCNTECKACFDRLRSKGKPGKVAVVAVANKLVRQAFAVVTQDKPYVDGFISVKP

SEQ ID NO: 483153 - protein, 409 aa, unidentified
MRYYLGVDWADQTHAVWVVDEGGTKVAMRTVPHTAEGLTEWGRALDEWRAQGIELWAAIERPEGRVVDLLLDHGVVVYAVNPKTLDRARDRFRQSAAKSDPFDARVLADFLRTDHAHLRAVQPSSEAAQELKLLTDDYQRQIRQQTRLVNQLTTTLKAYYPRGLEVAELTTGLAREFLQAYPTPATITALTERQWQRWAHAHRLSETRTQQLWVVLQRPQLPVPPHVVRAKARLMQSLVAQLMVVMEGVGAYREAIEDFFARIPAAQWIRTLPIGDHGITAPTLWARLGDAPGRWESFRHLQAQAGTVPVTIRSGKQQVVRFRFACDKSLRYIIDHVAFLSLRWSEWAHAYYAGQRARGHSYRQALRALSAKWLKIIFVMWERQIPYDEQYHLAMMTRQQLRQRQEKVA

SEQ ID NO: 483154 - protein, 348 aa, unidentified
MKNKSFVGIDISKNVIDVSIFREDTNIKMFPHEVFNNTRKGFGDMCSWLKKSRVVLSQALFGMEFTGCYSLDLEKFLTSKNYFFCMLSTRIVKHHPMGTIDKRDKNDSAKIADFLYRYDGTECAKPYKLPSKAMQQLKQLVNERKFLVEQRTNFMNRMQMFETKEDSAMYESYIKKLNHDIEKIDQEECELMSKEEDVFDTFQNLLTIPGIGFVNATNIIAITRNFTAFDTARQYARYVGVAPCSHTSGTSVKWRARPSAHCNGQVKADLSMAALRAVEYDVEMQMFYNRKLGGRKDSDTKRKALNAVKFKLICRMFAIGKQKRKWEVLNTSDDRKNLHIEKSKASEL

SEQ ID NO: 483155 - protein, 386 aa, unidentified
MPQPKNELRKSLVALDQHKTVIAVVELSLRNWLVGGIVPGIHRDPLKKLAADEHALLRLLHRWRDEAVKTGHSITRIVVTYEAGRDGFWLARWLRKHGIEAHVIHPTSVPVSREHRRAKSDRLDIGLLKRSSLGWLRGEEKHCTMVSIPTLEEEDAKRPNREREHLVGRCTSLTNRLKATLVRLGIRGVNPKLPKAAERLATLRTPEGEPIPPNTLAELQRDMAQLRFIKAQIKQIEGARREQLEQAPQKCSNAKVTELKSIRGIGLETADMLVQEVFSREWRDHRAVARYAGLTGSPDESGARRREKGLAKAGNARVRRGMIQLAWRFLAHQKNSTLAQWFEARVVAGKKRKTMIVALARKLLIALWRFVAMGEIPPGLVLRTAS

SEQ ID NO: 483156 - protein, 354 aa, unidentified
MAISKQCIGIDISKATFTACLCQRSDDGVLTFSKTLDFSNDTKGFNQFLRWVKGVIAPGAALVFLMEATGVYYENLAHHLHKIKKRVHVVLPNTSKHYFSSLNIKTKTDAIDARILSQFGVERAHKAWSPPPAALLQLRNLTRYHVQLQEQKTALVNIKHSKDCSHDIQNFILKSNKKLISDIDKEIARCIKEINRLVKSDVDLHRKIEKLATIKGIGMITMVTILAETMGFEQFRSAKQLVSYAGYDVVQRESGTSVKGKTRISKKGNRYIRNALYFPAMVACRHNSVLKEAYTRIIQKKPSKMVGQVAVQRKLLILMYTLWKNDTVFIENYKVSSPDPKTETTLDSSEAELL

SEQ ID NO: 483157 - protein, 374 aa, unidentified
MWSWPVEPQLWEAPVKIQRTSVGLDVHARSVVACGLDGETGELFERRLTPDHGDIVAWLGDLPGPVAATYEAGPTGFVLARSINAAGIRCSVAAPSKLQRPVGDRVKTDVRDARHLARLLHLSEIVEVEIPSVEQESARDLFRAREACGKDLMAARNRLSKLLLRRGIVYFGGTPWTSNHLRWLRGQRFDEPGVALAYDTAIDTVLATTDRRGRLDAAITAMAADSSFTPVISRLGCLRGVSTLTAFGLATEIGDWHRLTGRSIGAYLGLVPTEYSSGNSRTQGGLTRTGNTHARRLLIEASWHHRKPNRPGETMRRRWKAAPLAAQARGQTANRRLHDRWMRFDERKKRPVVANAAIARELAGWCWSLAVMDD

SEQ ID NO: 483158 - protein, 416 aa, unidentified
MTQPISPTVERHLAVDLHKHYLVIGGVNARQEVVLSPRRVDLDDWPTWAKTNLKPSDVLVVEATTNTWWFYDQTYQSVGQLLVADPRKIAWIAQTKVKTDAHDVMKLARLSAASLIPLVWVPPLAVREVRALLAHRRRLVRTQTVLKNRLHSLLHRLQIAPPEGDPFCAKHRAWWVALQVSPTERLHVRHDLATLDQVVGQLDEIEDELRRLSCAEPWSEVMPYLLHLPGVGLVVAMTILAAIGDITRFPTSKKLVGYSGLAAGVHDSGQTHRTGHITKEGRKEFRYVLVEAAWHAVETNDFWKAEFERLCRRMEKNKAIVAIARQLLVVIWHVLTERAADQHADPDMVAFKLMTWSWKLTDEQRGGLTTRQFVRYQLLRLGLGRDLTHVIRGGGKYLIAPPDEVLQLKPELHAAT

SEQ ID NO: 483159 - protein, 331 aa, unidentified
MAIISAEGLVETSARVFNEFKNSVSGYKQLVKWVDKNANGIDSSMWLFCGENTGEYSKPLCNHLYGKGYDMWLENAKSIKDASGIRRLKSDRADAAMIAEYAMRNHDKAVVYEPLSESLAQLREYYLYRQMVVRHRCSFEARRGEKRLMMEKSAAKTVIAQSGKHIISELNKEIAKINKKIASLIESSDELSEVYKIVTSVPGIGTQNAVCLMVYTNNFRRFNYDARSIACYYGIAPFGEDSGTSVHVDPHVHYMVNRHIKAMLTQAALAAVRFNPVIAQYYQRLIERGKKMPVAMNNVKNKLLHIVTSMVKNKKFYDPEYNFQNNTKKNG

SEQ ID NO: 483160 - protein, 243 aa, unidentified
MAKAQWDMALRPAGERWAVPNDARGIAPLVDRLQALHPTLSVLEAPGGLERAATAAWAAAGLPVVVVHPRPAREVARATGPWAKTEALEARALAHWAAVIRPTPRPRPDAQTHAWRALLGRRQPLRVMRTAAQHRLAGTSGRLQTDMAAPLTWRNARLATLDDDLATTLRASPRWRENDERWPSAPGLGPVCARTLRRELPALGPRTRQQIAAWVGVAPLHGASGTLRGRRTMWGGRAPVRTV

SEQ ID NO: 483161 - protein, 367 aa, unidentified
MLQKAELSCEADSENYLGGSSETIMYYIGLDVHKKTISYCVKEAAGHVHREGKIGATRGELDAWIKTLPQPRMMAMEATIFTGWIYDHLLPHAEKVKVAHPLMLRAIAAAKKKNDRIDAGKIADCLRCDFLPECHMASTEIRDRRRTLRYRNLVIRQMVQMKNRVSGLLMESGVSYNKQRLHKMGYFTELFSSNEEISDSIRPLLRLGREHILRGQRLDRALISSLERDPLLSERLRRLRTIPGVGPITALTWALEIGDYTRFPSVKEAISYCGLCGAEKSSADKVMRMPISKQRNKHIQHVLVEAAKLAPRYSHELALLREKEIQRGNKNRATLAVARKLVAYMLAVDRRKQDFVPAEELAAKAVA

SEQ ID NO: 483162 - protein, 322 aa, unidentified
MLTWIGIDISCKQFDAAWYTETGRKHIKLDNNDEGFVKLLEEVPEEVAFVMEATGSYSINLALFLHEHGKHVSVVNPLRTHSFGKAEMSRNKSDKSDAYSIARFGQEKSPKAWVPVTKEMVEIQQLRAFADKLKQQITQLSNQRHAFSQSKLQSADALSLIDIAIKFHGRILGEAMKDLEAAVGRSFQRQIELITSIPGIGKETATRLVALIGDFSRFRTSRQLVSFLGISPTLKQSGTSVHSKGRISRLGNPQIRKVLYFCAISASSCNAQCKSMWDRMNESKRPGKLILMAIANKLIRQIHAVVCSGKAYNPNFANFSLA

SEQ ID NO: 483163 - protein, 376 aa, unidentified
MRSIDSIPRDEHAAQQDDLFMSLELGDKRWKLSIGDVRHGVSRYDVPAGDTAAVAKCVAKTAERFQTPPNAVVHSCYEAGRDGWWLHRWLAQFGVDNIVVDASSIEVNRRARRAKTDRLDADKLRTMLMRHHGGEHVWSVLREPTEQDEDARRVHRELQRLTHERTSHINRIRALLVLHNVRPDLIIAGRDWPAWWQKNSEQVAPKLRAEIEREVARLTLVKDQVRSIELARRRELASGVHPMVSQLTRLAAIGPTGAWVLVHEVFGWRRFSNRRQLAGCLGLAPTPYASGDTETEQGISKVGNKRVRALLVEQAWGWLRRQPTSTLTLWFNRRFAHSGARMRRVGIVALARRLAIAMWRFLQNGEIPLGASLKPA

SEQ ID NO: 483164 - protein, 337 aa, unidentified
MNNYIGIDVAKSTLQVYIPENELNIEIENSLYGLKKLYNKLNKLYKKTLPDIVFVYESTGSYSTILERYCQANKIKCFKVGAYQSSSFSKVIKNRSKTDKIDAKMLSQMNILAKEKDIKIPVRDDSAHKIRSFIKYYHSLIKEEGRVANYLESATFNLEDKYVLKRVKNKITNIQKEQLLIVEKAMELIKSNDSYYEAYTNITSIKGVGQKSAIILLYLFLKYPNASRQHITALSGLDPIEKSSGTSVNRKQRISKQGLSLLRAIMYMPVLTTIQHNEEMRLFYNRLLERGKPKMLAQMAVMRKMILLAHSLYKNKEQYDSKRYLNFTQNKKEIEMK

SEQ ID NO: 483165 - protein, 368 aa, unidentified
MIVRIITYERSTLVNDEKYIGLDVHQATIVVAVMDSTGKWVMESILETKAATILQFFAGLRGTMSVIFEEGTWSAWLYDLLHSRVDKLVVCNPRKNALLNDGNKSDRIDARKLAELLHGNQLKPVYHGEIGVRMLRELSRSYLTIVKDLSRVMNRLKAVYRSWAIPCGGTDVYYPRHRTQWLAKIREAGVRLRAERLYEQLDMLQHLRQQARRELLAESRKHAITAKLRQIPYLGPIRVALAVALIQTPHRFRTKRQLWAYSGLALETRTSAEYRFVEGQVRRSKKLLCIRGLNKDHNHDLKGLFKGAATMASVRPGPFRNFYQAALAKGIKPTMARLTLARKIAAITLTLWKKGENFDAEKLKSQAA

SEQ ID NO: 483166 - protein, 387 aa, unidentified
MGRAEPHTRGRVMEHHSEAFVALDTAKLRNAVAIADAGRNGEIRYLGEFDNTEVGTRKLVAQLASKHARLTFCYEAGPTGYGLHRLIKSLGHDCIVVAPSLIPSKPGDRVKTNRRDAVNLAKLLRAGELTAVWVPDERHEAMRDLVRARDAAAKDYRIKRQNVSSLLLRVGRHYPGKKTWGRAHTNWLTSLKLEHREQRIAFEEMLLAVRQVRERIERLEQAMREAVADWSLAPVVEAVQALRGIDMVGAVAFLAELGDLSRFENPRQLMAYLGLTPSERSTGESVKRGGITKAGNTRARRLLIEAAWSYRFPPRVSKDMQTRIGAAPRTAREIAWKAQMRLCGRFRILTRKGKRPTIVVTAIARELSAFIWAIGREVVGSHATANQ

SEQ ID NO: 483167 - protein, 421 aa, unidentified
MKKEDAAGIQVIFERVCGLDVHKSVVVACLRILSAGGRVRTETRRFGTMTKDLLALLDWLKQAQVTHVAMESTGVFWKPIYNILEGHLEVWVVNARHLEKVPGRKTDVSDAQWIAQLLQCGLLKPSFVPERAQRDLRDLTRNRTRLVQQRATVANRVHKVLEDANIKLGSVASDVLGVSGRSMIEAIIAGQQDSEQLAELAQRRMRGKIPQLQLALEGKVTAHHRFMLRELLEQYDQLTNKIIAFEQRIEEVASSSFKQAAALVDTIPGVAIAAAQAIVAEIGINMSQFPSHKHLCSWAGRCPGNHESAGKRQSGKTPKAGKWLDAILTECAWAASRTKGTYLNAQYHRIAPRRGKKRAIGAVKHSILTAVYFIIRDQVAYKDLGADHFARLNPEQQTRYHVRKLQQLGHHVEITPLEEAA

SEQ ID NO: 483168 - protein, 424 aa, unidentified
MREEGLSMAEEIEWFVGIDWASQSHQVCLVDVRGECLGERAVAHGGLGIEELCDWLIARTGATPEVIGVAIEMTQGPVVEALLERGFCVYGINPKQLDRFRDRFTVAGAKDDRRDAHVLGDSLRTDRHAFRRLSNDEPVIVKLREWSRMADDLQQERARLASRMREQLWRYYPQMLELADDLAADWFLDLWNQAPTPAKAARLRQTTIERFVKAHRLRRWQAPEVLRILKQKPLSVAPGVVEAASDHIRTLTVRIRLVNQQLKAAHRKLDELCAQLVPSEEDEPGQQCEQRDVVILRSMPGLGRTILAVLLAEVWQPLRRRDYHALRSLSGVAPVTRRSGKTCVVVRRYACNKRLANALYHWARVATQHDALSRRRYAALRQRGHSHGRALRTVADRLLSVACTLLEQQTLFDPTYEVREAAGA

SEQ ID NO: 483169 - protein, 472 aa, unidentified
MKIPTNIMAVGIDPAKQVHQAVAIVYPEVVLLNCRFENNYEAISSFDEKVMKIAKKNDLKVIYGLEDSGAYGRTIKEVLTSRYREVREVNPLKTNRQKDFYGGDKSDEIDAKCIAQILLRSHENLPKIEEDNQVYISIREAERFRETLVKAKTQNVNRLHFYLTKTWGGSYKKFFSSLQNKIALEFFSSYPIPQTLKEIKAKELAKFLYEASSHRLGKGNPWKLAHEKVKFILSSIKTVKDLPLNWEREIKAEIIRQLIANISQAKDSIKAIERKLEKDLLPQTGQRLTSLKSISTVTASVLLGETLNPDRFSTRDKFARYNGTAPQEISSGGKIKHRARKGCNHRLKKTLRQISITATVREPLTKAYYQRCLSRGLSKSQALKRVDRKISDIVYKMMRTKQPYDRELAIRNIIERKQRTNNLGRARWQSRNLRIKKSSDEIESLVLPPLDIISELREIEKKDRSVSEKILT

SEQ ID NO: 483170 - protein, 362 aa, unidentified
MFTERTSVGLDVHARSVAAAAIDGVTGELVQTKLTPSHEHIRSWLAELPGPVAVAYEAGPTGFGLSRSLNTAGIRCEVVAPSKLQRPPGDRVKTDAKDAVHLAKLLRLDEITPVAVPAVEQEAARDLVRAREDARGDLMRARHRLSKLLLRQGFVYSGGQAWTGAHDVWLRQTGALLGSAATRMTFESDYEAVLAVRARRDRLDTAIATMAADCEFTPVVHRLGCLRGIGTLTGFALAVEVGDWERFTGKTIGSFVGLVPSEYSSGQSRVQGSITKTGNSHLRRLLVEAAWHHRARYVVGKTMRDRWELAGPAARARGDQGNRRLHRRWNNMRARHKRHVVANIAIARELAGWCWSLAVLEE

SEQ ID NO: 483171 - protein, 314 aa, unidentified
MDDTATVPTRFIGCDVGKAEIIVFDSASGKTTSLPNRADALAAFAASLDPAALVVCEATGGYEAALLDAMVAAGRAAHRADARKVKAFIRSLGILGKSDAIDAKALAQYGRERHDRLTRWQPREQHRDQLQLLVSMRRDLVRQRVAHRNRRQAPGAAPVAARLQRIIATLDAEIAGIDADIRALIDACDTLAQTVHTLTDIAGIGQTTAAQLTALMPELGSLNRKQAAALAGLAPHPKQSGTNNAYRRTRGGRPEVKHTLFMAALAAARHNPTLNTFYKRLISNGKKPIVALIAVMRKLITIANARLRDNLASI

SEQ ID NO: 483172 - protein, 324 aa, unidentified
MQGKDTPEAKAEMQVYVGLDVSKAAIDVYLHPLGHAFRVANTNQGLRQLKSRLAGLQVVLVTVEATGKFHRQAHRTLHTAGYPVAVVNPLRSRLFAEAIGKLAKTDPIDARTLAVMGESLKLAASPPPAALIAELQELVLARRAAVTEQTALENRLGAANSTFLIAAIKKLSKAVERHVAHLDAEIDRLIADDPALARRQEILTSIPGIGRVVASTLIACLAELGMLSSKAIAMLVGLAPVACDSGESKGRRRIRGGREHVRSPLYLAAVSAVRCNPDLKAFYRRLRDEKAKPAKQALTAVARKLVTLANTLVHDDRLWVEKRA

SEQ ID NO: 483173 - protein, 408 aa, unidentified
MNPLFVGIDVSSKNNVAYLMNPDGSKHSSFSVQNNFGGAKLLSERIVSALSSMRLSDVVIGLEATSIYGDSLVYALREDGRLGRFQRKIHVLNPKQVRKFKEAYPDLPKNDFVDAFVIADHLRFGRIAKEVYMDDYRYQALRTLTRARFDVIQNLTREKQRFANYLFLKCSGMAQDKDIQNTSATTIALMERFETVDDLANADLDELTAFIAETGRGRFADPDATAKVVQAAARSSYRLPKTVNDTVNQATAVSIASMRALKEQVKVLDKAIEQQFEIIPNTLTSIPGIGKVYSAGIIAEIGDIHRFNSQASVAKFAGLVWTQHQSGEFEAEHSRMIKSGNRYLRYYLLEAANSVRRCDSEFRRYYDLKFKEVNKYQHKRALALTARKLVRLVFRLLKDNRLYISPEG

SEQ ID NO: 483174 - protein, 309 aa, unidentified
MTAVGIDVGKAALDVAVDGVAGVVRYANTAAGMGKLVRRLQGVVDARVVVEATGGYEDALLEACCDAGLWVCRINPRQARDFARATGELAKTDAIDARLLCLLSRMFVDRLRRYVAPAPWQRELRDWLRRRGQVVTTLQAQRQQTALTSPSVRKLMARTIAALVRELAAIDRAMQALLKTHTPPALRSSKGMGPIFQATSLALLPELGTLTRQQIAKLVGVAPMNRDSGQMHGKRRIRGGRAPVRVALYMATLSAVRWDPAMRAHYQQLRARGKLGKVALVACMRKLLTLVNARRRDELRLQAGAAIAA

SEQ ID NO: 483175 - protein, 370 aa, unidentified
MLNTTTFVGLDVHARSIKAVALDAMTGEVRSATFGYDAAEVAGWVSSVDPSAKCVYESGVTGFDLQKRLASMGIDCVVGAVSKMIKPPADRKRKNDRNDAEFLARMLSVGNVVEVWVPDDGCEAARDLSRALDDAREDLKRCKQRLSKFLLRHGYVFSETTPTGRRKGNWTAAHWAWIKSISFPEKADDDVLAYYVDAVRQATEDKARLERLVEAEASKPRWKRRIDSIRCLKGIDVTSAADLVFEAGEFSRFKSARSFAAWLGLTPSEHSSGESVRQGGITKAGNKHLRRVLVESAWHYLGCSPHSKDLAKGQVPDPAARRHAAKGVRRLVERRRAMLERGVHKNKANVATARELACWCWAVGRMIENG

SEQ ID NO: 483176 - protein, 338 aa, unidentified
MERQYVAIDLHLNRSVVVRENEAGEKVGVTRIENDPLALADALREAGEAPEVAIEATYGWYWAVDTLEELGAKVHLVNPSGLAWENRRVKNDYRDCCDLLDRMRLGKLPEAWIAPHAVRELRELVRFRARLVMLRTGLKAQLKAVLAKHGLRPPVKDLWGLSGPIWLDQLDLPRAYTTRIESIRDLVEVYDREIDMLEREIHRQLKDHAGYQAIQAIPGVGPTIAAIMVAEIGDVSRFPNPQALCSWAGLTPKHHESDTKVRRGRITKAGSKLVRWAAIEAVSNGRGGPKLKADYHRIAERRPKSVARVAVARKLVIMVFYGLRDGQIRCLAQGEQAG

SEQ ID NO: 483177 - protein, 357 aa, unidentified
MLTIGVDAHKRVHVAVSLDVFGGELAHWRGQNSPAGWRDLLDWVSAQDEHRRFGVEGAWSYGRGLAQYLVAAGETVYEINPRWTAAGRLHSRKPGKTDRLDAAAVATLVLQEGDSLPHVYQDDESSVLNLLTVERDTALADATRLRNQLHVQLMQLDPEYQLHLPPIRSRRGLAAAKEYTVADPNPLRQVRVAVVRRLAARLELTLDQADEMAVKIRELAERHFKPLTRLCGVNLLTAGALAGILGPGPRFRSDAGLAAYAGVSPLEASSAARVRHRLNRGGNRRLNALLFRIAITQARHLPAAQAYLARRTSEEKTRREAYRALKRYLARAVFKLWSECLEDRYGPTPPPATSPCT

SEQ ID NO: 483178 - protein, 340 aa, unidentified
MKKLYGAFDLHSTNNYLAIIDGDDKRLYKKRLPNYPDVILAELEPYRERLDGIVVESTFNWYWLVDLLMAEGYKAHLANPAGIQKYKGLKHSDDNHDAFWLAHLLRLGILPKGYIYPKEDRPIRDLLRKRSHLVQLRTSLINSLQGILRRNTGQKLNINKMKQLTMDNVAPLLAGQEDLALSGLVSKESIDHLSGQIKRIESAVSEKIKIRKSFGGLQTIPGVGIILCLTIMLEVGDIKRFPKVGNFTSYCRKVPTAWTSNEKKKGKGNKKNGNKYLAWAFSEAAELARRFDETARSYYNRKAAKTKIMVARGALAHKLARAAYYIIRDGVEFDHRKLFG

SEQ ID NO: 483179 - protein, 356 aa, unidentified
MKKVTQSTRKVELKGADCYIGVDVHKLTYYAAILTTGGQSVEFSCPANPVGFISQLKDMKIKILGLAYESGPTGYELAWKCQEAGLPVMVAAASKIPRPIIAGGKTDRLDGLKLAEYLAKGILKGLTIPSREEFSLRELERGRQQLVKSRKKLRQQIKSFLLKNHIETPPGFTRWSQSGMEALKRQELSHKHLRMTLGSYLRQLEFVLQEIEETKTALSREVISQGKEEQIKNLQTIPGIGETISHTFTTEIFRPERFDCAEEICAYVGLAPIVSQSGQSRGTARLQRVGQIYLRSILVEAAWIFAGKEAHYKQIYNKIRSKTNLPQKAITAVARRLLIIMWRVAVEKRAYQPKST

SEQ ID NO: 483180 - protein, 334 aa, unidentified
MQNVTTVGIDLAKNVFSLHAVDGRGMVVLRKTVSRARLVSVVAQLPACVIGLEACSGAHEWARRFAQHGHTVKLMVPKFVAPYRKSGKNDGNDAEAICEAVSRPSMRFVPIKSVEQQAMLTLHRVRLGFVEERTATINRIRGLLAEFGVVLAQRAVEVRRGAAGALGQLPGPAARALNDLLTHVRLLDERIGEYGRDLEHHARTDERAKRIRALSGVGPIGASAIVASVADAHEFNNGRQFAAWLGLTPKQYSTGGKTRLGRITAHGDPYLRTLLIMGARSMLQTALGRTDRLARWALGVRARRGYHRACVAIAAKHARIIWAMFAKNEPLRLA

SEQ ID NO: 483181 - protein, 441 aa, unidentified
MAMRKREEEVVFPNAAGIDVGASSHWVAVPKHLADEPVREFGAMTDDLNAMADWLIACGIDTVALESTGVYWIPIYEVLEQRGLKVWLVDAGQLKYVPGRKSDVQDCQWLQKLMSLGLLRAAWRPGDEVCVVRAVVRQREVLLAEQGSWVQRMQKALVQMNIQLTEVLTDVMGMTGQAIIRDIVAGQRDPAVLAKHRNGRVKASLAEIQRALTGNWRDEHVFVLTQSLAMFDGLAQRVAECEAKLEALLAPLGHHDVKLAGPAKRAGKNTPSFDLRTALARWAGVDLTRINGLAVTSVLTVLSEIGPDLSRFANVKHFCSWLGLCPGTKISGGKVLSTRTRRSTNRVRQALKLAAMSLSRNGSALGAFYRRMCARMDKPRANTAVAHKLARMVYFMLTRGEDYVDQGQQHYEQQQRQRSIAALRRRAADLGFAIAPKAATA

SEQ ID NO: 483182 - protein, 366 aa, unidentified
MARYVGLDAHSKKSVYVIQDESGRILGEGRIPTTPEGFQGLCARHELGVGTRVALESGPMAFFVARGLSALGLEPLVVDAREVRSKALRPNQKSDRRDALELCEGLRRNTYRTMVHVPPESIERLRDTLGRRRHFVRIKTMQVNAVKHLLRRAGLQVAGRSLGTESGWSKLMRSVSFDPLLQTFCASHRDLWHCAQAQVATLEASLQAQQSQFQPALDRLRTVPGVGPIVGLTVIAAFSDVRRFPTAKHAASYAGLVSSTYDSGERVQHGHITRRGSSELRSMLCEAAHHARRRTNPLQPYFSSLCVRRGYKMAVVAVAHRLCRILYAMLRHGTDFDVTRLGVEPGRFDRTTTHHFRLKSRTAAAV

SEQ ID NO: 483183 - protein, 412 aa, unidentified
MTVTNQFAAHVGLDWADKKHDVCVQFNNGERVFHVIEHTAEALDVWLTELHQKVKGRIAIALELKKGPVVYALQKYPFITVFPVHALSLARYRQAFSPSGAKDDPQDAELALELMLRYPQKIKAIEPDNADIRLLQQLVEQRRQLVEDKRRFVNRIINTLKQYYPQPLEWFSHRGSLLLCELIIRWPSLQQLKRARRETVRNFLNAKGGRAMALTEQRVVSIDNAIPLTTDPSVIEANALMAAALATQIKVVSEIIKTYDERIETLFDTLPDAGLLKSLPGMGPCMGPWMLAALGDNRDRFNSAEEIQNYAGIAPVTERSGQKSWVHWRWQCAKFVRQTFVEWAAKTVNSSYWARLYYQGMREKGKSHQSAIRALAFKWIRIIYRCWKTRTQYDEAKYLLALEARHSPLLKP

SEQ ID NO: 483184 - protein, 345 aa, unidentified
MKNSNVIGIDLAKHVIQVCKIDKHGELISNKAISPSKLKELLAKTVPSIVAMEGCGACHYWSRLAQKYGHDVRVISPKKVKGFLQGHKTDANDALAIAVASIQLGMKFSQIKTEEQQSLQTLETSRKFLDKELVALNNHIRAYLYEYGIISRRGRKSLRETMAIVLDDLDTRLPACLKNTLGLLWERYKLTVEQLTEAEKYKAHLVNQLEPCQRLMDLEGIGKVCASMLYANIGDGREFKNGRQASVYIGLTPKQHSSGGKTYFTGIDKQGGNKELRAALYQGALSVIYKLPSEPRTLKEAWLIELVKRAGVKRTCIALANKTVRTAWALLATGKSYEPVPLGRS

SEQ ID NO: 483185 - protein, 323 aa, unidentified
MELKRIAIDTSKHVFTIHGIDVNDRPVLRQELRRGRVETFIAKLPPTDVVLEACAGSHHWGRIFERLGHRVSLIPPQYVKPFVKRGKNDRNDAEAISEAASRPTMRFVPVKGVEDQAAMLVVKHRQMLVAQRTQAINALRGHASEFGIVVAKGGQHVATLLTLLDENAAIPVVARAMFGEIGQHIADLDDKIAALDKQLLEQHKANPVSRLLAEIPGVGPITAITMALTVNPADFGSARHFAAWLGLTPREHSTGGKRRLGRISKAGNERLRQLLVVGATAVIRYARPGSKSASGWLLQLLDRNRLRSRRWLWPTRWPGSSGP

SEQ ID NO: 483186 - protein, 400 aa, unidentified
MEVYCGIDWAEQHHDVAVVDSAGRVLAQQRIGDDLAGFAALTEVLDRLAPTRGQVGIALEIDHGLFVHALRDAGFRVFAINPMAVDRYRDRYRVSRAKSDAVDALLLANLLRTDASRHCEIPADSEQAVVVSVLARAQQDAVRERRRQTARLRSALREFYPAVLRAFPDLTTKTALTVLSAAPSPGQALGLTRDDLHALARSCRRWGITLREVTRLHQVLHQPQLRQAPSVEQAMGTVVLQLVLGLRILNLTIARLETELAEQLNRHADTAILRSLPGVGVVLAGRMLSEFGDDPARFTSAASRRDYAGTAPITKASGKGRVVLMRRIRNTRLFDTCRDWSFSAVNASPGARALYQHRRGLGDGHEKALRRVGNKLVGQLDHCLRHHERYREETAWTLTA

SEQ ID NO: 483187 - protein, 337 aa, unidentified
MLYLGLDVHSKWSTLVALRRETGELIERDRVPNEALGETLEALGEPLEGAMETGTQAWVLYRQLRGHFVKLHVVDAAKMWDRRRDHSAKTDRRDALRLAQALAKGELEGEVWIPDERTQELRVLGRAKVRTSRWVTKLTNELGSLLRSWGVPVPQSLLSARGARLVAEVHLPPQSQRVLTLWRELWERLQAIEQELMAAVEAEAKADPVCRQLMTMPQVGALTALMTRAEIGEIGRFRNPKALVGYIGLAPQVFQTSETCRYGALPPSGNRWLRYVLVLMANRLARNGTNTRLHQLYWRTCLRHDRNSAKIVVARKVAHLLWHLLSRGEEWQEEPVR

SEQ ID NO: 483188 - protein, 389 aa, unidentified
MFYVGLDVASEKHDCCILNEKKKVLQSFSISNSSIGFDSLLAALAELPSDEIKIGLEATGIYSENLSVFLRRKGFDVTTINPLLLKKHQCATTLRKTKTDKADAKGIALFIAEEGFQPDLPISYHIQELKSLTRARFSVVQDRSALKNKVKRLVVLLFPELLGEFTDIFGSSATALLKQYPSAAKLAACHCDTLAALLRKASRGRFGRAKAEHLRQLAQNSVGNHSTARAMELRMLLKRIDLLSEQIAEYDTEIKVIMDKIDSPILSIPGISYTLGAIIVAEIGDISRFSSPARLLAFAGLEPSIYQSGKFVPTSGKMVKRGSPFLRWALLQAAGYTPTYSSTFALYRAKKVAEGKPAAVVRSHVAKKLVRIIYSLLTHSTAFSDQLSA

SEQ ID NO: 483189 - protein, 341 aa, unidentified
MEITTVGLDLAKNVFQVHAIGSTGGVVVRRSLRRAQVIPFFSKLPPCLIGMEACGTSHHWARELVGLGHEVRLMPPAYVKPYVKRGKTDAGDAEAICEAVTRPTMRFVPIKSVEQQAALALHRTRDLLVRQRTQLVNMIRGLLAEFGIDIPKGITNALAFVRRAVAGEANEVPDLATKVIGGLAEQAIEVQGRIRQLERDLLASYRSNDLARRIATVPGVGLLGATAIAATVTDPTQFRSGRQFAAWLGLTPLNNSSGGKERLGRMGDQYLRRLLVTGMTSLVRRNKHHPDSADPRINALLARKPLRLVTVAMANRAARAIWAIMVRGDVYRVPALGSVTA

SEQ ID NO: 483190 - protein, 399 aa, unidentified
MAAPSLWAGIDAGKLDHHCVLIDASGERLLSRRVRNDEAPLTALIDDVIALADGGLVQWAIDLNGGGAALVISLLLARDQHLLYIPGRIVHHASAAYRGDGKTDAKDAAIIADQARMRRDLPEFRHRDEFTVELRTLCARRTDVAADRNRAINRLRAQLLEYFPALERAFDYSHRRGALILLTGYQTPEALRRTGRTRLEKWLRGRNAYNPVAIADRAIAAANAQHVVVTGQRLGSTIVARIAQQILDIDAELSDLDDMIEERFTQHQQAAVIRSMPGFGPLLGAELIAATNGGLDSFHSADRLAAVAGLAPVPRDSGRISGNLKRPRRYDRRLLRVFYLAANNSIKTCPQSRAYYDRKRAEGKHHRQAILSLARRRVNVLWAMQRDNTAYRSTAKTAA

SEQ ID NO: 483191 - protein, 371 aa, unidentified
MHDTIFVGMDVHKATISVAVADGARGGEVRHLGNFLNRPDHVGKLVERLSKTDGRRLRFCYEAGPCGYGLHRQITDLGHECVVVAPSLIPMKAGDRIKTDRRDAVMLTKLHRAGELTAVWVPDAAHEAMRDLVRARATAVRVLGKARQHLQGFLLRQGRVYAGKKGWTLPYRRWLTTLRFDHPAQQVVLQDYIHSVHDAEERIARLMKQIEDLVPTWSMAPVVEAFQAMRGVAFVAAVTVVAEVGDFTRFDNPRQVMAYLGLTPSEHSSGTAIRRGGITKAGNALARRVLIEGAWTYRMQARVSRKLHDRLEGLPQIVRDIAWKAQVRLCGRYRRLAATGKPKVVVTTAIAREMVGFLWAIARQAQVGSVA

SEQ ID NO: 483192 - protein, 336 aa, unidentified
MAHYCGIDLHSNNHVLVVIDEEDKRLYEKRLGNDLSLTLKALSPYRESLQSIAVESTFNWYWLVDGLQEHGYDLQLVNTAAVKQYDGLKYSDDHHDAFHLAHLMRLGILPTGYIYPKEQRAIRDLLRRRLSLVRTASAQLISVQSQIWRSTGIRIKSAELRKLEFAPPLVDDYTLQAVQAGLAVYQVIQREIDALERTAHQAVRLTEAFKILQTITGIGKILGLTIMLETGTIDRFAGAGNFASYCRCVDSKRTSNGKKKGEGNAKAGNKYLSWAFSEAAHFSVRFEPLAQRFYERKKAKTNGIIAIRAVARKLARASWMMLKHQVPYDARRMFPG

SEQ ID NO: 483193 - protein, 333 aa, unidentified
MEDLSEMKHFVGCDVSKETLDFGIFLPKTDSRRFPHTRVPNTPEGYRQAMAWLRTHGVDKSAMVVGMEHTGYYSCEFSEWLHGKGVRFVMLHPMAVKRCWSEGRNKTDKADAQFIADYVYTQREKLSPSQPEAPAIKALRMLISERRLAVKSKVMCQNLRDVQGKGAGHKRLSEMIKTHRDNIRAIEKDMLALICSIPELRKTYELLTSIPGVGLINAAAAIVATGNFERFQTARQYAKFCKVAPLEKSSGTSVRGGAHVPSCGHTELKTLLTDAARSAIVHDPQIKAYYERKRAQGKSHGCVLNAVKFKLVCRMFSVVKRGEKYVNTEKFRS

SEQ ID NO: 483194 - protein, 345 aa, unidentified
MKKNLFFIGLDISEANFAASIYKTPGQPIVTKEAIPNDRKGFKMLLLWLNDYHIDKKNCRICMEATGVYSQAIAYYLLFQGFPVSVEPPLKVKRAFDPVGHKTDPVDSKQIAEYAYRFQDELTSWKPRDEILEKIRQLLSVREQFTKQKVALDNSIQAYSKQRVQVALIKKAQKETLDQLKKQIARIDKELEKLIKQDPEIFQRTNNLDSIPGCGMLLAAHLLVITENFTKIQNSKRLAAFIGIVPYQHQSGSSVSKRAKIRYFGPGPSRKLLRLAAQSVATHNVTFRRYYLRKLDQGKAKPLVLNNIANKLLKIACTIIRNNTRYIKDYRSINPMYLKNAVKNA

SEQ ID NO: 483195 - protein, 404 aa, unidentified
MLDTEDIGVFLGLDVGKTAHHGHGLTPAGKKVFDKPMPNSEPKLRAVFDKLKAKFGTVLVIVDQPASIGALPLTVARDADCEVAYLPGLAMRRIADLYPGEAKTDAKDAAVIADAARTMPHTLRSLELTDEITAELTVLTGFDQDLAAEATRTSNRIRGLLTQFHPSLERVLGPRLDHAAVTWLLERYGSPAALRKAGRRRLVEVIRPKAPRMAARLIDDVFTALDEQTVVVPGTGTLDVVIPSLARSLAAVHDQRRALEAQINSLLEAHPLHQVLTSMPGVGVRTAAVLLVTVGDGTSFASAAHLASYAGLAPTTRSSGTSIHGEHAPRGGNRQLKRAMFLSAFACMNADPASRTYYDRQRARGKTHTQALLRLARQRISVLFAMLRDGTFYESRTPDVTLAA

SEQ ID NO: 483196 - protein, 412 aa, unidentified
MRLLVGDDWAEDHHDIEVMDEAGKVLARRRLPEGVAGMAQLHGLLGQFLPEEDPDSVEVIIGIETDRGPWVAALVAAGYTVFPVNPLQASRYRERHGVSGAKSDAGDAHMLADMVRTDSHQLRAAAGDSPEAAGIKVLARTHKTLIWERTRAVQRLRHQLREYFPAAIEAFDDLDAADTLELLGKAPDPARAAKLTRAQVSAALKRARRRNIPDKATAILAALRSEQLRQPEALTAAYAATVRSLIAVITTLNEQVKILQGQVEEHFGRHPDAEVYLSQPGIGAILGARVPGEFGDDPSRYRDGKARRNYAATSPLTRASGKKKVVAARFIHNDRLVDALNAQAFAALNASPGARAYYDELRTRKIEHNDALRRLANRLVGILHGCLKTGTLYDEATAWGHRENLPQSSAAA

SEQ ID NO: 483197 - protein, 410 aa, unidentified
MRIVYKRCCGLDVHKKVILACLLVLDRDGELRKEIRKFGTMTTDLLDLLDWLKQAGCTHVAMESTGVYWKPIYNILEGHVEAVVVNAQHLKGVPGRKTDVLDSEWLAECFQLGLLKASFIPPAPVRELRDLTRYRTSLIAERARAANRLQKVLEDANIKLASVATDIQGVSSWSMLQAIVAGDTDPEALADLAKGLLRKKRPQLVKALTGKIKPHHRFLIAELICQIEYLEETVGRIGKEIEERLRPFEEDISLLDSVPGISRQTAEVLLAEMGWDMTRFPSDKHLASWAGMCPGNNESAGKRRTGKTRKGSRWLRHALIEAAHGAARTKNKYLKAHYHRVAAHRGKKKALVAVGHSILIIAYHLLTRRQQYSDLGANYFDERDRTSVRLRCVKRLEKLGFRVDLQPSVA

SEQ ID NO: 483198 - protein, 447 aa, unidentified
MKKVFIGIDVGKFKNSISIINTEGNPIIKKGLSIENDYYGFARLEEQIDLIINNYGFTYDDCIAGVESTGHYWFNLRDYLKDIGIETVMIKTDSVKHRRALEEGQKGKNDTLDARVIASCLRNGNYVYIRENERELRALQKLTRMRNDISDELVALKNKIHRCIDICNPVFFKIFENLNSKTGVALIKLYPSPEDIINVDLDNIKRELCEIVDKPNMRMVSLYKEECEIWSRLIKEPSYAEKVEMIAYIDKFLLQNESKEQLDKQIKEIAKNIIPLYSEFEKIRGIPLIQLISVLSEIGDIRNFKNTRAILAFLGLSLKGNASGKYVGERRINKAGSRIVRKHLFNIMDSLVKHNEYFRIAYCYYKSYNHKNPTKKRSMQIAVMCKFVRVMYGMLKHNTNFDYKEMLKGYYFGDCNMKVFKEEFEGEKRTKKIENYKLGYSIFINYS

SEQ ID NO: 483199 - protein, 410 aa, unidentified
MRIIALDVHRRFAQVAVLEDGKIRNAGRIDLEHSRLLQFAKTLKPDDEIIIEATGNTNVIVRLLSPFVGRVVIANPILVRAIAWAKVKTDKIDAAVLAKLHASGFLPEVWMPDEETETRRRVVAERAQLVSQITRLKNRIQSVLHANLIPPYKGILFSQRGRTWLTAQPLPEDQRRVILRHAGELDRLGAELAEVDKSLAQRALEEPRVKRLMTITGVNVTVAMSVLAAIGDIRRFSSQEKLVSYFGLNPRVRQSGDKPAYHGRITKQGRAHARSMLVEAAWVVSGAPGPLRAFFIRIRDKRGKHVAAVATARKLAVVVWHMLTKDEDFTWSRPALLQWKLRKLELKAGHPSRRGGHQKGSAAAYSNKSARDSEREATGNAEEEYRRFVANWKQQSPKGRSGATNEVRRS

SEQ ID NO: 483200 - protein, 357 aa, unidentified
MQTQSNHLDFKGQNIYVGFDVHLKSWQVTIMTEKLTHKTFSQPPDPKLLYQYLDRNFPGGTYHSAYEAGFCGYWIHHQLKALGFNSIVVNPADIPTTDKEKVQKEDSRDSRKIAKTLRSGDLVPIHVPSLKTLEDRCLIRTRAMMVKDATRNKNRVKSYLHFHGIAIPEAFKDSRWSNRFIIWLEGLKLGEQSGTYSLQAIVTTTKYLRTSTLEITGKIKSLSQTDNYLEDVKLLKGIPGIGLITAMTILTELETMDRFEKFDNLCGYIGLIPSTHSSGEKDVIGDITRRGHGVLRAALIESAWIAARLDPALSKSYHDYCKRMEANNAIVRIAKKLLSRIRFVLKTNKPYICSVVK

SEQ ID NO: 483201 - protein, 338 aa, unidentified
MNATTIGLDIAKSVFQLHGEDAEGRLVVQKRLSRRGMAEFFAKLAPCVVALEACGTSHYWGRTLRAMGHEVRLIPAAYVKPFVRRNKTDARDAAAICVAARRPDMRPVAIKSEEQQASRARERSRELLIKQRTQLMNSLRAMLAEFGIVAAQGARGFAELRARLASGDGLPKTLVTALRLVAAQLDGLTPAIESMEDKIKTIVRADPTMRRLSRIPGVGFITAHAVVAAIGDGRQFVSSRCFAAWGGMTPRETSSAGKRRTKGLSRQGESRLRKLFALGAATLMRNARSRDDRASTWQRGILARRPMKVAVMAQAAKTARIAWAVLTSGKDYAPPAAA

SEQ ID NO: 483202 - protein, 444 aa, unidentified
MAVRKREDEVFPNAAAIDIGASSHWVAVPLHLAQAAGDEPVREAGAMTDDLNMLARWLVKLGVDTVAVESTGVYWIPVFEVLEQHGLKVWLVDARQMKYVPGRKSDVQDCQWLQKLMSLGLLRAAWRPSAEVCVLRAVARQRETLITEQASWVQRMQKALVQMNIQLTEVITDVMGQTGQAIIRDIVAGQRDPKALARHRHRRVKASEADIVKALTGNWREEHLFVLKQALGVYDDIGRHLVECDAKLEALLDQRAGAKIDLGATPRAGSKARAEHEIRQRLADWAGVELTRINGLGVTIVMKLLTEIGPDLSRFATVKHFCSWLSLCPGTKISGGKVLSSGTKRSASRARQALKMAAQSLCRSESALGAFYRRLCGRMDKPKANTATAHKLARMVYFMLTRGEAFVDQGQQRYEEQQRQRSIAALKRRAAALGFQINPFVVAA

SEQ ID NO: 483203 - protein, 409 aa, unidentified
MQPIIKSCCGIDVHKKMIKACIAKGPLDKPPKFEIKTFSTMTSDLLRLKDWLRQNEVEKVAMESTGVYWKPIFNILEDEFPIVLSNPQALRKIPGKKSDVSDSKWIATLLRSDLVPGSFIPPKPIRELRDLNRTRRKLVGVMTSDKNRLHKVLEDANIKLSSVVSEVGGVSSMNLIQALMTKDELTREEIKALVHGKLRSKVDQLVEALNGKLTDHHRFLLKIHLENIAFMAEQIQELDDEIAKRMIPFQKESYLIQTIPGIKTTTASAIIAEIGVDMSQFQDEARLSCWAGICPGNNESAGVKKSGKIRKGDKFLKATLVEAAWSASKKKGSAYSAIYNNIAKRRGKKRALVALGHQILRDVYRVLKTGEPYVDEGAEAVFQRNSANRQKSAIRLLERSGYTVTKASA

SEQ ID NO: 483204 - protein, 388 aa, unidentified
MFYLGIDIGKFNHAATLVNEQGKLIASLSSFANTHTGFQTLLHLISSHLPPTDQLRVGMEATGPYWKPLAQWLTNNGWLPVILNPIKTASLRNYGIRGSKTDSIDSLLIANTLRMEGEQPHPLLPKLSEELRQYTRLRAEMGEDRTGIGLRVASLEDLLFPELLSSFPKTLSPSCLAVLAVAPTPSKVLDLGEEKLTALLHKASGGKLNQERAKQIMDKAAHSVAVTSPAAEQSLALLLEQINLLNAQLKVVDQNIKKLYKQAGVHFTSIAGVGILSAATILAEYGSVTRFSKATQMVAFAGVDPKLRNSGIHQGQVHISKRGPRYLRRALYLACQGVVRNDEYFHSIYQRHRDKGKSYKEAIIAVVNRFIHVLYAMWRDNRPYYPLT

SEQ ID NO: 483205 - protein, 412 aa, unidentified
MEVLYRNCCGIDVHKQFLVACLLVVDEAGCQHKELRRFSTMTGDLLTCVDWLKAAQCRAIAMESTGVYWKSPWNLMEGHFESVMIVNAEHMKRVPGRKTDKKDAEWIAELLQLGLLKPSFIPSRPQRELRDLTRLRTTMTGERTRLVNRLHKTLEDTNLKLSSVLTDIMGQTGRHILGAILRGEEDPAVLADLALRRAASKRDALALALRGRVSDHHRLLLRELLEMIQHHDQAIYRLDQKIEEHLRPYEPLIQRLDVIPGCSRRVIEILFAEVGWDLSAFPDAAHLASWVGICPGNNESGGQRFSGRIRKGNRWVKAILVQAAQAAARTKNTYLSAQYHQIAARRGNKRAAVAVGHSILVIYYHMLTTGEPYREKGADYFSELDRKHAERRFTKQLERLGYQVTLTPAQIV

SEQ ID NO: 483206 - protein, 317 aa, unidentified
MATTAGYVGIDVAKRHLDLALHATGQPWQVANDAAGVKQVVKHLLTVAPTLIVLEATGGLETRVVSALAAAQLPVVVVNPRQVRAFAQATGTLAKTDRLDAQVLAHFAAAMQPTPRPLPDAATQELSAVLTRRQQLVDMVTAESNRLGAQPNSALRKRIRVHLTWLTKELGRTEKELTQLIQQSPVWRVQDDLLQSAKGVGPVLSQTLLAEVPELGHLHHKQMAALIGVAPFNQDSGGKRGKRRIWGGRARVRAVLYMGALVATRHNPVIKAFYERLLAAGKEKKVALTACMRKLLRILNAMMKHQTKWQDVSINTH

SEQ ID NO: 483207 - protein, 358 aa, unidentified
MRIIGCDLHARQQTIAMLNTETGEVVEKILRHEADKVREFYASLPGQVRVGIEATGSMHWFLKLMEELGIDCQVGHPAKIRAAEPRKQKHDRRDAALQLKLLVENRFPSIWMPPTEQRDLRVLLLHRHQWVRMRTRVQNTLQAIALSNGLRRGSTLWSQAGQHAIASLPLTPNAAHRRTQLQTLYRKLDRQIGKLDERVRDQALRRPGAKLLMTHPGVGAVTALATDVFLGDPTRFANGKALASYVGMIPSEHSSGGRQRLGKLSKQGSPLLRFLWGEAAMHAVHQDPGLKHFYRHKLQQKGLGKARVAAARKLGIRLYIMLRDQIDYEEFCRRGQLRQKCGSAHAGMSDRNHGPAVQ

SEQ ID NO: 483208 - protein, 555 aa, unidentified
MAILAELVDHVIGVDPDRDRVTAAVVCAKTQGELASKTFPATRRGYGQTLRWAQTQTVDDRRAWAIESTGSYGAGLAIVLAEKGEFVIEFDHPGTLASKDGAKSDSLDAVRAARETLGRKTWATPRARGLREGLRTLVVARDSAKLARVAAINVLKAFVVTAPVELREELRGLTRGQLVDRCMRLRPDTAVDPEHAATKLSLRSTASRVKQLTIECRELEDAMVPIVREMCPALLTEPGVGTLVAAQILISWSHPGRCRDESAFARLAGVAPLEATSGQTQTRHRLSRGGDRQLNRALHTVILARGVSPGEWWESAEGIGPGPRRVVPALRVGHRVVINELPLTVTQRKQPRDDPRPFCTARPTRRTHRCRQRQRVRRTDPHRPAGPDRSRGHRQTRRRPVRAHQHPHHPSQRASNEDRGHHQRRCRGQDSQAAVRVVLPVAARTASADRQGAVCGGDGSVCARRIDPQRRRPGRCVGRRVRDFEVGSLADLRRPRCRDRSLPGTDAHAHELSVRLPRCHLLQGSGRCARGLPGAGGRDRGVDRRHPRGVGHRGR

SEQ ID NO: 483209 - protein, 343 aa, unidentified
MSEYDGKQFVGIDLHRRRTVIVRQGEGGEQLGNTRIVNDPMALAAEIGKAGEAPEVVLEATYGWYWAADVLAEAGARVHLAHPLGIKGFAQRRVKNDLRDAADLADLLRMGRLPEAWIAPPEVRELRELVRHRAKLVAVRSGFKAGVHAVLAKQGLQIAVSDLFGPRGRAELDQAPLDVAYRARVNAYCRLVDTLDLEIELAAGWIAARLATHPGYRAIQQIPGVGPTWAAVFVAEIGDITRFASARHLCSWAGLTPRHRESDTTVHRGPITKQGSTLVRWAAVEAVQKLPPTAGWLVSARDQISARRGHNIAKVAVARKLLILVYYGLRDGHIRALHAASAA

SEQ ID NO: 483210 - protein, 413 aa, unidentified
MALKIVYPICCGIDVHKTFVVACIASTNKGVTTYKSHRFSTYTKGLKELSQWLCENNCPDVCMESTGKYWIPVFNVLEDSCNITLAHPKYVKAIRGKKTDKKDAKWIADLFKHDLIVGSFMPPLAIRQLRDLMRYRFKLTNFMSSEKNRLQNSLTVSNIQLGNVVSDTFGKSSMNIINRLLLNPLDNSFDIEPLIHASMKDKLPELELAIDGLITPEQAEKLKVIKQHYDDLKSRKADLEKIILSLSEPYSEEINLILTVPSFKNIFSAIAVVSEIGSNMDVFPTAKHLCSWAGLTPTNNESAGKKKSVRISRAGCYIKPLLVQCATAVVKSEKHPEIRNRYLRIKKRRGHKRAIIAIARMLLTAIYNIIEKKEPYNAELYRKADVLPVNHVITVEQAILLAQAQGYRIKAAS

SEQ ID NO: 483211 - protein, 367 aa, unidentified
MPWNQKIINTMDKSNKLDFSGQDIYVGLDTHLKSWRTSIMVGESPYKTFSQDPSPKLLKDYLVRNFPNANYYSAYEASFSGFWTHRNLLNLGIKNIVVNPADIPTTDKERKQKEDSRDSRKIAKQLSQNDLTAIYVPEIEIEGDRSLIRYRKTLTKEIARTKHRIKSLLYYFGIEIPVQFSGKKYWSKSFTNWLMGVNLPTASAKLALVGHLEMAEMLRKKQYSTTKEIRKLSEKDIYRENYFLLLSVPGVGSLTAMIILTELGDISRFKNLDKLCSFIGLVPMTNSTGENEKTGGITVRRNKILRTAIVESSWIAIRNDPALMLVYQKLTKRMEPQKAIIRIAKKLVNRILYVLKNKKPYVQAVVE

SEQ ID NO: 483212 - protein, 362 aa, unidentified
MSKKVINNQTILRQCVGIDISKDSFVACISHKTSTDEIIVKSTKKIPNSPSGYHTLQEWVTKFTSPVFPLIYVMEATGVYYEPLAFDLLERGQSVSVQLAKNVKFFMQSHNIKSKTDDIDAQAIAQMGLERKLKLWQPGSTRMRVLKHLCRERTMLQAEQTTVKNQSHAWKYTYKPEKSILKRLENRLSFIKEQIQEIEQEIQSIVKNDQELAQRVANVCTIKGVGLLSAIVIIAETNGFALFNNKAQLISYAGYDVVRKQSGNSEAKTRISKKGNKNIRKALFFPATTASRFNTKMKSTYEKISERTAIKMKGNVAVQRKMLILIYTIYKNNIPYDENYQYDKERNETQKNKAESIINCPA

SEQ ID NO: 483213 - protein, 370 aa, unidentified
MSYSSTLYVGLDVHKESIAVAYASEARDAEVVFLGRIGTRQSDIDKLIRTLTSKAKQLVFVYEAGPCGYWLYRYLSRKQLSCWVVAPSLVPKKAGDRVKTDRRDATQLARLMRSGDLTPVYVPAVEDEAIRDLARAREDAIRDRKAAKNRLKAFLLRQDIRYEGRATWGPAHLRWLAEVVCPTPAQQIVFQEYVRAVAEHDERLQRLETELREQVQGWRLAPVVQALQAMRGVQFTVAVTLVAELGDLTRFENPRQLMSYLGLTPSEYSSGERRRQGTITKAGNTFARRALIEGAWAYRYPAKVSRHLQLRLETLPQAIQNIGWKAQVRLCKRFRHRTARGKHANQVVVAIAREMAAFIWAIAREVPIAR

SEQ ID NO: 483214 - protein, 338 aa, unidentified
MELYAGIDLHSNNNVLVVLDESDRVIYQKRLHNVLADILAALASCGGKIKGVAVESTYNWYWLVDGLQAAGYTVHLVNTAAVKQYDGLKYSGDFSDARHLAHLLRLGILPEGYIYPREERAVRDLLRKRSQLVRTRTTQILSIQNLLARNLAIQASGNLIKNWQDTHIDALELLPEQKLALKSNLALMHCVDEQITLLEKAILAKGKLKPEYQSLRTVSGIGEVLALTIALETGELTRFAEPGNFASYARTVNSRRESNGKKKGEGNTQCGNKFLAWAFVEAAHFAVRYDPVIARFYQKKCAKSLSVVAIKAVAHKLARACYHVMKKGEAFDVKRAFG

SEQ ID NO: 483215 - protein, 320 aa, unidentified
MMAQNDLVVAGIDVAKDKVDVCIRSLSLRRTFASTAEGRRELASWLRRKKVGKAVMEASGGYEREWAKALRDARIEVRIVDPKRVRSFARSAGRLAKNDAIDAEMIAWFAETFDEAPGQAYDAAREKLVQIVHARQGLLDLQTSLQNSGEHAAPEVVQKMQGRLLKKIALELAGLEAAIAAMIKATAHFAELAEIIESVPGLGGITAAGLIAAMPELGQVSNKIAAALLGTAPYDNDSGRRRGERHIKGGRRRVRNLFYMACLGAATRHNPMLKAFYQRLLAKGKEKKVALVACMRKLIVILNIMIARRQKWDPSRYALS

SEQ ID NO: 483216 - protein, 412 aa, unidentified
MEVVYPCCCGLDVHKKSITACVLWAEAKGKSRKEKKRFGTFTHDLLQLADWLEQCGVTHVAMESTGVYWKPVWNILAEQFEVLLVNAQHIKAVPGRKTDQKDSEWIADLLQHGLLRGSFVPPRPTRELRDLTRYRVSLVQEINRIANRIQKVLEDANIKLASVATDALGASGRAILEAMLAGEQDAARLAEMSKGLLRNKIPELKLALEGRMTEHHRFLLRQLYDHLRFTESKRSEIEQEIDRRMLPFEDKVTRLCTIPGVDRVTVWGMLAEMGMNMNQFPSSGHLASWACLCPGSFESAGKRLSGKMRKGNVSLRRCLSQAAWAISMMKNNYLSALYRRIAARRGAKRAVMAVAHALLEIAYHMLKRKEDYRELGADHFDRIDVNRIRRSLVRRLERLGHKVTLEPVALTA

SEQ ID NO: 483217 - protein, 347 aa, unidentified
MSHKTAATVTHTIGIDTGKNTLHLIGLDDKGAIVLREKIARGRITARLANVPGCLIGIEAGMATHYVARELSALGHNVKQVPPAYAKPFRQGHKNDFRDAHAIAEAVQRPSTRCVPVKTDDQLDLQALHRVRSRLVGQRTAVINQIRGFLLEHGIAVRQGLRFLRQQLPDIMAKRSDVLSPRMIRIIGDLSADWRRLDERIEHVTEEIEVLAHGSEGCRQLMTVPGIGPLIASAMVAAIGNGAAFAKGRDFAAWLGLVPKQMSTGDRTILGRISKRGNRYLRTMIIQGARVILLRPANWAKHSFGPWLTAAANRLHHNVLATALANKLARIAWTVLRQARSYEARVN

SEQ ID NO: 483218 - protein, 441 aa, unidentified
MNKHPKMDYLYVGVDCHKYTHTASVINCFNEPLGTVTFNNQIKDFKLLMDLVNNALVDYPDTLLVFGLEDVKHFGRALCTYLLKDKYLVKFVNASLTFNERKSNPIITKTDELDSLAIAKVLLDKFDTLPDARNDEIFWTLKQLVTARDSLVKTHTHYKNKLHSQLLHHYPNYRKIFSCIDGKTALNFFSKYPSPNLLKGVTREQLLKDIRPTFGGNNAIKKVNLIFSLITDYTVSDPDYQEERNILIQLLVKYIIDNDIRITELEKEVIDIYDRMDCKLHTMPGLTKVSAAVMLAEIGNIARFKSSSQLARYSGIAPNSFSSGTSTKYVDNQYGNRRLNALIYFLAVRNICPGSHKYTPTNPIFIEYFNKKVSQGKTKKMALVCVMRRQVNIIYGILKNRTEYTHPQELHDKCKSTFLDRFHKEQEEKQKQAKEKEKIKK

SEQ ID NO: 483219 - protein, 358 aa, unidentified
MQSVTRVGIDLAKMFIQVHAVDAVGKLVCNKQLSRDKFIAWCNQLPAGCLVAMEACSGSHAWARKLIALGLDAKIIAANHVAPYRLEGKGGKNDANDAAAICEAASRPSMRFVPVKTLSQQGMLCVHRYREGVKEERTANINRIRGLLAEFGIIAPQSPNKLRERLAEIIEDADNDLCGIARMVIQEAFSHWDEIDKQLEWCAQRISAHVKENQQAQAAVQLMGVGPVTASAAVVTVGDFKQFKNGAQFGAWLGLTPRQNSSGGKTKLGRITKRGDVYLRMLLIQAAKAAVMTAHKRDDSISRWLLQLREKSGWQKAAVAMANKNARILWAVMTKGCDFDPRYVSVKPSGGGSIAAAI

SEQ ID NO: 483220 - protein, 342 aa, unidentified
MPQVAIIGVDLAKRVFQLHGAAADGSVLFRKKLTRERFLSFLASQSPCVVAMEACATAHGWGREIERVGHMVRLIPPIYVKPFVKRQKNDAADAEAIVEAASRPTMRFVAVKSEAQQARAMLFRTRDLLVRQRTQLINALRGHLAEHGVVAAHGPAHVKRLADAIANDDSCLPIAVRELGELLLEQIAALDEKTRDLDKRLRDAAGRDGASKRLQTMPGVGPVTAVAVETFAPPMEVFRRGRDFAAWLGLVPIQRSTGGKPRLGKTSKMGQRDIRRLLITGAMSVVQAAGRSAPPENSWLAHMLDRKPRMLVALALANKMARGIWAMLTKGENYRDPVTTGA

SEQ ID NO: 483221 - protein, 500 aa, unidentified
MKKNSANRTKSVYSKQCIEIRTVFEKASSPRKVLCIALDYAKKKHVALFCDGLGDILKNPFTVVNSTEGVDFLCKEIQATSRRRKIKKETIFLGGEDEPAYVANFVAALTRKGYLVVRVNALEAAKQRENMLASTDNLDLLGISKCLLNRRASPSSAANQHNPVYRELLELTRQRRNYVRQQTAASNRIHAIVDQLFPGFLNSTLSGITPFTVASLALMTDRFSSTQFARRKQSSLANTLRRHRVRNSDEKAYTLITLAQNALPPNPERINTLQQSLTGLIDLYQCLQTNAALLRKEAACLLATTPYIMLTSISGISFVLAAGIASELGDPAYLPATSSLCAYAGIVPAVTQTGGPDSPAIHLSTRARCNHILKDWIIQGAQKIGLCGPIELKSKYIKRGANGQHAAYAGARTLLRITRNLVTTETPYLPPIARCKGATSEELNDGCQETWGKLVEKWRTIPGWQQMLSDENHPMGFWRRVVKELHGIELSMQVPTQRRK

SEQ ID NO: 483222 - protein, 351 aa, unidentified
MKYYTTTTEFNCGIDLHARQMYACLMDRQGRKLVHTNIQGNDFGYFLQKVEPYRHDLTVVSECTFNWYWLADACEAAGIQFVLARALYAAHIHGGKNKNDRIDSEKLAHLLRSNLIPPAYIYPSERRPIRALLRQRMSYVWHRAELMTHLSMNQTAQNCVPAQKGGHNRDVWQERILAQTPNPYHQLAVRCDMDAIRTYDDLINKLDGTITLYARHHQSRDYTLLQTVPGIGDVLAMTLLYEIDTISRFPTVKDFTSYCRLVKGSVASAGKLKGLTGGKMGNAYLRWAFGEAAVICKRSHRLLSPYADRLVAKHGTFKGNAILANQIARAVYFMLQSGQAFDPERVIKTSI

SEQ ID NO: 483223 - protein, 345 aa, unidentified
MNSTTIAVDVAQTVFEVAVSEHPGQVRDRHRFSRERFRRYLGEQPPAAILMEACGSAHYWGRQAQRHGHRVVLLPPHVVRPYVVGNKTDRTDAKGLLEAARNDAARPVPVKTEMQQAVTALHRLRSTWLATRTARLNTVRGLLREFGIVIPIGARHVGPTVSGLLEDADADVPGVLRAMLVETTQEICELERRIRLVEGQLETVGEQLAAVAHLRSIPGIGLLTATALVAAVGDVQRFPSGRHFASYLGLTPRERSSGQRHQLGGISKRGDSYLRMLLIHGARAMLWRAKRKTAPVPDRLSAWALQLEHTRGHNKAAVALANKMARIAWAVWKTGQPYQPRAAAV

SEQ ID NO: 483224 - protein, 355 aa, unidentified
MGDRRHRFCALDERGEVVEEGSICNERDSLTKLAGRYHGALGVMEAGAHSPWISRFVEALGWRVVVSNPRKVRAIYQHERKSDQRDALMLARIGRMDRALLYPVRHGSEEAQQDLLRIKLRDSLVRARVALINSVRFSLKSLGYAVRNPSSERFHKVAMERLPERLQQMIAPSVQALAELSTRIAVLEREINVLARTKYPQTLWLQQVPGVGALTALYFVLKIEDPQRFENVRDVGAYAGLCPRRDQSGQSDPQLRISKRGDAYLRRLLVSAAQYILGPFGPQSALRAYGLMLAADGTARAKKRATVAVARKLAVLLLSLWKSQQPYQPFPGSPPQWPTRGPTIRNDCGASHGSD

SEQ ID NO: 483225 - protein, 349 aa, unidentified
MAMTIVENRALITGGVDTHLNFHVAAAIDANGGTLGIETFPVGRRHYADLSRWLESFGELDKVGVEGTGSYGAGLARHLRHGGISVVEVDRPNRQMRNRQGKSDHVDAVAAARAALSGTATGLPKGRDGNVEAIRVLMVARRSAVDERIQILNQMRHLVFCAPDEIRTRFEDLSPKALLNATSTLRPRESDDVVRYTTLIVLRELGRRAKNLHEENKRLNKLLRPLIRQTAPGILEIYGVGYDTAAKLLVAAGDNPQRLHSEAAWAHMCGVAPIAASSGKTQRHRLNRGGNRQANSALYRIMLTRMRHDQRTRDYVARRSAEGKTMGEISRMLRRYISREIYQHLPRPA

SEQ ID NO: 483226 - protein, 309 aa, unidentified
MKEELVYLGVDIAKSYLDGAIGSEKRRFSNDTVGHRQLIGWIKQTEGAVQVICESSGGYERKLVQALARARVKVSLVQANRVRQFARASGILAKTDRIDAEVLCEFGRVMRPQTVTAATLEQEHLRELESQRRHLTHLLVMEQNRSARVSDGSVLKLNRSLINQIKKQVERLDLLIKQHIEQSPRLSAKAEKLTSINGVGLRTAALLMAQLPELGQLNRREVAALVGVAPFNRDSGKMRGNRAIYGGRRFVRHGLYMAALVAARHNPILRVFYLRLRAAGKPAKLALTATMRKLLIVLNSSLKTDLSYA

SEQ ID NO: 483227 - protein, 360 aa, unidentified
MIRFPLRKPKKGGARVHFIGVDHHKQTSTLTVLDSGGREVRTARLLNLRADVEAFIREVAPGGFLAVIEAGRASYGMADLLRDLGGEVKMANPLQVKAIAHARIKTDKRDSRTLAQLLRADLIPEVYQRESGNREAQRVLRLRAYWMSLRVQVRNKIRALLAQQSEEVRTAVEAQGERLFGRHGQELIQGLDLGERDREILGALLRGYQTFEAFQKESDQLVRGLYRDLPAAQLIDTAPGFATTLAVLVAVEIAEVRRFPRVEALHCYAGLIPSTYSSGERTWHGRIVKGNVWLRWALVEAVYPAVRKDAGLSILYHRLARHKGPNVAKVATARRLLTILYRMLMENRPYVPYRTNPMAA

SEQ ID NO: 483228 - protein, 358 aa, unidentified
MNTQSNKLDFTGQNIYAGFDVHIKQWTVSIMTDYLTHKTFSQPPKPEILFQYLQKNFPGGNYYSAYEAGFCGYWIHNQLLEMGINSIVVNPADVPTTGKERDQKNDPVDSRKLARSLKNGELKGIHVPTLKILEDRTLVRTRATLVKDITRYKNRIKSFLHFHGIELPEQFLKNKSYWSKRFIEWLDSIEMSEKSGKDSLVIIVTIVKNLRFILLETNRKIKTLSCTEAYKKNVELLRSVPGIGLITSMMLLTELGSIERFGNTDQLCRFVGFVPSMHQSGDNDKSGDLTKRGHSVLRGALIESSWIAARMDPALMKSYCEYCQRMEPNEAITRIAKKLLKRISYVLKNQKPYELKIV

SEQ ID NO: 483229 - protein, 380 aa, unidentified
MRRVSGLDVHKDSVFLCIVDEDGVVFQSKYGVLTPELEQMAGVMVEYGVEEAAMESTSIYWIPVWRVLEPYVALRLVNPFFIKQLPGKKSDVKDAEWIATCLQKELIKGSYVPDELIQQLRQYDRRIFDLSKDIVYKLTKLDAALQRCNIRISNYVSTTKGKAYQDIVRLISEGKTDSEELVKHIHGRTVNRIGKDVLVSALSGVITAADIDTIRQLREEVELAQRHKDECQAKMDEICKQYFPKQYANLQTIPGVQARSATAIIAEVGTNMDAFQTAAHLVSWAGLKPRNEESAGKIKSRRVTHGNKYLRKTLIECSWAASKTQNCFYNRFSYIQCTVRHKNKMKVQVAIARKMLTAVWYILHDNVPYRDFTPDIVPSE

SEQ ID NO: 483230 - protein, 399 aa, unidentified
MDVSKGSCHYQPYVSNGHPMRKPKVLHDTVEGFQSLSDLIDTMKDRYECETIPVIFEATGVYHHCLQKYLDDHQIPYYIISPLMSASYRKTTPNSNKTDDLDCSHIAKAYYGECNLFPYDKPSKSFHNLRELNRYYECELNHLRMRKNTFRKYLDIVYSRLDKCFKGHSSLYDEIPMEVIKQYPHPSLLLKHKEETIVKKIEKKTSHNALFIQNIVHEMYECSMHCYSGADVTDVESMILPELVDDLQSQKERCDEILKQLVSEAQKTPYFTSIVSIVGIGDNLAARIIAELGDMSRFSCRRAITAYAGLNPKIRQSGDMDGIHLAISKKGNKHLRCLMYLAVSCNYRLKKGDVLYEFNQKKRQQSFSLLKPKAATIATAHKLLLIICALCTNGTVYRS

SEQ ID NO: 483231 - protein, 344 aa, unidentified
MDHFVGLDVSVKETSVCIVDDTGRIVKEVKAASEPQALLKVLGNPAYRFKRIGLEAGPLSQWLFSGLAEAGLPVVCVETRQMQAVLKAQINKTDRNDARGIAQMMRAGLYRPVHVKTLRSQKLRMLLTHRKLLQSKAIAIENDLRGTLRNFGLKVGMVGKVRFEARIKELVESLPDLAELVEPLLIVRRSLREQIVILHRRLLAIVRDDEVCQRLMTTPGVGPVVALTYRATVDVPARFRKSKAVGAVFGLTCARYQSGEIDWSGRISRCGDEMMRVMLYEAAQSMMRSKKWSWLKAWAMQIARRRGMKKAIVALARRVAVIMHRIWVDGTEFRWTREQAAAAA

SEQ ID NO: 483232 - protein, 342 aa, unidentified
MTFVGCDLHTRMQQVAVLDTRTGEVSERQLAHDGSAVEEFYAALPGPVTVGIESTGYAVWFHTLMQRLGHTVLVGDAAKIRAMVVRKTKTDRRDALHLLDLLRHDRFPTIWVPDPATRDLRALLTHRMRLVRIRTMVKNGLHAIALNYRLARGSKLLRQAGLVQLHALALPPHTAQRRDQSLELLAGLTTQIRALDDAITTAALAHPDGPRLITHPGVGALTALATIVVLGPVARFHDSKHVVSYVGLAPALNASADKYHLGHITKQGSPLLRFALGQAAAHAARMDADLKRTYFTLVHRRGRPKAKVAVARKLLVRLFIMLRDQIDYDEFRRRGRPALASA

SEQ ID NO: 483233 - protein, 351 aa, unidentified
MTSNRSIVVGVDTHADTHTAAICDELGRLITFATFDADLAGYRKLLAWARRRGQITAFGVESTGAYGAGLTRFLTARHVRVIEVNRVNRQHRRRRGKSDPFDAEAAARAVLSGEATAIPRRRVAEVEAVRVLKIARRSAVRAKTHAANQIRDLIVTAPDDIRARLAGLTTEQRVRHIARWRPGTPVDARSATRAALWRLARRWIELHDEARHLDAQMRTLLEPLVPSLLAETGVSTQVAASLVIAVGENPDRLRNEASFAALCGTSPVPASSGRTTRHRLNRGGDRQANAALHIVVLIRTQRCEETRRYLQRRTTDGRTQRETWRCLKRALARRFHHLLLQDLTPNLTTLT

SEQ ID NO: 483234 - protein, 420 aa, unidentified
MNNDWTQHPHFAALDWASDHHDVLVLDRAGAIVAELRFAHTAAGWAEFTAQMQPFGPCPLTLETSSGPAVDQLLQRGYPLYPLAPQAAKAYRSRKAPSGTKTDRHDTWSMADALRTDGHAWRPLHPQDEATATLRALCRDEIGLIQQRTLLVNQLQAALREYYPVALAAFDDWTQPFTWAWVQQFPTPQTLQSAGPRKWEKFLHTHKRWRPETREERLAIFAAATALPTSPAMVSAKRLLAVSLAKLLTTLQAQLDEYRRQIEAAFRAHPDHDVFGYLPGAKEVLGPRLLAEIGSVRAEYPDADALMCQAGVSPVSYQSGKVERCRLRRACNKVLRFTVHLWADGSRKTCPWAQAYYAQKRAEGQGHASALRCLGKRWLKILWRLWQDHQRYDETHHIQSLERRGSISWQARAVKVARPV

SEQ ID NO: 483235 - protein, 343 aa, unidentified
MELYVGMDVSLKETSICVVDGSGAVLCEGTVISEPEAIARFIKAKAGSAKRIGLETGPTTTWLWHELRALGLPVICIDARHAKAALSMQINKSDRNDAVGLARIMQCGWYKEVQVKGLSCHETRAVLNSRALLVKIKRDLGNQMRGLLKNLGLIIGNAKGKVFSRRVEELVAGHPLLQQAVRPLLTVREKVSREIADFDRQLLALARDDVQSRRLMTVPGVGPITALAFQAAIGEPTRFKRSRSVGAYFGLTPRRYASGEMDWSGRISKCGDALVRTYLFEAAGVLLTRVPHWCALKAWGLRLMKRIGFKKAKVAVARKLAVILHRMWRDETDFQWSSREAKA

SEQ ID NO: 483236 - protein, 355 aa, unidentified
MQRYLGLDVHAASSTLAVISESGRRLQTHVLETNGRALVEAVRLIPGRKHLIFEEGAQSAWLYEILSPHVDEVVVAGVTKSRGQKDDRRDAYGLAEKLRTGSLDKRIFKAPRQFAMLRELARTHQMIGRDLVRVQARLKSVYRSRGVRTPGRTVYAKAHREQWQQQLPATARSTTTRLYEQIDFLVALKEQAEQDLIRESRKHSIARVLETTPGLGPIRVARLLPIVVTPHRFRTRQQFWSYCGLAIVMRSSSDWIRTPDGRWMRAPVQQTRGLTRQHNHGLKDLFKGAATTIVTQAPDDPLYHDYQRLTEAGTKPNLAKVTLARKIASTVLALWKKEEPYRPKHRIAREADRGA

SEQ ID NO: 483237 - protein, 344 aa, unidentified
MDHFAGLDVSVNETSICIVDGAGRIVRETKVASEPEALLAVLKNPAYHFKRVGLEAGPLSQWLFSALAEAGLPVICVETRHMKAVLKAQINKTDRNDARGIAQMMRVGLYRPVHVKTLRSQKLRMLLIHRKLLQSKAIAIENDLRGTLRNFGLKVGMVGKVKFEARIHELVENLPDLAVLVEPMLTVRRVLREQIVILHRRVLAIVRDDDVCRRLMTTPGVGPVVALTYRATVDVPARFRKSKSVGAVFGLTCAKYQSGEIDWSGRISRCGDEMMRVMLYEAAQSMLVRSKKWSWLKAWAMQVARRRGMKKAIVALARRLAVIMHRIWVDGTEFRWTRQEAAAA

SEQ ID NO: 483238 - protein, 332 aa, unidentified
MSDTPALCTPPPAGAAEPLFLGIDIAKASFDAHLLPGGQQWQLPRTAAALAAWLRELQALGAPITLVVMEASGGYENLVAATLAEAGLPVAIINPGQARQFAGALGQRAKNDPLDAALLARFGRDLRPPVRPLPDAQQQALAELLTRYTQLVGMQTAESNRLQTAITQRVRKSIAAHLKWIAAQLKAIDTDLDDLIKGSPLWRDQEQLLTSVPGIGKTTARMLLGLVPELGLCPGRQISALTGVAPFDRQSGKWHGRRFIGGGRADVRSALYMPTLAAMRCNPPLRALHARLKAAHKPGKLIVIACMRRLLVMLNAMLRDHRPWSPQPITNP

SEQ ID NO: 483239 - protein, 416 aa, unidentified
MEIVHTHCAGLDVHKKTVVAAIIVQEGSDELHKEVQTFGTMTADLLKLSDWLLSLGVTHVAMESTGEYWKPIHNILEENFEVLLANAQHIKQVPGRKTDVKDAEWIADLLRHGLLRGSFIPPVGQRELRELTRHRTNFVRERSTLVNRIQKTLESANIKLASVASNVMGASGRAMLEALVAGSANATEMAGLAKGRLREKREQLDKALEGRVKPHHRFVLSELLCQVDNLDETITRFDAEIEKYCRPFEQAVELLDTIPGIARRNAEVIVSEIGSDMSRFPTANHLAAWAGVAPGNNESAGKRYSGTIRHGDRALTVALVQAAHAAAHGHNTYLSAQYHRLAGRRGKKRAIIAVAHSILIISYHLIQRNEPYRDLGGNYFDQQRPEATAQRLISRLHQLGYDVSRLEQPVALPAAT

SEQ ID NO: 483240 - protein, 338 aa, unidentified
MKLKRIGVDLAKQVFQVHGVDSHEQVKCRKQLRRHQMLDFFRQLEPCVVAMEACGSAHYWARELSKLGHEVRLIAPQFVKPYVKGGKNDANDAQAICEAASRPTMRYVEVKTVEQQASQSVHRIRGRLIKARTALVNEVRGLLAEFGLIESRKGVAATRELLCRAIDDSDSSMPGSMRELLRGLSEELQGYDERLKKLEQLIQREAREDERVRRLMKIEGLGPISATAIVSAVGDARQFASGRQFAAWLGLVPSQYSTGGKERLGGISKRGDKYLRTLLIHGSRSVLKHCQSKTDKRSDWLSQLMCRRNKNIATVALANKNARIIWAILSKGEQYQPC

SEQ ID NO: 483241 - protein, 351 aa, unidentified
MTNSTLHDLVTTIGIDLGKNSFHLIGMDKHGKILWRQKLARGQLEERLANRPPCLIGLEACAGAHHVGRRLAALGHEVRLIPAQYVKPFLKGHKNDYRDAEAIAEAVQRPTMRFVPLKSSEQLELQALHRVRSRLVGQRTAVINQIRGFLLEHGIAVRQGATRLRQALPTILAQRDDVLTPRMVHLLEDLCGDWRQLDSRIEAITSQIEELARQDASCQRLMGIPGVGPLVASAMVAAIGNGAAFARGRDFGAWLGLVPKQISTGDRTILAGLSKRGNRYLRQLFVQGARAVLQRQGSWTKHRFGHWLTGAAARLHGNVLAAALANKLARIAWGVLYRARDYAPGVPMQPA

SEQ ID NO: 483242 - protein, 388 aa, unidentified
MTQSSDSISDPIALNYENTLVLAIELSNANWVLAAQVPGLLRVKAKQTIEPRANALMAAINAYRDRSRSAGRTVERVIAIYEAGWSGFWLARWLARHGVEVHIVQPSSIPVDRRARRAKSDGIDAELLLRTLLAWFRGEPRVCSMVPIPNEADEDERRRVREREDLVADRISLVNRIGAVMATLGVHDYNPLRRDRRPRLETLRTALGNPLPPHARARILRTLDRLELVCAQIAELERQREAVLEEEAPNKPEKMIQQLVGLRGIGVQSATVLVREAFVRDFPNGKALGSYAGLTPTPFSSGATEREQGIGKAGNRRLRTVMIELAWLWQRYQPGSAQVSWFRERVSGTGRRMRKVMVVAMARRLLIALWRYATQGVVPEGAVVNHPY

SEQ ID NO: 483243 - protein, 335 aa, unidentified
MNKNWFIGIDVSKKTLDASIFVAGEVINRFPHIQVRNEKQGFKELLRWAKTQGVNTKDTLFGLEFTGYYSDALEQFLTGKKLCYAMLPTTVVKHYQRGTRDKNDKTDSAKIADYLFRFNGTECIKQRVLPSKAMQELKALKSERKFYVQQRVACENRQNVAKSKQEQKHLQKAIDLFNEQIELIEQQMAEVVTSDEEIYLTYTRLLTIPGIGPVNAINTIANTQNFTAFETARQYAKYVGVAPSEHSSGTSVRWRGRPSPHADLQAKADLSMAAMRAVEFSCDMSIYYERKLDNRPNDKDVKRKALNAVKFQLIKMMFAVVRQDRVFEQRGLDKA

SEQ ID NO: 483244 - protein, 318 aa, unidentified
MKLYVGVDVSKSKLDVSLNDKDLIVTNNQKGLLLLIEKLKKQNDEGNEIGLVLCEASGGYERLLIKTLRTQGYPVHLAHANKIRSFAKAKGLLAKTDRIDAHIISEYGRVLSPMPDINLISESAEILGELLKRREQLLEHKQGEKNRLDKERLPAVIKSINSHIKWLEKEIQQLDKKIEEQQMQEEFKHQIELLISVPGIGKLTASYLISFLPELGKINHKQIAALVGIAPFNRDSGTLRGKRFIQGGRAIVRKILYMAALASIRCRYSDLRVFYQYLRARGKAGKVAIVAVMRKLLLVLNSVLIRQTPWLEKIAISA

SEQ ID NO: 483245 - protein, 361 aa, unidentified
MTSMTTDAGPVTGGVDTHGQTHHAALIDGVGRHLGDREFPTTPTGYRALTAWLSSHHHLERVGVEGTGAYGAALARHLHAHGIAVVEVDRPDRRARRAKGKSDPLDAYAAARAALSGAAAGTPKQRDGRVEAIRTLRVARRGAVKARTQAMNQLKALLLTGPAELREQLRHLSATVLVTTCARLRPDDQDLADPAQAVKTALRRLARRHQHLTEEVRDADTDLTTLVSDAGPQLLALHGVGIDVAGQLLTTAGDNPDRLRSEAAFAHLCGVAPVPASSGRTHRHRLNRGGDRAANNALHTIALCRLRYDPRTHAYVVKRTKDGPSKTEIIRCLKRYIAREIFTALQPLPAPNGLLHVLDTP

SEQ ID NO: 483246 - protein, 343 aa, unidentified
MKLHVIGIDLGKTIFHLVGLDSTGKAVIRKKCSRKQLLAFTANLEVQLIGMESCSGSHFLGRALREQGHEVRLMPAQYVKPYVQTNKSDYLDAEAIAEAVQRPRMRFVPIKTEEQLDLQALHRVRERWVMRRTAVVNQIRSLLLERGLTLPKGRRYVDEQLPRILEDAEWRLSGSFRVLLAQLKIELEQLAARIEEMDRVIQKTAKDNEDCQRLTEIPGVGPVIATALIGAVGNASTFGKGRKLAAWMGIVPGEYTTGGKQKLLGISKRGNKYLRTLFIQGARSVLQQRHKQAPGLSRWIEQLLGRTHQNVVIVALANKLVRMAWAVLCKNERYRAPVLAVTP

SEQ ID NO: 483247 - protein, 456 aa, unidentified
MAKLSKRNNKTKRDWDEGLAALNRNAAGIDVGNAEHYVAVPAGRDSEPVQTFGSFTADLHRMAQWLKACCVETIVMQATGVYWVALFQILENHGFQVNVVNARHTKTLPGRKTDVLECQWLQKLHTFGLLNNSFRPTEEIQILRTYLRQRENLVAAGSTCIQHMQKTLTQMNVQLANVISDISGVTGMAILRAIVAGERDAEKLSTLKHNRVRASREEIARSLEGNWREELLFVLEQSLELYDLYVRKIAVCDQRIERHLKTMTSKLEPEQKSDPGALPSAKHEPRFSLKDHLCRITGVDLTRVAGLQVQTVQTIISEVGVDMSRWNTEKQFASWLGLCPDNRVSGGKILKSGTRQVVNRAATALRLAAWSLIRSQSALGANFRRLRSKLGAPKAITAMAHKLARLIYRMMKFGGEYVDKGMAAYESRYRQQQMKWLAKQAASLNLQLVPSTEVTG

SEQ ID NO: 483248 - protein, 326 aa, unidentified
MNLPAVVLGVDIAKLKFDVCLVKENQKVKHKVFVNTKHGFEQLVAWLNSHQVGSLHICLEATGSYGEALALFLHEAGYRVSVVNPAAVKAFAASRLTRTKTDKVDAELIARFCLAQQPQAWTPPASEVRQLQALVRRLESLVEMRVAEENRLSSGIIVDVVRHSLEEHIAYLREQIKQTEKMIREHINNHPDLKEQSELLDSIPGIGQTTAALLLAEIVNIKQYKSARQVAAYAGLVPRERRSGSSVRGRVQLSKIGNARLRKALYFPAMTALRCSSFFQQWASGMRERGKCKMSVIGAAMRKLLHLAFGVLKTGKPFDPNWAKTA

SEQ ID NO: 483249 - protein, 402 aa, unidentified
MNAVGIDVSKGKSMVAIMRPFGEIVSAPFEIKHTASDIHSLVELINSVEGESRIVMEHTGRYYEVLAHQLSETNLFVSAINPKLIKDFDNDSLRKVKSDKADAVKIARYALDKWQNLKQYSVMDELRNQLKTMNRQFGFYMKHKTAMKNNLIGILDQTYPGVNTYFDSPARSDGSQKWVDFASTYWHVDCVRKMSLNAFIDHYQNWCKRKKYNFSQSKAEEIYGKAKELVPVLPKDAITKLIIKQAVNQLNSASTTIESLRTLMNETASQLPEYPVVMAMKGVGTSLGPQLMAEIGNVSRFTHKSAITAFAGVDPGVNESGSYEQKSVPTSKRGSSDLRKTLFQVMDVLIKTHPQDDPVYQFIDKKRAQGKPYYVYMTAGANKFLRIYYGRVKEYLSSLPES

SEQ ID NO: 483250 - protein, 320 aa, unidentified
MSEQTKSAEANCFVGVDVAKDKLDVCVLPSGEYHEFTNDPEGQAALVDCLRQLPAAAIVIESTGGYERPALFAMQDADLQVTLVNPRQVRDFAKGIGQLAKTDRLDAAVLAEFARLVAPPPTDKTSEKQRELDALVTRRRQLLETRVAEQNRLQQTRDKFIQKTLQRVVKTLDRELEAVEKRIARLLESDDEWKAKLDILTSTPGVGQTTGATLLAELPELGTLNRQQIAALVGVAPYAKESGNMKGKRATWGGRRKVRSVLYMAALTARRCNPTIKAFAARLAAAGKSFKAIQVACIRKLLVILNTMIKNNTPWKTKNT

SEQ ID NO: 483251 - protein, 417 aa, unidentified
MDPQISFNQVVSRGCGIDVHQKVVVATIVGEGLKKATREFGTFTRSLTELKDWLLENGVTHVAMESTGIYWKPVYHVLEPTSLKVWIVNARHIKYVPGHKTDKQDSAWICKLLLAGLLKPSYIPAKEQRELRDLTRFRTKMIQHVASEKNRIVRILEDCNIKLSSVLSTTQGVVATKLIDKLCEVGTITMSDIEEVYHKRLEASKEDLYEACQGLIDKHHIYLLGLIRQDIASTEAVIKNLNARIKEVLSGYDNVLENLKAIPGLSTKTVEDLVAEIGLDMSVFPTEKHLASWAGMCPGNNESAGKKKSGRTTHGNKQVKAVITEAAWAATRTKNTFYSARYHRVAARRGKKRALIAVGHSILKSVYHVINGMEGYKELGADYVTQRVEKRRKLYLKKELEKLGYAVQLTPPVPQAG

SEQ ID NO: 483252 - protein, 417 aa, unidentified
MKIVYPVCCGIDVHKSFLVATIVSVTDLRTLKHKKERFSTFNKDLKRLKHWLIENNCYDVCMESTGKYWVPVLNVLEPELRVVIVNPKWVKAIKGNKDDVKDSKWIGELFCFGLVRSSFIPEKPIRILREFTRYRYKLVHMRSSEKNRFQNGFTVCNIALDAVVSDMFGKSASLITDYLLTDENPDAEHCTTFLQRSLKKKAVAVVESIEGFQLTEEQKFRMLQVRQHMDYLDSAIAAVDRKLEEMTSPYAAAIKLLCTIPGMKHDSAITVISEIGTDMSQFGSSKRLCSWAGLTPGNNQSAGKKKSVKITRAGVYIKPMLVEVAHAAVKCISQPYYKTKYESIMRRRGKKRAIIAIARMILTAIYHMFCTGEVFNPTDLRQIDMPEELKKKNVFDAIRLLKQQGVLPENFMQASYT

SEQ ID NO: 483253 - protein, 401 aa, unidentified
MNAVGIDVSKGKSMVCVMRPFGEVVLEPFEVLHTAQNLHDLAEKLKALDGETRVVLEATGNYHKPVAFVLHDAGLFVSVVNPVLIHDYDNNSLRRVKTDRKDAVKIANYTLDKWTRLRQYLPEDDTRLALKNCYRQYQQAVAIRTMLKNNLISSLDLTFPDANKLFTSPAKSNGCEKWVDFIGDFWHSECISSLSANAFAKKYLKWCQKHGYVFTRSKSDEIYACAVNSASLPKSPTSKLLIQQQVAQLKAVSQSVAAFRQEMLRLSQQLPEFDTVMEMYGVGPSLGPQLMAEIGDVRRFSSKKSLIAFAGIEPQPNDSGKVVGNDKGISKVGSAVLRRTLFLIMTVILQTQPQDEPVFQFMNKKRSEGKPYKVYMMASANKFLRIYYARVKAVMDSERSQ

SEQ ID NO: 483254 - protein, 359 aa, unidentified
MMDDSEIATRRVIGGVDTHKDVHVAAVLDEQGRLLETTSFATNAFGYRDCYRWITSFGEVLAVGIEGTGSWGAGLCRFLRARDLNVVEVNRPNRQTRRRKGKSDTVDAEMAARAVLAGDATVTPKAGDGPVEALRQLRLARRGAIKARTAAANQMHSLTDTAPDELRAKLRGLTTLQRARLCTRFRAGDLLTPAGAAKRALRSVAARYLTLHDEIRDLDAAIRQLLNTIAKPVVDRYGFGYETVGTLLCAAGDNPERITTEAGFAALCGSNPVKVSSGKTKRHRLNRAGDRHANAALWTVVMTRLAAKHPPTVAYIERRTTEGLSKREAIRCLKRYVAREIYNDIRAIVLTPEAARTAA

SEQ ID NO: 483255 - protein, 427 aa, unidentified
MKYTQNEKIMQITEETLVVGVDIASEVHYARVFNNRGIEIGKLIRFNNTAEGFIAFATWAEELKAKYNKQQVIVGMEPTGHYWFNFAQYLKDHSIKIVLVNPFHVKRSKELDDNNPTKNDRKDPKTIAMLVKDGRYMVPYIPEGIYSELRTAMETRCQIVKQLNTIRNRVKRWINIYFPEFNTVFGDWEGKAALIALKEFPTPAKVLEKGVEGIVSYWKKEKIRAVGKRRAVELIEAARKSIGIREGLTAANNELLTLLEDYEMKIKQYERIMALIEQLTLQIPGMEEILKIKGVGLTTAAGFIAEVGNISRFEHPKQIQKLAGLSLKENSSGKHKGKTTISKRGRRRLRALLFQGIMPIVATNEEFRELHRYYTSRDKNPLKKKQSLILLCCKLIRIFYALLTKRTAYDPQKMMSDIKRPILREVA

SEQ ID NO: 483256 - protein, 401 aa, unidentified
MNAVGIDISKGKSMIAVLRPFGEVVTSPYEIKHTNGELNELAKNLKTLDGETRVVLEHTGRYYEPVINKLYHAGIFVSAVNPLLIKEYGNNSIRKVKTDSADALKIAKYTLDNWADLREHSPMEDARNQLKTLNRQYQLYLKNKTAFKNNLIALVDQVYPGANSLFKSPARKDGSQKWVDFIAHFWHVDCVRCMSERAFITRYLKWCKRNNYNFNTDKTLLIYNQSKELVPTMLKNESTKLLITSAVNQLNATSKTIEAIRAEMLRLAEALPEYPVVMDMFGVGNSLGPQIMAEIGDIRRFVRKQSLSAFAGVDPMPSQSGTYERQSNPSSKRGSPFLRKSLFIVMQVLLQTAPEHDDVYQFLNKKRSEGKPYYVYMNAGCNKFLRVYYGRVKEYLDDLDA

SEQ ID NO: 483257 - protein, 356 aa, unidentified
MNEGSWVGLDVHARSVVGGVIDAGSGEVRSLRVPPGCDATVAWLRTLPAPVRVVYEAGPTGYRLARACAGAGIDCVVAAPSRVRAAADRVKTDRRDAERLARLLRLGEIAPVRIPTLEEEAARDLVRAREDARGDLMRARHRLSKLLLRHGLVYDATAWTRTHDAWLRRQRFQSGPLAIVFDECYGRMLDAKTRRDALEKGIAELAATPPYVDVVSRLVCLRGVSTLTAFALTVELGDWHRFRPASLGPFLGLTPSEHSSGERRRQGAITKAGNSHVRRLLIEAAWHQRSPSRRSVTLERRRHGKPLVVQAQAERSARRLHGRWHALEARGKPRSIVVVAVARELAGHCWALATME

SEQ ID NO: 483258 - protein, 412 aa, unidentified
MKVTYQTCCGVDVHKSFLVATIVKITGGIEPSYQKKRFSTFNNSILEFKQWLLDNDCHDICMESTGKYWVPVFNLLEDDINVVIANPKWVKAVKGNKDDTKDSKWIGDLFRLGLVKGSYIPCKKVRILREYTRYRYKLVSCRSSEKNRYQNALTVCNVALDSVVSDIFGKSSTSINHEEIASKLLRSLKSKEDAVIESVEGYQMTDAQKYRMRLVRAHMDYITAEINDVDKMIENMISSNTDFENAVQFLCTIQGVKRDSAITIISEIGTDMSQFSSSKRLCCWAGLTPGSNESAGKKKSVRITRAGVYLKPALVQCAHAAVKSDKSPYYKKKYESLVKRRGKKRAIIAIARMILTAIYQMLSTGEQWNPSDLYKIDMPVALVEKQKAKAIKQARKLLQREGLLPPDEPLAS

SEQ ID NO: 483259 - protein, 423 aa, unidentified
MNSDQPELAAYVGIDWADEEHAVCLCVSETNEIRTFTIKQQPQKLHEWVAMLHQEFRGQPVGIAIEKSRGGLIYTLMQYEFLILYPINPKALAKYRESTCVSGAKDDPSDAKLLMDLIYKHRERFRSWRPDTVETRMIQMLAEHRRNLVDNQTSLTNRLEALLKGYFPQALSWAGDLNTVQACDFLSKWPSLQSVQKAKPAQLRKFYLDHGCRKAEIIESRIEQMQHAQVFTNDAAVMRSSVLMVQAIVDQLRPLIAAISRFDLEIKDAYKKHPDKKLYESLPGAGEVMEPRLLAAMGSDRSRFETAAEVQQFSGIAPVTKKSGKMRFVHRRYACPKFVKQSFHEWAGLTIRYSAWARAFYEYQRGKGKGHHAAIRALAFKWIRIIFYCWKQEAAYDEQIYLAALERRKPTWALQAGLIERAA

SEQ ID NO: 483260 - protein, 388 aa, unidentified
MSQDFDASRSLTALEQDNTLIAVIEMGQTKWLVRAMVPGIERQPLKKLDADEGALLKLLYRWRAEAGQAGHALKRTVVAYEAGRDGFWLARWLRTRDIEAYVIHPSSIAVSREHRRAKTDRLDTELLVRAFLGWLRGEKRHCSMAAIPTVEEEDRRRPNRERENLVYEQTRTVNRIKAILARFGIRTFKPTLRKAEDKLEAVHTAEGMQLPENTRDELRRNLARLRLIREQTRAIERERLRKLAASPAEKGPHAMVRLIARVIGIGVETADMLVNEILWRNLRDRRAVARYAGLTGSPEESGKRRREKGLARAGNARVRRGMIQLAWRFLMFQKNSALALWFQARAADGRGATRKTMIVALARKLLIALWRLATVGEVPAGVLLRPAS

SEQ ID NO: 483261 - protein, 410 aa, unidentified
METLIKRCCGLDVHQATVVACLRIARPGKKVSREIRSFATTTAGLLELRDWLTAAGCTHVGMESTGVYWRPVHAILEDAFTVIVGNAQRIKNVPGRKTDVKDAEWLAELLALGLIPPSFVPDRGLRALRDLVRFRRSLVEARTDCRNRILGVLEGAGIKLASVATDVFGVSGTAMLQAIVAGHLTPAEIADLAKGRLRKKRAALELALHGSVTDDHRLMLDLLLGSLNDTEGRIAAIETHINVRLEPYRQDHLNLTTIPGVDWAGAASIVAELGTDMAVFGTAGRAAAWSGVAPGNNESGGRRRRAGARKGNVHLKTPLHTAAVAAGRTKHTYLADKYHRIRARGGPGIAGGAVAHKILIAAFHILARKVTYRELGADYLDRRAKQRVQRTIVRRLERLGYDVTLRPKAA

SEQ ID NO: 483262 - protein, 449 aa, unidentified
MGRPQVIDDEEHERIHDRVAAIDVAKDSGMVCTRTPHPSRSGARRSTVWTVKARMNAVRALGRQLKHDGIELVTLESTSDYWRIWFFVLEACGLAVQLVHAAQAKNLPGRPKTDKLDAMWLARLTEMGLLRASFVPPKAIRDLRDYTRMHTRLTQERTRCWQRLEKLLESALVKVSSVVSKLTTISAQDMIKAMIAGQRDPHELAGLARGSMKAKHDDLVEALNGIFDDHHGELAALLLDQITVLDAKIAQMGARAAELAAAMPAAWGVNADGTTGPGAGTGPDAPVLNAVARLAEIPGLSPGLARSIIAETGLDMGRFPTAGHLVSWAGLCPSARQSGPRTRAAKKGQGDTWLRGSLGQAAIGAARTTTFLGERYARIARRRGKAKAQVAVARSILVVIWNLLADPTARYTDLGHGYYQARTDVDRKLRNHIRQIQALGFAVTLTRAA

SEQ ID NO: 483263 - protein, 312 aa, unidentified
MAMLSFCGIDVSKDRLDVVVLPEGRLFSVSNDTAGWAELVVRLRPLTVSAIGLEPSGGYERGIIRALLAAGMSVRRINPNKLRQFARARGVLAKNDRLDARLIAEYVAIMPTRAVQRDAAVERLAEIVTMRRQLCDEHVAAENQAAHLEDAMLRRLSKRRQTRLEADIRLLDKRLAEMVAANVALAQRYELLTSMPGVGPVLAFTLIALLPELGKMSRKQIAALVGLAPYDFDSGKLKGHRSIYGGRMSVRNVLYMAALSASRYSPALKAFRKRLADADKKSKVIIVAVMRKMITTLNAMLRDNAAWQPQST

SEQ ID NO: 483264 - protein, 412 aa, unidentified
MFKIFRNNCCGLDVHKTWIYACIGITDPNGRTEYKQARFSSFSNGLRELAAWLAKYSCTEVCMESTGKYWIPVFNILEKSCFVTLAHPKYTKPQKGNKTDRKDAKWICDLFMCDMIKPSFIPSPEIRQLRDLMRYRFKLTNMLTGEKNRAQNCLTVSNLKLDDVFSDVFGKSSRSITNYILDHPGKTFDVSPFVDPRCKTPVSEIQAAVDGAISPEQAVKLRQCLDHIDELEAHRKEIESEILRIAEPFSAVLDLLYTLPGLNKNPMTAIAILSEIGPDMSVFPSSKHLISWAGCCPRNDQSNQKVKSRRISRAGSYLKPLLVQVANALIKSKKHPEFKERYHRIKSRRGHKKAIIAVCKMLLTAIWNMLSKLEPYNPEGFLEHRPVKQEKTLTVSQALELLRLRGYTIANQ

SEQ ID NO: 483265 - protein, 356 aa, unidentified
MSNITRVGVDLAKNLIQVHAVDAAGKVVTNRALKREKFLVWCAALPAGCLVAMEACGGAHHWCRKLRESGLDARMIPAQFVAPYRIQGKSGKNDANDAAAVCEAASRPHMNFVPPKTLAQQGMLCVHRLREALKEDRTACINRIRGLLAEFGVVLPQTPAILRQNLNEVLEDASNDLAGMARLVLQRALEHWRELEKHIQWCDERIAAHQKDDEQVQRAAELKGVGVITASAVVATVGDFKQFKNGAQFGAWLGLAPKQNSSGGKTSLGSITKRGSNYLRTLLIQGAKSVVLVGKHNDDPISQWVQRLRQRSGWQKAAVALANKNARILWAVMTGNKRYDSHHVSIPPAGAIPAVA

SEQ ID NO: 483266 - protein, 373 aa, unidentified
MKVTRIGLDIAKQTFELHGVDQRGRAVLRKTLRRERMLEFFTQLEPCEVALEACGGAHYWHRELSKLGHTVRLVPANKVKPYVDGNKNNAHDAAAICEASSRPSMRFVEPKTVAQQDLQALHRVREVAVHHCTLLANHMRGLLLEYGVTVGRGYPALHRALPELLGDDEQRLSRLLKQLLAQQWRMLKLHQKQVQTYDRRINCIARGETSCSALLKIEGIGPITATALVAAAGKGHQFKNGRHFSAYLGLVPGHSNTGNKTVMLPITRRGNRYLRTLLIHGARSALYAARNKDNPRSLWLQRLKARRGYNVAAVALANKNARIAWAVLRFGEAYQRAKAHRPERCATPSPRLQRLCSARRTCAVPEGLCFVLQ

SEQ ID NO: 483267 - protein, 415 aa, unidentified
MNPNLITAVGIDVSKGKSTIAIRRPGGEIVRKPFTVMHDQTGLQRLVQILHEVGGEIRIVMEHTGMYWRPIASVLQQEGFFLSVVNAILTHQFSDNSLRKVKTDKADSLKLANYALTYWSELKRYDLEDETRQQLKFQSRLYQRTIQTSTTLRNGLISILDQTFANANQFFTFSMPTKDGHHKWIDFVERFWHKDCVATVSLHSFAIALEKWCKRNGYRYSYADAEYIHTQARNAVTTLPKNDSTKLLIMQAVHTLNTIYESLQVIRTEMQRLASMLPEYPVVMAMKGAGQVTGPQLMAEIGDVRRFTHKGALVAFAGVDAPPFQSGDFEAKSRHVSKRGSSTLRRTLFQICCMSLCRADPEDPIFCFMDKKRSEGKHFYVYTVAGAAKFLRIYYARVKQYLNQMEIASASVSPN

SEQ ID NO: 483268 - protein, 338 aa, unidentified
MCKVKHYDYFVGTDVSKKTLDLSLLTSGNQVLVYEQIENTVKGIKSFISKIKRKKIDLGKCLFCAEFTGIYSNYLQAVLVDLSIDLWMERPVQIKRAQGMARGKSDKMDSLRIAQYARKYAEDARLWLPAREEVQRLKKLTSLRNRLLTTKKQLGQVFTEQEFLSGEDKKMLRSSSRKTLNAIKSDIKGVEKQMEQIINDDAELNRLYAIITSVDGIGMFSAIEVIITTNEFKNIKEAKKYACYSGVVPFDHSSGSSIKKRPRVSKMANRQVKALLHMAALSAVNMKGDLRDYFLRKVGEGKNKMSVINAIRNKLVLRIFACVNNNRPYQKKYGFKLV

SEQ ID NO: 483269 - protein, 311 aa, unidentified
MYYIGIDVSKKDLSVFNGKDLNFINKEGLKSFKKYLKKKYRLSEIAIIFEPTGVYSLYLKEFCAENSIKAYIVNPKQSHNFARALGIRPKNDKIDARTLYKFHKLIEAKDIRVPKIDQQAKTLSSYLVSYEFALKQRISLSNHLESLRDKRLIALMKKDLKRAKMLEDKLFHDIKEYVSKNQNLREDYQRLLTISGVGEKTAIALLTLFKTYEGTNRAQITALTGLDPVRRESGSSVKYKVKISKNGKGIYRKIFYLPTVCATVHNQKIKVFYQRLLANHKPKKLAIIASMRKILLIAHAMYRDKTEYVTV

SEQ ID NO: 483270 - protein, 409 aa, unidentified
MIYCGIDWAEKTHDVALVDDTGQLLAKRHITDDAVGYRILLDLLAEYGDSEENPIPVAIETSRGLLVTVLRTGKRQVFAINPMAAARYRDRHSVSRKKSDPGDALVLANILRTDMHAHRPLPNDSDLARAVAVLARAQQDATWNRQQAANQLRSLLREYYPAALAAFEPWKNSLCRPEAHELLKAAPTPARAARLTRTQLQAALKRAGRKRGIEAEAERLREVFRAHWAHQPPLVEDALGKQMLALLVQLEAACTAADDLAEAVEETFPQHPDAEIILSFPGLGVQLGARVLAEVGDDRQRFADARGLKAYAGSSPVTRASGKKSSITRRWVKNNRLNHAGYLWAFSAITASPGAKAHYRRRRDNHGDWHAAAQRNLFNRLLGQLYHCLQKRQLFDENTAFPAELAVAA

SEQ ID NO: 483271 - protein, 346 aa, unidentified
MDYYAGLDVSEEATSVCVIEGRGQVISEAKVKTEPAALARYLAGFEGLALVGLEAGALTPWLAREMAALGLPVVVIETRRMKAYAKASAVKTDRRDAKMIAQALRAGLYQAVHVKDEAAHKQRLALSARAMLLSQARQLQVKIRGDLKPFGIRLGQVGSGGFAARVKERLGDRPDLMVLVAPMLVMRAALLQQVRGYDREIKRCAAADPVCRRLMTVPGVGSITAFAYKATVDRPERFARSADVPALFGLVPRIDKSGQYEHIGSISRTGDAMMRSLLFEAANVLLTRTRKSFALKRWGLKVAKRRGMNRARVAVARRLAVILHRMWIDGSDFRLLPEERPAPAGI

SEQ ID NO: 483272 - protein, 394 aa, unidentified
MIYLLYVGIDVAKSKHQCCILNEDGGVCSSFSFENDKAGFEKLMGEMKRFSGTKDLSDTKIGLESTGHYSINLTNFLLHKRLSVKIFNPLAVSLALKASTLRKTKTDKSDSKFLAELLFADRSKPYLPTVYPISELKTHTRNRQRLVGMRTRLRVSISRLVTILFPELPGVVYTINQKSTYAILLEFPTADFIANAHLTRLTKLLKDNSKGKYAREKALEIRALAVDSIGLNSRATGFELQQAIRLVQNLDAEIAILEAEIKAVMDELDSPILSIPGIGYTLGSIILAEIGNIENFPGPNQLLKFAGMEPSVYESGKYKAKDTPMVKRGSPYLRWALFQASRLVAYRDKTFGDFADKKLAEGKHFFVVQGHVAKKLVRTLFSLLKYNRHFVPQS

SEQ ID NO: 483273 - protein, 389 aa, unidentified
MKYIGIDLHKKTISGCVVVKERGQKKIAARKRLECRDEAGIKSWFSELGKFEVVVEATASYEWFVKLVEPLAQRVVLAHPKKLRIIAESKRKSDKLDAQVLAEFLASDEIPLAYRPGPRVREHRTLVRWRNYIQRRLTSVKNKLRHILAAYNADVPHLFTAEGRAHLATVKLSAADRFVAEQLVVELEQHQERLVTANCRLREFAASASLAEREARAILDSIPSVGPVTTEVILAELGDWRRFRSQAEVASYAGLAPGFRESAGKAKQLGITKEGSRLLRWVMIEFAWRMVGASRKWGGHYHRLEARVGAKKAIVAIARRLLGMIFALLRTGRKYSLALESPRPASCRSKSPRDTNPSELACLRGQPRQASSLGAGVYYGGPLSVPERE

SEQ ID NO: 483274 - protein, 326 aa, unidentified
MQGKEASEQETKTKSNVGIDISKCWLDVHILPAGERLRVVNSEAGVRQLKRWLLRHNPALVVIEATGKWHRLVHRSLVASAIAVALVDPFRVRMFAKAQGILAKTDRLDARVLASFAAVMSPPLRAPAPQTMAELAELVVARCSAVEAQAALKNQLGTAECKFLKRQLERRIARAAKDVDDLDREILKRIKADAGLARRYAILTSIPSFGFAVAATLIACLAEIGSLSAKQIGMLAGLAPIADQSGERDGVRVIWGGRPAVRRILYLAALSASRFNAEMKAFHQRLTASGKPPKVVLIAVARKLVVLANTLISQDRTWQPRHIKCA

SEQ ID NO: 483275 - protein, 415 aa, unidentified
MIYQVSAKYVCGIDLHANKLTACVMDKKGKIQKKKTMVCSKKLVLDFLSPREKDITVGVESTCNWYWLIDLLTENNIPCRLGHALYIKRKISSKHKTDTADARGIADLLRTNQFPVAYAYPKEISAVRDLLRRRYFFVRKRAATFTHIQNSLHQDGCIEPLRNKLQYKSARWSLVDKTENIDLKNILTADLEYIAALDTLIENLDKKVIEKARLHNNKHYEALQTMPGCGKTTALTIIYETQTIQRFRTPRRYSSYSRVVRAENESAGKNLGGTTNDKIGNPCLKWAFAEIGYSMIRNYPVICEWHQKQAAIHGKSGAHARLRHKIAVTVYHMMKNDTVFDLVKFLRKNNDRVKNHSQQWLETSGHQSEPVLKNKNPSGLSQSKRIKYKRNNAVKSKPGRLSLRTTGKRKVLTKS

SEQ ID NO: 483276 - protein, 359 aa, unidentified
MLNNSTFFIGLDLGDKHSYVAILDPEGELIEESRLPTNKTSFQRKFSSLQRCRVAMEVGTHSRWASQLLKELGYDVLVANARKLRAIYHNPRKGDRADAETLARLARLDPELLSPIHHRSPEAQADLAVLRSRDAIVRCRTLLINHTRDLVKSSGSRLPSCSADSFARKVAPDIPEPLRPALAPVIDTIASLTQQIQSYDQTNEELCSERYPETRLLRAISGVGPLTALAFILTLENPDRFRRSREVGPAIGLVPRRDQSGDQDPQLRITKTGDAYLRRLLVGSAQYILGPFGPDCDLRRWGLKLAERGGKNAKKRAVVAVARKLAVLLHHLWKTGEIYDPFYLARKHDRAPEVVPAAA

SEQ ID NO: 483277 - protein, 391 aa, unidentified
MTRISVGVDVSKNRSTVCIMDQDGKFIMRPFLVWHSTEELDFLADTLKRLNGEVRVIMESTSIYQYPIALHLKEKGIFISIVNAYEMKQFANIDFRGGKTDKKDSRTIASYGISYWYKLVEWQIPKDTYFNLDLLNRTYMNAKKHRQIILQELQHYIDCAMPGMNKELHSLNLSTKKDFMLDFVEKFWHRDEIVNMTEAEFTEVFTAWAKKKGYRPVEGKAAKIYAIAKSCIPYYPANPTVKTILQCIVDKLSGVNRTLVTIVTQMIEEAKKLPEYQIVREMPGVGDPLAARFFGSVGDIRRFKNSKALVAYAGIDSPPDESGDFSSTHRHITKKGSKVFRDTGYEIMMALRAQKRTWEKVRKNPEVYDYMLKKEAEGKPPPKLNELARFN

SEQ ID NO: 483278 - protein, 398 aa, unidentified
MKQMAADVKLLQNLRKKEEPMTTSTATIEPIRGDLYLAFELGWKTWKLAFTVGRAQRPRLRTIDARDIEAVKNEIRAAKKRFGLSRKGRVVSCYEAGRDGFWLHRFLESIGVVNQIVDSASIEVSRRKKRPKTDRIDANKLVMMLIRWVEGEDKVWSVVAVPSVDAEEARHLHRELKTLKKERTKITNRIKGLLAGQGVEVSKIDAAFPKWLRKVRLWDGSAIPERLGQRVLVEFDRHSYVHQQILAVERERRKLTKESQGNAAVVARKLLKLKGIGENASWTFSTEFFGWRKFNNRKQVGSLAGLTGTPYDSGGSAREQGIDKAGNKIMRCDGVEIGWCWLRHQPNSALSLWYQRRFGHGGKRLRKIGIVALARKLLVALWRWVDQDIQPEGAMLKA

SEQ ID NO: 483279 - protein, 411 aa, unidentified
MRIIRKRCLGLDLHKKQITGHLRVHRSSNEEAERIDIRFGTMPEELLRLRDWIVEHQVSDVVMESTGVYWMHVYELLETVTTPAVVNAAHVKKVPGRKTDIHDAQWLSELHAHGLLRLSFVPPKEIRELRLMTRYRTKLVAMRTSARNRTIKMIELAGVKLSSVVCDSFGKTGRALLDALVDGPVNSTTVKELAKGSLRNKTVELEAALRTPLSDYQREMLAMHLRAYDAIDAQIAQSESKMMERAKPYAAAIERLDAVPGINPLAAITVLAETGLDMSVYRDAHHLTSLAGLAPGNNVSADKRRRITTPKGNHYLKRISVQIAWAASRKNNSFLRTRFNRLSFRIGRNKAIVATARHILIIVYHLLAGEQQYKDLGPQFYDKRNKERSIKRHVKRLEQLGFTVALKPATE

SEQ ID NO: 483280 - protein, 310 aa, unidentified
MEQVFVGIDVAKDRLDVYVRPSGEAFAVARDSEGVAALVERLAGLRPGLIVLEATGGFETVVAGAVAAAGLPLAVVNPRQIREFARATGRLAKTDKLDAEINALFAERIQPEPRPVPDDQARALAELIARRRQVVDMMTMERNRRHMLTSKRLLKSVDRLLAVLQKELSGLEQELDDTIRGTPAWREKEELLTSVPGVGNGLARTLLADLPELGQLGRRQIASLVGVSPFNRDSGRFRGRRTTWGGRAKVRSVLYMGALVATRHNPILSVFYQRLLADGKEKKVALTAVMRKLLVILNAIVRDGTPWQSA

SEQ ID NO: 483281 - protein, 320 aa, unidentified
MALFRGKVDWNEGHVKVDNNVSGYKELKKWLRLKNAEKSRLRICMEATGLYTHDFRSWLEQEDITYYVVDPKRMHHFAPPLSIKGIRQTKTDKADAFRIAIYCSLFHDSMKPSKLPSAAYFKLKRLLAERRQYVKQSVLYRQQLSDISVYDSVSSRTRKRDELVSLRDNIRQTDKEIKSVIDTDPAIKQNYDLLTSIIGVGIVVAVTTIVLTENFTIFTNPRKYASYIAIAPFPHESGTSVRGVTRVSKQGFQQAKADLSISVLNAITHDAELREYWQRKKAEGKHTGVILNAVKFKMVLRMFAVVKRGKPYVNTKGYKG

SEQ ID NO: 483282 - protein, 341 aa, unidentified
MKNLFIGVDFSKEKVDVAILFADGLVETAAIVFNEFKTTVSGYRQLVKWVEQNSCGIDSSLWLFCGENTGDYSKGLCNFLYGKGYDMWLENAKSIKDASGLRRLKSDRADASMIAEYAMRNYDKAVMYEPLSESLTQLRELFLYRQMIVRHRCSFQVRRGEKRLTMEKSPVKTMISQSGRHIVSELNKEIEKIDKRIADLIKSDEELTKVFTIVTSVPGIGTQNAVCLMVYTDNFRRFNYDSRKIACYYGLAPFGKDSGTSVHSDPHVHYMANRQIKAMLTQAALAAVNFNPIMARYYMRLVERGKKKQVALNNVKNKLVHLVTAMVRNRQTFTPEYKISA

SEQ ID NO: 483283 - protein, 403 aa, unidentified
MNNVAGIDVSKGKSMVSVLRPFGEVVAKPFSIGHTGSELKELADYLKSLDGETRVVMEHTGRYYEPVARFLHEEGVFVSAVNPKLIKDYGNNTLRKVKTDKADSRKIARYGLDNWAELRQHTPMDTIRMQLKTLNRQQSLYAKTKTMMKNNLIALLDQTYPGVNALFDSPVREDGSQKWVDFATTFWHVDCVRNMSLTAFAERYRKWCKRHGYNFSQSKAVEVHAGAQDLIAMLPRDALTKTMVRQAIDALNAVSASLERLKAEMQALAAQLPEYPVVMAMHGVGDSLGPQLMAELGDVTRFTHRNAITAFAGVDPGADQSGTHEAKSTRVSKSGPPELRRALFLVMDCLLKTQPQDDPVYRFMDKKRAEGKPYLVYMTAGANKFLRIYYGRVKEYLASLEEN

SEQ ID NO: 483284 - protein, 455 aa, unidentified
MPKKTTSDRPELKTVNVSAAAIDIGSKMHMAAVNPACTEVPVRSFSTFTQDLHELADWFTACGVTSVAMESTGVYWIPVYEILEQRGFEVILVNARYAKNVPGRKTDVSDAAWLRQLHSYGLLRGSFRPDAEIATLRAYLRQRERLVEYAAAHIQHMQKALMEMNLQLHHVVTDITGATGMRIIRAIVAGERNPDVLATYRDVRCHSSTETIHAALVGNDRHEHVFALTQSLELYDVYQAKMLDCDRKLEVLIAALNNKGEKPVGKLSKPRIKTKQVNAPTFDVRTALYGVLGVDLTEIHGLGPSLALKLVGECGTDLRAWPSAKHFTSWLCLAPGNKVTGGKVLSSRTRRSSSRAAALLRLAATTVGRSDTALGAFYRRLSSRAGKSKAVTATARKIAVLFYNTLRHGMSYRDPGAEHYEQQYRSRVLANLQRRAKSLGFVLQAIPGDANPAVS

SEQ ID NO: 483285 - protein, 342 aa, unidentified
MQVTTIGLDIAKNVFQVHGIDANEKVVVRKQLRRSQVIAFFAALAPCLIGMEACATAHYWARELTKLGHKVRLMPAKDVKAYLKRNKNDAADAEAICEAVRRPTMRFVRIKTAEQQGQLMQHRTRDLMMRQRTQVINALRAHLAEFGIVAAQGNQGVKELLAIVADQQDARLPVDARASVIMLAAQLEAVQTLLRSLDQRIMKQHRANEASRRLETIPGIGIIGASAIAATVSDPMVFRSGRDFAAWIGLVPRQDSTGGKQKLGPISKQGDRYLRRILIVGAHSVLRCVKENPLKYPWLTQLLARRPFKVVAVALANKMARTAWALLAHGGTYRAPELAATA

SEQ ID NO: 483286 - protein, 350 aa, unidentified
MFAETADFVVGVDTHGQRHSFALVQARTGALVREWELPACAQGYRRALALARELAPGRRLWALEGSGCYGAGLARFLLAAGECVREVERPLRRGLQARLKSDSLDALRAARASFERPLASPRAGDSREALRVLLATREQAVQVRRVGLNQLRALLVTAPDQLRQRLSGLPRTRLAIRCRALRLTAAAGEQERATVLALRLCARRITAADHEAQTLGREIERLVRTLAPALLDEPGVGPISAGFLVLGWSHHGRLRSEAAFARLAGSAPIPASSGQVSRHRLDRGGDRRLNRALHTIVLARRRNHPATIAYIERRISEGKTTREAVRCLKRYLARHLYRLLEQTPAATRQT

SEQ ID NO: 483287 - protein, 343 aa, unidentified
MEEVSIIGVDLAKNVFQLHGAAADGAVVFRKKLSRLQFARFMTDHPACDVAMEACPSAHHWARELTSHGHRVRLIAPHYVKPFIKRQKNDAADAEAIVEAAMRPTMRFVEPKTEAQQARAVAFRAREQIVKQRTEAINALRAHLYEFGHVAPEGVGYIPRLAKVVDDPGSGLPDLARDICRMVLEQIELLTSRLTAVSAKLAAASKAAAIPRQLQTMPGVGPITALAVETFAPPMDQFRRGRDFAAWLGLVPRQHSSGGKQRLGKTSKMGQRDIRRLLVTGAMAVVRWALRRGAPQNPWLERMLERKPPMVAAFALANKMARRIWAMLTRGEDYRDPVIASAA

SEQ ID NO: 483288 - protein, 346 aa, unidentified
MKINRVGVDLAKNVFQLHGVDRRGKAVWKRKLSRAKWLSVLFETVQPGTEIGMEACAGAHHWARLLTHRGYSVKIIPPQFVTPFVKSNKNDANDAQAICEAMGRPNMYPVRVKTVEQQDLQAMHRIREEIKGHRIAKANQIRGLVTEYGLVAPQQLCSLRRAIPDWLEDADNGLTGLFRQLLQGLWGDLYVLDQRMDELDQQIAMIAQENPVAKRLQQLRGVGPLIATALVATIGDAKQYRKGRDMAAAIGLTPRQHSSGGKDRLLGISKRGDAYLRCLLVHGARSAVRTAKDKEDRLSRWIISLQTRRHPNVVAVALANKMARMAWAMMTRGADYDPDLAAVSVN

SEQ ID NO: 483289 - protein, 343 aa, unidentified
MTYFAGLDVSVKETSVCIVDDAGKIVQEVRVASEPEALLQVLTNTIYRFKRVGLEAGPLSQWLYSVLAEAGLPVICVETRHMRAMLKAQINKTDRKDARGIAQMMRVGLYRPVHVKTLRSQKLRVLLTHRKLLQSKAIAIENDLRATLRNFGLKVGMIGTVKFETRIRELVENLPDLAVLVEPLLIVRQVVREQLVILHRRLLAIVRGDEVCRRLMTIPGVGPVVALTYRVTVDVPARFRNSKAVGAVFGLTPSKHQSGEIDRMGGISKCGDAMMRTVLFEAAQSMLTRTIKWSWLKAWGMKIAKRRGIKRAIVAVARRMAAVMHRIWVDGTEFRWTRDFVAA

SEQ ID NO: 483290 - protein, 408 aa, unidentified
MEVVHPRCAGLDVHKKTVVACVLVPERKEVRTFGTVTDELLRLADWLASEQVTHVAMESTGVYWKPIYNVLESTGMELLVVNAQHIKAVPGRKTDVKDAEWIAHLLKHGLVRASFIPSRPQRELRELVRYRKGLTEQRGHVVQRIQKLLEGANIKLSDVASDVVGVSGLTMLRALAAGEQDAERLAEMAKSQLRNKREELKLALRGSFGEHQRFMLKNQLGLLEFLDEQIAELNQEVERRLRPFETLLERLRAIPGIGPRNSEQILVEVGTDMNRFPTDSHFASWAKLCPGNDESAGKRMSGRTGQGSRWLRATMVEAAWSATRVSNRYFAAQYHRLVPRRGKRRAAVAVAHSMLIVVYHLIKDGTVYQDLGPRHFHELDRKRITRRAVLRLQSLGFDVSLKEVATVS

SEQ ID NO: 483291 - protein, 398 aa, unidentified
MTESSDYESVQVFIGVDVGKDTHHAVAINRSGKRLFDKALPNDENKLRSLISDLKQHGQILLVVDQPATIGALPVAVARSEGVLVGYLPGLAMRRIADLHAGEAKTDARDAAIIAEAARTLPHALRTLKLADEQIAELSMPCGFDDDLAAQTTQASNRIRGLLPQIHPALERVLGPRLEHPAVLALLQRYPSPEKLASLGEKKLAAQLCKLAPRLGKRLAADIAQALAEQTVVVPGTNAAAVVLPRLALQLITLRKQRDEVALEVEQRVLAHPLYPVLTSMPGVGVRTAARLLTEVACRAFASAAHLAAYAGLAPVTRRSGSSIRGEHPSRRGNKALKRALFLSAFAALRDPLSRAYYSRKMSQGKRHNQALIALARRRCDVLFAMMRDGTFYTPQGS

SEQ ID NO: 483292 - protein, 466 aa, unidentified
MKPFYMGIDVSKGYADFMIINAQKKPVIQSFQLDDTFEGHQTLYNIVGRFLAKHPNSMLFAGMESTGGYENNWYNSLVAFQGSLNIQTSRLNPLGVKRNSQADLKKNTTDKISAQNIAEYLVAHPEKVAYQQQDQLAGLRKQWGFIQMLTKQRTQFLNQFKGLLYTSNPELLGYCQSETPAWVLKLAIKYPSASRLKRANVKSVANIPFVSKEKAQQLATNAKRSVASATDTETEQLIIATARQIIHLNQTIDTQSQRMINTCKLPEVELLKTFDGISDKSAIGLIIEIQTVKRFATAKKLASFFGAHPVYKISGDGVGGIKMSKQGRKQPRHILYMITLAAIKCNPLIKQIYEKHQRNGKHNMAAMGICMHKILRIIYGMLKHNKPFDPRIDIANRQLSAQAKEAVPKKNTSRRFQEYDTKAPVSRRQKKKRLERGRSHSVPDTKSGITAPVPLRNIIANILPEL

SEQ ID NO: 483293 - protein, 325 aa, unidentified
MQGKEASEQELRKSNAGIDVSKDWLDAHVLSTSESLRVANTSAGIRRLKRWLLEHEVKLVAIEATGKWHREVCRSLSASSIAVAIVDPYRVRLFAKAQGILAKTDRLDAKVLAMFAAMMSPACRPPAPQALEAMQELVTARASAVDEQTALKNQFAAARQRFVQRQLERRIKQLAAHIAALEAECLKRIKADEALARRFAILNSIPSFGNVVAITLIACLAELGSLNDKQIGALGGLAPVADDSGKRQGIRVIWGGRAVVRRVLYLAALSAKTCNKDMKAFYLRLTANGKPPKAALVAVARKLLVLANVLLANDRPWQSVAPQNA

SEQ ID NO: 483294 - protein, 358 aa, unidentified
MTTTTTSMTHSALQRRVIVGVDTHKEIHVAVAIDELGALIGTGSFTADRAGYTALISWATSLGAEVTFGVEGTGSYGAGLASAIRRSGIGVLEVLRTDRRDRRLRGKSDALDAENAARSVLAGSVHAVPKSADGIVEMIRVTKVAKDNAVKARTSAMLSLKQLLVNADDELRQSFKGLPKMTFIRRAAALRPGPIDNVTAATKQAIRAIAVRWLALDEEIKGHDLLLTRLTTSIAPDMVAGFGIGPDVAAELLIVLGDNPARIHSEAAFARLCGTNPIPASSGKTTRYRLNRGGHRQANSALYRTVVVRMQYHEPTKAYVERRTEEGKTKPEIIRCLKRLLAREIWARTRDFRAQSGT

SEQ ID NO: 483295 - protein, 344 aa, unidentified
MEHFAGLDVSVKETSVCIVDDTGRIVREAKVASEPEALLAVLNNPSYRFRRIGLEAGPLSQWLYSALGEANLPVICVETRHMRAVLKAQINKTDRNDARGIARMIRAGLYRPVHVKTLRSQKLRMLLTHRKLLQSKAIAIENDLRGTLRNFGLKVGVVGAAKFEARIKQLVDNLPDLALLVEPLLVVRRVLREQIAILHRRLLDIVRDDEVCRRLMTIPGVGPVVALTFRATVDVPARFRNSRAVGAVLGLTPCRHQSGESDRTGAISKCGDEMMRVMLYEAAQILLVRSTRWSWLKAWAMQIARRRGLKKAIVALARRLAVIMHRIWVDGTEFRWARQEAAAA

SEQ ID NO: 483296 - protein, 453 aa, unidentified
MAKKAKKLHTSKGIELKIVNPNAAGIDIADTEMQVCVPAGRDGENNRRFGSFTRDLNEISDWLKACGIDTVAMEATGIYWIPLFFKLQQDGFDVQLCNAREVKNISEKKTDEADAEWLMLLHSYGLLKPSFQPENTARQVRNLARHRSNLLRSAGKEVQHMQKALEQMNIKLTNVLSDIVGVSGQRIITSILAGERNAEALSQLADGRCKRSKEEIALSLEGTWDTDHMFELKQSYELYKVYQEKVAECDREIEAMLKGFIAKIDTDMAKLIRCDKTICKKNAVGFDVESYAYGLWGVNTMSISGMSAGSVLQLIGELGTDFVKKFDTPAKFCKWCNLVPNNKISGGKLISSRVPKRKNPVGQVFRQCANTVSKSKNPMGFYFRRIKSRGGHMAAIVATAHKIAEIFFIMVRDKVAYDEGRVGLDEETLLKRKIERTQRALDALSAKLYATAS

SEQ ID NO: 483297 - protein, 423 aa, unidentified
MKFKSQARQNQLIEKITAQHLVIGIDIAQQMHVARAVNFRGIIIGDYLSFSNDEEGFHHLLLWIQKLQTTHHLSAAVVGMEPTGHYWLNVSRWLTEHHFEVVLVNPHLVKKNKENRDNTPSKSDRKDALVIADMVKNGYYSETRTTPEAFEDLRVLLSNRDFVVKRLVSAKNQIHRWVDVVFPELRRVFKDITCIGSIATLRLFPTPAELSKLQPQYLIQGWKTIMKRHCGARKAKALIELANHSIGSQSATHYYKLHLKQLLAEYDLACEQLEVVEKEISTVIERIPFAKSILAIKGISVISLAGILGEAGDLSGFVHGNALLRHAGLNLAEASSGKWTGQMKISKRGRSRLRRFLFMTTMSLVMNNSEFQAMHAYNVQFKKMKKMRSIMKLCGKLARILVGIARSGKAYMPQKTLPLLQAA

SEQ ID NO: 483298 - protein, 470 aa, unidentified
MVAVMIGIDPHKASHTAVAIDPAEAPLGQVRVRACAAQTERLLEWAQAWPQRTWAVEGAGGVGHLLAQQLAAAGERVLDVPPTLAARVRLLATGNINKNDPNDARSVAVAALRSAGVREVRRDDHAAVLKVWSKRYRDLGRARTQVACRLHQVLCELVPGGVPGEITAAQAERILASITPAEAVQAARWELAAELTEDLRGIDARIRQARTKLAAAVRAAGTSLTRLFGVGPVIAAAVIGDVGQVARFPDRDHFAAYNGTAPIEVSSGGRKIWRLSRRGNRRLNHAIHMAAVTQIRHRHSQGHAYYQKKLAEGKTGKEALRALKRQVSDAIYACLQADARRAAAHVKGPGGQPGNGSDSSAAGSHPGHRLFGQATPGPRHHTTTAASDPAPGPASARGRAGHSSIAATLPLAKPQVQVQRPQRSEDERPGGAARQRPYSAARKAWGQGSQAKPQRPEAASRAREKDRRNP

SEQ ID NO: 483299 - protein, 352 aa, unidentified
MQHFIGCDVHKRHQVVAWIEEETGEIKKRRLEHEGKGVKAFYAQFPRGTVVGIEATFPAYWFERLMGELGHELWVGDAARIRASEVRYQKTDPRDAEGILDLLRTGRFPRIWVPSLEERDLRQLLVHRMKQVRARTQVKNQLHALAISQGVCRKRKLWSAQGRAELEKLALLPWAARRRKELLESLDRLDAQVRELDRAVEEAGRARPEVALLRTHPGVGMVVGLAFVLSVGPIERFPNSRKLVSYWGLNPRENSSAGHQRLGSISKQGNTMMRWLLIEAAQTAARLDPRLRRTYQRLKHQRNSGVAKVAVARRLVVRLFWMLRTRNNYAQLVHMSGSPSSAVVPPQGGPNL

SEQ ID NO: 483300 - protein, 443 aa, unidentified
MARKNQKRFEIIHHDCAGIDVGSREHWVAVNPDRADPPVRKFLTFTDDLIALADWLASLQIKVVAMEATGVYWIPLFEVLDARGFEVYLVNSRATRQTSGRKSDVLDCQWIWQLMTHGLLSGAFRPADEVCSMRSLVRQRANKVADQAKTINRMQKALSQMNIQLANVISDITGVTGMKILQAINHGERDPHALAALRDRRIKADHATIARSLHGNWRVEHLHSLRQELACYDFLETQIADCDHAIAQALGLLPMRQEEVPAARKVLRSAHRSVTEQTVLHQALGRVMGVDLTAIPTIGVDTALVLASELGPDLSRFPTSQHFCSWLGVAPPTRISGGKSLPGRGPKVINRAAQALKQSASNARNDKSFIGASHRARLSRMDTGCAVKATAHQLARLIYAMLTKGQPYVEQGLEAYEEKSRSRQLRALERKAHKLGWRLEKAG

SEQ ID NO: 483301 - protein, 320 aa, unidentified
MMAQNGLVVAGIDIAKDKVDVCIRAVSQRQTFPSTAEGRRQLVSWLRKYKVTKAVMEASGGYEREWAKALRVKDIEVRIVDPKRVRHFAKSAGRLAKNDVIDADTIAWFAETFGEAPGQAHDAARETLQQLVNARLGLMEMRTMVSNKGEHDVPEAVKNGHARLLKTIAVEIAALEEAIAAMVKATPHFAARAEIIESVPGLAGTTSAGLIAMMPELGEASNEAVSALMGVAPYDDDSGKRQGGRQIKGGRRKVRNLFYMSCMGAATRHNPALKTFYQRLLAKGKKKKVALVACMRKLIVILNIMLARGEKWDASRYAVS

SEQ ID NO: 483302 - protein, 419 aa, unidentified
MTQQKYTKSVSIVHPVCCGLDVHKRIILACLISQDQDEPVIEIKEFSTFTNDIIKLKDWLLEHECPVVAMESTGIYWRPVHNILEDSTQVVLVNARHYKNVPGRKTDVSDSQWLAELLRHGLLKGSFIPDKEIRQWRELVTMRNHFVATESDYRRRIQKVFETANVKIDSVVSDLFGVSGRNLIDLILTVPTEELTRENVQECLRGRLSTKGEELFLAIQGFVTDHHRFMLTKYLDVVDSSRQSVMDIESRIREVMKPQQPLLDRLQEIPGIGEIAAAGIIARLGVNMDTFPTSAALCSWAGVCPGNNESAGKRHSGHSPVRKHPLKTLLVEVAWAAIKKKDSFFREKYYRLKARRGAKRAIIAIAHKILKVIYVIIKEGKHYQELGAEFLNENNKKAQIYRLKKMAEKYGFALVEKAA

SEQ ID NO: 483303 - protein, 466 aa, unidentified
MKHHRRRSPGKPRVSPTVLDRINPNVAGIDCGSAEHFVAVPPDRDPMPVQSFTTFTSDLLRLADWLAACRVTSVAMEATGVYWIPVYEILEARGFEVLLVNARHLKNVPGRKSDVSDCEWIRELHSVGLLRGSFRPTDAIVALRAYLRHRQTLIESAGTYIQRMQKALVQMNLQLPLVVSDITGVTGLRILGDIVAGHRDPHQLAEHRDHRCRASKADIIAALTGHYRPEHLFVLQQNLELFEVCQTQLAACDRAIDAHLQTLAAHGATPATPMPAPRVTKKPRDNEPRCEIRTPLHQLTGGVDLTQIDGLAPYTALKLVSEIGTDMNRWATEKHFTSWLTLAPKNKISGGRLLSSRTQPSANRAAAILRMTAMSLGRTQTALGAFYRRLAARIGKPQAITAPARKLAILVYRALKGELAYRDPGADAYDIQQRTRVLRRLRQRAATLGFELVNRQTGEILPAGVS

SEQ ID NO: 483304 - protein, 422 aa, unidentified
MNKAKKQKQEEKRCWVGLDWGGKGHAVSVVDDTRAVLGSFKTGAGLADLDRLALRLRTYGTVAGIAIETTCHPVVNYLLAAGFPIYAINPKQSKNWRACNSVACSKNDERDGLVLAVELAQRHASLRPIEPLDPVVAELMGLCEKLRALVDERTALIQRLKATLGQYYPGVLGFFSDWTSPAAWRFVKRFPQPQTLAHAGKETLIRFLKANHIGIKPLWLARIEARGEVARWPRPADSIALEALALATIAQLLALQPHIERMDRLIAQHVPRVPHACLLDSLPGAGKRLAPALTAITALVTSDQADLQGLRGMSGVAPVEYTSGKRCRVQIRRRCNKHWRDIMHLFAHCSTVSSAWAKAFYDMHREQGDTHASALRKLADKWLKIINRMIQTGQPYDDQRYVEALRRSNSPVYLRLGEKTCG

SEQ ID NO: 483305 - protein, 399 aa, unidentified
MLAVGIDISKSKSVAAILNQDGSMHTSPFEFHHTQPELDAFIKYILNSNQSATILMENTGHYHYPVLKAFREAGLPVCMVNAYQIKKFGDMDLRKAKTDKKDAVRIARYALEKSYSLVPYTSMEQKYEDLRFLARQYNQRMLTLKTNKVFLLNILDETMPGITNILPLTTRTPETSLSVLFINRFKSYDRIKKMGKSRFLDAFEKIARKSRNRQTKTYGLAIYEAALRNITTRGENEYTLAAQDQCLELVCESQKAADSIILKMQTLAETLPEYAVLRSMAGVVDRLGPLILAEIGDIRRFHSGKALNAYAGNDPPPYQSGIFESHNRHISKRGNAALRKYCFEVMQALKLTRPQDDPVYLFLLKKEQEGKPYNVAKMAGVNKFLRIYYARAMETLKQQ

SEQ ID NO: 483306 - protein, 372 aa, unidentified
MGLKGGAMDTIYIGVDFHARQQTICYLKTETGELVICELKHQDKQEVRGFYAQFKGQVIVGLEASGYSPWFERLLEELGCEVWLGHATEIRRRARWRQKNDRRDAELILDLMLHHEFPRLHRPAAESREVLRMLRYRQKLIKLRTMSKNSLQAIALQSGLAKGRGLFTKTGQQELSTAEMSPVMQWQREHWLQLLKPLNEQLLETMVWFKAQSKGDVCITRLRTHPGIGLLTSLCILHTLQPVSRFRNTRKVAAYAGFDPIERSSAERKCFLGISKAGSRLLRYLLVEAAQTAVRKDEDLKRFYKRLVERRGRPKAKVAAARKLLIRAYIMLRDEIDYAEFRRRAVAARLARRGQRPEVPEVLIGQPASPAP

SEQ ID NO: 483307 - protein, 343 aa, unidentified
MDHFAGLDVSVKETRVCIVDDTGRIVREVKVASEPEALLQVLRNPIYRFKRIGLEAGPLSQWLFSALAEAGLPVICVETRHMRAVLQAQINKTDRNDARGMAQMMRAGLYRPVHVKTLRSQKLRMLLTHRKLLQSKAIAIDNDLRGTLRNFGLKVGIVGTVKFEARVRELVENLPDLAVLVQPLLMVRRVLREQFAILHRRLLAVVRNDEVCRRLMTVPGVGPVVALTYRATVDVPARFRNSKAVGAVFGLTPSRYQSGEINRTGAISKCGDEMMRVMLYEAAHIMLVRLAKWSWLKAWAVKIARHRGMKKAIVALARRLAVIMHRIWVDGTEFRWTHEVTVT

SEQ ID NO: 483308 - protein, 386 aa, unidentified
MTQHPHHTASNGLDYDRTLILAVEISNRSWVAAAQVPGLRQKGAKQQLAPQADALMTAIEGYKRRAAAVGMVVDRVIVAYESGGSGFWLARWLQQRGVEVYVMQPSSVPVDRRMRRAKSDRIDADMLLRTLLAWLRGEPRVCSMVPVPDEATEDARRPMREREELIRARVAIVNRIEAVLTVLGAGEYNPLRRDGRERLGQLRTALDQPIPPHARAQIERLLDRLDLVCQQLAELEAQRDQAVESEAAGQTEQMIRQLARVRGIGVQTATVLVHEAFVRRFRNARALGSYAGLTGTPYSSGGTHREQGISKDGNRRLRATLVELAWLWLRYQPGCARSRWFHDRLGGSRGRLRKVLIVALARKLLIALWRYLQDGTVPQGMELKPA

SEQ ID NO: 483309 - protein, 340 aa, unidentified
MWYLGVDYHLEVAVVCVMTPTGKVSCKFEVPATPEGMDEMIDRVKDKRFRVLGEAFTYSMDLHNYLLSKGVISDLIQPDELQIITKSYKKTDYNDCEAIAWYLRLYDKGELNIRMSYIVKGDEMRLRDMARLMNSLSMEKAKINQQIQAHMRRNGEYLPRDIKDSGVSSNDVQQYIIETFGHDFTLQQYLQLYVILTERCKMVDAELKKFSVDERIKSLLVSIPGIGEQTAIMLMSMIIDITRFQSADKMRAYFGMNPVVRNSGETVKHGKITKKGDSMMRRLLERSALVHIRTCPDSTVARIFNDVSSRSKKPVALLAAANKLLDIVYSVWSSGRHFHC

SEQ ID NO: 483310 - protein, 387 aa, unidentified
MPQPNDLSRSLVALDQNSTIIAVIEMSQSSWLVGGVLPGIERQPRKKLEPSPERLLAVLHRWRDEAVRAGGNITRIAVAFEAGRDGFWLARWLEARGVEAHVIHPSSVAVSREHRRAKTDRLDTELLKRGFLGWLRGERGHCSMVRIPTIAEEDAKRPNRERECLVAERTRIVNRMKSTLARLGIRSFKPTLRKAADRLATLHTPEGMPLPPNLLAELRRNMARLGFVVSQIREIEEARQKRLGQEPETGPHAMVRQLARVVGVGIETADMLVHEVLSRPMRDRKAVARYAGLTGSPDESGAKRREQGLARAGNARVRRGMVQLAWRFLRFQKDSALALWYRARTADNRMGTRKTMIVALARKLVIALWRFVTTGETLEGVVLRPAG

SEQ ID NO: 483311 - protein, 316 aa, unidentified
MFIGIDVGLKHLDCAATAAAPDLPRRVPNTADGIARLVAALAAVAPALVVLEATGTYHCPLLAALLAADVPVSLANPAQVAAFRQSRLGRHKTDRADAQLLARFAQVHADELRRAAPDEPDLARLRTFVRYRDDLVAQRTAIRNRRHAARWTEAPAVVAWLEGDLAGIKARLREVEAEIAALLATRPETAALTAQAGVGLVTAAAVLAYLPAGVLGDAKAAAAYAGLHPRHEQSGQRDRSRLSKQGCPPLRRYLYLAAWTAVRRDPAMAAFHAKLLARGKAAKSALCAVAHKVLRQLLGKIKEMRHHQAHMPPLAA

SEQ ID NO: 483312 - protein, 357 aa, unidentified
MTSSSRLPFSGVIVGVDTHRDEHVAVAIDHLGARLGQYQLPTTRDGYQGLDCWAGSLGEVVAFGVEGTGSYGAGLTRHLASYGRTVIEVNRPDRSTRRRLGKSDPLDAEMAARAVLAGVAKDYPKSGLDNVEMIRMLKIVKGSAIKARTQAINQMKALIVTAPVELRHALAGLNVRRLIARCANFRPGKLVAPLAAAKHALRSLARRHDQLNSEIEVIDGELIRLTSETAPALVEVFGVGPDTAATLLVTAGSNPERLRSEAAFAALCGVNPIPASSGKTNRHRLNRGGDRQANSALYRIVLVRLRHHEPTKEYMSRRVSEGMTKLEVIRCLKRYVARQIYPILRLSGGNNIVAVAC

SEQ ID NO: 483313 - protein, 339 aa, unidentified
MTEITRVGLDLAKNVFEVHAVNAQEQVVVRRSLRRSQVLTWFAKQPLCLIGIEACGTANHWARELTTLGHTVRLIPPAYAKQYVRRNKNDAADAAAICEAVSRPSMRFVPIKTVEQQADSVTHKARQILIKQRTMAMNSLRSLMAEFGIVVPPGPQHIGKLLAILADPEDTTVAAVARTALNTMRELLSALEMQIGVLDKDIRARARTDVTARRLDTIPGFGPILSSAIAAIVTDPRHFDSGRDFAASLGLVPRQDGTGGKVKLGPISKRGNGYLRRLLVNGATAVLNGKNARNDPWRAKMLDGKPRKLAAVALANKMARIAWAVMTRQQDFRPRAVPA

SEQ ID NO: 483314 - protein, 342 aa, unidentified
MQITTIGLDIAKNVFQVHGIDAAEKVVVRKRLRRSQVLAFFKALPPCLIGMEACATAHYWARELTKLDHTVRLMPAKDVKAYVKRNKNDAADAEAICEAVRRPTMRFVQVKSAEQQGRLMQHRTRDLLMRQRTQVINALRAHLAELGITAAQGNAGLKELLKVIASDEDERLPADAHASLVVLAAELQAMQTLIGSIEKRIMAQHRKNEASRRLETIPGIGLIGATAIAATVTDPKAFRSGRDFAAWIGLVPRQDSTGGKQKLGPISKQGDRYLRRILVVGAHAVLKLAKQKPEKYPWLTRLLARKPFKVVAVALANKMARVAWALLAHGGTYRAPELAASA

SEQ ID NO: 483315 - protein, 467 aa, unidentified
MVSEVRLGIDVACRADHQASLADERGELIWSGWRFRTTPADLERLWAKLPVGADVLVVMEPTRNAWVPLAAWLRGRGAKVVVVPPEQSADLRDYYNKHTKTDRLDSRVLARLPLLHPEGLRAIGDLGPAESLRRAVRHRSSLVKNRVAAVLRLDALVELLGPAWADVLGSGDYTKTALAVLGRYADPNALKKLGRKRLTALLVRSSRGAWREAKADELLAAADETLELWAAGGLDFAELAEDIAAEVRLVAALDAEIAAVEDRIAGLYDDVDPNGIVRSAPGLGTTLAAGIIGRTGDLRRFANLAGIRAFTGIVPKIDESGITRRHKGITKAGDPGLRQTLFLAADQARKVDPTLAARYHRLVTVEGKTHVSALNSVAPVLMTRIAACWRNGQHYELRDVDGTPITDTQGRAICADRYKIDPKVRAARRATTRAQQLKRRTSRRREESAGAAPATGPSAADPTESVA

SEQ ID NO: 483316 - protein, 403 aa, unidentified
MNAVGIDVSKGKSMVTIPRPFGEIVSSPFEIKHTSSDIHSLIKLIHSIEGESRVVMEHTGRYYEALAHQLSAADLFVSAVNPKLVKDFNNDSLRKIKSDKADSVKIARYALDKWQSLEPYSITDELRAQLKVMNRQFHFYVKQKTAMKNNLIGLIDQTYPNANTYFNSPTRSDGSQKWVDFVSTYWHVDCIRKMSLNAFVEHYQNWCKRKKYAFNKSKAEEIYTKTKELVPVFPKNEITKHIIRQAVDQLNSTSVTVETIRTLMNETASKLPEYSIVMQFKGIGPSLGPQLMAEIGDVTRFTHKGALTAFAGVDPGVNESGSYAQKSVPTSKRGSSNLRKTLFQVMDVLIKTMPQDDPVYQFMDRKRTQGKPYYVYMTAGANKFLRIYYGRVKEYLSVLPDPS

SEQ ID NO: 483317 - protein, 457 aa, unidentified
MKDKEAKLQSNIVTMPLVHACAAGVDVGDTLHSVAIPEGIFAERVKTFGTMTCDLEAMAAWLLQGKITTVAIESTGVYWKPLFSLLNKKGLEVYLVNSRQTKNVSGRKTDEDDAMWIQKLHSCGLLKSSYLPDDEQEALRTLVRYRHTLVQDCSRFKNRMQKSLELMNIKFHTLFADIAGKTSIAFIEAILAGERNPQNFLPLVDGRIKASKEEILKSVEGNWRSEHLFTLAQSYEMNKVYLQKIAACDTAIEERLQCYQAFANDGQCGEPVNENTAILKPVLKKKKQRGAPVFDVRSNLKKIYKVDVLAIYGLSEMGGLEILAETGVDLKKWPTENHFKSWLNLCPNNKISGGKLISSKLLKKKPNAASQAFRIAANTVQRSNHWLGDYFRRMKSKGGNKFAVVATANKIATIFYKMVVQQKDFMPFDLEAYQQKYKQAKIAFYEKKLKQLKAVAA

SEQ ID NO: 483318 - protein, 317 aa, unidentified
MSALPIFVGVDVAKTELVTGLRPTGETWTVSNDETGIQELLQRLRPHRPMLVVIEATGGYERGVVAALAAAGIPLVVANPRQVRDFARSTGQLAKTDRIDAQILALFAERVRPEPRPLPDEATRMLTALLARRRQILEMLTAERNRLEHAVPPVRRDLLQHIRWLERRLRDVDHDLDRTVQSSPIWRAKENLLRSLPGVGPVTSRTLLGSLPELGALNRKQIAALVGVAPLARDSGTLKGKRLVWGGRAPVRAALYMAALVASRRNPALRAFYTRLVAAGKPKKLALTACMRKLLTILNAMVKTNSAWQRIHHPKRA

SEQ ID NO: 483319 - protein, 355 aa, unidentified
MDDFKYIGMDVHSATTTIAVRDGGGRLVMEATVATQAAALSDFLRGLRGRLWLTFEEGNWAAWLTQVLTPQVEKLIVCNPRRNASLKQGNKSDPLDARQLAHLLQANLLRPVYHEAAGPQTLQELARAYTTCVGDTTRVMNRIKARYRARGIPCSGSRVYRPRFRQPWFEQLTDPGARQRVELLYLQLDLLQELRKKARRALLTEARRYPACSLLRTVPGVGPVRAALLLALISTPFRFRTKRQLWMYAGLGLITRDSGQYQTVRGQIIRRDRPACVRGLNPEHNRELKEIFKGAALTATRSSSPLHAFYQQRLDQGMRPHLARLTLARKIATLTWILWKKGERFNAHDLTSQAK

SEQ ID NO: 483320 - protein, 440 aa, unidentified
MSNRTEKQNVPQRKASAKDTVLWVGIDWADQKHCVATRRPDGSDSKLHWVDQKPQKLDEFFLELQKQHLTGHIGVVLEQSRGALLYALLKYSFLELYPINPRCLADFRKAMAASGAKGDPSDADLLCELGCKHGERLRALELEDEATRQLVLLNEHRRGIVDEQTGLSNQLGSALKCYYPLILELFADHLVAPIALDFLERWPNLAALQKAKPGVLRAFFHKHNGRSEEKIQERIKAIGEAKPLTNDAVVIACYQLQVQTLIERLRAVQAGIAQYDERIKVVFASHAKARVFSSFPAAGPVLAPRLAAAFGTSEANFPAPDAMLCWSGVAPIQIQSGKSKVVHCRWARPKFLHQTFVEYARTSVLFCPWAREFFKSRTEKGWGKFRIYRALAFKWIRIMWRCWKDNVEYDEAKYLAGLQKRGVQLYASLYAAPDAKKPNE

SEQ ID NO: 483321 - protein, 353 aa, unidentified
MSDDKYIAFDVHQVTTVISVLNSAGREVKTAILPTQAQALLGFLEGLRGTLHLTLEEGTYAAWLYDLLQGRVAKLIVCDPRHNALLKEGNKTDAGDARKLAELLRAGMLRGVYHGSRGLRALQELAHAYESLRDDTTRVMNRIKAFYRGRGIDCAGRGVYRPGQRARWLERLPAGASRLRAELLHEELDKVGSLRRKARRGLLAESRKHTVAARLRQIPGMGPLRVALLMAHVQTPHRFRSRRNFWTYVGLGVVYRGSSEYRLVGGRAVRRAQALQPRGLNPNHRPELKEIFKSAALTAIRRPGPFKNYYEPRAQQGVDPAILRVTVARKLAALTWSLWKKGGHYRGEGPQQA

SEQ ID NO: 483322 - protein, 366 aa, unidentified
METIYIGVDFHARQQTICYLKTETGELVTCELKHQDKQQVRAFYAQFVGQVIVGLEASGYSPWFERMLEELGCQVWLGHATEIRRRARWRQKNDRRDAELILDLMLHNEFPRLHRPAVQSREVLRMLRYRQKLIKMRTMSKNSLQAIALQAGLAKGSRLFTKAGQQELGTAEMSPVLHWQREHWLQLMEPLNQQLLETMVWFKSQSKDDDSITRLRTHPGIGLLTSLCIVHTLQPVSRFRNTRKVAAYAGFDPIERSSAERKCFLGISKAGSRLLRYLLVEAAQTAVRKDEDLKRFYQRLADRRGRPKAKVAAARKLLIRAYIMMRDEIDYAEFRHRAVAARLARRSQGPANVPEVLIGQPASPEQ

SEQ ID NO: 483323 - protein, 347 aa, unidentified
MRFYNQQHNYYCGIDLHARMLYVCILDALGNTVLHKKVDADSDALLELLTPYQDNIIVGVECMHYWYWVSDLYLDYAFDFALGHALYMKAIHGGKTKDDRIDSYKIASLLRGGNFPLAYVYPKAMRATRDLLRRRTKIMRHGANLKTHVSNTFSQYNQQSPNVQLRYPCAREKVRNQFNEPAINRNIDMDLNVIAFCTKELASVEHFIEKTARQHNTQDYQILQTAPGIGRILALTILYEIGNIERFPSVQKFASYSRLVKCKAESAGKPKGTYENKIGNAYLKWAFSEAAVLYLRGNEPAKKYLHRLQKRMSKAKALYALAHKLGRCVYFMLRNKTVFDEKRFLPE

SEQ ID NO: 483324 - protein, 346 aa, unidentified
MYQDNKEELKMINNIFYGLDIAKMVFHVFTINKDEIVKKQLSRSQLLKYFAQQARGVVGIEACGSAHHWARELEKLGYQVKLLDAKHVKAYLKGNKNDFNDAEAIYDAVTQVNCREVGKKTIEQQDIQLIHSFRQELMKHKKALVNQIRAHLRERGIIISVGMSKFHQQLPELLENETNYLSQISIRSIRAHYEQVKQLELLIRENDLEIEQLCRANELSQRLVEIQGIGVMTATILVSDIGKSRTYNKSRDYAASLGLVPRQYSTGGKPRLLGISKRGNAYIRTLLVHGARAVLKNIKDKKDKLSCWCRALIERRGFNVAAVALANKNARIVWAMATYGTNYEKP

SEQ ID NO: 483325 - protein, 380 aa, unidentified
MRNVRFIGLDVHAETIAVAVAEPGGEVRSLGTIPNRPEPVARLIRKLGKPEQLRVCYEAGPTGYVLYWQLSELGVKCEVIAPTLVPVKAGDRVKTDRRDAEKLARCYRAGDLTAVWVPDAAHEALRDLVRARLAARRDQLRARNRLGKFLLRHGRRAPEGTTAWGTKHLAWVKRQSFEQAAQQATVVDYLHEVEHAAERIVRLERSIDAAIETLPQSLHAVIDALQSLRGIAKISAVSIMAEVGELSRFESARQLMGYSGAVSREHSSGERTRRGSISKAGNSHLRRIVIEAAWAYRHRPGLGATLLARQRDQSEDIKAIAWKAQHRLHARYSKLLAKGKAKQQVITAVGRELLGFIWAIGVAAERSQSEAPRRALRRAA

SEQ ID NO: 483326 - protein, 356 aa, unidentified
MKASIKKTSFKGEVLYIGMDVHKKSWMISIISRDIFLKRFSQEPDAERLSKSLKKMYPEATLKCVYEAGYCGFWIAEGLQKEGIDCIVVNPADIPITNKDKDRKTDKVDSKKLAELLRAGLLTGIYIPKVEELEDRYLLRMRSILIRYQSATKNRIKTALTFNNIIIPEEQLSKYWAKNYINYLKTIKFTQVSGQEAFTALLRQLDYYREDILRITKSIRELAKTEKYKNVIERLISIPGIGIINALTLLTEIADIDRFSCANRFRGFIGLVPKEHSSGERINRRSMSKRGNNRLKTMLVESAWVAVRTDPAMTLAFEQLTKRLNKSGAIIRIASKLANRILHVMVTKEQYVYSVA

SEQ ID NO: 483327 - protein, 338 aa, unidentified
MDHFVGIDLHSNNSYIAVIDTDDNRIFKKKARNNLKEILKILAPFKKQVKGIVVESTYNWYWLVDGLMDNGYKLHLANPSAIKQYEGLKHSDDVTDAFHLANLLRLDILPEGYIYPKHERPLRDLLRKRIHLVHKRTAFILSFQNLVSRNLGIKMHATEVSKLNEEDLEKLFDDEHLLLSAKASISIIHFLRSRIVQLEKVIAKAAKLKSEYKLLKTVPGIWNILAQMIMLETGPIERFKKVGNYASYCRCVQSNRFSNSKSKGKGNRKNGNKYLSWAYVEAANHALWNYEYVQKYHQKKTAKTNNVVAIKAIAHKLARACYYIIRDQKEFDPKKAFA

SEQ ID NO: 483328 - protein, 414 aa, unidentified
MFAVGVDVSNGRSTVAVLQTKTSTLMKPFEIPHTAEGFASLAGKLAGLDGEVRIVMEHTGRYYESFARAMHSAGFFVSAINPLAIKNYQDGINIRKVKTDKADAMKIARFALDKWEILPQYTPMDTIRYDLKTMHRQFQLSSKTKTALSNNLVALLEQSYPGANRYFDSPARPDGSQKWVDYVDTFWHVDCVARVSQNAFVERYRKWCKRHGYNFSQQTAIDLHTDARQKFALVPKSDTCKLLVREAVSQLNAVSRTVETYRTEMDRLASQLPEYETVMAMTGVGKSMGPQLMAEIGDIRRFPHQKSIVGFAGTDPIKDDSGDKVSDSKPSSKRGSPYLRKTLFVIMSILLQLHPQDDPVYQFLDKKRSEGKPYYVYMTAGMTKFLRIYYGKVRDCLKEQGLWEQTPDAPGMAD

SEQ ID NO: 483329 - protein, 350 aa, unidentified
MLIIGCDFHTRYQQIAMMDQATGELVERRLEHETGEADAFYRSLPKPVRVGIEATGPMHWFERLLAELGHELWVGDSAKIRSSDLRKQKTDERDALLILELMLANRFPRIWVPTPAERDLRQLLWHRHKLVRLRTMLGNQLHFLAMSQGLCRKRKLFTQQGRRELCSLGLGAWASRRRGELLKLLDQVEPSIAELDRAVLAQAKLREDAVRLMTHPGIGPVNALAFVLTIGPVSRFRRSKQVVSYLGLNPSEHSSGGRRRLGAISKQGNTLVRWLLIEAAHHTVRFDPELRQDYQRLKFRRGHAVAKVAIARKLAVRMFWMLRSGADYAQLVRTQGSPGATLVKATSPLG

SEQ ID NO: 483330 - protein, 350 aa, unidentified
MLTKNVIAIDLAKNVLQACHISIHGELMSNKPLSRQKMKEFLAKAQPSIVAMEGCCGCHYWGQLAEKFGHEVRIITPKKVKGYLEGHKTDHNDALAIANAAIQIGIKYSRPKSLEQQAMHSLETSRRFLSRSVVSLALHIRGTILGYGIANPRGEKGLKASVQTVLDGDPPIPSNVVSVLSMLWEQYTELKAKLIAFEKEKNALTRQIEPCQRLMGIEGVGETTAAMLYITLGDGKQFKNGRQASVFVDLTPKQHSSGGKVFMIGIDKCGGVKELRSLLYLGAMSYVGRLPEKPKTQKDAWLRSIIDRIGFKKACIALANKVVRTAWAMFRYETEYKPVLITNKFLNFTK

SEQ ID NO: 483331 - protein, 440 aa, unidentified
MISRSLPNAGPASPREVSSMSNRNRVMTVGSLDVHKRYVVGYVLDVFFDENEKKFVAENRAIKRVSRSLTGLGELADFLREFNVNTVVMESSGPYGLKVYYFLESENFDVWMIPARDNKSESGKKTDVEDAKRLARKFVAGSIRAYKLPSDPKIRALRTYVRTRKKLIDQLVALKNMIVKTFDEACVDIKAVFSDFGKGFLVFLEGYLRGESLDEIIGRWPRLGKKKEMLESLMKVRLDEASLASLSSYLRIAKAVLREVEKLDARIENLLVEFSDDIGLLLTVPGVGLKSAAVILAEIGDIRRFASAKKLASYAGLVPTVYQSGEKLIYGKLRGECNRRLRWILYEVALNAIKVSPWLKSFYERLVSRGKARKQALIAVARKIAVGIWHILMKRVRWKEMIRKNVRLPRKRRISRITVREAIELLREAGYIVTKARSGF

SEQ ID NO: 483332 - protein, 412 aa, unidentified
MHQRVAGIDVHRMKPVVTILIGQEDGAVSSETREFGGFKRDMRALVAWLQTHRIQQVVMESTGIYWKSVFAHLEAAGIAALVVNAFHVKNVPGRKTDVGDSEWLAQLARFGLLRGSFIPPKDLRELRIVSRYRRKLTGMLAGEKNRLHKLLDDAGIKLGGVVADIDGVCASKMVEGLIAGGKPDELAALGRGKVRATTDILEAAMDGELSARHRLVLDMASDHLRYLEGKLAALDRYLLAAMQPYAWAWRLLQTIPGIDAISAAMILIEIGDDPHRFGSPARLASWSALCPGNNESAGKRKSGKTRHGNPIVRYLLCEAANAARRTKTVFRAKYESLVIRRGHKKTIIALAHKLVRTIFCVLVRRKPYRDSTVDYEAASVAKNAPRWIRALKKYGYWPQVAAPSAPIVATAS

SEQ ID NO: 483333 - protein, 339 aa, unidentified
MYIGLDVHKKLSYYSMVDGEGTEVKRGRFPTTCEGLDEFASKLPEGAKVAIEASTSGIFAYEYLDEGGIEVHLAHPVYVKPFAKKHVKTDKVDARVLAQLLRMDYLPESYVPGKEIRDQRVMIRHHASLVRLRTSIKNRVHALLAIEGIQTSEFSDLFGKKGMEFLRGVKLREVRRKALDNYLEVLKALEERIEEMEDILKEKTKITDEAKWLMSIPDNALLILSELGEIERFSNPKSMVSYSGLAPKVEQSGDYRRYGHINKHSNGFLRWAFIQSARAAVRSSKPNRFQRIYNKIKARRGEKVAIVATARHMAESVYWVLTRKEYYKENKAIRASSFS

SEQ ID NO: 483334 - protein, 386 aa, unidentified
MSRPSNILLRAINYDHTLVLAIELSNKSWVLAAQVPGLPQTKAQRTIEPNKNALLAAIVGYRARAAAVGYAVERVIATYEAGWSGFWLARWLTAQGVEVHVVQPSSVPVDRRLRRAKSDGIDAELLLRTLLAWLRGEPRVCSMAPIPDEADEDARRSVRERTELLSDRVGLTNRIGAVLATLGVNDYNPLLQSRRRRLAELRTGFGEPIPPNALAKIERLLARLELVLAQIAELERERDEVAATDAPDRAGKMIQQLTSLRGIGVQSATVLVREAFVRHFSNGKALGSYAGLTSTPYSSGRTDREQGIGKAGNRRLRTVMVELAWLWQRYQPGAAQVVWFRERVGSTGRRIRKVMVVALARKLLIALWRFVIDGVMPKGAVMKPSI

SEQ ID NO: 483335 - protein, 352 aa, unidentified
MPMLEGQVDAVIGVDTHRDRHAAALLDPNGGVRATLEVPSDQAGHVRLLRLADEQAPGRRVWALEGTGCYGAGLTRFLVGQGEWVVEIDRPKRPRGRNGAKSDVLDAIRAGREALAREHLTTPRQRGHREALRVLHTTRAGIVAAGADARRQLKALIITAPEPLRDTLRGRPWRQQLHACAALVAAPGDPVEHRATVRALALTAQRALAARHDAKQLEAELRQLVTAVAPALLTQPGIGPVIAAQLLISWSHPGRFRSEAAFAMLAGAAPVPASSGQVVRHRLNRGGDRQLNRALHTIVMLRQVHHGPTRAYTSRRITQGKSEREIRRCLKRTLARQLYRLLERTATNPANS

SEQ ID NO: 483336 - protein, 456 aa, unidentified
MNNYFLGCDVSKGYADFVIIDERKQVVEQNFQLDDTFTGHHQLFQILKQFIEKNPEASLYAAVESTGGYENNWFQSFKKFSRELPIKVVRINPFAISHNYKAAMKRVTNDRISASTIAEYQIHHPEKLQYNQDDAYQTFKRLVTTTLMLKKTRSQFVNELETLLYVANPEIIKYRKSQISQWLLRVLQNYPDAASLATVSVENLSQIALIKPTRAKEIIRAAQQSVASASDEMIRLAITSTVETIVAIDKKIDQHIKLLQKQLMVPQIELLQTFKCIGLLSAIELYIEIGCIERFPTAKHLASFFGVHPAFKESGDGIRGVGMSKMGCRKPRAVLFMVSLNAIQHNELIRSVYQRELKKGKAKMAALGVCMHKILRIIYGMLKNNTAYDPAIDRKNQQKKVRKTNKEKFDDNRRFQIEDLNAPISKKQTRKRKERKLSQSDNITKNGISVLAPSNV

SEQ ID NO: 483337 - protein, 317 aa, unidentified
MYQYIGIDISKATLDVFDGEKSYQFPNTPSGYKDILRYAPKGKELCFIFEPTGIYSYDLVLFCHEKNIPALIVGSKEARDYARSIKQRSKTDKIDAQVLYQYHSQIDPKRRITPRIPTPNLSARKLMQYRNVYEHYLKDIQTYRNLLESMDKEDNTLQTSLHQQIDVLQQAADVLLKEIEHLLLQEEDNAVHLEHLQTINGIGHKSALMLLLEIMRYPKATAKQMTALMGLDPVLKDSGTYKGKIRISKKGGKRLRQTLYLPTLSAIRYNPNIKAFYERLVSNGKPKKVAIMAAMRKLLVLALALVRNRTTFQGRIA

SEQ ID NO: 483338 - protein, 391 aa, unidentified
MTEFFDAHRPATAFDHDSTLVVAMELSGKSWQLGAVVPGVSRRPKRGLKVGDMDELLRVLERWKAEAAKAGRTVARVVVAYEAGRDGFWIARHLIERGIEVQVMQPASIPVERKGRRAKTDRIDLDMLLRTLLAWLRGEPRVCAMVRVPSEEEEDARRPGRERHKLTRERVSIENQIQSLLWLHGIYGFRARLKKAKEKLEALRMRSGASLPRETMAQLRRLMIRQRLLGEQLAEIDAAREAELAAAAKAPDPERGQRMIRLLVAICGVGLETATQLVREVLCRPFRDRRAVAAFVGLTGTPFQSGGMEREQGVSKNGDKRVRGLMMQLAWRWLKFQSDSALSRWYVERVGDAKGRIRKIMAVALARKLLVALWRYVQDGVIPEGARLAAA

SEQ ID NO: 483339 - protein, 327 aa, unidentified
MIIVGIDVSKKKLDVLWLIDPDTRKARTKSLINSPAGYQALIAWIQKTAKSKIDEVQFMMEATGIYHEALAYALYEAGAQVVVANPAKIKAHAGSLGSRNKTDRKDSFVIAHYGATMNPRLWKPEPPKIREIKALIARKQAVEKDLQREKNRLEKAEIRQTSDVVHRSIKSMIKVLEKQQKALEAEIDQRIDNDPDLKEDRRLLESIPGIGTVVSALMVAVIRSRDFTLARQCSAFLGLNPVFHESGTSVYKPPRLSKMGDSRIRAKLYMAAIVATQHNPDIKQQYARLLKNGKSKKSALGAAMRKLVQICFGVLKHQTEYQQQVAI

SEQ ID NO: 483340 - protein, 364 aa, unidentified
MTIIHWIGIDDHADKWTIASYRGAEEKPSKEFELVPDDAGYRKLISYAKSLDGEVRIVYEAGPCGYELYRRLNKAGLHCQVAAPSLTPRKPGEKVKTNRRDAAKLGRFYRSGELTIIAVPDPQRESLRDLVRARSSVQADLVSIRNQITKLVLRYGHRYREGRAWTLSFWSWLRKIELAGHSKTVLEEMLLTHQQRAEQLARHDQEIERAAKEPEYAEYVTGMSVLRGISTLSAMTLLSELGDLRRFPTAPQAMAAVGLVPSEYSTGDKTNRFSITKTGNAHVRHVVVEAAWQYQRRITNGAKIRARRKGQPQALVEIAERCDLRLHRKFYRMTSRGKRSTVAAVAVARELVGFIWAIGQLVHP

SEQ ID NO: 483341 - protein, 387 aa, unidentified
MASVVIGVDPAKRSHTIEAIDSHERVLAAARFDNSSIGYRQMRTMARQWPDRVWAVEGATGVGLNLAQRLVADGERVVDVPAKLSTRARAIDTGHGRKNDPCDAHAVAVVGLRTTGLREVVADDQTVALRLLSERRRDLVRSRTQAVNRLHQVLMELIPAGAGQHLTAAKAKELVAKVRPRDSAGKARRQLAVDLIDDITVFDRKIKVVDERITEAVAASGTRLTEIVGVGPVTAATILGEVGDVARFANADRFASYTGTAPLETSSGDVVRHRLSRAGNRRLNSALHVVALSNKRYDPRGKAYYDRKLAAGKGKKGSLRCLKRRLSDVVFRVLVEDRAAANPGGQMGATLTASAVDPIPTVNTSVKPQPGFTHEATPARALAEAAS

SEQ ID NO: 483342 - protein, 371 aa, unidentified
MKSIIYIGMDVHKKTYSLCALLKETGEIIGETKIPADVSLIIKFIENAKKSVDSDDVQIKTGYEAGCLGYSLYWQLAAKGIECDILAPSTMHRSAKNKVVKNDRRDAKNIAANLANGTYKSVYVPTDEDVEIKEYIRMMHDFKIELKKVKQHINAFLLRFGHHYPGKSKWIPAHIKWLKELELSDMYREILDEYLSQFEILSEKIERFKYRLEELSQKETYKEKIGQLRCIKGIDTTVAMTMHAETSDFDRFPTANAFASYCGLTPGEDSSGESYHRLGITKQGNSMIRTTLVEAAQTLVRGTIGKKGKKVKSKQKDQDVKVIDYADKAVIRLQKKYHRMIFRGVKRNIAITAVARELACFVWGIETGHIS

SEQ ID NO: 483343 - protein, 416 aa, unidentified
MPAFTLYIGIDWATQTHQVCIMDAYGTIVREFVVHHTGESIREFLRSLEAASDEPSKIAVGIEVPRGPIVEALLERGYAVFAINPKQLDRFRDRHSVAGAKDDRRDAFVLADSLRTDQHCFRRLSIEPATVVRLRELARAEQEAGEELRRAANQLFQLLLRYYPQILELCRFPDEPWIWALLDIAPTPEQARRLTLARVRNLLTKHRIRRVTAEEVREVLGRLALPVAAGVTEAISERVLLMLPRLRVAYQQRRQIIERMEALFEGISAPDDEACGSLRRDVAILISIPGVGRVIAAALLTEAFDALSQRDYEALRAHGGTAPVTRRSGKTTQIVMRYGCNQRFRTALYHWARTSVMHDERSKHHYARLRGVGHKHARALRGVADRLLAMLVAMLKAGQFYDAARRAVTPPVASAA

SEQ ID NO: 483344 - protein, 389 aa, unidentified
MTFFVGVDIAKYEHVATILDDSTGEFLVDSLHFDNNSKGFKLLLSNLSKLDRNDVVIGFESTAHYHQTLFSYLSGKKYRCFLINPFMTSRFRSLSLRNAKNDNIDSRAIASYLSFEYRHLLEENFFLNELKELCIHRDAIMKRSSRLKIQLLSYLDRVFPELESVVDKQGIHSKAIRAILKERPTAASISSTRIDHLLKLAKDASRNRFPQAKIKAVKEAAISSVGISSDAIGLKIRQSVQMLESLEKQIDEVEAAITSSPTVIDSPLHKVKGLNSIEIAYIMSAIINIDRFASPDKLIAYAGLDPIIRQSGTWQATQTRMSKRGNKLLRYALIWSANNIRKHPSKMKDYYDRKIAEGKSHYNALGHCASKLCRYIFFILNHPDDDFIN

SEQ ID NO: 483345 - protein, 341 aa, unidentified
MQITTIGLDIAKNVFQVHGIDAAEKVVVRKQLRRGQVLKFFAALPPCLIGMEACATAHYWARELTKLGHEVRLMPAKDVKAYVKRNKNDAADAEAICEAVRRPTMRFVGAKSAEQQGRLMQHRTRDLLMRQRTQVINALRAHLAELGIVAAQGREGLKQLLTIIADEKDARLPIDARGSLIVLAAQLQALQTMIGSIEKRLTMQHRANEASKRLESVPGIGTIGASAITATVTDPNAFRSGRDFAAWIGLVPRQDSTGGKQKLGPISKQGDRYLRRILVVGAHSVLRRARQNPEKYPWLTQLLARRPFKVVAIALANKMARVAWALLARGGTYRVPALAAA

SEQ ID NO: 483346 - protein, 333 aa, unidentified
MVYAAIDIHKRVFQAAVLDAESGELVQERLPATREALADWATRWAGKLEAVALEATTGWRWVWRVLSSRGFEVRLCDPGQARALRGSKRRPKTDRLDAAWLARLLAKEMLPTCWLPPEDIQSLRDRTRLRRALAQDRMRFAQRLHALLTHEGWPCSRGRLLSVSGQRWARALALPPAALANVEAMFALIAVLDEQLAVIDAELRQRARSDPRLKALCTIFGVGPVLAAHLLAEIGQADRFRRARQVVRVAGLDPVVSESAETRRRGKLSKQGSPELRWALVEAAHHACQPRSPDHALYLAGKERSGSKRAALTVARKIARRAHHVLAELEQAA

SEQ ID NO: 483347 - protein, 350 aa, unidentified
MLSDLADYVIGVDPNRDRITLAIVDARSHAVLATTTLPTTPRGYRESIQWADRHIDTRTRVWSIEGAGSYGAGLLSALTDAAQMVIEFDHPLTPAAKDGAKSDSLDAVRAAREVLGRQSWSTPRAREAREGLRALIAARDSAKVPRTSAINVLRALILTAPADLREELRQLTFTRLLERCRHLGPDSTTDPEISATKRAIRSTAHRVTDLSSEMDELEAAMHALVLRLSPALLQEPGIGTLLAAQILISWSHRGSCPTEAAFARLAGVAPLPATSGQNQTRHRLSRGGDRQLNRALHQAVVIRAKTHPETRAYIDRRVSEGKTKREAIRCAKRYLARHLYRVLEATPSTP

SEQ ID NO: 483348 - protein, 345 aa, unidentified
MEHFAGIDVSLEQSSVCVVDGAGRIVRETKVASESEALIRFFGGLEIEVTRIGLEAGPLSQWLHAGLIAAGFEVVLLETRHVKAALSAMVNKTDRKDARGIAQLLRMGWFRPVHAKSPGAQEVRALLVARKLLQSKLLDVEFSIRGILRGFGLKMGKTSKGQFVARVRELAVGHPMLELITEPMLRAREALRTEYARLHGEMLAIAKPDPVCRRLMTAPGVGALVAITFKSTVDDPGRFTRSRVLGAYFGLTPKKYQSGERDVTGAISRVGDPMVRVALYEATNIMLSRVTRFSSLKRWALDVAKRRGLKRAKVALARKLATVLTACGSMAPRSIGASRPSPQCN

SEQ ID NO: 483349 - protein, 370 aa, unidentified
MAEVRYVGLDVHKDSIVMAVAEAGDGEVREVQEIRADWPLLQRRLARVAAGGFRLRLCYEAGPTGYELHRRLTEAGYDCQVIAPSLIPVKAGQRIKTDRRDAIKLARCLRSGDLTPVWVPDEPTEALRDLERAREAAKRAERSAKHQLSKFLLRHGRKWEGGSNWTLKHLAWIRRQQFEIEALRRVVREGLQAVEEATERVARLMSDIEELVATSALAPLVTALASLRGIATLSATVIAAEIGDLRRFDSAKQFMAFVGLVPSEHSSGPRTRRGPITRTGNKHVRRLLIEAAWNAGRPAAISAALRKRRARVSGEVRQIAVKAQGRPARKFRHLAYDRHKPPCVVVTAVARELAGFVWATTGQQPRLLAP

SEQ ID NO: 483350 - protein, 392 aa, unidentified
MVISVGIDVSKDKHDCFILNSEGEVLAEVFTIPNTMDGFNCLLQKIQDSTTPQDKIKVGLEATGHYSYNLLGFLLDNGLPTYVLNPLRTNLYRKSLSLRKTKTDRVDARTIATMLLSDAGLKPYTDTAYHNEELKSLTRYRFDKVKARSKLKNSISRLVCILFPELEKLVPSLHLASVYALLEEFPGAKQVAGAHLTRLKTLLETVSNGRYKRDMALEIRNAARNSIGSRMPAKSLELQHTIRLIRELNAEITEIEEQIQSIMAELHSPITTIPGLGFRMAAMILAEVGDFTRFDSPDKLLAYAGMSPSIYQSGQLKNCYPHMEKRGSRYLRYALYNATKYVCQWDPTFSDYLAKKRAEGKHYNVALSHAAKKLVRLIFAMEKSRTTYRLAA

SEQ ID NO: 483351 - protein, 321 aa, unidentified
MNKDKKIYGIDISKNVFDLFSIESGHAQFKNDEKGFKALVKFVKKEALVVMEATGYYHYRLAQYLYKKGIGVSVVNPLSVKRFIQMKLAKVKTDKSDAKAICEYGQMNDLPMYNALTDVQSECLQLFRLLDNYLKKRTATKNKLHGEEALGIPSKFVYRSLKRDLKHLNNEVTALEDRLLELVKQDQQAQLTLLKSIPGMGVKTALFLIVITDGFKKFDSASQLCSFVGITPTIRESGSSVRGRSRISKVGNKKLRNLLFLCAFSACKHNKACREIYERIVNKGKSKKLALIAVANKLLKQAFAIAKSGKPYNENFVSRLS

SEQ ID NO: 483352 - protein, 429 aa, unidentified
MKIIYPRVCGIDVHKKFIVAVICISESVEPVYLKKRFSTFHNDLIRFRDWLIQNDCQNVCMESTGKYYIPVYNVLESHISNIVVANPKWVCAVKGEKDDDKDAKWIADLFKFGIVRSSFIPQKDFRILRELTRYKYKLVNMRSSEKNRYQNALTSGNCKLDMVFTDVFGKSASNIIDLILSDNPYTDEDILSKVHKNCKASPDMILNSINGTDLTPVQKSRIELVNDHIKQLSSNIQRLDKLIDLMIEPYEDYISFLCQIPGVSRNSAIIILSEIGVDMNQFTSSRRITSWAGLTPSSNQSAGKKKSVRISRAGVYLKPCLVEVAHAAVKDKNHSYYANKFNKISKRRGKKRAYIAIARKILVAAYHMLLTGEIWNPADLAEVETPVEQRIKYVKNNLKSDIKQLLDIGLTVEELTLMIQQNANTMTAQ

SEQ ID NO: 483353 - protein, 311 aa, unidentified
MQEQCVGVDVSKQYLDWVLGGEGSVSRVNNTPAGVRSLTTKLRRRDMGLIVVESTGGYERALVEALAKASLPVVLVNPWRVRRFSEGMGVLAKTDPVDARILALFGERARPPRRPLPGPTQRQLADLIRRRRQLIAMVTAEKNRLGTATAVIKRDIHALVKILERRVVKMDERIDTAIASDPEKAENWERLQTTPSVGPGVARALIIDLPELGSLGRKQIASLVGLAPFAKDSGRKTGQRRIRAGRSAPRTALYLAAMNAARFNSTLKPVYDRMIAAGKPPKVAFIALARKLLTILNAMIRDGTTWQQATR

SEQ ID NO: 483354 - protein, 342 aa, unidentified
MFYAALDVSLRSVAICIIDQDGKVRLERAVSSDVPDLVHCLREFGEPIHQIGLEAGTLTQHLTYGLTEAGFDVVCMEARQVNAALSAMRNKTDKNDARGIAQLLRAGWYSRVHVKSVESHYIRALLTSRKVMQRKCIDLENEIRGLLKVFGVKLPMRLRGGAFDAAVRDTIESDPALSHALLPMLQARQMLLETFLELDRRVRRAAHQDSVTTRFMSVPGVGYVTALSFKAAVDDPTRFKSSRTVGAHFGLTPRRFQSGEKDNPGRISHAGDADVRATLYAAANAMLMRSIAWSSLKAWGVRLMKTKGRRRAIVAVARKIAVVLHRMWIDGTEFRFGSEASA

SEQ ID NO: 483355 - protein, 481 aa, unidentified
MKAKPPEKIQKATDPSTRGRWKEMNRKQRREMMRKIQSEDLSLEVVHPQAAGIDIGNEFHYVAVPPTRDSQPVRRFGCTTVELKAMAEWLKQCGIRTVAMQSTGVYWIAVYDILEAAGFDVYLVNARDTKNLPGRKSDVQESQWLMKLHTYGLLRNSFRPSQEIRTMRTYWRQRNDLIRTAVSHIQRIQKALTQMNIQLANVLSDVSGVTGQAILKAILAGERDPHKLAALRDPRVKASEEQIARYLEGNWQEDLLFVLKQEQEGYEFCQQQMAECDRQLEQYLQQREDRSQGASLPKEVRKGRLVRRKGNKPAFALRAELFRITGTDLTQVDGIDVVTATTILSEAGWDMSPWKDEDHFVSWLRLCPDNRISGNKILGKGRLPTNNRASIALKMAASTLRVSNTYLGAQFRRFRTKLGAPVAIKAMAAKLARLVYRMLRYGMKYVDQGAKFYEAQHRQRQITQLKWKAAKLGFHVVEAAA

SEQ ID NO: 483356 - protein, 454 aa, unidentified
MPKSPTRSRPTGLPIIHPFAAGIDIGSRFHVAAVSPELCDEPVQTFLAFTSDLERMADWLVATGTKTVVMESTGVYWVAAYEVLESRGLDVILANAREARAVPGRKSDVNDAQWLQRLHACGLLRASFRPGRDIAELRAYLRAREKHTDYAAAHIQHMQKALTFMNIQLHHVISTITGVTGMRIIRAIVAGERDPDKLATMRDVRCKESAETIRGALVGNYQPEHVFALKQALALYDFYQRCIDECDAEIERTVATLNVERKIPDAPLPKAKHRTNKQPSDPNFDVRSAMYQLAGTDLTQIHGIGPFLALRLIGECGTDMSRWPTAKHFTSWLTLAPGCKISGGKVLSSHTRKTSSRITVALRLAAVTVGRSNTALGAFYRRLAGRIGNAKAVTATARKIAILFYNAMRYGMDYHDPGAEHYEQQYRDRVIKQLHRRAAQFGFTLHQKDTLASG

SEQ ID NO: 483357 - protein, 360 aa, unidentified
MQTKVNEKLFDGQSIYVGIDCHKKNWTVTILTEEFEHKTMSQNPDPEILAAYLRRNFPGADYHAVYEAGFNGFYSCRKLRELGIDCNVVHAADVPTGNKEKIQKLDPVDSRKLARSLRSKEFRPIHVPESSMEADRALVRQRFRVMKDVTRIKSRIRSLLFQFNINIPDRFTNSQTRSWSNIYINWLKELQVGHESLRQTLDNYIRIGELQRKELLLANRQVRILSQTNAYKDNYNLLISLPGIGFLTAMTFLTQIGDIKRFKQLDDLCDYIGLVPMMKGSGSKLYTGKLINRGRKELKIMIIEAAWDAVRMDPALMAKFNELKMRMNKNKAIIRIARKLVSRMRHVLLSQEPYRLGITE

SEQ ID NO: 483358 - protein, 459 aa, unidentified
MAKQRGKKTRKKKDVLEGLPPLNLNAAGIDVGSAEHHVAVPRDRDAECVRKFGSYTADLHRMGQWLKGCGIETVVMQATGGYWTALYDVLESYGLQVQVVNARHTKTLPGRKTDVQECQWLQKLHTFGLLNNSFRPAEEIRVLRSYMRQREVLVAAAGTAIQHMQKALTEMNIQLANVISDISGTTGMKILRDIVSGERDPEKLALHKHARIQASREEIARSLEGTWRPELIFVLEQSLDLYDTYLKKISACDERIEAQLKSMDGKVDVTANPAPEARKLRRPSKHQPRFDLRGQLYRITGVDLTQIDGVDVQTGQTVISEVGVDMSRWETEKHFASWLGLCPDNRISGGKVLQRGTRRVVNRAATALRLAAWNLIRSQSALGAKFRRLRSRLGAPKAITAMAHRLARLIYRMLKYGSQYVDKGMEDYESKYRQQQLQWVAKQAAALNMQLIPAADVVS

SEQ ID NO: 483359 - protein, 316 aa, unidentified
MNQAETFVGIDISQANLDMAVIPSGEAGSYSNDYAGISALVKRMKAIAPALVVMEASGGFEVSLVAALVEAELPVVLENPLKVRKFAGAKGRLAKTDKLDAIVLAQYGKAIDPEIRKLPDTLTQELSSLVARRRQLIEMLVMEKNRLRLAKKSVRQSLQKNIEWLEEQIKDLDKGIEDFISSDPIWKAKDKILKSVPGLGPASSSTFLSSLPELGVLNGKQIAALVGVAPFNYDSGALRGKRKIWGGRAKVRSMLYMATLAATRFNPVIKAFYLRLCNEGKAKKVALVACMHKLLTILNAMLKNNSTWQQNHAFTN

SEQ ID NO: 483360 - protein, 344 aa, unidentified
MDNHTQYSGFAGVDLAKKVMQIHFVTGDGEITDKQVKRAEFLDFFRNRGKCLIGMEACGSSQDWARKLEAMGHEVHLLPPKAVKPFVSGQKNDHNDAIGIYKAMFNGVRRVPVKSTEIRDLQTLRRIRSQVTKDKVKEINHVRGLLAEYGIVMGKSITAFNKGISSALESLKERGDVSPLVAEELQTTVESIKTKIERQKRLDREIEQLARGCKNYENFLKTPGVGPFTAAMLCVLLCEPAIFANGRQFAAYIGLAPRSRGSGGKNFIIGIPSKFNCDRESRAVFVECAQALARYKNKSPWVDGILRRKPKKVAVIAIANKLARQVWAMANKGESFKQMTILTA

SEQ ID NO: 483361 - protein, 376 aa, unidentified
MSKIRFVGLEVHADTIAVAVADTDGDVRSLGTIPNRAESIRKLVKKLGPADRLRVCDEAGPTGYVLYWQLTALGVPCTVVAPTLVPVKAGDRVKTDRRDALKLARCHRAGDLTAVWVPDAAHEALRDLVRARESAKQDQLRARQRLGTFLLRHGHHRPPGMHAWTQRHLAWVKTVHLSQAAQEATLVDYLHEVEHMADRVVRRETAIDQAVEQVPTPMRAVIGGLQALRGIALISAVTIVAELGTLSRVPTARERRGYSGAVPREHTTGARVRRGGITKTGNAHLRRVVGEAAWASRYRPAVGPALRKRHAAVGADVKAIAWKAQHRLHARYRHLLGRGKSKQTVVTAVARELLGFIWAIGVTVEAAEGQAPPVAT

SEQ ID NO: 483362 - protein, 332 aa, unidentified
MLIAGVDISKDDFHVCIKEKSDDGAVKIKGSRSFPNNPKGFSELSGWVSKREHANLGTWYVMEATGTYYENLAYFLYEKGCRVSVVLPNKIKHFAKSMNLKTKTDKIDAAVIAGIGIERSLAEWKPMSKDFKELRDLSREMLALKQERSRAKCQRHAMVHSHEKTASVLKLKESQIEFYDNAILEIESEIKRIVDADPVLKGRIDNIATVKGLGVLTIVAVLCETNGFGQFNSIRQVVSYAGLDVQFKESGNFKGKTRISKKGNARIRQCLFMPALTATMHNEKIKNLYLRICERNPDIKKKGVVAGMRKLLVLIFVLWKKNEEYNPLYQWN

SEQ ID NO: 483363 - protein, 317 aa, unidentified
MSDAPVYVGIDVAKDHLDLHALPSGEAWRLANTPDGIDGLTGRLATLAPALVAMEATGGHEHAVAAALASAGLPVAVINPRQIRDFARATGELAKTDRLDARVIALFGERVRPEPRTLPDASQRALEALLSRRRQLIGMLVAERNRLLLADAAIRRSLTKHVRWLEKELAAVEEDVARAVEGSPVWRAREDLLRSVPGVGRVLATALLADLPELGRLSRREVAALVGVAPHARDSGRHRGRRTAWGGRSEVRTALYMSALASLTHNPPLRAFYERLVAEGKPRKVALVAVMRKLLVALNAMARDGRRWDPDLVAARP

SEQ ID NO: 483364 - protein, 370 aa, unidentified
MRKDTSRNKQQIRSKKERETREGFEFYIGIDLGDKNSDVCVLDQSGEVSKEFRLRMKEADFRTYFASIPRSRVAIEAGGQSRWVAEVVEKCGHEVYVSNTRKVPYIHQSDDKDDPGDACKLAELLYFKPRLLHPVQHRSREAQVDLSWIRAREVLVKSRTQLINAVRGISKAFAERLEKCAAESVTAKLAGQVPEVIRGAVAPLLETIDHLNEQIRYYDEMEEHIARERYPKYRLLEQVSGVGVHTALSFMLTIGDPERFQKSRMVGSFLGMRPKKQESGESKPQLGITKAGDLYLRKTLVNCAHHILGPNRKDSDLRRFGQRICARGGKNAKKRAVIAVARKLAVLLHRLWITGEVYEPLRNNKQSMAA

SEQ ID NO: 483365 - protein, 389 aa, unidentified
MIYVGIDVAKDKHDCCIMGTDAQKLFPIFTISNNMAGFNELYEKVFSVAKDKTEIKVGLEATGHYSMNILSSLVDKGLATYLINPLHTNLYRKGQSLRKTKTDKVDAYTIAMMVMTDRTLKPYSDTSYHNEELKSLTRYRFGKVQERAKLKSSVMRLVTILFPELEKIVSEIHSPSIYAVLEEMPGASFIAKCNLTHLKSVLESNSRGRYGREMAILIRNSARDSIGITMPAKSLELKHTLHLIKVLTEEIDEIDASIKNIVDMSASPILSIPGISYKMGAMILAEVGDFSRFNNADQLLAYAGLSPSTYQSGQLESCYAHMEKRGSRYLRYALYNATKYVCLWDERFATYLAKKRAEGKHYNVAISHAAKKLVRTIYKMELTGQPYHK

SEQ ID NO: 483366 - protein, 359 aa, unidentified
MPKMIWLGMDVHAASITVARYEDQAATAMVQTIANDPAQVRRLVRRLPAGSDVRACYEAGSCGYGLHRQLTALGVHCDVIAPALIPRRPGERIKTDRRDAEKLGRFHRSGELTTITVPTPSQEAVRDLVRAREDVRRDRTAARQRLAKFLLRHGHRYPGSHWTKRHWEWVCGRPFEGAARTVFVHYCDHVLALNERLAHLEREIHTFADSPVYQPVVARLSCLRGLATLSALMLIAELYDLRRFRTPRELMAYLGLVPSEHSSGARERRGRITKTGNALLLIEAAWAYRHPARQTRRVHQALTTQPPEVHAISDRALHRLTARYRRLLSRGKTPHHAVTAIARELCGFVWAIALVPDLA

SEQ ID NO: 483367 - protein, 358 aa, unidentified
MLYSTIIGIDAHARKNTVTAIMPQTGEARQIELAAEPDLLVKWINDQELPTPIMAVYESGPTGFPLARALMAAGVACSVAATSKLPSRKDRKKNDKVDSEWLARQYLGGSVRAVRIPTSEEESLRGLSRLRSQAVRDLVRAKKRASSFLLLRDIRRPGKTRRWSARFKEWIERLEFSEPLDRYVLDEMVAEVYHIEERVAAINAKIDEVIESSPWLREQINRFQCIHGIGKIISMTLVCEIMDFNRFKNGAAFASFVGLVPSEHSSGEKNAKGDITKTGNVYVRTALVEAANCYLRPFKKFSPNIPTVDPLVRAHATKCTTRLKKRALTLKARKKQANKIKVAIAREMAEWVYHLAIM

SEQ ID NO: 483368 - protein, 406 aa, unidentified
MNYLGIDVCKSSSRYVFLDNDGERLTKPFTLQNHQQDFSKLLERLKELNLSQENLLIGIEATGIWWENLYSYLTENKFKVIVLNPHQTNKFREALRIKAKTDDIDAYVIAGLLRSGEYSSSFIPEESIQVLREITKLRFQLLKDRQDYERQACALLGLIFPEYPQTAVKNPFAVASMAILKAYPTAKHLAEAKVKNIEKIVRSIQGINFNIQDIQSLIDTAQKSIYSGRAKDARGLNLNILLAQIQTLQNSLAQLETRTQDILSPTNPNDANSFPGANLLSIPGIGPKTLAAVLSAVGSNGQSFPDGKHLIGYVGFFPKIYESGETKRDNEISNRGPKYLRWALYMAAVACLKHNPELKALYDRKLSQGKDPKQALVYVAKKLAHLCLSMLKSGESYNPARVFMPA

SEQ ID NO: 483369 - protein, 427 aa, unidentified
MAYRIAAIDVHKKMLAVVVADVEGEGEYQFERRKFGASPEQLQVLAQWLVEQEVEEVVMESTAQYWKPVWGTLELSWKPARQQRDGATKMSGKLHLCQAKSNRGPRGRKNDFADGERMIKRLVAQELVLSFVPDPEQRLWRTVTRRKQQLTRAKVRFKNQLESLLEQAHIKLSSFVSDLLGLSARRMLHAIAEGETSPATLAALGDCRLRATPAQLRDALGACTQLNGVYRRLLKMALEELKLLEEQMEQLDREASHLMQDHQDAVQRVAEVPGFGVESATQMIAEVGAEAAAFESQKDLASWVGVCPGDEETAGKSKSTRSPKGNSTMRRLLNQSAQSAVKVKGSIFEITFHKLLPRLGYKQAIWAIAHRLCRLLWMILHKGIRYQERGPAVSAKSLRTRTARMIKALQKLGYRVEGGPLPAGSPA

SEQ ID NO: 483370 - protein, 378 aa, unidentified
MLNYSKYIGMDVHKDTISVAIAQAGQEEPRFYGRIPNSPPAIGKLLKKVCPGGEAMLFCYEAGPCGYEVYRLLTAAGQDCLVVAPSLIPKKASDRVKTDRRDALSLARLLRVGELTAVWVPDQEQEAMRDLTRAREDFKAAERRARQRLNAFVLRHGLTYTSGKSKWTLAHRRWLQSLKLESPIQQIVFQEYLDAIDQASQRVADLESQMQGSLLTWSLAPVVEGLMALRGLSLVAAMTVVAELGDITRFDSPKQLMAYIGLVPSEHSSGAARRQGAITKTGNGHVRRMLVESSWSYRFPARKTAHLQRRAAATSDSIQAIAWKAQKRLCGRYRKMTQVQGKLPVVACTAIARELLGFIWAIAKEVKRSDALRVCSTP

SEQ ID NO: 483371 - protein, 335 aa, unidentified
MTGELRRARLTPSHDHILSWIEQLDGPVAVAYEAGPTGFGLYRALSAAGIGCVVAAPSKLQRPSGDRVKTDAKDAVHLARLLRLGEITPVTVPTVAQEAARDLVRAREDCRGDLMRARHRLSKLLLRHGQVYSGGAAWTGPHDRWLRKQRFTNPATMAAFESDYETVQVVTARRDRLDAAIAAMAVDSEFTPIVYRLGCLRGIATLTAFALAVEIGDWHRFTGNSIGSFVGLVPAEHSSGASRVQGSITKTGNTHARRLLVEAAWHHRTRYLPGKPLRDRWELAPAAARQRGDAGNRRLHARWVSFNLRRKKAVTANAAIARELASWCWSLAVLD

SEQ ID NO: 483372 - protein, 364 aa, unidentified
MYDSTTTVTVGLDVHARSIRLAAVRADELLEERTLPYDEQAVEQVLRRWPVVRCCYEAGPTGFGLQRFLVERGIDCSVVAPGLVPQRPGDRVKTDPRDARKLARLLAGGLLEPIHVPSRELEAARDLVRGREDARLDRMRDRHRLSKFCLRHGRVLPTSSWTVMRRKWLGEQRFEFAGQQITFDSYVHTVDLVDARIEQLERAIRETAEQEPWRGLVARLRCLRGIETLTALALVTEIGDFDRFTTAEEFMAFVGLVPSEHASGEKRRQGSITKVGNSHVRRLLVESAWHARRRPKVGYELARRQRGQDAVVVERTWRCQQRLYQRWQRMAGRGKPQQKIVVACARELAGFVWAIATEQPLRNT

SEQ ID NO: 483373 - protein, 339 aa, unidentified
MKYTPVGVDIAKHVIQIHFINEHTGEVVDKQLRRQDFLTFFGNREPCLIGMEACGGSQHWARELTKLGHKVRLLQARFVKAFVMGNKNDVMDARAIWMAVQQPGKEIAVKTEEQQSVLVLHRTRMQLVKFRTAQINALHGTLLEFGETIHKGRAAMEREFPEALERMKERLPLYLITVLENQYNRLNELDSLIDDIEKQLTSVARQNETCRRLLDIPGVGPLIATAALAIMGKASVFKSGREFAAYVGLVPRQTGSGGKIRLLGISKRGDKYLRTLFIHGARAAALLTKEPGPWITELKKRRPASVAIVAMANKLARTVWAIAAHGRKYDKNHVSIRPY

SEQ ID NO: 483374 - protein, 310 aa, unidentified
MDARFVGIDVSKDRLDVHVLPTNETFAVARNGEGLVALNERLAGLGVTTVAVEASGGFETVVAASLAGAGLPVVVVNPAQVRGFAQALGKRAKSDPIDAGVIARFVEATRPEIRPLPDEQTQALGDLVARRRQIIQMIVAEQNREERATIKRVKRSIQRLVLALEKELAELNQDIDDMVRGSPAWRRNEDLLRSVPGVGPIIARTLLSEMPELGTLDRREVAALAGLAPWTRQSGKWKGKSFIGGGRSSVRTVLFTGALAAARFNPPLRTFYEKLRDAGKPKMVATIAVARKLLTILNAIIRDQKPWKPA

SEQ ID NO: 483375 - protein, 320 aa, unidentified
MMAQNDLVVVGIDVAKDKVDACIRSLTLRQTFPNTAQGHRKLVAWLRKYQVGKAVMEASGGYERDWAKALREAGLEVRIVDPKRVRSFARSAGRLAKNDAIDAEMIAWFAETFGEAPVQAYDADREKLVQIVNARQALLDVQTELQNRNEHSVPDVVQKMQARLLKKIALEVARLEAAIAATIKATAHFTGLAEIIESVPGLGRGTSAGLIAAMPELGQVSNKAAAALLGVAPYDDDSGKRRGERQIKGGRRKVRNLFYMACLGAATQHNPVLKAFYRRLVAKGKEKKVALVACMRKLIVILNIMIARGEKWDASRYALS

SEQ ID NO: 483376 - protein, 349 aa, unidentified
MTTQRLSYVGQSVYVGVDVHKDTYAVTCVCNKQIVKTATAKADPAGLTASLSQWFPGARLYTAYEAGFSAFVLHRALTKAGIMNIVVNPASIAVAANDKVKTDRRDSKKLALDLSDGRLQGIYVPTEDEELARLLPRTRAQIVEHRATIARQIKAKLHQFGLIAPASRRLISNRYLREIDAWPLPPDLRVSLTFLAEQWRFATRQLIEMRRLLREQAKAHPAIEQVYRSVPGIGEVVARTLATELGDMTRFANERALFSYTGLTPSEYSSGPSVRRGHISRQGSSRVRHLLIDTAWRALPRDAVLKEIFDRIAATRGKKRAIVAIARRLTGRIRACFRQGTTYAVGTYA

SEQ ID NO: 483377 - protein, 432 aa, unidentified
MANLAVPAPRPRGQGPEEGGERVRYYLGVDWADQTHAVWVVKADGAKIGARTVPHTAEGLSEWGRELDQWRAQGIALWAAIERREGRVVDFLLDHGAVVYPVNPKALDRARDRFRQSGAKDDPFDARVLADFLRTDHAHLQALQPSSAAAQELKLLTEDYQRQIRQQTRLLNQLTNTLKAYYPRALEIAELTTTLAQEFLRAYPTPESLTGLTERKWQRWARAHRLSDARTRELWGVLQQPQLPVPAHVVRAKARLMRSVVAQLTPVVAAVAEYRKAIEDFFASIPTAQWVRTLPIGEHGITAPTLWARLGDAPGRWESFRHLQAQAGAVPVTKRSGKQQRIVQFRYACDKALRYVVDHVAFLSLLSSEWARAYYDQQRERGHPHRQALRALGAKWLKIIFFMWERQVPYDEQYHLATMTRQQLRQRQEKIA

SEQ ID NO: 483378 - protein, 432 aa, unidentified
MVEINPLSTLFVGIDVSSKNNVVYAMDFNQHKAFSSSFANSQPGAEQLEKRLEQFMLAHQNLDTIVVAMEATSVYNIHIANFLSSSEVLMPYSPYVYCVNPKATANYAKSYVGASKSDPEDAEMIADFARAGRTKKLTPWRGSQFIALKRLTRQRLHLVECMTREKTYMVSNMYLKFSELQLLDGDNAPFCDVYGATSSAVLTEYYSPQDIIDAPEEDLLKFLAEKSRNRIADPSEASRLLKKAASDSYRLDKCMYEPLNISLACSFNCIETYKKQIKAIDKAIEKALNGVVPEAVTILESIPGIGPVCAAGIIAEIGDISAFRSADALAKYAGLTWRHHDSGDFKSDDTYVTKAGNIYLRYFLVEAANSVRRHVPEYGEYYAKKFAEVTKHQHKRALALTSRKFVRLVFGLLARNQLYTGEKLDAELNNRT

SEQ ID NO: 483379 - protein, 317 aa, unidentified
MDPIVIGIDVSKDRLDVAIHPNGEHFAVSRDTPGLEALVSRLTPLGPVAIGVEATGGYETVVAARLAAAGLPVVVVNPAQVRHYAQALGQRAKTDPIDAGVIARFVAATKPEPRPLPDEATRRLTDLLARRSQIIEMMVAERQRQKRLTAKRIQRSIARLLAALQKELSALEADIDDAVRGSPAWREKEDLLASVPGVGKIIARTLIAELPELGSLDRRRIASLAGLAPWTRQSGQWRGKSFIGGGRSTVRAALFLGAMTAARHNPVLKAFRDRLVAGGKPKLVALIATARKLLTILNAIVREGKPWQDGTHAPASI

SEQ ID NO: 483380 - protein, 425 aa, unidentified
MTPEPNPEFAAFIGIDWADAKHDICLQAAGSRQREFAVLSHRPDAIDEWAAALRQRFHGQAVAVCLEIARGPLVYALQKHDFFVLFPVNPATLAKYRQAFQPSHAKADPADAQIALEILLCHRDKLKALQPQSVGIRTLERLLEERREFVDEQTRITNRLTSALKEYFPLANAWFDEKASALFCDFLSHWPSLKQLQRARRTTLLTFFREHHCYQPRLIEERLAALQRAAPLTDDAAVIKPKALMVEGLVDQLRVTLKAIARFDAEIESVAPTLPDYALFQALPGAGPNLAPRLLVAFGERRERFASAADVQMFVGVAPVTESSGKQHWVHWRLQCPTFLRQTFVEWAAQTITRSFWAGAYYRQQRAKGCAHQAAVRALAFKWIRILFRCWQLRTPYDESAYLNALQRRGSPLLASLALPSPATH

SEQ ID NO: 483381 - protein, 354 aa, unidentified
MSQNSNTAIAIVGIDIGKNSFHIVGLDQRGAIVLRQKWSRGQVEARFANMPPCLIGMEACVGAHHLSRKLKELGHDARLMPARYVRPYSKGQKNDFRDAEAIAEAVQRPTMKFVATKTADQFDLQALHRVRERLVSQRTGIINQIRAFLLERGVAVRQGLRFLRAELPRIIAAPPDVLSPRMVRVIEGLAGDWRRLDERIERLSGEIEAVARQDAGCERLMSVPGIGPIISSAMVAAIGTGDVFSKGRDFAAWLGLVPKQISTGDRTILGKISKRGNRYLRVLFVQAAWVVLIKPKSWERHGLKPWIEAAKKRLHRNVLAIALANKLARIAWSVLARGRAFEVRKVGEAAARSA

SEQ ID NO: 483382 - protein, 336 aa, unidentified
MQHYCGIDLHSNNHVVVIIDEEDKRVFEKRLINDLTLTLKALSPYRETLQSVAVESTFNWYWLVDGLQEHGYHLQLVNTAAVKQYDGLKYSGDHQDAFHLAHLMRLGILPTGYIYPKAQRAIRDLLRRRLSLVRYASAQLISVQSQIWRSSGIRINSATLRKPDFKTTLLDGYTLQAANAGLTVYAAMHQEIKALEESAFQAVKLTKNFEVLQTIKGIGKILGLTIMLETGDIHRFASAGNFASYCRCVDSTRISNGKKKGAGNAKAGNKYLSWAFSEAAHFAVRFEPLAQRFYERKKAKTNGIIAIRAVARKLARASWMMLKHQQPYDAKLMFPG

SEQ ID NO: 483383 - protein, 427 aa, unidentified
MTSANNRMKGTNVRVFCGIGWAEKHHDVALVDDTGKMLAKARVSDDVTGYRKLLDLLAEHGDTEAEPIPVAIETSRGLLVSVLRAGKRQVFAINPLAASRYRDRHGVSRKKSDPGDALVLANILRTDLHMHRPLPTDSELARAVAVLARAQQDAVWNRQTVANQLRSLLREYYPAALDAFVTGRKGGLAHPEARAILAVAPTPARAAKMTKTQITAALKRGGRQRRTEAETIRLREVFRAEYAHQPPLEPPLAEEAMGRQMLALLRQLDAAAEGVDDLAEAVEPSFQQHPDADVITSFPGLGSLLGARVLAEIGDDRSRFADARALKAYAGSAPITRASGKKRYVGRRFVKNDRLVHAGYLWVFAAIDASPGAGAHYRRRSEHGDWHAAAQRNLFNRMLGRLYHCLQTGQPFNEQRAFTPFLEAAPA

SEQ ID NO: 483384 - protein, 342 aa, unidentified
MATTIGIDPHKGSHTAVAIDSNENVLDEIRVRSCSTQTVRLREWADRFEERTWAVESAHGLGYLVAQQLVAAGENVIDVPPVRASRVRVLGSGRSQKNDPNDARSIAIAALRADDLAAVRVDDHSRVLKLLSKRHRDLGRLKNKACCRLHALLLEMVPGGAGFRIASVNRVNATIDSFEPVDAMGRQRQEIAYELAADIGRYDELLDASKHRISTALAASATSLTTICGVGPITAAVIIGQSGNIERFKSKDHYASYNATAPVEASSGPKVRHRLNQRGNRQLNWAIHVIAITQLRHDTVGRVYYDRKVAEGKTSKEAVRALKRQLSDVVYRHLVADARQQN

SEQ ID NO: 483385 - protein, 341 aa, unidentified
MERAKTIVGIDVGSESVSVAVMHTVTQKEKQEQKFSNNGEGFEELEQWLHSKSVQPDQSVVVMEATGVYGEALCYYLCSRRYSVAVEPPLKVKRAFQHSAHKNDTVDARQIAEYGHRFYDELQYWSPPDVVLEQVRELLSAREQFTMQKIANINALKSLQRKIITSVTAMEAYEQTIERLQQNINVIDKEIKRLEKNDDSFHQLITRLTSTPGIGMLLASNLIVMTQGFTRTRKHKEIASFAGVSPIEHTSGSSVFRKARSRQFGPHRLRKLLYLSAMSVATHNEEFRKYYLRKVAEGKPKRLVLNNVANKLLKIVCALVRSETEYIPHYRSINPILVKVS

SEQ ID NO: 483386 - protein, 350 aa, unidentified
MMKVLIGVDPHKASVAVAAVNEVAGELVECASFPQNRAGLRALERWAKRFGERRWTVENAGGLGRHMAQRLAASGESVVDVPPKLSAWVRVLSSFAGNARKNDGLDAFATALAATRNGRLAVVDAEAASEVLRLLSERREDLVAERTRALNRLHGLLRDLVPGGVAGTLSAHRAAHILRGIRAQGGASGRLRRRLASEILGDVRTLDRKIAELNRRIEAEVEASGTSLTDIFGVGPILAAKIIGTVGDVARFPTKAHFASYCGTAPVEVSSGEAVRHRLSLAGNRKLNNALHMVAVCQARSDARGSAYYRKKIAEGKSPKEALRCLKRRVSDTVFRSLTASSQASSRGAA

SEQ ID NO: 483387 - protein, 382 aa, unidentified
MQTIDTVNPTILLAIELSASTWLVAARVPGLEKPHLHRIDGGDTAALLALISSLRARAARGLDATIGVVCCFEAGRDGFWLHRLLTAHGVACHVLEPTSILVNRRARRAKTDRLDAEGMLRVLAAYLRGDHQACSMVRVPTPEEEDAKRTHREREKLVQERLRIENRIEALLFTQGIRKRPSLRSWERDLAVLRTGDGREIPRHLRAELDRLRRRLIMTLELIREVEAERDQAAKAKPQDQACHKIANLCRIRGIGENFAAVLTREVFYRSFDNRRQIASYVGITPMPYQSGGMDRDRRISRAGNPRARTTMIQLAWLWLRYQPGSELAEWFRERVGTLAGRTRRIAIVAMARKLLIALWRYAETGVIPAGVEIQAETTVAA

SEQ ID NO: 483388 - protein, 402 aa, unidentified
MNAVGIDISKGKSMVAVMRPFGEVVFSPFEVAHTDKDLTDLAKKIKSLPGETRVVMEHTGYYHAPIAVALHEAGIYVSAVNAMLVHDYGNNSLRRAKTDKKDAIKLANYALDHWLSLPRYLPAGDTRLMLKTCYRQYEQFSKMRTMQKNNLISLLDITFPDANKLFSSPPRADGSEKWVDFVNQYWHCECVCGMTVKAFTRSYEKWCRKHGYNFSEDKALDVYASASGHICIMSKCESTKLMIQQAIAQLQASSSALAALKNQMQKLASTLPEYPIVMQMYGVGPTLGPQLMAEIGDVRRFHSKSALVAFAGIDAPPYQSGQIDVRSRSISKRGSAKLRRTLFLVMSVILQNSPLDEPIYQYMDKKRDEGKPYKVYMMASANKFLRRYYATVKAYLDELDAI

SEQ ID NO: 483389 - protein, 369 aa, unidentified
MNITIKNIGLDVHKKSISIGIADDGRDGEVRYYGKIDNDMNQLDKVIRKLISQGAVLRFVYEAGPCGYGIYRYLTNNDIDCVVVAPSKIPQQSGNRLKNDRRDCLSLARLHRAGELTPVYVPTEADEALRDLTRAREDATRALRTAKQQLGAFLLRYDKVYSGRSKWTKAHFNWLADIAMSHPAQQIVFQEYIDTVTDCSNRVQRLTEQVRQQSQESSLHEFIKALQSMRGISLIVAATIAAELGDLTRFENPGKLMAFLGLIPSEHSSGDRIKKGPITKAGNGHVRKALVEAAHAYRFAAKKSRALHKRQEGLPKDVLDISWKAQCRLCTRYHYLVAKGKKTNVVKTAIAREIAGFSWAIAHVLPKAA

SEQ ID NO: 483390 - protein, 364 aa, unidentified
MKRKVYVGMDVHKETIQIAILPSNTKALVKEQQIKHEEGQIKKFIQKLKSEGTEIHCCYEAGVTGYPLYRYLKTLGVNCIIAAPGKIPRQSSDKIKTDKRDAIKLAKLLRSGELESIHVPSEEDEAVRDYLRSRDSLRLDLGRNRQRLMKFLLRKGIKYSTTKYWTASHYKWLNNLHFENEILQATFNDYYSRVRVQEENLKAMDQKIREIAESEPYREKVGILRCFRGVDYLTAMFLLSEVNDFKRFKTAGSFMSFLGLVPGEYSSGSKRKQTGITKTGSPRLRRILTEAAWQHRFPGTGSKVVVARRVGQSALVVSLAEKASLRLHKKFKSMQLRGKTPQVMITAVSRELSGFLWAAMNLVA

SEQ ID NO: 483391 - protein, 402 aa, unidentified
MNEPPPPKQPANATPALGPTGRAVGLDIHPDTFAAAILEGRDPLRARVAQSVTRQPLAALGAWATRHTRSEDLLILEASANSFAIAERLQGIGRQVYILESHRAGQIGKSYLANDKVDAAKIARIYLSGLAIKVWQPDPETRQRRELLSTYQRVVKDSTRAQQHLRSFLNEHALRLPKGFRLCRPEAISRLLTLKEWSPRQKLLLQEMHGGLIAARERRTRLRRMMALEIEEQPDFLRLYKLAGLNLVTTYALVAIIGDIQRFATSKKLVSYLGLNPSVVESGQFEGGGALHGHGRGSLRALLIQASKRLLSTVNPLQKWGLSVALRRGMNKAAVAVARKLTVAVWHVLQGHWNQALEETTTLLTKLTKLATELGVATLHELGYASKVAFQEEKLQVLRTHP

SEQ ID NO: 483392 - protein, 370 aa, unidentified
MAHTSTLFIGMDVHKETIAVAYVAEEREAEVISLGTIGTRQCDIDKLIRKLQAKGKTLHFVYEAGPCGYGLYRYLTKKNLKCWVVAPSQIPKKAGDRIKTDRRDAVPRARLLRSGDLTPVYVPAVEDEAIRDLVRAREDALKDVKAAKARLKAFLLRQDIRYEGRATWGPAHLRWLAKGVCPTPAQQIVFQEYVRAVSEQTERLQRLEAELHTQVQSWRWVPVVEAIQALRGVQFTVAVTLIAELGDLSRFENPRQLMSYLGLIPSEHTTGERRRQGGITKTGNSHARRALIEGAWAYRYPAKVSRHLQLRLEKLPKVIQDISWKAQVRLCKRYRRLIARGKNANQVVVAIARELAAFVWAIAREVEVAH

SEQ ID NO: 483393 - protein, 407 aa, unidentified
MQQGKSFSFACTYEGYNEKLWEKLDGILVDYSEENMVFAVETACDLWRTIVDYLFERGYTVLLVNPLTTYHSRPLMNNDYSKTDPKDALLVATNAHNGNYIEYKQYSGSINSLHRLSISYGKLLKDRQEVILRMMAFMEEVFPEYVKCMNVEIETSLYLLERYFLPEHFQKLDIDKHEWPIRRVSNGKHRAKTLQTIKEQAHRSIGRNVAGEEEILRLILDGWIAEIRQLHKTIKSVKKAMVELAEQTEYFEILVSIPGISDLTAARFLAECRDMDLFSHYKQIEKMAGSNVRLCDSGKYTGTRRINGIGNKRLLNLIYVMTCSAARFIPEVRIKFLRRQLKRKGFRKNIFAASPVLLRLIMTLIKEKRTYEIREESLKELEKLENKYNPKKEEKKKNKKKPLKKVA

SEQ ID NO: 483394 - protein, 326 aa, unidentified
MEHELHYIGIDTAKEKLDVDVLRPDGRHRTKKFANTTKGHDELVSWLKGHKIDHAHICIEATGTYMEPVAECLYDAGYIVSVINPALGKAFAQSEGLRNKTDTVDARMLAEFCRQKRPAAWEAPHPIERALRALVVRHQALTDMHTQELNRTETAREVQMPSIDAHLLWLEAELKRLEKQIKDLTDDDPDMKHRRKLLESIPGIGEKTSAVLLAYIGLKDRFAHARQFAAFAGLTPRRYESGSSVRGASRLSKAGHVSHRRALYMPAMVATSKTEWGRAFRDRLAANGKKGKVILGAMMRKLAQVAYGVLKSGVPFDASRHNPVAA

SEQ ID NO: 483395 - protein, 428 aa, unidentified
MNYNTQNAKIASITEKTLIVGIDVGSETHFARAFDWRNYEYSKKPLEFSNSESGFETFKAWVEDIAEEHGKDVVIPGMEPTGHYWFNLGAYLQDNGMRPVHVNPHHVKKSKELDDNNPNKNDRKDPKTIAALVNEGRFLYPYIPTGTYAEIRSFSNLRLQAQEEVTRIKNRIARWFSIYFPEIKDVYKKPDSVSGLMVLKEAPLPQDIVKLGVDGINKIWRDAKLRAAGPKRAKTLLTAAEHSIGSQEAPDSARIELKNLLNDYEIYRKREEELMEMLEQKLSEIPYIDKLLEIKGIGLKTVSGFIAEVGDITRFDNPKQLQKLAGYAIVECSSGKHKGESHISYRGRKRLRYVLYEASISLIARNEEFKEVHYYYRTRKKNPLKKMQSVIAVACKALRVFYMILRKGVSYDGAKMLQDIKRPQIAAA

SEQ ID NO: 483396 - protein, 412 aa, unidentified
MEVLVDRCAGLDVHKKSVTACVRTPGEKGQRRQVVRTYKTFTGELAKLRAWLAEEGVTRVAMESTGVLWKPPWHALEGGFELLLVNARHVKALPGRKTDVQDAAWLAQLLECGLLRGSFVPPPLIRQLRDLTRYRKRLIEDQVREGQRVEKLLEDAGIKLASVASKTLGMSGRAMLSALCDGERDPEVLAELALGRLRARLAELRQALQGRFGEHHQVMLDAVLGHVDHLEAAIAELDRRIDLVIAPFAALRDRLCTIPGIGKRTAEVLIAEIGVDMTQFPTAAHLASWAKICPGNNESAGKHRSGKNPGGNKWLCAALTQAAWAAARTKDTYLASHFWHLARTVGKNKAAVAVGHTILVSAYHMLARGENYQELGADYYTRRADPQAHQRRLVHQLEKLGLKVTVEPADAT

SEQ ID NO: 483397 - protein, 403 aa, unidentified
MRHVIAFDISMGKSYMVIYNAQKQCIFEKEIKHSKSEFEELQKKIHELTNETGKSPEIVFEATGIYSRQLERFMQDNQYTYCLLNPLEAKLQCDSLRIHKTDRSDAHRLAITHFTVTRRVSHGTDHLFHQLKSLSRFYSELDGELSMIRSRMHKVIQLTFPELEKMFTSKSDLFLNFVQLFPHPDCVLNLSKTIIKNRIRANTNKKISTIMAEKKAIQILEIAKNSYPAVSQNDVLCDQLKVYARRYQELLHQKEHCINKMVHLAEQRAEYSIILSLPGIGPNTAVRLMAEIGDITRFANNKQLNAYAGIDIRRFQSGKTFYKDKINKRGNKHLRKLLFLIIQNMIKQRRYGRNHIIEYYDKLKTQPYNKCHKVASIACVNKLLKLLFYLITHDIHYDYRLTA

SEQ ID NO: 483398 - protein, 458 aa, unidentified
MPKKSSNKAKSQRSRERALLQKVHLNAAGIDIGADAHWVAVPEDRDGYPVRSFGVFTRDLIALCDWLKRCQVETIVMESTGVYWIPLYQMLERKGFEVRLVNAHHVKNVPGRKTDVKDCQWLQQLHTFGMLGGSFRPQAQMCVVRSYLRLRDTLSKDCNSLVQRMQKALTEMNVQLHRVISDITGVTGMSILRAILAGERDCLKLAQLKHPQIKSSAQDIAKALEGDYCQEHLFALETALELYDSYQLKIMACDRHVQDALSAFEPKAKAPAPDLSRMRSAEKRQEALRRHHLAEMTGADLTKLPGLDLLAVERILSEIGLDMSRWPSEKHFCAWLNVAPNNRISGGKILSSKPRKNANRAAAALRLAAQSAMQSKSAIGAFIRRIKSRLGAPTAINAGAHKLARLVYRMLKFGKAYVETGQEAYEKLFKERTLRNLQRKARQLGFQVIPITAAVLVS

SEQ ID NO: 483399 - protein, 376 aa, unidentified
MKKYSKFAGLDVHKADISVGTANADRGEAGYYGTIENASHAYLKLAKKLSKGGEEVLFCYEAGPCGYEIYRQLTKAGYDCVVIAPSLIPKKAGDRVKTDRRDAVSLARLLRAGELTPIWVPDREQEAMRDLTRAREDMKAMERNSRQRLGGFLLRHGNVYPGRSKWTKAHFRWLEGLRFETAAQQIVFQEYIDMVKHTQERVASMEEEIRKALEGWTLKPVVEGLMALRGVDLVAAMTIVAELGDLSRFESPRQLMSHLGVVPSEQSSGERQKRGGITKTGNGHARRVLIEAAWCYQSPARMTAHMRRKAEKTSKAVQEIAWKAQKRLCSRYWYLIGKGKLPVKSCTAVARELVGFIWAIACEVMGKGSVSASINV

SEQ ID NO: 483400 - protein, 353 aa, unidentified
MTVYCGVDFHARQQTISYCDSADGEIHQCELLHQGNQVREFYAQFQGEVIVGLEASGYSTWFEELLESMHHKVWLGNPAEVRRKAPRRQKTDRRDADLILGLMLKGDFPKLHRFSAESRLVLRQLRYRHKLVKVRTIAKNSLQAISLSAGLPLKRGLLTQRGQERLRALELPPVLGQQREEWLQLVAHLDERITAIEATLEKVAASDEQIKLLRTHPGIGLLTGLGVRHTITPVARFRTTRKVVAYAGFDPVEDSSGERRRLGSISKEGSRLLRFLLNEAGQTACRRDPDLKRFYQRLVHRRNRQKAKVAVARKLLVRSFIMLRDQIDYAEFLRRGVAARSARKTHRPNVPVL

SEQ ID NO: 483401 - protein, 342 aa, unidentified
MQVTTIGLDIAKNVFQVHGIDAAEKVVVRKQLRRSQVLEFFKTLLPCLVGMEACATAHYWARELTKLGHQVRLMPAKDVKAYVKRNKNDAADAEAICEAVRRPTMRFVQVKSAEQQSQLMLHRTRDLLMRQRTQVINALRAHLGELGMTAAQGQAGLRELLAIIAGSADERLPAEAHASLIVLAAELQAMRTLIASIEKRIIAHHRLDEASKRLRSIPGIGLVGATAIAATITDPKAFRSGRDLAAWIGLVPRQDSTGGKQKLGPISKQGDRYLRRILVVGAHAVLKLARQKPEKYPWLTQLLARKPFKIVAVALANKMARIAWALLVKGGPYRARALVAAA

SEQ ID NO: 483402 - protein, 355 aa, unidentified
MNDAKYIGMDVHQATISAAVRDSRGNLVMEAILETKAETILQFIRGLRGSLYVAFEEGTWAAWLHDLLQPHVARVLASDPRKNALLKAGNKSDRIDARKLSELLYLNKLSPVYHGEQGIRTLKELARSYITITRDLTRVMSRLKAIYRGWGIPCAGQQVYAPRYRAEWLSKISEAGVRRRAELYYQQFDVLAALRQGTRRELLAEARKHPAMRLLRQIPAIGPIRAALLIALIQTPNRFRTKRQLWAYSGLALRTYTSGEYRFVAGQLKRSKKVLAVRGLNINHNHDLKNIFKGAATRAAATAGPLQGFYQACVARGVKPHLARLTLARKIASITLLVWKKGARFDAEHLKQQAA

SEQ ID NO: 483403 - protein, 353 aa, unidentified
MKRTTKYVALDVHQATSVASVRIPGGRVIARSILPTEPGALVEFFAGMRGSIHVAFEEGTQAQWLHDLLVPVVDRVIVCDRRGEHRGNKGDRMDADMLSQRLLTGDLRPVYHGSTDRATLHELTRTYTNLVEDSTRVMLRLKSLFRARAIRAQGKRIYGEQNRARWLAKLPDPAVRFRAETLYTQLDLLRELRPKVKAAMVSEARRDPAWEVLRSIPFLGPVRVTLLLGTLKTPWRFRTKRNLWAYAGLAVVTETSAEHDFVAGRVVRRRRRPLTRGLNKNHNRIAKNVFKATAVAALGRPGPLRDFYDALIDRGMRPDMARLTLARKIAAITLRLWKTGEPYNPALLSVQPT

SEQ ID NO: 483404 - protein, 431 aa, unidentified
MSERDYSKQVAKRQRIRSTTLVVGVDVGKAYNAVGFMNKEGKVLGSCAKVYNSREGFEQFMKMVEDLKARYGLKDVLIGMEPTGHYWRKLAYFAKGHGYEVRFVRTTALKHHRELDESASAKSDQRDALTITNITREGKYIDTVIEDGPLRQLRTSSKARERLLRYSVSAKNSLHAALDDYFPELHELFWSMGSRSLWAILDRCPFPEDVRLVEVSMLKGLIVKRSRKKAGAVQKAEALYQAATKSIGLRPIGSADRYRVQLCLEEVKRTVLTLKSMDQQMKNMLKEIPAAPYLLSIPGIGALSAAVFLGELGDPAHFHNARQIVKYAGYDPQESDSGSWVSRKFISKKGRWLMRKYLFFMSMRVVVLTHYFKTYYERKLETKNRVGQLPRRKEMLCAVAIKLIKVIFALLRDKRRFDDTRDTVMALSQAA

SEQ ID NO: 483405 - protein, 355 aa, unidentified
MTSTKYIGMDVHKESISIAVLNFAGKVVMECVIETKASTLLQFIHGLRGDLHVTFEEGTWAGWLYDLLKPHVTELVVCNPRKIALLKDGSKSDRIDAHKLADLLYMNKIKPVYHGEHGLRMLKELSRSYLTITKDLGRVMNRLKALYRSWAIPCAGTQVYAPRFRSEWLSKITEAGVRRRAELYYQQLDALRLVRQQARKELLAEARKHRATKLLRQIPGIGPLRAAHLVALMQTPHRFRTKRQLWTYSGLGLETHDSAQYRVVEQQLQRSKKPVTLRGLNTNHNHDLKDIFKGAAMRASTAAGPLHDFYEALLAKGRKPTMARLTLARKIAAITLIVWKKEVRFDANYLKQQAA

SEQ ID NO: 483406 - protein, 353 aa, unidentified
MFREPVSDACPRGATNSNMKPNTTNPPGFFLGIDVGKKDLFCHIIGPDQSWSERFDNSPAGIRLLLKWLKKACVPAQLSACLEQTGHYGDDIADALYKLRISSLHLVNPHRIKAYGMQKLRRNKSDTADAKLIARFLKAEHSGLRPWHPRSPGQQRITSLSRYADTLTQDNATLKTRLHAVSEKSIVASIKQRIVFQEKQLKAVRKSIAEIIRTDPEILAKNKLLISIPGIGVVAAQTVIAELPDLAEFADARQVSAWAGLTPSHHQSGTSGRTQTPITKIGSAHLRRALFMPAMTARENNPLLKTFGDRLKENGKKPKPIIIAIMRKLLHQIYGILKSGLPYNPEKRGCASA

SEQ ID NO: 483407 - protein, 459 aa, unidentified
MSQLPTLSYKGFAGSKAGLVRLRFQEEVSKSTMSRVESIQSEPEFAAFIGIDWADQKHIWCLQTTGSKQRESGELEHTPEAVESWVANLYQRFAPRPIAVAVEQSRGALVFMLSKYELFHLFPVPAQMAASMRQALYPSGAKDDPRDADLLLDLLLQHRNKLRRLSPDSEATRRVQNLVEERRKLVDEKTAQINRLTDHLKVYFPQMLEWFGRLDSELVCALLERWPALEELQKASPANLRTFFRKHRCRDRERIECRIEAIRRALPAIQDRAVIEAKSAVVKVIVQLIRILIGGIEDLDGQIEEAAAAHPDFFIFNSLPGAGPVMAPRLLAAFGSQRERYRSAHEIQSFSGIAPVTESSGKRKWVHFRWACPKFLRQSFHEWAGHSIVQSEWARVYYQQQRSKGNTHHAAVRALAFKWIRIVFRCWQDGVAYDENTYLAALVKHGSPLSGLVAIGKTL

SEQ ID NO: 483408 - protein, 344 aa, unidentified
MENYAGIDVSLELSSVCVVDAQGKILREAKVASEPDALVEFFETLGFAVERIGLEAGPLSQWLHAGLRKAGFETVLLETRHVKAALSAMTVKTDRKDARGIAQLIRMGWFQPVHAKSVGAQEIRALLIARKQLLGRLIDVELSIRGILRGFGLKVGPVTRRNFEARIRELVTGQATLERIAGAMLSARSALKAEYGRLHKAVLATVRDDAVCSRLMTVPGVGPLVAITYKSAIDDPHRIAKSKAAGALFGLTPKKYQSGEKDVTGGITLAGDEMVRTVLYEAANVLLSRITRFSKLKRWGMDVAKRRGSKRAKVALARKLAVILHRIWVDGTTYRWAETGPIAA

SEQ ID NO: 483409 - protein, 346 aa, unidentified
MKILALDLGKYKTVGCDYESESGAHQFKRGFTTRAGLAKMVQEVKPDRVVIEVCSIAGWVCDLLWEMGIEVQVANTSDDAWRWRKVKQKDDRRDALKAARLSAVNQLREVYIPAQAVRQWRALITYRQHVIRRRTKIKNHIRDLLLREGQILRRGSGCWSQAGIAALAAQARPFSECGPAELWRGELQLELEQLKEIQRQVTTVTAQLDKIGAADARVQLLRTVPGVGPRLAEAIVALLDQPQRFRKASQVSGYIGMVPKALDSGETERRGHITRQGSRLVRSLLVEVAWAGLRHNAWVRQTYQRLSGGKKARKKIAIVAVGRKLLVKCWAMLRDNRAWDWQPQIT

SEQ ID NO: 483410 - protein, 341 aa, unidentified
MSTATLVGIDLGKHSFHLHGQDKAGREVFRKKTTRQQMMRLLGNLPSCTVVMEACAGSHFLARQLMAFGHEVKLISLQFVRPFVKGNKNDFIDAEAICEAASRPTMRFVTPKTEAQQTLSVLHRMRESLVRDRTKTANQAHGFLLEFGISLPKGLSLVRRLPCTLGEHELPPRLATLLKRLHEHFCYLDEQIRALDEEMDNQLAADDLGSRLLSIPCVGPITASLLCAEMGDGKQYGGSRDFAASVGLVPRQYSTGGRANLLGISKRGDKNLRRLLVQCARVYLQRLAFQQGALADWVRSLRERRHSNVVVCALANKFARIAWAIAANHSEFEAGPSALAA

SEQ ID NO: 483411 - protein, 410 aa, unidentified
MIFVGVDWAEAHHDVHVEDEEGQRLGGGRLPEGVEGIARFHDLVGRHAEEPGEVVVGIETDRGLFVSALVAAGYEVFAVNPMSTSRYRDRHSTSGAKSDPGDAKVLADMVRTDRHNHRPVAADSEEVQVLKVLARAHQSMIWGKTRQTNSLRSALREFYPAALVAFDDLASADALEVLRIAPTPELGASLSRSKIAAALRRGGRQRRIDERTVEIQSALRAPQLAPPTALSSAMGASVAASVAVIATMVNQIAVLTGELEAGFDQHPAAKVVRSLPGLGTVLGARVLGEFGEFGDEPNRYASAKSRKNYAGTSPITRASGNKRVVLARYARNHRLADAIYLWSFAALNASPGARRFYDQRRAAGDTHHAALRALGNRLVGVLHGCLVHHSAYDETIAWGHRPENALSEAA

SEQ ID NO: 483412 - protein, 419 aa, unidentified
MARVSRLLRPLGRCIGLDVHLDFIQIAICEEGKVFSAGRVPATPEGLKTLVDSLLPADRVALEVTGSSREIVRLLEPHVKKVIVVSPGDTGISQARAKTDKLDAKTLAKLLWTGELDAVWMPPEWISRMRRRLARREQLVRARSRVKNEIHAVLMRQLKGRAPASDLFGVKGRAWLRSLELPEEEDETVKAGLRHVEFLDQEIEQVERLIAREALCSPQIKRLMTIPGVNVICAAIFLAAVGDIRRFKGSRPVVAYLGLDPRVYQSGAGPARGGRISKQGSPRARWALVEAARSVAQQPGPMHAFYERIRARKGHNAAIVAVARKLAVLFWCMLTREEDYAHQQPSLTAQKLRRLEVRAGVPIRPGKPTGVWATRERMRHAEKQLAAQAEASYKRSIADWHATSPNKKSAGASVTAERA

SEQ ID NO: 483413 - protein, 368 aa, unidentified
MEKFITFVGLDVHKNSIDVALADAGRNAEVRHYGTIGGGLDDLDRLVKKLSSPNKELRFVYEAGPCGYDIFRSLTDKGFDCAVVSPAHIPKKPADRIKTDRRDAMMLARLHRAGELTYVFVPRADDEAMRDLTRAREDAKKAQRVAQQQLNGMLLRLGFRYPRDNWTKQHFLWLADLKMPMPAQQVVLQEYINAINETKARVERLTQQIESLVPTWRMAPVVKALQALRGTSLIVAATMVAELGDLTRFDHPKKLMTYLGLVPSEHSSGEKTQRGKITKTGNGHARRVLVEAAQAYSHPARITRPLLKRQEGLSQEARDIAWKCQVRLCTRFRRLMAKGKNRNAVITATARELAAFMWAIAKHTSLAA

SEQ ID NO: 483414 - protein, 391 aa, unidentified
MFYIGIDIAKKNHEASIIDSSGKSLSKSISFPNSAKGIKKFNNFIAEFGVTTNNCIIGMEATGHYWISLFSYIVDLGFTCYVINPIQFDAFRKMYVRQTKNDSVDSFIIAQIMRFGEFSISNFSDENTFALRNLTRYRFALVDECSDWKRKLVAILDQVFPEYSSLFSNIYGVTSKELLSKYPLPEDMLSIPAEELGNLLCECSKGRLGINKAKEIQSRARESFGIKFAKRSFSFQIKQIISQISFLEEQLKEIEIEISSLLEDICPVITTITGIGSVLGASIVSEIGNISRFERANQLVAYAGLDTRIKQSGDFSATNTKLSKRGSPYLRRSIWLSTTVAAFKDPALSIYYQGLRARGKAHGTAIGAVARKLTNIIFAVLRDQKPYTPNI

SEQ ID NO: 483415 - protein, 431 aa, unidentified
MNRSVEFLSVGIDVGADFSLMAFALPSQELLGKPYKIIHSSQRSLNGAVEKIKTLSHKHQLPARVFMESTGIYHYPLYHKMKDAGFDVFVLNPLVTHAGRDLNVRNIHNDKYDSQKIALLGLRPGLKTSLIPSDQVISMKVILREYYAVKKEISMYICRLKNQLRQAFPQFLPLFSKVNGVTAMAILCEYPNPESLLNAGEHAVADFMKSVSHNGPLKVQKKAAALIQAAQDARSFGHWNHGISILIRHYIEMIRLLDVRAKTLLAQAKALLAEQDSKTLAHQTELLQTIPGIGFLSALTLICELGDFSAFKRPKQLFSYFGLDPIVRQSGNYNGTNLKLSKRGSPFARRCIFVIALQSISLNIHKEPKNPVLRTFYEEKCMCKAKMTAIGAVMHKICNLIFAVLRNDAPFVLQTPEQHNAAYLSKTHSVA

SEQ ID NO: 483416 - protein, 316 aa, unidentified
MSISKTFIGVDVSKERLDCFCRPTGTRFSYDNTPPGIAALVKWVEAQQPQLVVLEATGGLERPLVAELVVAQLPVVVVNPRQVRDFARATGQLAKTDRIDAEVIAHFGEAVNPEARPLPDHLTQQMDALMTRRRQLVQMLAAERNHLVSAPVHVQNYVKEHIVQLEELIKKLDQDIDQMITRSPICKTKENLLRSFKGVGPVLSRTLLAELPELGRLSRQEISKLVGVAPLNNVSGKHKGKRSCWGGRASVRMPLYMAALSATRCNPVIKEFYKRLLARGKLKKIAIVACMRKMLTILNAMIKSNKPWDASLAQIG

SEQ ID NO: 483417 - protein, 347 aa, unidentified
MRFYTQQHKAYCGIDLHARSMYVCILSQDGEILLHRNMKTSPETLLKAIAPYREDVVVAVECIFTWYWLADLCAQEQIPFVLGHALYMKAIHGGKAKNDKIDSQKIAVLLRGGMLPQAYVYPAEMRATRDLLRRRMHLTRKRAEMLAHIQNTNSQYNLPEIGKKLAYKANRAGVAERFPDPAVQKSIEVDLGLIGYYDQVLNDLELTLVNTAKQHHAQTLYRLQSVPGIGKILALVLLYEIHDIVRFPRVQDFVSYCRLVKCTKESAGKRYGTSGAKIGHAYLKWAFSEAAVLFLRNNPAGQKYVARLEKKHGKGKALTILAHKLARAVYYMLRRDTAFDLQKFLNG

SEQ ID NO: 483418 - protein, 392 aa, unidentified
MYIVGIDIGKNHHEASIVSPEGKQIGRSLRFATTHKGADSLMSFIFKNIGNSPCVFGMEATGHYWYPIYSFIKAKGYTIYVINPIQSDSLRKMYIRQTKNDSIDSFLIAEVIRFGQFGTTSMADENILAMRQLCRYRDSVISSRTEIKLRIGTIMEQIFPEYEKQFSSLWVSTSMGILEKYLTPDNIENAPIDELFEIIKDKSHNRLTRAKAISIKEAAADTFGIKIAQDAFSFQLKQLIDRMNFLDKQIEALDCQILEYYEKFDCYLHTIPGIGMIAAATILAEIGDINRFKSSSALVAFAGIDPTVRQSGEFSSTHNHMSKRGSPYLRHAIFLAATTCSFHNSPLNAYYKKKREQGKHHLTATGAVARKLTTVIYAVLRDGKPYEPKSFC

SEQ ID NO: 483419 - protein, 338 aa, unidentified
MYYTGIDIHKFTSYLTTVDSSGAIVKQENLKNVAHNFIQYFGSIPGEHKTTVESTMTWYWLNDLLTSINIPLILAHAKYVKAIAYAKVKTDKVDSHILAQLLRMNFIPVAHKISMENRLLRDALRARLKIVQRHTSVTNSMQLLLAKYNYDSPTELSGIPKFQYEQLTEVEALLDEQMLDLEKQLYPYLIPNDNIQRLLWIPGIGKMNAFTILLEVDDINRFPDVKNFFSYCRLVPSARNSGGKSKQRSSKDGNKYLKVAFSDAAVHAVHYYPVIRNYNNSLIRKKNKQIAKTIIAKEIAQTVYFVLKNKTDFNNKFKGKELEHKKSLQWPRITNPYA

SEQ ID NO: 483420 - protein, 321 aa, unidentified
MKDISQTPVLGIDVSRDYLDGYFLPDGKRFRLPNTEEGHGQLIELLAVHPDVVVCFEATGGQEWRLWAALDAVGIETRQLPPAQIKAFAASRGTRAKTDRIDAELIARFLAFRPDAGRRLPHETLRILRALCAKRGQLVEMRKRLLAQTKARMKNGSGDPFEPMDGELKALLGIQIADLETRIEAAIAADPEMADTARILRSIIGVGPVTSWTLIAEMPELGQISGEQAAALTGLAPIAHDSGAMRGKRSIGGGRRALRHVLFQAALVASHHNPRLTAFADRLRERGKPHKVIIIAVARKLVTIANALCKSRQICANLNNL

SEQ ID NO: 483421 - protein, 337 aa, unidentified
MIVMGLDQHRGQVTAEWIETDTGEVSRARVSPAHREPVRRFLGRFRGAELEVALEATTGWRFVVEELRAIGADVHLAEPAETAARRGNKKRAKSDRADARHLRELLMIARLPESWIPPDHILDLRARVRLRHALSDQRGEWQQRIQAVLYHHGCPQRRELMTRDGRAWLAEQALPETAREQVTVAIAMVDALEVQLAPITKQLRAYARRQVGCRALMRHYGIGELTAVTILAELGDCRRFSSSRHAVRYSGLDITVHQSDQRRAPGHLSRQGPPALRWALFEAAQVARRTGSPDREYYRQAAERLGPNRACLSIARKLLKRSYHTLSELGEEALAPA

SEQ ID NO: 483422 - protein, 323 aa, unidentified
MAKRNTICAGIDTSKDKLDVALDGSSEELQVKNTAEGHQELVEWLKRHKVKRVGIEASGGYEQAAVAELRRQRFVVIVFQPIQVRAYATFHLQRAKNDKMDAALIAACTAAVKKIHPAPDPRLQPFAVHLTMIDQIKEDIAKLKNRLESCPDERIQKFWKEQIALLAKHRRAEFKALVAAIRKHRDLAARLDLIYSVGGSGLPTAVAILIRMPEIGQITREQAAALTGLAPYDDDSGKHVGARRIDGGRQRLRQALYTAALPASFRWNPQLMALYSRLIAAGKGHKRALVACARKLIVIINAVVARGTPWVAEPPRTASVSVT

SEQ ID NO: 483423 - protein, 338 aa, unidentified
MSETSHLQGWAKLGAPVDQYSNRGRSIVETFVGIDISKTHVDVAIRPGDQDLHVERTPAALSELAKRLLELSPALVVMEATGGLEVEVASILAASNLPVVVVNPRQVRDFAKAIGRLAKTDRIDARVLAHFAEAVRPEPRALQGAEADELQALVARRLQLTEMLVAEENRLRNCRVDRIRTSLKLHIEGLKKELSAISRDLKDFLQKNEVWKTKDQLLQSFKGVGPNTSAMLLVDLPELGKLNRKQIAALVGVAPFNCDSGAFKGKRRIWGGRARVRRALYMAALVASRRNPEIASFYNRLVGAGKPAKVALTACMRKLLTILNAMLRTLQPWNAQLA

SEQ ID NO: 483424 - protein, 354 aa, unidentified
MKKARRELQTGDRVFVGIDMHKLKWHVTARTAEFELFSGSIPGKWEALQRILERYQGHRINTVYEAGYFGFWLHDELIEYGAECIVTPPSLIPQEYGNKVKTDRRDSRKLAHFLAKGLLKRVWVPTEKERYHRQVIRRRRQLIGDRIRAQSRIKAELQLHGLNLSAPHGKWTKIFLENLGRIRFNNRWMQESFKRLLEQYHFLDEQINKQTSLLHELSETELYKQRVEILMTAPGIGMIAAMELLLELQDVTRFQRADQLAAYVGLTPSQYSSADKIRMGRITCVGKNSLRAMLVQASWALIRKDGVMREKYDRLKSRSGGKRAIVAVARTLLIRMRRMLLDNNPYVVGLVATN

SEQ ID NO: 483425 - protein, 343 aa, unidentified
MQTVTTIGLDIAKSVFQVHGIGGEGEVVIRRQLKRRHVLVFFQKLPPCLVGIEACASSHYWSRELTALGHTVRLMPPAYVKPYVKRQKNDAADAEAICEAVTRVNMRFVATKTPEQQSCLMLHRTRHLFIRQQTAVINAIRAHLAEFGIVAPVGRNGVEELLAVVADPSDKRVPEIARACLAALGAQLRVLKAQILEFDRRINAWHRSNQASKRHDEIPGVGPALATALVASVADPKAFRSGRDFSAWIGLVPKQHSSGGKDKLGSISKQGDRYLRSLFTAGALAVIRYAKIHGTKHRPWLTALLARRPTKVAAIALANKIARIAWAMMSKGERYKEPVALAA

SEQ ID NO: 483426 - protein, 425 aa, unidentified
MNYKQNEKINQVKESTLVVGIDIGSTTQYARAFDWRGIELGKVFTFSNSREGFEAFKAWMRHLQDKYRKSDVIVGIEPTGHYWFDLGAYLEDEGILLVMVNPYAVKQTKELDDNSQSKNDRKDPKVIAKLVTEGRYSAPYTPDGVYADLRIMVANRKRLIREMTQIKNRFARWFAIYFPEYTDVFGDYEAQSSMLLLKKVCTPEAIVELGAEKINQIWRDAKLRAVGMKRATTLCETAKRSIGLKKGSSAARYEMKLLLEDYEYKKAQLDAVMEEIEKLCRKIPESEQMLAIKGIGVITVAGFLAEVGDVRRFESPRQIQKLAGLSLRENSSGKHKGQTTISKRGRSKLRAVLFNAAIPLIAKNPEFKSLHEYYTTRANNPLKKKQSVIAISCKLIRVFYAILAKGVTYDAQKLISDIHRQPQVA

SEQ ID NO: 483427 - protein, 526 aa, unidentified
MTNTQRWARGCKLDNRRWLDTATGGMCVTGHSIGIDLSINGAHDCTVLDATGQLVQRFTFDSSSAGLQKLEQCVRATDPSYGAPVVIMEPTGLAWFLPCLCLRAEHPEVKVVRIKTSKVAALRRYLKQDAKSDRLDSLTLAKMPLVDPEKLYAVDLPPAAVQGLDRMTRQRARLVASLTGRKNRLQALVGGYLPGLMAVAGKPWEPVFRAMLAVSLNPFTLTDQGTTALGKSLQDKRSREALPEAPLPRLRIACEQLTRLYRPIIEAGLLTEAFFDDVQDEVARELRLMDVEEQEVKELEAAIARRYQEIVPEDHLRTIKGLGAVTAPTILAAVGTPQRFHSQAAFRGWTGVVAHASQSADSDAKGLPMTKAGPRRVKLALYQAAEIARQWDPQLAKIYYDQMVHKGKPHYKAIGAVMSHLASRIHAVLSEQRDYVLRDTDGREVTPQEARAIILTRYRVPAEIRAERRTRKRRKPDVSTGSHRGGTKRSSRRSSTSSHLHSTRSQEAHQTGAVAISHDGSAVARA

SEQ ID NO: 483428 - protein, 391 aa, unidentified
MPEDAPRPAQAAIRTDLGAIFVSLELSRRTWLITSLSPGAGEKMSKHSVPASDVSGLLRRFAELRRKAVARTGRDFPIIVIQEAGLDGFWIHRVLQSEGIESHVVDAASILTSRRGRRAKTDRIDGETLVRTLMAFKRGEPRVCSMARAPTPQEEDRRRVCRERWTLVGERVRHVNRIKGLLFAQGVFGYEPLRKGRRERLEDLRTGDGRPLPVHLKAQIIRELDRLEVVLEQLKTVEAERDALLKPANDEMPSPAAMLAQLKGIGSETAVLLWSEGLFRRFDNRRQVAAYAGLAPTPWQSGSIDHEQGVSKAGNPRLRATMVELAWLWLQNQPTSTLSLWFHERVQRLGGRMRKTIIVALARKLLIALWRYTTAGIVIEGAMMKPSPATT

SEQ ID NO: 483429 - protein, 351 aa, unidentified
MSNSIVVFVPCGIEVSQLTLVVALRGPDHTEPLREFPNTREGHQAVLRFLERSARPVRVVLESTGLYGLDLALTLHQAGVAVMVANPRAVRHFAQALLQRSKNDQLDAGVLREFAARLPFQAWRPPSAAALKLVAVARRLEALTDMMAAEKNRAHAASLSEALPVSIRRDIQRSIQTQQRAIERLTRAAQEFLLADPELARRYELLLSIPGFGVTSTLHTLAELTLLPADMDVRQWVAYAGLDPREYAPGTSVHKKVRISKAGNKHLRRALYMPALVAVQHQPHVRAFYEHLLARGKSKMQALVATMRKLLHAIYGMFKHNQLFDGQKLYASNSPTLAPPPSLSEVVCAQT

SEQ ID NO: 483430 - protein, 348 aa, unidentified
MRSVRLSRWASIWAIGNAISVSWKGEIVKEEAITTSPAAFKDYFKKLPTPTVVAIEVGPHSRWVSQVISECGHDAIVANATKVKFIFANNGKNDRVDARSLARLARVDRHLLFPIHHRSNSAQFALSVLRARDALVRARTRLINCIRGLVKPTGVRLGPASADCFPLRAAKQIPAELQFSTALTLEQIQSLTDSIAVYDEYIEHLVDTQYPKAKLLQQIPGVGALTSLAFILTLDDPARFPKSRQVGCYLGLRPRQDQSGDSNPQLGITKSGDEFLRRLLVNAAHYVLGHFGPDSDLRRWGLAIAARGGKRAKKRAVAAVARKLAVLLHHLWVTGDVYEPFHNTGKAA

SEQ ID NO: 483431 - protein, 372 aa, unidentified
MNYNTVYVGMDVHKESFTLCSCKYEDEKASHYQRTPASYKNVLRYLAFLRTIYGEDTRFVCGYEAGCLGYSLYHQLENFNVECVILAPTTMLEQRSKRRIKTDKRDAEIITKSLAQHNYSPVHIPTETDNQTKEFIRMRDDHKAELKKIKQQILSFCLRQGYQYDGSGNWTAKHVKWLRSLKTEGLYKEILDEYLLTYTILTDKLNRLDQRIEELASEEEYKEPVSKLTCFLGIKTHTALSVIVEVGDFQRFASARKFAGYLGLVPGQHSSGDDRNGLGITKAGNTHVRRLLVESAQSYTRGKIGYKSRVLRSRQAGNSPQIINYADRANERLRRRYYQMVLKDGKKYNIAKIAVARELACFIWGMMTDNIY

SEQ ID NO: 483432 - protein, 360 aa, unidentified
MAKARSVVGLDVHATKIVAAVLDAETGEIAFFAMTADIGRTAAFCAALPRPVRVAYEAGPTGYGLARELVKRRVECVVAAPSKIPRASGDRVKTDRRDAELIARLLLAGKLHAVRVPGPQEEALRDLVRAREQVRVDLMRCRHRLSKLLLRHGIRFDDGDAWTDRHRQWLNEIVLEWPAAQATLLDVRGAIDALTHRRDGLERQIVSMLPSSPWRAQVGVLRCLRGIDTLSAVGLCAEVGDFARFARAGQLMSYLGLVPAENTTGQQRRLGSITKTGSAHARRLLVEAAWHYRARPNLGKALTERQADQPQQAIAVAWTAQKRLHRTWARLEARGKRRTMIAVAAARELAGFVWAITQIE

SEQ ID NO: 483433 - protein, 291 aa, unidentified
MNIVFLGIALAKNVFQLCGLNQAGKPVYTKRTGRKELLQTLANIPACLIGIEASTGAFYWQREFEKLGHKVKVISPQYVKPFVRGQKNDGNDAQAIAVALMQPTMQFVPPKSPEQQDIQALHRARQRIVNHRTATVCQIRGLLLDRGIPIGSAVSRSRRAIPLIPEDAEKGLSSRMRRIIAELYDLFNDLGRRIHFFDKEIETVFRQSEACQRIAKVKGIGPKTATAVVAAIGKGTEFKNGRHFAAWLGLVPRQHSSGDRQVLMNMTKKRRQASADTFYSWCPRCRQGCHE

SEQ ID NO: 483434 - protein, 338 aa, unidentified
MTIVMGLDQHRAQITAEWLDTETGEVMRTRVTPAHRAGVRRFCERFAGQEVEVALEATTGWRFVADEFQRVGASVHLAEPAETAAMRGNKKRAKSDRADARHIRELLTGGRLPESWIPPAHILDLRARVRLRHTLSHQRGEWQQRIQAVLYHHGCPQHGNLITVEGRAWLAAQPLSTAAREQITIALSVIDALDAQLGPLDKELRAFARRQPGCRALLTQFGVGELIAVTILAELGDARRFSSSRDAVRFAGLDITVHQSDQRRAPGHLSRQGPPALRWALFEATMCAARSSSPDYEYYSQAAERLGSNRARLSVARKILKRSFHLLRELGDEALLPA

SEQ ID NO: 483435 - protein, 323 aa, unidentified
MQAITTIGLDIAKSVFQVHGVDAGGQVVLRRQLKRRYVLAFFGKLAPCLVGIEACASSHYWARRLQALGHNVRLMPPAYVKPYVKRQKNDSTDAEAICEAVSRANMRFVPTKTPEQQSGLVLHRTRHLFIRQQTSVINAIRAHCAEFGIVAPVGRRGVEELLNVIANAKDEQVPAIARACVVALGAQLHRIKQQILEFDRMITAWHRCCDTSRRLDEIPGVGPALATALVASVANPRAFRSGRDFSAWIGLVPKQNSSGGKPKLGSISKQGDRYLRGLFTAGALAVIRYAKIHGTRHRPWLTALYAELEPNVANAADESYVRA

SEQ ID NO: 483436 - protein, 412 aa, unidentified
MEVLYDCCCGLDVHAKTVVACLITKGRKEIRTFATMTDELLQLEDWLSSAGCTHVAIESTGVYWKPVFNILEGLLTVILVNARHVKAVPGRKTDVRDCEWLADLLRHGLLKASFIPPLEIRELRELIRYRQTVVAEHTAVANRIQKLIESANIKLGQVASEVLGLSGRLMLRALAEGETEAGKLAELAQGKLKSKKAELRRALEGRLTHVQRWVLAELLSRVEELEAALTRVEARIGEEVAVCPNLFVPEAVVLLDSIPGVGVRTAQTLVAEIGVDMERFPSAQHLASWAGVCPGNHESAGKRKSGQPTKGNKSLRTVLVEAAWAATRAKGTFLQAKYHRLVKRMPKQKALGAIAHRLLVISYHLLSRRVLYAELGSAPLDHQQVERQRRRLVGQLATLGVTVTIEEAASAA

SEQ ID NO: 483437 - protein, 428 aa, unidentified
MDQPHDESKEVRWEDIQLFAGLDWAKDHHDIVAVNAQGRVVVELTIPDTAEGWGGLREKLSAQVGGILSAVAVAVETNNGPAVERLLALGCRVYPMNPKAAGRYRDRKAPSGGRNDRLDAFSFADGLRTDGHAWRALKADDPLTQELRLLCRDEVQLIRQRTALVNQLQAALHEYYPAALEAFDDWVSPGAWSFVERFPTAAALVAAGKRQWEKFLHSHRLYRPETYPRRLEVFARADRFAGPPAVTEAKSRLAVALAGQLRVLQKHIDEYRAAIEALFAKHPDHDLFDSLPGAGKKLAPRLLGELGDDRDRFEDAQGLQCYGGTAPVTIQSGKSRFVKLRRACNKWLRTTVHLWANLSRAECVWAAAYYDRKREEGKSHATALRCLGQRWLKILVRMRQDRRPYDEALHLRNMTQRGSWKLSLASEE

SEQ ID NO: 483438 - protein, 355 aa, unidentified
MNSVRYIGLDVHRDTISAAVLNESGRLIQQSILATRAAAILDFIGGMRGTLHVTFEEGTHSSWLYDLLSRRVTWLVVCNPRKNALMKSGNKSDAIDARKLAELLRADMLSPVYHGEKSAMEVQHLARSYALLTEDTTRVMARIKAVFRGQAIACAGKKLYGKKHRDEYLAELGTGALRRRAEFLYQELEAVQQLRRQAKRDMIVECRKYPETKLLCSVPFLGPVRAAVLIGRVQTPHRFRTKRQFWAYCGLALEMRDSGEYRMVDGQVERRKRPAQIRGLNWNHNHELKNLFKAAATSASACEGVFREFYLGLLKKNMQPEMARLTLARKIAAIALNIWKKGEAFDAEHLKLQAA

SEQ ID NO: 483439 - protein, 354 aa, unidentified
MLIIGCDFHTRYQQIAMAREETGELLVERRLDHASGEAHAFYRSLQSSQEPVRVGIEATGPIHWFERLLADLGYELWIGDSAKIRASEVRKQKTDERDAALILDLLLAKRFPRIWVPTPAQRDLRQLLWHRHKLVSMRTMLGNQLHALAMSQGLCRKKKLFTKKGRVELVSLGLAPWASRRREELLKLLDQLEPPIAELDRAVLEEAKRHADAVRLMTHPGIGPVTALAFVLAIGPITRFRRSKKIASYLGLNPSEESSGGRRRLGAISKQGNTMVRWLLIETVHHAVRQDPELRQDYQRLKFRRGHAVAKVAIARKLAVRMYWMLRSGADYARLVRRQGSPRGTLVGASPSLA

SEQ ID NO: 483440 - protein, 292 aa, unidentified
MLHAGLDLSRHRLDVCLLDEQGSTVQVTTAPPDADGLRGLARQTAAHGVPVRAAIESMNGARFVHDQLELSGWQVAIADAQKVKGLAPLACKTDRIDAWVLAELSPRDLVPEIWPPTPEVRAERERARWRPHLVRHRTAPKNRIHAILLAFGKPCPVSDLFATGGRQLLARLALPEPWAGNVVAALALIDDLDAQIHACEQDLRHLGAHHPYVPLLMTAPGIAWVPGYTIAAELGDITRFPSPKKLCGYTGLCPRVYQSGSRDQRGPLAKNGPPYLRWALIEAATHAARHPC

SEQ ID NO: 483441 - protein, 439 aa, unidentified
MCGGTVNGFFILFLKGVLTMKVVYQTCCGVDVHKSFLVATIIKTTSGIEPSYQKKRFSTFNNSILEFKKWLLDNSCRDVCMESTGKYWIPVFNLLEDELNVTIANPKWVKAVKGNKDDTKDSKWIGDLFRLGLVPGSYIPCKPIRILREFTRYRYKLTSCRSSEKNRFQNALTVCNVALDSVVSDIFGKSATSVIDYLLEQSDNSINHEEISSRLLRSLKKKSESVIESIEGYQMTDTQKYRMRLVHAHMDYITSTISDIDSMIDSLVEPYENAVQLLCTIPGVDRSSAITIISEIGTDMTQFSNSKRLCCWAGLTPGNNESAGKKKSVRITRAGVYLKPALVQVAHAAVKSNKSPYYKAKYERIMKRRGKKRAIIAVARMILTAIYHMLSTGEAWNPTDLYQIDMPEPLKNKQKEKAVKQAKKLLIHEGILSESQFAS

SEQ ID NO: 483442 - protein, 422 aa, unidentified
MLGVGIDWAEAFHDIALGTAEKGVIQQFRIEHSPAGIERLIMRCLALEPDPAEIRVVLETRHGLLVEALVDAGFTVVPVNPDLVARRRGPARKKDDAEDARICCLLALDRHTTLRQLIPHGEIAGELRAIARDDQPAARDHVRLLNRLRADLQITYPAALVLAGGDLGAPTVLRLLQHWPTQSELAQATREELIDLARASHHGWPKHFADRVAAALATPALAVRDHLVRAKATSIRLAASQLLALHDARRRWEQRMAELLLGGPRTGRDRSMTDSDPGKAFPGGEIYLSMPGLGDRLAARVAGEIGDHIHQYDTPNALQCYAGSAPVTRRSGKSDFVVARRLAHNHYLGDAVHQWAFCSLTQSAWAREFYDEKITAGKSHHAALRALSNRWLNILWHCLAKGVHYDEATHQANRNHALRNAA

SEQ ID NO: 483443 - protein, 350 aa, unidentified
MNILAMDLGKNNTVICNYDSETGKHKFTKVKTLPQEIHDMLVENAPDRVVFEIGALTGWVYDIATALKFEVQVANTSHQAWRWKNIKKKNDRTDALKLAQLSAMNQLSLVHIPKPEIRQKRALIQYRQSLIKRRTQIKNNIRSILERQGCHKLLPSGKNGWSKNSVEMLNKMSIDFSLCDMDQLWKGELNLELRQLEAIEKCVDETEKRLDKLAECDENIKVLRSIKGVGARLAEAIAAFVDEPERFETGKQVGSYIGLTPRQYQSGQMDHQGRISGAGNKVLRSLLVEVCWLGLRHNKWMNETYNRILRGSKSRKKIAITAVARKLLVRCWAMMRDRKNWCDVEIKKVA

SEQ ID NO: 483444 - protein, 372 aa, unidentified
MDQHNRHFVGLDVSKLKISVAVADGERGGEVRFYGDIASDPNSVTNIVEKLAKRGAVLHFCYEAGPTGYELYRQLTGMGHDCVVVAPSLIPKRPGDRVKTNRRDAVSLARLHRAGELTAVWVPDRGHEAMRDLVRAREAAQEAQKRARQQLQSFLLRHGRIYSGRSSWSLAHMRWISTLKFEHPAHFIVLKEYCQAIEDAEVRLKRLTDLISETVKSWTMAPVVEAYQALRGVSLIAAVVFVAEIGDIRRFENPRQLMAFLGLVPSESSTGEHVKRGGITKAGNSRARRMLVEGAWAYRFPARVSRTKQAQLEGLPRTVREIAWKGQLRLCSRYRKMILAGKHKAIAITAIAREMGAFLWAIGQEVQPADHA

SEQ ID NO: 483445 - protein, 342 aa, unidentified
MEILTIGIDLSKTTFHLIGLSARGEIVLRKKLSRKQLLIFTATRTPMLIGMEACAGAHYLARALREQGHDARLMPAQYVKPYVKTNKNDYLDAEAIAEAVQRPTMRFVPVKNDAQLDLQALHRVRDRWVARRTAVMNQIRGFLLDRGIAIRKGPSYLTAQLQIIFADGDSSFSGRLLHLMRELKHEWEELERRIEEASAELARIAKEDDGCHRLMEVPGFGPIVSTALVAAIGNGISFRKGRDLAAWLGLVPRQHSTGGKTRLLGISKLGNEYLRRMMLHGARSVVMQMERKPSALGEWLTSLSARSHRNVTVVALANKMARIAWAILSKGTHYCAPALIAA

SEQ ID NO: 483446 - protein, 370 aa, unidentified
MLDTTTFIGLDVHARSIKAVSLDVMTGEVRAATFGYDAGAVAEWVRSVDPRARCVYESGVTGFDLQKRLSGLGVDCAVGAVSKMIKPSADRRRKNDRNDAELLARMLSVGNVVEVWVPDDECEAARDLTGALEDARDDLSRSKQRLSKFLLRHGLVFDERTPTGRRKGNWTRAHWSWIESIRFAEGADEEVLAYYVDAVRRAAEEKARLEGLVEAEARKPRWRRRVDSLRCLKGVDTASAADLVFEAGEFSRFGNARSFAAWVGLTPSEHSSGESDRRGAITKAGNKHLRKALVEAAWHYLTCSGRPKGLAKGQAPDRGARRHAAKGVRRLAERREALLARGVHGNKANVATARELACWVWAVGLMAEEA

SEQ ID NO: 483447 - protein, 365 aa, unidentified
MQTIYIGVDFHARQQTICYLTTETGELVTCELKHQDKEAVRAFYAAFRGPVIVGLEASGYSPWFERLLEELGYEVWLGHATEIRRRARWRQKNDRRDAELILDLMLHNEFPRLHRPALQSREVMRMLRYRHKLIKIRTMSKNSLQALALQAGVAKRSGLFTRAGKQELDAALMSPAMQWQREHWLQLLQPLDQQVLEAMAWLKAQSKDDVCIARLRTHPGIGLLSSLCLVHTLQPVTRFRNTRKVAAYAGFDPVERSSAEHKRFLGISKAGSRLLRHLMVEAANIAVRKDEDLKRFYQRVADRRGRPKAKVAVARKLLIRAYIMLRDEIDYAEFRRRAVAARLARLGHRPNVPAVVIGQPASTEY

SEQ ID NO: 483448 - protein, 370 aa, unidentified
MKETITSFVGLDVHKDSIAIAVAQAGRQAPRFVGTVTPELASVCKALRRVANAQHTLVVYEAGPCGYGLARHLNAHGYCCEVIAPARISRSPAEQRVKTDRRDALLLARESRAGNLVPVVMPDERDEAIRDLSRTREDVCTARLRARQQLKAMLLRHGRSYQGKTSWTLAHERNLSTVSFAHPAQDIAFAEYRQAVKDSHERLARLTEALRTQSSQWRMNPLVHGLMSLRGFDFVGAITFIAEIGDPRRFANAPALMAYLGLVPSESSSGLTRHQGSITKTGNKHARRILIEAAWNYRHSARISRVLEVRQQGQPKIVRDIAWRAQLRLTKRYRHLAIGRRLPPNKVSVAIARELAGFIWDIARQVKPLP

SEQ ID NO: 483449 - protein, 403 aa, unidentified
MIFVGDDWAEAHHDVYLMDESGRRLGSRRLPEGLSGIRQLHEVIGEHAEEPDQVVIGIETDRGLWVGALTGAGYEVFAVNPLAVARYRDRHHVSGAKSDASDAKLLADLVRTDRHNHRRIAGDSPDAEAIKVLARTHQSLIWTRTRHTNALRSALREYYPAALVAFEDLDHGDALGVLDRAPTPEQGAHLPLAALQSALKRGGRKRNIAARAREIQAALRTEQLTAAPAISAAFAATTRATVGIIGELNRQIGELETSLAAHFETHPDADIYLSLPGLGVVLGARVLGEFGDDPNRYTDTKSRKNYAGTSPLTIASGKKRAVLARHVRNRRLYDAIDQWAFCALSSSPGARALYDQHRDAKESHHQALRAVGNRLVGILHGCVRHHTPYNEHTAWAHRTQAAA

SEQ ID NO: 483450 - protein, 384 aa, unidentified
MQRSNLAPVFLNRNQIENRDCSPIIKVLISSKTRLIYSHFKCFKSMSKLFKNFVGIDISKTWFDAALIKDDDSSVVIHERFSQKPDGFIQMQNWLQKLEVLPDEQTLFCMEYTGIYNTGLVHYLVKAKAALWVEMPLRIKKAGGFERGTDDKAASVKIALYALRYKDQVKLWQPIDSNIESIKNLIAQRDRIVNAIILLTVPVNELKDCGCAETAKTLEKLQRAPVAALQKSKLSVEALIAKTIQQDEQLNTKVKRVASIKGIGQVTSVALMVYTKGFTAFENGKQLACYCGVVPFTKSSGTSVRYKSTVSPFANMKLKKLLHLCAMSAIQNDAEMKAYFERKVKEGKNKMSVINAVRNKLIHRVFAVIRDERNYENNYVRNCA

SEQ ID NO: 483451 - protein, 353 aa, unidentified
MAYNVKDYDVFIGIDVDQKSYSFTVMEQEQINRSCKIPATPENLYKYIKNMYNDKRVICAYETGGTGYRLHDYLASRQIYCLMVPPLSIPKAGNDRIKNNRLDSEKIAQHLKNGDMSPIRVPDYEYRELRQLIRSREDYAESGKITKQRIKALLLFAYLYPLIKDPSQNWSNRYIQELKVLPTTPATRHRLDMLLMDLEYSRNQKLRVIKELKSLCKQNACLEKNINYLRSIPGIGFIIAATILANIGDPGQLRNVRELAAFAGLVPSEHSTGDRVLKGHITHLGNNALRSLLIESAWIIIRKNTRLKQFYGRIRAKHHPSIGPRKAIVAVARKLTMIIYKVLKEQREFIDYQ

SEQ ID NO: 483452 - protein, 339 aa, unidentified
MKYTPVGVDIAKHLIQVHFIDEHTGEVVDKQLRRQDFQTFFSNREPCLIGMEACGGSQHWTRELKKLGHEVRLLQARFVKAFVMGNKNDVMDARAIWMAVQQPGKEIAVKTEEQQSVLVLHRTRMQLVKFRTAQINALHGTLLEFGETIHKGRAAMDRELPAALERMRTKLPPYLIVLLEDQYTRLSELDSLIEGIEKQLISVAKQSETCKRLMKIPGVGPLIATAAVATMGEASAFKSGREFAAYVGLVPKQTGSGGKVRLLGISKRGDTYLRTLFIHGARAASLVAKEPGPWITELKKRRPTGVAIVAMANKLARTVWAIVAHDRKYDKNHVSIRPY

SEQ ID NO: 483453 - protein, 406 aa, unidentified
MELTTLHKRVVGLDVHQAQITACAIVEDESGQPRIEQRQFGTFKRDRRALAEWVVQLRAELVVMESTGIYWKSPYAALEATGIKTLVVNAKHVKNVPGRKTDIGDAQWLATLARAGLLRGSFIPPAQLRELRLISRQRQKLVGQLAAEKNRLHKVLTDSGIRLGVVVSDVHGTAARRMVKALIVGAPVHEILDLASKRFKASREELFDALQGDLTPSHRFVLGELMQHIEEIEARICRFDQRLLAGMVEQRNAMALLQTLPGVDVIGAAMLLVEIGTDMTAFGSPDRLASWVGVCPGNNQSAGKRKSGRVGKGNPYVRRLLCEFAHSASRTTCVFKSKFQALLIRRGHKRSIIAIAHKLLRTIFFMLQRGQYYRDSATNYEELSVKKNAPRWIKSLLKFGLIPQPA

SEQ ID NO: 483454 - protein, 349 aa, unidentified
MYYIGMNIHKKDTQASVLNEKGKFVHGERIRTDVVDIGHFFEKIERMNDDGLSVVIEATGFYFWIYDVIAGRGHQVKVVHPNRAKALMKARSKTDRNDAFMLAQLLQLGGLEGIYVPSKDVRELRDLTRHRESLVRKKGDLKREIIGSLDQHGIKVPAEFKTNFSNKFNEHVRKLDVFIINEKLDLLVTTIEKLKNVEAVIEERYGKDDEVELMMTMPGIGIVTASVLKGEIGDIGRFQSFGNLATYAGLTPSRSQSGEKEWFGPTGHGNDRIKHVLIEATLSHVHHKTIRRSRTSTKGRRGRWARTRSWWPPPGRCWRRSTSCCIVRKRITLTDVDHRRTHPPRSALS

SEQ ID NO: 483455 - protein, 359 aa, unidentified
MKREENNNTSFFENILLFIGIDVHKLKWVVTIRTYDLELKTFSMKPSAEELERFLIKNYPGADYRIVYECCFSGFWIYDYFSEKGYKIIVTPTNRIYKDGSTIKTDKIDSRKLALQLSREMLKEVVVPAKRIREYKYIFRIYDKQKIRQGQILRQIKAFLEQKNHPLKWSKWNKGLLGKLKEIKFEDKLFDLKFGNLLKEYEYIVEQIKDSEKIIERIKEDEELGRRIQILEKINGIGIISAVRMCLYLFDRKDKFESSERLNHYLGLTPSERSSGDKITRGRSGMCGNRQLRSIIIQLAWMTVRKDGALLDKFDRVYKKSGSKQKAIVAVARKLMTKIYAVIQKEEEYRINIRSCKAA

SEQ ID NO: 483456 - protein, 411 aa, unidentified
MDVVNARCAGLDVHKATVVAGVRVPGPQPGARRGETKTFATTTRGLRDLTNWLLTHGVTDVAMESTGVYWRPVYAALEGLVQVVLVNARHVKMVPGRKTDVKDCEWLAQLLECGLLRGSFVPPRAVRDLRDLTRLRKALIRERGHHVNRIEKTLELAQIKIGGVVTDLMGKTGRAILEALSAGIDDPDQLAEYAQGLLRKKRAALREALVGRLTPHYAFLLQQHLSLIEALDAHLATLQARIETAMVPFADTAALVQTMPGVAARAAQAILAETGVDMSCFPTPAHFASWARLCPGNHESAGKRQNTTTGKGATWLRATLQETAWAAVRSKKSYYRTLYYRLKARRGAKKAIVAVQHAMIVALWHMLKHRVAHHDLGADYFERRNTARIRRHHIRRLERLGYDVVITERAA

SEQ ID NO: 483457 - protein, 400 aa, unidentified
MINFYFLFFIKFRHSKNELTITNDRPGFIQLLHELAAFSKHPQIIFEATGVYSRRLQAFLEDYGYEYVILNPLKAKKEMDMGLRHNKTDKTDAYHLALIQRLYHHPINQLQSQTYKQLNALSRFYDQLTADLVMAKNRLHQALQSTFPEIENLFSSAKGKNYWQIVVRYPHCDLVRREDKKQLINWLMSLKGIAFKHALRTADKLIELAYQAYPVVSCSSIEVEQVQYYAHRLLNLSDQRENLIARMVKLAKSLPNHDLENLESIPGFAQTTAVRVLAELGDLRRFSNPNKINAFIGIDPGRYQSGEMDSNLSITKHGNAVARKLLYRAIGQIDNAAKTNPCHIADYYESKKLSSQTKGFKKIAIASIHKLIRTIYALIINDQPYDYNVATHNQKDFSRN

SEQ ID NO: 483458 - protein, 324 aa, unidentified
MIDGILGIDVCKNTLDVSISSYTKVRTKSFTNSPDGWRHLLDWLIAQKIQRVHACLESTGRYSLGIACALYEADHVVSIINPAQIRDFVRTKLGRNKTDGVDASHIREYCELFKPSPWAPPSEAHRRLGELQTIRSGIIAGLTEWKNRKNSGIVDAEAQALADATISHFTSQLGAVDKAIALTIDNDCDLQSKRDLLLSISGVGETLAGVVLAELPGPDVLRSSAEVVAYAGLNPRRHQSGTCIDRATRISKIGNAVLRAALYMPALSAMRYNSAIVALVTRLKSRGRLKSKQIVVAAMRKLLVLCFGVLKTGRPFDAAIAMGG

SEQ ID NO: 483459 - protein, 434 aa, unidentified
MPRRLAPVRAARTMNTNWTQHLHFAALDWASDHHDVVIVDRNGAIVAEFRFAHSAAGWTEFTEKTKAFTGAPFTLETSSGPAVDQLLQRGIVIYPLTPGAAKRYRERKAPSGTKSDRHDTWAMADALRTDGHAWRVLRPQDEATAVLRALCRDEISLIEQRTLLVNQLQAALREYYPAALEAFDDWTARGTWAFLQQFPTPLELQQAGKKKWEKFLHIHKLWRPQTREQRLAIFAAANALPANTAVVSAKSLLAVSLAKVLVTLQHQIDQYRERIGQAFRVHPDHDIFGGLPGAKEVLAPRLLAELGSIRDEYPDADSLMCQAGPSPVSYQSGLINRCRLRRACNKVLRFTVHLWADASRKTCAWARIYYARKRSEGHTHASALRCLGKRWLKILWRMWVDKKPYDEALHLKNLERRGSKVWAELCGATRSSCE

SEQ ID NO: 483460 - protein, 414 aa, unidentified
MQVIYERCAAVDVGKDVIAVAVRKPGDGPGGRVTVRRTYKTFYGVLREAARWLMAEGVTHVAMEATGIYSMPVYHALIEHGDFEKVLVCNAGHVKNVPGRKTDMADAEWLAQLLECGLLAGSFIPPAEVKAARDVIRYRAKIAQQRVSEISRLGNVLQDAGIKLDSVAWSVSTKSGRLMIEALIDGERRGAVLADLAIGRMRSKIADLSMALEGRFGNHHAMLCRLHLDHLDHLDGMLAKLDAQIEAMMQPFRAARDLLTTIPGIGQLSAAAVISEIGTDVRGYFPDAAHLASWAGLCPGNHESAGKHRPGKRRKGNQHLQPVLVECAWAAVRHEGYLKSLYHRHVMKWGGYRSSVAKTKAIIVVAHAILVIIWHVLATGKPYDELGSDYFTRRHRQARGPRPPRHPRGRRRLT

SEQ ID NO: 483461 - protein, 375 aa, unidentified
MKMMQHRQLRYIGLDVHRATIAVAIAEEEGSPSSYGTITNDPDAVRKLMRQLGGKDVELRVGYEAGPTGYALHRQLTKLRIACMVVAPSLIPVRPGDKVKTDRRDALKLARLLRSGDLTAVWVPDREHEALRNLVRARADAKSDELRAKHRLNKFLLRLGIQPPVGMRNWSQRYFQWLRKVELEHLADRVVFADYLAEVTAAGERIKRLEAALRECAASSEQVALIHALQAFRGIGFLSAVSIVAEAGDLHRFRTAPQFMAYVGAVPSESSSGSKQHRGSITKTGNSLLRHVFGEAAHHARHAPRVGVTLKHRQLEVPPPIIELAWRAQLRLHSRYRHLSARIGTHKTLTAVARELAGFVWAVSRVLDEQVPAAA

SEQ ID NO: 483462 - protein, 380 aa, unidentified
MVTNIKYSVGFDVSKEEVEVCLSVINSMQEVKIKASRKSKSTISSFKELKQWIEKHLKEKLPVTVTMEATGVYYEELAMFLFNNGFYVSVVLPNKAKKYAQAKGFKSKNDKIDAKGLSYMGAEQCLARWEPFSENIYELRALTRQNEDLQIQRTMILNRMEALKCSGYKNRFIEKQELKILKLINQQVEEVNEQIEKTVREDEVLNNKINKICKVKGLGILTVATIVAETNGFKLFRNQRQLTSYAGYDVVENQSGKRVGKTRISKKGNSHIRRALHMPALNMVRYEQLGYKELYERIYLKTGIKMKGYVAIQRKLLVLIYALWKKDEEYDPNYLKRGMDKTSGDDESKSLFSLNFGEVAKKIGDIKSPTLDKLPYDESP

SEQ ID NO: 483463 - protein, 354 aa, unidentified
MFIGLDVHARSVAAALLDGTTGELRSAAAPARTAELVPWLQAQGSAPCVAYEAGPTGFGLARACEAAGIPCLVAAPSRIPRAAADRVKTDRRDALRLAKLLRLGELVAVRVPSAAEEAARDLVRAREDARTDLMRARHRISKLLLRHDLLWEGRAWTQAHERWLAEQRFAARGLRIAYEESLAAMYAVQARREALDAAIAEEAAREPWVGIVGRLCCLRGVSVLTAFGLAVEIGDWQRFDGRSIGAYLGLVPRESSSGERRSLGAITKAGNTHARRLLVEAAWHHRRPLRQSRELARRRAGQSPLVRQRAEAASRRLHRRWAAFDSRGKRSTVAAVAVARELAGWCWSLATMAD

SEQ ID NO: 483464 - protein, 344 aa, unidentified
MMTYAALDVSQEATAICVVDESGRVTAEKKVTTCPEVIGTWLGKHAPGLVRVGMETGPLAVWLWNELHERGVPIICLDARHAHAALKMRPNKTDRNDAAGLAQIVRTGWFKQIRIKGRDSYEIRSLLTAREVLVRIRVKLENEIRGLLRTFGVLFGKAAGGFARRADEIVTGELDASPSMRLVVETLMQARAAILERIKVLDRQVLATAKRNSTARLFMSAPGVGAITALSVASAFDDAARFRYSSSAGAYLGLTPRRYESGEVRRNGHISKHGNSMTRKHLYEAAPTLLTRTTAFSSLKAWGLRLAQTSGFKKARVAVARKLPAILHAMWKPHTVLRWSKETA

SEQ ID NO: 483465 - protein, 370 aa, unidentified
MQVTFGIDVSKSTSTVCELIGESKNELTITNNRPGFIQLLHELTAFSKHPQIIFEATGVYSRRLQAFLEDYGYDYVILNPLKAKKEMDMGLRHNKTDKTDAYHLALIQRLYHHPINQLQSQTYKQLNSLSRFYNQLTADLVMAKNRLHQALQSTFPEIENLFSAAKGKNYWQIVVRYPHCDLVRREDKKQLINWLMSLKGIAFKHALRTADKLIELAYQAYPVVSCSSIEVEQVQYYAHRLLNLSDQRENLIARMVKLAKSLPNHDLENLESIPGFAQTTAVRVLAELGDLRRFSNPNKINAFIGIDPGRYQSGEMESNLSITKHGNAVARKLLYRAIGQIDNAAKTNPCHIADYYESKKLSSQTKGSKR

SEQ ID NO: 483466 - protein, 412 aa, unidentified
MEVIYPCCCGLDVHKKSITACVLRAEAKGKSRKEKKRFGTFTHDLLQLADWLEQCGVTHAAMESTGVYWKPVWNILAEQFEVLLVNAQHIKAVPGRKTDQKDSEWIADLLQHGLLRGSFVPPQPIRELRDLTRYRVSLVQEINRIANRIQKVLEDANIKLASVATDALGASGRAILQAMLGGEQDAARLAEMSKGLLRNKIPELRLALEGRMTEHHRFLLRQLFEHLRFTESKRSEIEQEIDKRMRPFQDKVTRLCTIPGVDRVTAWGMLAEIGMNMNQFPSSEHLASWACLCPGSFESAGKRLSGKMRKGNVSLRRCLAQAAWAISMMKNNYLSALYRRIAARRGAKRAVMAVAHALLVIAYHMLKRKEDYRELGADHFDRIDVNRIRRSLVRRLERLGHKVTLEPLAQTV

SEQ ID NO: 483467 - protein, 405 aa, unidentified
MNAVGIDASKGKSMVTILRPFGEIVLSPHEVRHTSDQIDDLIHEIRSLEGDTRIVMEYTGRYHEPMARWLSDAGLFVSLVNPKLIKDFDNDSLRKVKTDKADSVKIARYTLDKWNKLKQYGFMDELRNQLKTMNRQFGYYTKLKTAMKNNLISLLDQTFPGANTFFDSPARDDGSQKWVDFVDTYWHVDRIRSMSLSAFTDHYQKWCSRKGYNFQPNKPAEIYEAIRNIIPVLPKDAMTKFIIRQAVNQVNTASAAVEELRTRMNDIASQLPEYPVVLAMKGVGTSLGPQLIAEIGDVTRFNHKGALTAFAGVDPGKNESGSYAQKSVRTSKRGSAPLRKTLFQVMDCLIKTAPQGDPVYEFMNKKRSQGKPYYVYMTAGANKLLRVYYGRVKEYLAEHPETAEN

SEQ ID NO: 483468 - protein, 376 aa, unidentified
MERGSLMLNTTTFVGLDVHARSIKAVALDAMTGEVRSATFGYDAAEVAGWVSSVDPSAKCVYESGVTGFDLQKRLSSMGIDCVVGAVSKMIKPSADRRRKNDRNDAEFLARMLSVGNVVEVWVPDDECEAARDLTRALDDAREDLKRCKQRLSKFLLRHGLVFSETNAKGQRKKNWTAAHWAWIRSISFPDKADDEVLAYYIDAVRQAMENKKRLEKLVEAEASKPRWKKRVDSLRCLKGVDAMTAADIVFEAGEFSRFKNARSFAAWIGLTPSEHSSGESVRQGGITKAGNKHLRRVLVEAARHYISASPHPKDLAKGQAPDPAARRHAAKGIRRLVKRREEMLGRGVHKNKANVATARELACWCWAIGRMVENG

SEQ ID NO: 483469 - protein, 369 aa, unidentified
MAEVKEAFVGIDVAKLRNAVAVADAGRDGEVRYFGEVDASPDSMRRLAAKLTAKYDQLTFCYEAGPTGYGLYWLFTELGHTCIVVAPSLIPKKPSDRVKTNRRDALSLARLLRAGELTAVWVPDPAHEAMRNLVRARAATVKDVGLKKRQVSAFLLRHSRVFPRKKNWGARYRGWLQTQSFDHVADQIVLQESIEAVRIAEERLVRIERAIDEFLPAWSLAPLVEALQALRGVDLVTAVTFVVEVGDIRRFESPRQLMGYLGLVPGERSTGDSVRRGSITKMGNARLRHLLVESAWTYRHPPRVGKAKLPKLERVSPKVREIAWTAQSRLTARYRALTARGKKTTVTCTAIARELAAFMWAVAREARPA

SEQ ID NO: 483470 - protein, 405 aa, unidentified
MWYAGIDWSDQHHEVVVIDEQGQRVASCRVPHTPEGVAELTTFLHQTLGTAPAAQELACLIETTHGLLITALLDAGFAVYPVNPKTVDRRRKPSGAKTDAIDAYLLAKTGRSDLADLRRLTPDSPLVQELKALTRDQDGLIQMQTRLVNQLTACLKAYYPVALSLFTKLQQPLTLAFLQTYPTLEAARGASVAQLAELLQQHHHPTASTTAQTLHARLQQPQLEADPITTRTKSRLLLALVSQLAPLLDQIQRYDAEITRLFLQHPDSVSFSSLPRAGKRLAPRLLAGWGDERERYGSAASVQALAGTSPVAYESGKYAKAHRRYACVKAFRNALYQFAWQSTFAEAWAEAYYRRKRAEGKSHSMAVRALANGWVRIIQAMWLQRLPYAASTFLAAQQAHAGQVA

SEQ ID NO: 483471 - protein, 423 aa, unidentified
MPLSGLLGLPPKVKAFRLGQALDWAAAQAKVKGFAHVTVACEPTGPRWMQVQRLCAERGLSLVCIQPLVSHIAREQQDYTTHKTDEADCVMIARLAVELHCYLPEQLDETWVHLRHLGRRRNQLITAATASVQRIRDFLSVAWPVVTETCAGPFESVTWLAAMQVVTSRCGAQPGKLAEPGLEAFTVLVRGAVPGWGGRRPSGRVCRAMFAALTDTEGAVVSHRRGLLRRCADELGDLQRTRAQLRAVEADMVAVLAELGLARLADIRGLTAVGAAAILAETGDPRRYDSSSSLVKHAGLSPSDNASGAFRGEAHISRRGRPGLRLTVWRAVWPLLIHNPVLAAKYQAMTQAADTAAAAAAAPAEAGSRQVSAAAAAARARRAKARVACAASLLRWIYSLVIHGTGWDPAVASGTASRPAQAA

SEQ ID NO: 483472 - protein, 316 aa, unidentified
MLYVGIDVAKNKHDVTALNVPGKTVLKPLTFSNNKAGFELLDLSFRQLNQDCLIALEDTGHYAFNLLNFLHEQGYKVYTYTPLLIKEFAKSLSLRKTKTDKKDAHGIALKLLSDPNREQFQHDNRQVELKILARHIHRLKKKQSDWKVQYTRCLDIIFPELDKIVGKHSEYTYQLLTCYPNPQKRLEAGFDKLIEIKRLTASKIQDILSVAPRSIGTTSPAREFEIIEIIKHYKRLIDKAETCVNDLMAEFNSVITTVTGIGGRLGAVILAEIRNIHAFDNPAQLQAFAGLDSSIYQSGQIDLAGRMVKRGSPHLR

SEQ ID NO: 483473 - protein, 409 aa, unidentified
MELTPIYKRVIGLDVHQAQISACAIVEQADGSSTLERREFGGFKRDRKALAEWARGIGPDVVVMESTGIYWKSPYAALESVGIVAWVVNARHVKAVPGRKTDVADAQWLATLARAGLLRASFIAKADLRSLRHIARQRQKLGGMLASEKNRLHKLLTDAGIRLGVVVSDLHGQSARAMVKALIAGKTVPEVLSLASNRLRASREDIFEALQAEEITPAHRFVLTEIMAHIEELEQRIARFDAELLRSLVGAGYEAALRLLQTLPGIDLIGAAMLLVEIGSDMSVFGSAQRLASWVGMCPGNNESAGKRKSGRIRKGNAWVRRLLCEFAQAAARSRCAFKGKFQALNVRKGHKRSTVALGHKMLRTIYAMLSKNTHYVDKTVDYEALMVARNAPRWLQMLTKHGFVPTPA

SEQ ID NO: 483474 - protein, 373 aa, unidentified
MPKYSTAFGMDVHLRSTTVCALDADTGEAVTRRFPGNPWGEIAGWMDGFPGPSLAAYESGYLGFAPQRELAGLGVECVVAAVSKIPRSAADSASKNDRNDAARMAKAILAHDISPVWVPSPEVEGIRDLAGAYDGATARLATAKQRLLAFLAKRGFVYGGTTPAGNPRKYWTYDFLRWLDKVRPEDDGGVRTLAALRNEVEAAAEARADLLSEYRAAVDASPIAAEVAALQSIKGCAFALAAAFSAEVGDFTRFRSGRQVTAYFGLAPSQRSSGDSVRLGGISGAGNALVRKLAVEGSWCYAAARHQPKLMPRDTGVPLEIRMHGRKGSERLLRRREEMLARGVPAAKANAATAAELVRWLWALGMMCREGAE

SEQ ID NO: 483475 - protein, 410 aa, unidentified
MEVLYPHCAGLDVHKETVVACVRHMAEGKINTEVKTFQTTTGGLLELSAWLAGEGTTHIAMEATGVYWKPVWHILSDGEFHLVLANAAHVKNVPGRKTDVKDAEWLADLMAHGLIRPSFVPDEPTQQMRDLLRTRKQLVRERTSHAQRIQKTLEDANIKLDSVISDVLGVSGRSILAELIKGETAPQVLAARASSRIKASSKQLEASLRGRVTKHHRFLLKLHLDHIDALDAAIASIDQEVDGNVESFRQAAQLLSDIPGLGPLAVLIVLSEIGLDMSRFPSAAHLVSWAGLCPRNDESAGKRRSSRMRQGAPWLKTILVQCAWAAARTKGSYFQAQYQRLRSRRGSKKAVCAVAASLLTTIYHMLKNGTLYQDLGPDHFDQRAKQKHVVRLISKLENLGYDVQIAPRAA

SEQ ID NO: 483476 - protein, 349 aa, unidentified
MNIKRIGIDLAKTVFQLHGVDSHEQPVLRKKLKREQMLSFFRTIEPCLIGMEAFSGAHYWARELQKLGHTVKLMAPQFVKPYVKANKNDAKDAEAICEAVSRPTMRFVTIKTIAQQDLQASHRIRKELVGQRTAKVNQIRGLLAEYGIVVGQAIEVLRKALPCLLEDAENGLSADFRILLKGLQEDLLALDERVAELDKRIHTLAHTHEDAKRLLQIPGVGPLTATAIISAVGDGSQFKRGRDLAAWIGLTPRQNSSGGKEQLLGISKRGDHYLRTLLIHGGRSVLRMAGSKDDLRSRWLTGISERRHKNIDAVALANKNARIIWALLTQKTDYEQKAGELSFGESVCA

SEQ ID NO: 483477 - protein, 400 aa, unidentified
MDERQQFRWFLGIDVSKETFDACCIPSRGERLFNLSASMDRKGFEELIKQLSALSIPRESVLVGMESTACYHVTLYSFLISLGYTVMVMNPLLISNFVKLQLRKTKTDKKDASVIAQFLLLNRDSFCQTLVSSDFSELRELSRQRESLVDQMSSIKSEIKRLLTVTFPELEQMAGVFTKSMLRLLSHYPSANSIRQLKRSQIAKILIPGSYGKQTAVSVERIIRGAQESIGTTSPAKEIVLKQKVSLLMQLEQHLQELTDILKELCQAKIQENTRILTSMKGIGEKSAMNFLIEMGGDIKDFERHQKLIAMAGLDPALYQSGKIDRKGKISKRGNRHLRRVIWLMTTKVIQFNERFKQYYLKRIKDGLPYKKAVLATAHKLIRVMFAMLTNRTLFDPRMN

SEQ ID NO: 483478 - protein, 398 aa, unidentified
MDLPVYYELETNNGNRDYRIQIGGHYMNYNTVYVGMDVHKESFTLCSCKYEDEKASHYQRTPASYKNVLRYLAFLRTIYGEDTRFVCGYEAGCLGYSLYHQLENFNVECVILAPTTMLEQRSKRRIKTDKRDAEIIARSLAQHNYSPVHIPTETDNQTKEFIRMRDDHKAELKKIKQQILSFCLRQGYQYDGSGNWTEKHVKWLRSLKPVGLYKEILDEYLLTYTILTDKLNRLDQRIEELASKEEYKESVSKLTCFLGIKTHTALSVIVEVGDFQRFVSARKFAGYLGLVPGQHSSGDDRNGLGITKAGNTHVRRLLVESAQSYTRGKIGYKSRVLRSRQAGNSPQVINYADRANERLRRRYYKMVLKDGKKYNIAKTAIARELACFIWGMMTDNIY

SEQ ID NO: 483479 - protein, 341 aa, unidentified
MNVTTIGIDLAKTVFSIHGTNQHGKVVVRKRLNRPKLLAFFAQLPPCLIGMEACSGAHYWARELTKLGHDARIIAPRFVAPYRKSSKNDDNDAEAICEAVSRPNMRFVPIKTEDQQAVLCLHRIRRGLTKERTAQINQIRGLLAEFGLIIPQGRYHARHRIPEILEDAENGLPMLARRLLNNINQRILQLDEEILAYDREIEAMARRDEQAKRLMAIPGIGPQTATAILASAPDPRQFKSGRHFAAWLGLVPRQYSTGGKPRLGRITKRGDKYLRTLLIHGTRAVIAKLADKHDQLSKWAKGLVERRGYKRAAVALAAKNARIIWALLMNQTEFKTQPVEG

SEQ ID NO: 483480 - protein, 415 aa, unidentified
MATTVARDEVLYLRAAGVDVGKRFVLACVRVPDPKRAGRWVVETERFDTTAEAVRGLRDWLAERAVEVVALEATSDYWRAVYYPLQDAGLNLMLVNPSHLRGIKGRKTDPSDAAFLARAAASGMVMASFVPDRAVRELRELTRRRTEVRADRGREIQRLEKELEDTGMKLTSVLTDLTGVSSRRILDALIDGERDRAHLADLTVGRARAKIPALIDALDGTFTAHHAFMCRHFLAQIDHLAAMIAELDTRIEAILRDRDQDTIPGIGRTTAEIIISETGGDMTPFATAGHLASWIGVCPGTNESAGVNKSGHTRHGNANLKRVLGTAAMAAVKQKDSYYAVYYRRIAARRGKQRALVAVMHKLVIAIWHVLHDHTVHRELGADYFARRDPQRTMRQITRQANAIGLTVRFDPIGA

SEQ ID NO: 483481 - protein, 420 aa, unidentified
MRNAGIHADSLLEVRRMYNAVGIDVSKGKSTIAVLQPGGTVIRKPFDVSHTSQSLIELAHYLGSLEGSTKIVMECTGRYHEPMLKALYEAGLFVSVVNPHLIKNFGNNSLRRVKSDPADARRIARYTLDNWAELRQYSGMDNTRTQLKTLNSQFSFFMKQKVAAKANLIALLDNTYPGVNKLFDSPPREDGSEKWVDYAYSFWHVDCVRRIGLKTFTERYRAFCRKHHYIFQPDKPEKLFHASKELVAVFPKEKTYKLLIQQSIQQLNLASGHVERLRQEMNALASTLPEYSTVMGIYGVGKTYGPQLIAEIGDVSRFTHREALTAFAGVDPGVDESGQHKSKSNRASKVGSARLRKTLFQIMTTLLQNAPEDDPVYRFLDKKRAQGKPYYVYMTAGANKFLRIYYGKVKECLRNLEQAE

SEQ ID NO: 483482 - protein, 350 aa, unidentified
MNYVGVDIHKRYSFVSATDEQGHRVREARIEGNAPSAFAQFFAGLDGSSKVVLEACWNWGLLHDVLDELEPVEEIVLAHPFKTRLIADAQIKTDRLDARALATLLRGNLVARVHIPSPQTRQRKNLLRQRLYWARLRTMLRNRIHALLDRQRGLALPQCSDIFGVKGLNFLRSLQLPEPDGALLAEQLALHDLIAQQMRAQEKRIVAETRTDPIVQRLQSIPGVGKVLAVVLAAEIDTITRFPSAERLCAYAGVVPTTHASGGKIHHGRLLPWCNKWLQWALVEAAWIAVGCSGYFGGVYRQHRQRGKPANKAITIVARRMCRIVWTLLREERDYEERANLISPAAPAKD

SEQ ID NO: 483483 - protein, 413 aa, unidentified
MTNDQQITKERVFVALDIAKGSHDAAIQLVSGKRLNIKIPNTQDGYQTLIQRCGVPEALIDVGFEPTADYHRNIAYWLAEAGCSCYLVSSLSCARAREMLHNTWDKNDRKDANVVLYLMKQGIAEPFHDPLVHGVMDIQELSNTYHQLQKARTRLLNSLFNHYVALYFPEMEQYFNSSRAEWFCRFMLKFPTPASVCRYRKPTFIKRAWDVVGRKVNKESFLSHLYDQASQSIGLPVAVDSVAVETFKLQITRFAELTDQRTKLERQADGFLSNRADYQRLRSIPGIGPILAMMIIAESGDLCRFKHYRQYLSFCGFNLAAQQSGLSKGQYRLSKRGNSRLRYAFWLAATQAINGKENSFREKFRRYISKDPDNKDLRRKARTAVAAKMARVAHALVKSDRDYQGYYEFSRGT

SEQ ID NO: 483484 - protein, 416 aa, unidentified
MKIVRPICCGMDVHKNIIVATIGITNKKTRITEYIQETFSTLNPDLLNLKQWLINHKCFDACMESTGKYWIPIFNILEDEINIYLTHPKYVKAIKGKKTDKKDSKWICDLFKHDLIKFSFIPPKEIRALREISRYRYKLVGMRSSERNRYQNCMTVSNIGIGSVFSDPFGKSAQAIMKEVLESDIIEDEKILKCIHGSCKNKDKILDSIKHCNIETDQRFKMNESMTHMEELQVHIDNCEIEMMKRAAPMFDQFMHITQLPGISTLSAILIISEIGVDMKQFESDKQLTCWAGLAPANNESANKKKSVRISKAGQYLKPLLVQCALGAIKDKEGYFGIKYSRIKKRRGHKKAIIAIARMMLVSIYHMILTGEAFNPSDYESFRNPKPPIKQQDLTEESAIEFLKKSGFDVSKLTKP

SEQ ID NO: 483485 - protein, 355 aa, unidentified
MDQPTTTASPLPVTLGLDLGLRRTQVCAIDSSGAIIEERAVATSRDAISELLERFPKSRIVLEASTSARWITALAESSGHEVIVANPRNIPVVTANVRKCDRNDARLLAELGQVKPQLLSPVQLRSDRHQRVRTLLFARSQLVKQRTALTNLVRSEVRVLGFSLPSGAAKSFAEKMWPRIPGALRSSLGPIFEVLRTVTTQIDHYDAEVVRLSETEFPETAVLRQVHGVGPLIALAFVATIGDPERFKKSRSVGAYLGLVPRMSQSGARNPTLSITKCGDHFMRSLLVSAATRILGPFGQDSDLRRHGERIATGGDKRAKAKARIAVARRLAVLLHRLLCTGEQYDPLRQAAPAA

SEQ ID NO: 483486 - protein, 394 aa, unidentified
MRFVGIDIAAETHVVAVVDESSALVVKPTPFGEDAAGYATLRALLGAPEDVLVAMEATGHYWQNLFAVLVAEGFAVALLNPMRTRRFAGEDLARAKTDAIDAVGIARFAAQKRPAVTRLPEAATQELRELVRLRDRLRQEFGDRTRQLHRLVDLGFPEFTRVIPDLKGRLATGLLAAYPTAAAFRGVSVLRLAALRADGTHRVGAALARALLEAARESVGQHHGPAYQLQVRYLCEDLELLRRRIEALEQDVATTLQTHEVGMLLTTITGIGVQTAARLVGELGDPARFRSAAALAAYVGVVPGTRESGKRRLTHARLAPTGHARLRAALWMPTLVAVRTNPWLRAYYARLRARGKLPKVALIAALHKLLLAIYSVAKHRRPFVPHLTVQGVEA

SEQ ID NO: 483487 - protein, 354 aa, unidentified
MSGDFKYMGMDVHKESISIAVMNGAGKFVMESTIETKAATILQVIHGLQGDLYVTFEEGTWAAWLYDLLQQHVTEVVVCNPRKNALLKSGNKSDRIDARKLAELLRNGSLSGVYHGENGIRTLKELARSYLTISKDLTRVMNRIKALYRSWAIPCEGTSVYAPRHRSEWLNKIPHAGVRRRAEYFYGQLDGLNALRREVRRDLLTESQKHRAAKLLRQIPSIGPIRAALLIALIQTPYRFRTKRQLWAYSGLAIETHDSAQYRYVAGQRQRSKKPQQLRGLNENHNHDLKAIFKGAATSSSDGPFHDFYQGLLMKGMRPSMARLTLARKIAAITLIIWKKGEQFDAEQLKPQAA

SEQ ID NO: 483488 - protein, 407 aa, unidentified
MERPAPDLQTVDYAASRERPWRRATYKWEPAVKNVRFVGLDVHAETIAVAIAELNGEVRSLGVIPNRAESVGRLMRKLGKPEQLRVCYEAGPTGYVLYWQLAQLGVHCEVVAPTLVPVKSGDRVKTDRRDAEKLARCYRGGDLTRVWVPDAAHEALRDLVRARLAAKRDQLRARHRLGKFLLRQGRRAPEGTTSWTGKYLGWVKQQHFEQAAQEVTLLDYLHEVEHVAERIMRLERGIDAAVNSMPESVRTVIAGLQCLRGVAKVSAVTLVSELGQISRFAHARQLMGYAGMVSREHSSGERIRRGSISKAGNAHLRRIVTEAAWSYRHRPNIGKTLATRQCGSSETVKAIAWRAQHRLHARYRALLARSKTKQKVITALGRELLGFIWAIGVELERAQHQQVRRAA

SEQ ID NO: 483489 - protein, 480 aa, unidentified
MAHPTKSPPDLQAVPMLKYESLYVGIDVGKQRHVAGFVSTTLLERHQRFEACPALAFEQSREGFRSLMERIRSYVPLEQVSVLLEQTGHYHRTLVQYLQEFDIPVYIMPVQKRPPGMLKTDKRDALSLANHLFNQLERGIQLADKTHLVRRLLTPTETALQLQGWMRHRYELVQECTRRKNKLTAICDELFPELTQVLKDPNLPTALALREHFPTPHALATAPFSALIALRAKSRPTLGQLEHLQQVASQSIGTKEMTRQRGLVLEQSQLIRELRMLQEHIEQLDTEIRRSIEQSREGKILTSIPGIGSIQAAAIIAAMGNVLNFERASRLKAYFGWAPQEERSGTSLDRVHLTHRGTRSMKQMLFLCVASAIQLDCEWARLYNRLVPKKCPYDERTQRYRGKVKVMGRIAGQMIEMIYALLKQDAEILSQLAPGETPPDPILYDPEVHKRHRNGEYGPIKNVPSQRKVIRLPGRVLPKQ

SEQ ID NO: 483490 - protein, 323 aa, unidentified
MTITTIGIDIAKSVFQLHGVDEAGTVVLRKKLRRSAVLDTLRDLAPCLVGMEACATAHYWAREISALGHEVKLMPPAYVKPYVKRGKNDKADAEAICEAVTRPTMRFVPVKSAERQGVLVLHRTRDLLMRQRTMLLNAVRGHLVEFGIIAPQGPCKVMEMITNLREIEAPGLPEITRSVVLSLGLQRDALAREIHAQERQLLAWHRQDTASQRLETRPGVGIITGTALAASVPDPSMFRSGRQFAAFLGLMPRQNSSGGKDRLGHISKMGDGYLRRLLVVGATSVIRRAETNPSATGVLVRSLLTRKPVRVTTVAIALSLIHI

SEQ ID NO: 483491 - protein, 410 aa, unidentified
MGELGRAVALDVHRDFCEIMVCEEGKVRSGGRVDTTPEALEVLAASLQPSDRVVLEVTGGAWAIVRILEPHVAKVIVVSPADTGITQARAKTDRLDARTLARLLWAGELEGVWPPDELTRLLRRRLARREQLVRARSRAKNEIHAVLMRCLIGKPPMSDLFGVAGRKWLRQLELPVEECETVEACMRHIEFLDTEIAEVERVVARYALSCSDARRLMSVPGVNVICAATFLAAIGDIHRFKTSRELVGYLGLDPRVRQSGSSPAKGGRISKRGSGSVRWALVEAAQSVVHQPGAMRAFYERLRARRGHQIAVVAVARKLAVLFWCLLSREEQYAHQQPSLTAKKMRLLEIQGGAPTRKGTPTGVWATREKMREAEKALAMQAEASYVRTVRDWQAAAPKRVGASVTPERA

SEQ ID NO: 483492 - protein, 388 aa, unidentified
MANNAAPARRAVLGLDVGKASHWACILTRDGEVAVSRPVANSEHELDRLFSQVGEGTLVVVDQARNIGALPISRARRAGLDVACLPGIAAHQASRMFAGDAKTDERDAHVIARTAMGLPDAPLPVPERDGNLEAARSLASQRDHMMTCATRDKNRLRSILLESCPAFEALVDPSDPRWLRVHARLGGAWGVADAGRASLSALMQDAGGPARADAWTAIASSTRPPEAMVRAENPQVKMLARHISEAMEEASRLDAEIASLLESDDTYACLLTIPGIGPRTASELTIAIDMSSFPDHDHLASYCGIAPRNRRSGTSIASVAASRQGNKRLKNLLIFSCNSLTRSANRFGEYYRACRGRGMCHGEALKAVARKRLKVIYAVMRDKAPYAA

SEQ ID NO: 483493 - protein, 373 aa, unidentified
MKKVSTAATKQSRNFSEQKLTIGLDLGDRSSHYCVLDESGGILVESKVSTSPHAMQGIFGSMPRSRIALETGTHSPWVSRLLSELGHEVIVAHARNVRLIGESRRKDDRLDAQTLARLARIDPQLLCPVKHRSARAQADLTVIRARAGLVRARTALVRARTALVNTARGLAKSYGERLRGCNVRNMNAEKADALSPELQTALQPLLVGIEMLSEQIHEYNEHIEKLAEESYPQVELLQQVKGVGTLIALTFLLTLEDAHRFKKSRDVGCYLGLQPGRRNSGQSEPQMHISKEGDPYLRTLLVQGAQHILGPFGADCDLRRWGLKLAERGGRNAKKRAIIATARKLAVLLHHLWISGEVYEPLHNHQCAIAAAA

SEQ ID NO: 483494 - protein, 341 aa, unidentified
MEQATTIGLDIAKHVFQVHGADGAGHVLFRKRITRAKLLGFLAAQARCVVAMEACASAHYWAREIGKLGHHVRLIPPAYVKPFIKRQKNDAADAEAICEAAQRPSMRFVPVKTEEQQANGIVFRARDLLVRQRTQCVNALRGHLMEYGYVFPKGITHVETLVAVVEDLQSSLPDSVRVILKLLVDTFTALEAQITALDAEINQRSKSDPTARRLMTIPGVGPITSTAITALVPAAEGFRAGRDFAAWLGLTPLQKSTGGKQKLGAVSKRGERTVRRLLIIGASAVVQQASRRGAPKGSWLAQMLARKPKMLVTVALANKMARIIWALLVKGGTYRTPAVAA

SEQ ID NO: 483495 - protein, 456 aa, unidentified
MARRSKAKGTRQHTKLHMIYTRAAGIDVGSTFHVVAVPPELSAEPVQTFQSFTGDLYRLATWLVEIGVTTVAMESTGIYWIPVFDILEAHGLEVLLVNAQHVKTVPGRKTDVNDAQWLQQLHTYGLLRGSFHPAQDWSALRVYLRHRERLVEYAAAHIQHMQKALMQMNLQLHHVLSDITGTTGMKIMRAIVAGQHDPAVLATSRDARCKASEETIRAALTGHYRREHVFALRQALELYDSYQARIEACDQEIQSTLASLQNEEIAIDTLPAARHKKRQSHEPLFDVREALFRVLGVDLSQIDGFSAYTALKLVGECGMDMSRWPTEKHFTSWLTLAPGNKISGGKVLNTKTRRSANRAAAIFRLSAMNVGQTQTALGAFYRRLASRAGKAKAVTATARKLAVLFYNTLRYGMAYEDPGAAYYEDRYRQRVLKGLHRRAKEFGYKLTEVEALEGVS

SEQ ID NO: 483496 - protein, 375 aa, unidentified
MTRPILYVGLDVHADSISIATADARRDGEVRHYGTIPATLRALDSVLNKLGHPGTELRVCYEAGPTGFVIARHLAKKGIDCLVAAPSLIPSPKGNKIKTDCRDSIKLTRLHRAGELTAVHVPDATDESIRDICRARTDAVDDKRRAMCQLKAFLLRHGHGIADKTPWSEARMRTLRSIALQLPAMNIVLEEYIQAIETAHQRIARLEHQMENVLETWEQAPVVRALMGLRGIRLVSAMILVSELGDIHRFAHPRLLMAYLGLVPSEASSGGKRRVGGLTKTGNAHVRWLINESAQHYRLPPRVSPNLSKRQEGIAREHRAEVQKISWKCQQRLYDKGRQMAGRLKIRQKVQIALARELCGFVWAIMKAVQPVTAR

SEQ ID NO: 483497 - protein, 351 aa, unidentified
MLTIGVDAHKQTNMAVAIDAAGREEARWRGPNSVAGWQQLAAWAAARDADVRWGIAGAWNYGRGLAQHPVEAGAAVYEVNARWTAAGRRRARTMAKSDGRDAHAVALVVWREATALPPVAADDETGVMDLLVGERDGVVAEATRLRNQIHQLLLQLDPDYRRGIPSLQSQRGLRALATYATVDPRPLQQQRAAAVRRLAQRLQLLVEQARELATQIRAHAARYASLTAICGVDLLTAAALAGILGPGRRFANDAQLAAYAGVAPLEASSAERVRHRLNRGGNRQLNAILYRIALTQARCSAAARAYRARRVSEGKTKREALRALKRFIVRAVWRRWQECLAAPAAPTALAA

SEQ ID NO: 483498 - protein, 346 aa, unidentified
MSQKTAATVAHTIGIDTGKNTLHLIGLDDQGAIVLREKIARGRIAARLANVPQCLIGIEAGMATHYVARELGALGHDVKQVPPAYAKPFRQGHKNDFRDAHAIAEAVQRPSTRCVPVKTDDQLDLQALHRVRSRLVGQRTAVINQIRGFLLEHGIAIRQGLRFLRQQLPDILAKRSDVLSPRMIRIMEDLSGDWRRLDERIQHITEEIEVLAHGSESCRQLMTVPGIGPLIASAMVAAIGDGAAFAKGRDFAAWLGLVPKQMSTGDRTILGRISKRGNRYLRTLLMQGARVILLRPANWAKHSFGPWLTAAANRLHHNVLATALANKLARIAWTVLVQARSYEARV

SEQ ID NO: 483499 - protein, 482 aa, unidentified
MKKRNIYQNQSQELLSLFETAGSSAKVMCVPMDYAKKDHLVMFCNGHGDILRKPFSVKNSPDGIEYLIDQVARSCRRRGIKKEHVFLGGEDANSFAENFVSTLRFKGWLVAGVNAHDAKKQRVNLQASTDRIDLMGIATMLLNCRANCCPAATGIYRNLRTLVRHRRKLVVMLTEVKNRAHGIVDRLFPGFLNENKSGIVPFTQSSLYLMENRFSPKQIRRRRRQKLIEILKRFGTSKAEETALKLQQYAAKVLHTPDEYIDTLQISLAQHVKHIRCLKESIVQLEKEIAVNLAQTQGAFLTSVRGIGIVLAAGVSAEIGDPYEQKSLNNVISYSGIIPRVKQTGGVDGKTYTGHVAKRCNRILKDYVVKSAYHLGLSGPEDLMADYKRRDASGQHADFGIGRRYLRMTMSLMRTSQIYLPPRLRKADTAPEERAGYYLMSWPFLRDKWKKAGALEAAFSKDRPLGLWRQIVQKLYDITLKL

SEQ ID NO: 483500 - protein, 387 aa, unidentified
MSRLDDLSSCLVPFRQDTTLVVVIELSQASWLIAGAVPGVERQPLKKMEPDETALLRLLHRWRDEATRSGHTIERIVVAFESGRDGFWLARWLAKQGIEAYVMHSSSVAVSREHKRAKTDRLDTAMLIRVFLGWLRGERGHCKMVVVPTLAEEDAKRPSRQLEKLTGECTRIVNRLKAALARLGIRGFNPKLRKAAARLEALRTPEGEPIPQNLLEEMQRDLAHLAFLREQRKTVEQLRLERLQQAPKTGTNAMVLMLASIIGIGIDTADLLVQELLSRNLRDRRAVGRSAGLTGSPDESGSKRREKGLSKCGNARVRRTMIQLAWRWQQFQPDSVLAKWYKSRVEGAKGVVKLKMIVALARKLLIALWRMVNTGEVPDGVVLRQPA

SEQ ID NO: 483501 - protein, 428 aa, unidentified
MNCTQNEKLNQVTPHTLIVGVDIAKFKHVARAQDDRGKILGKALVFTNTKEGFEAFFSWLEEMQHKHEKSDVLVGMEPTGHYWLNLAYTLKERLVSFGVVNPLHVKRSKELDDNSPTKNDIKDARVIAQLIKDGRFSYPRLPMDEDAEIKAGITIRNQIVGDLQVLQGRVHNWLDKYFPEFLTVFKDWSGKMALATLEHIPLPGQLNQTTPERVAEIWSTYGGVQRPSLKRIQRLQEAAARSVGLNVGLQMAQREIATNIKRYKMLKEELRALEKELETLVLTLPGIAEMLTVPGVGMVTVIELYSELGDIKNFKNPRQILKYAGLNLRESSSGKHKGQARITKRGRAKLRALLFRTVMPLLRHNRAFKALHQYYTTRQENPLRKKQSLIVLCGKLVRVLHTVGQKQCPFDEERMIRDIPHLSLALKV

SEQ ID NO: 483502 - protein, 421 aa, unidentified
MEEITEEPAELAERVAALDIGKASLVCCVRVPHESRPGARRQEVRTCGTVTPALLELRDWLICQGVTRVVMEATSAYWKPPFYLLEDDIECWVVNARDVKNVPGRPKTDKLDAVWLCKLAERGMLRPSFIPGRAGRQLRDLTRYRRTLTQERTREKQRAEKLLEDAQVKLSSVISDIFGVSGRDMLAALIAGERDPHDLARLARGSMRAKTGVLRQALTGHFTAHHAFLLAMMLDRVDALTAQIDRLTARIEKAIAPFAAQVAQLDEIPGIGVTTAQEILAETGTDMSRFPTPSHLVSWAKFAPKARQSAGRSKAAATGKGNPWLGGTLGEAAIGAARTSTFLAARYKRVVKRRGKKRALVAVGNSILTICWHLLSDPDARFTDLGPDWHDRLAPQRRKRQLIAELERLSGKKVLLQETAA

SEQ ID NO: 483503 - protein, 363 aa, unidentified
MNDQKRFIGIDMSKRSFEVAVVNNADPQILRKKYKATHEDRQEFISSLRKDDIVALETGNSSFVLAKLIQKQVGCTVYVLNAGKLHIIFRSLKKTDKEDALRIAKFVQRIPEEELPAVTIPSDEEMAMRSSATEQIRVDRSRTQSINALHSLLWNNGITEYGRNDLKHKKNRDKVIANLPEAYRAQGIRLLKLIDVYEQCLGEIGEEQKEVLIKNRDETTISISMPGIGPKTAFVLLAYLGNMERFSCSAQVGHFSGFTPRIDMSGQQEHYGPITKRGPKQLRRVMNQAAWAAIRSKDGIILRGFYDRVRSTKGKKKAIVAVARKMLEILWVLHTRKELYQSPVVADHSRIIAKLKRYGLIFE

SEQ ID NO: 483504 - protein, 411 aa, unidentified
MEVVYRRCSGVDVHKESISVCVLLMEDQKVKKQIRRFGTMTRDLLELRLWLQQLGVTHVAMESTGVYWKPVWNLLEDQFELLLVNAQHIKQVPGRKTDIRDCEWIADLFQHGLLRGSYVPKQEQRDLRDLTRYRVRLNEDKVRLANRIQKTLEDANIKLASVATDVLGASGRTMLQAIAAGEDDPEKLAQMARKGLRKKLPQLRLALQGRIRDHHRFLLGQLLEELRFTEDKINELDQRIQQCMLPHHHAISLWTSMPGIRMTTAWSLVAEIGTNPEQFPQGSNLASWAGMCPGNNESAGRRKSGKTRRGNRWLRRALNQAAWAAARTKNTYLAARFHRLAAKRGSKRAIVAIGHKILVLAHYMLQHNTPFRELGAEYYQRLRAPSFSQSLVRRLQRLGFQVTLTPTQQVS

SEQ ID NO: 483505 - protein, 347 aa, unidentified
MTIVGNPDAVIGGVDTHADTHVAAVVNHVGGVLGVESFSTTSIGYRQLVSWLRSHGELALVGVEGTGSYGVGVSRYLQHEGVTVVEVDRPNRQTRHRQGKSDPVDAVAAARAALSGTATGSPKARDGNVEAIRVLMIARRSAVDTRIETLNQLRHVVFTATPEIRAKFTGLSAISLSNKASALRPRQADDPVRYTTHMTIRALGHRVQYLREETKQLNRMLRPLIRQTAPTLLEVYGVGYDTAAKLLVAAGDNPGRIRSEGAWAHLCGAAPIPASSGKTKRHRLNRGGNRQANSALYHIVITRMRHHQPTRDYVARRLSEGKSMGEIARILKRYAAREVFKHLPRPA

SEQ ID NO: 483506 - protein, 344 aa, unidentified
MDITTIGLDLAKSIFQVHGVDANGRVVIRKSLRRAQMLPFFAKLPSCLVGVEACGTSHYWARELIKLGHEVRLMPPAYVKPYVKRSKTDAADAEAVCEAVTRPTMRFVPVKSPEQQAALSMHRARDLLVKQRTQLVNMIRGLLAEFGINIPKGLERALLMARRIVDDEAPDVPIEAAKIVGTLSQQALDIHVRLRQIDRDLLVWQRGNDVARRLMTIPGIGPVGATALAASVTDPHQFRSGRQFAAWLGLTPLQKSSGGKERLGRITKMGDKYLRKLLIVGMTSLVRRAKDNPPTIDPRLANLLVRKPVRVATVAMANKTARIIWAIMTRGETYRASHQPALAA

SEQ ID NO: 483507 - protein, 373 aa, unidentified
MHGPHHSTNVTRYLALDLGKFTSVLCVYDPATHAHRFVATQTSPQTIHDLLVAHQAGGDDPSATLLVIETCDVAGWVHDLATALGMAVAVANPAHEAWRWTRVKRKTDKDDALKLAKLAVLGQLPTAHMPGPQQRQRRRLVHYRRVLVDRRTQIKNQVRSIFSQQGLSLPRRGKAWTKAGIEQIAEDARPLSECASIDDLWRGRLHVELQLLESLNKQIEQVDAKLDALGAKDDRVQLLQSVPGVGPRLAETVVAHLDDPHRFKRAGQVASYAGLVPKQFESGTIKRSCRITRRGPALLRSMLVEVAWMVYLRNDWAKAFVARVSRGVASRKNIAIVALARKLLITLWAMLRDGTRWHQPAAKHEPPPALAMT

SEQ ID NO: 483508 - protein, 347 aa, unidentified
MLPYSLFFSSFLLVHFTLNKTKINTMNKYIGVDISKKDFYACFEEAEEPILFGNNKIGIKTFEKYINAHDFKKDETIIGVESTGVYYLPMSFNMSKAGFCVNVINPLIVKKQNQISLRRVKNDKKDAGLIRYCTANRAGYKFIDTSETLTIKSLVRQRDSLAMMKNTLNRKQDSVSYKETNLGISISKSNERLINAVDLEIKQLEKELKEFRKDEQKLLQSIIGVGPITAISFISEINDVSRFSHPKRMVAYIGLDSRVHLSGTSIHGKGYISKRGNKILRTRLYNACSVAVLHDNVFRDFFQKKRSEGKAYKVALCATMNKMAHVIYAVWKSGVPFEDKRKSTQAV

SEQ ID NO: 483509 - protein, 348 aa, unidentified
MATVTERYEHVVGIDTHARTHTYCIIDSRTGSMVDTRSFPTTAPGMQRAVSWIRRRTRGTAVLAAVEGTSSYGAGITTALLTEEIEVAEIRALYRRSRARTGKSDPLDAEAAARTALSTDVEKLAHPRRSGDRAALRVLLASRSLTDQQRTANKNALTALLRTTDVGVDARKPLTDAQISTIAAWRTGRDEPSHRIFREEARRLAKAIIEQTRSLQQNHQALSALTEALAPGLQGIPGVGAVTGAILVASYSHHGRVRSEAAFAALGGIAPLPASSGNTSRHRLSRSGDRQLNRAVDVVVRTRMSYDPATCKYVERRRAEGLSKREIRRCLKRYVCRSLFRELRTRMA

SEQ ID NO: 483510 - protein, 313 aa, unidentified
MDSLGYVGIDVSKNTLVVFVSGHVVEKTNDDSGISELVALLRESSPTLIVLEATGGYEMLAAMALGAAGLPVAVVNPRQVRDFAKAMGRLAKGDRIDAELLARFGEAVRPEPRALPTEEARLLTAELNRQRQIVEMLTAEKNRLAKAHPAMKKRVEAHMAWLGKELKKLDKELHQTIRKSPLWRERDDLLRSAPGVGPVLSTVLMAELPELGSLNRKQIAALVGVAPFARDSGKYRGPRTCWGGRASVRAVLYMGTLAAVRSDAGFIKYYEALLQRGKAKKVAITACMRKLITVLNAMVKSHARWSPELAFSS

SEQ ID NO: 483511 - protein, 378 aa, unidentified
MKKGRSNNGKVAASSNTKTKPSKERPMKPPKYIGMDVHKATTVVAVLNSVGKVVEEAIIETNGSRILDFLTSQRGTLHVAFEEGTQAAWLYDLIHPRVASVIVCDPRKISRQGNKADRVDARLLAELLRTGGLKPIYHGEKSTRAVKELALSYIAMVADGTRIKNRLKAIFRGRGIACNGAGVYSPDERKDWLAKLDNAAVRARAATQWEELDLVERLKEEVAEDLVAEARKHADTRILKTVPGFGPIRAAVTLGVAGTPHRFRTRKQFWGYCGLAVVTSTSGEYEIVDGRVYKTKKRPLVRGLNYNYNRAMKAVFKGAAKTVTDGVWKSRFEAMTAEGVTESLARLTLARKIASIALAVWKKGERYDPKRMKSLHAA

SEQ ID NO: 483512 - protein, 332 aa, unidentified
MRYFLGLDVAKDSFVAVLLDEAGQLLGSATFANALDGFTELLAWLPAPAQTIGVCEPTGIYNQHLKQTLAAALESLHEINSQTLKQYAFSQVRTKTDQADALAIADAARTLFLSRPEKLAKTRVSWSPQRENLALWLAEYDRLRKAIASLRLQIGNLDHHAAPDARKVQKRRQLELKHLLAQQAEVKRQVELVYQQLDDSQARLVDSIPGIGPLSTAATLVVVRDVSRFRSADALKAYLGIYPRRNQSGLREKRSHLAHHGNKLMRHVLWNAAKAAVKVKHEGNPFRCLFDRLIAKGRTYSHAIGAVCRKLVQVIYGVLKSQTPFHYPASTP

SEQ ID NO: 483513 - protein, 348 aa, unidentified
MGLYAGIDLHSKSNHLAIIDKNRKRVLKKKLANDPDLILGVLAPYQGEIAGIVVESTYNWYWLVDLLQENGYRVHLANPAAIQKYSGQKHVDDTHDAFWLAELLQLHILPEGYIYPKETRALRDLLRKRQQLVRVRTSLILSLQNIVTRNFGIKLSASDLKTLTEDRVQPYLQENEDLLLAGSANKSCIDSLTLQIVRIEKAVEKKLKLLPPYIQLLTLPGVGRTLAMTIMLETGPISRFDKVGRYASYCRKVSSKWTSNEKVKGHGNKKNGNRYLAWAFSEAAEHARRHHAGSRNFYQRKLRQKKNMMVAHNALAHKLARAAYWILRNNVPFQEAKMFGQAEAALDN

SEQ ID NO: 483514 - protein, 336 aa, unidentified
MIVVGLDIGAESFAAALKAQVQDVGSVREKLANTAEGFEELIGWMRDRGADAQHAVVCLEATGVYGEALCYYLRSRGYRVAVEAPSKVKRAFGQSAPKSDTVDARQIAEYGHRFYDELQWWDPPSAALEQVRVLLTAREQFVAQKVANMNARQALKYKVITSVKAEETYEQAIEQLRENIQEIDQELKRLIKEDDNFHRLIRTLISVPGVGMVLATQLAVLTNGFARTNNPKQLASYVGICPLEHTSGTSVYRKPRSRQYGPSRMRKLLYLAAMSVSTHDAQFRAYYLRKVAEGKPKRLVLNNIANKLLKIICAVVSTETPYIPNYKSVNPALLSA

SEQ ID NO: 483515 - protein, 338 aa, unidentified
MIVIGVDVHKQSVTAVAVDQVGQLLDEKTVVVGSDELVGWASAHGSERRWAVEDCRQLTRWLERQLLGLGEDVVRVPPKLMAPERRAGRARGKSDPIDALAVARAALREPDLSRPRPEEAVFRDLKLLVDHRDDLVDERRRTQQRLRWHLHQLDPTLAVPLRMLGRASHLERVGRWLARQEQELQVRLARELVTRIRSLTRAITELDRELEQRAATIAPALLELPGCGGVTAAKLLAEIGPISRFRTDAQLARHSGVAPLEASSGRIQRHRLDRGGNRQLNSALYRIAITQARYHPAARAYLERKQAEGKSRREAIRCLKRLLVRVVFNTLKTSPALT

SEQ ID NO: 483516 - protein, 458 aa, unidentified
MPKKSSNKAKSQRSRERALLQKVHLNAAGIDIGADAHWVAVPEDRDASPVRSFGVFTRDLVALCDWLKSCQVETIAMESTGVYWIPLYQMLERKGFEVRLVNAHHVKNVPGRKTDVKDCQWLQQLHTFGMLAGSFRPEAQMCVVRSYLRLRDTLSKDCNSLVQRMQKALTEMNVQIHRVISDITGVTGMSILRAILAGERDCLKLAQLKHPQIKSSAQDIAKALDGDYCQEHLFALGTALEFYDSYQLKIMACDRHVQDALSAFELKGKAPAPDVSRMRCAEKRLEALRRHHLEEMTGADLTKLPGLDLLAVERILSEIGLDMSRWPSEKHFCAWLNVAPNNRVSGGKILSSKPRKNANRAAAALRLAAQSAMQSKSAIGAFIRRIKSRLGAPTAINAGAHKLARLVYRMLKFGKAYVEIGQEAYEKFFKERILRNLQRKAHLLGFQVTPITVTVPVS

SEQ ID NO: 483517 - protein, 355 aa, unidentified
MKKRDKYMGMDVHQATTVTCVMDAEGKTVLETTVATEAGPLLRLMDGINGPLHVTFEEGTQAAWLYEVVRGYAKEVIVCDPRRNRLLEEGSKGDKPDARKLAQLLKAGLLRSVYHGHEEATRKLKQLVRAYENLSDDTQRTMVRIKAVYRSRGIACRGQEAYQPTQRKQWLEKLSEPGARQRMEWLYEELDQLAPLRRRAKQAVIREGGKHRAVALLRTIPQVGPLRSALIVATVDTPHRFRTKRQLWSYSGLAVVTHMSSEYQIQEDRVIRSRKPIATRGLNRNCNHRMKDVFIGAATGGAQIEPYRTYLERLEQTGMRAEMARLTLARKIAAVALSIWKKGEVFDPKKLNWTT

SEQ ID NO: 483518 - protein, 299 aa, unidentified
MKVAVLGIDLGKNSCSVVGLDDTGKVIMRRRMHRDSVIKIASGLAPCVVAMEACCGAHHLGRILRERGHQVRLMSPEYVRPYVKAQKNDDRDAEAIAEAATRPTMRFIELKSAEQLDMQSLHRVRDRLVSERTALLNQLRAILLERGIVIPQGRRKLEDHLRTLLEGQEAILSPRVWSLLNDMQAEWRALDSRIEALTDEFAAQAKTDEAARRLATIPGIGVLNATALVAAVGNAATFARGRDLAAWLGLVPRQMTTGGKPRLMGITKRGNKYLRKLLVHGARSALPSLSASALPLGNG

SEQ ID NO: 483519 - protein, 331 aa, unidentified
MKFKETLGIDVSKKTIDVSLHLTSTVHKFDNSVKGFKSLLIWMKKQTGLSQDRVLICFEHTGLYSLPLAAFLTEQKAIYCIEPALQIKRSLGLVRGKNDIVDAKRIAEYAYLRREQLKPFELPSMKVLKLQKLLSLRERMVKQRAGYSASKTEYKLFLKQKDYESLFSIHNKMIHYLGKQIDAIEKEIITLIKSDEKMKVLYQLMVSIKGVGLVLSSNFLVSTNCFTAFKNSRKFACYAGIAPFQKQSGTSLNSKPRVSHYANKRLKTLLNLSASSAIQADPELKSYYQNRIKRGKSKMSTLNIVRNKIVNRIFAVVSRGTPYVPLYQHVA

SEQ ID NO: 483520 - protein, 336 aa, unidentified
MRYIGVDLHTTQITVCYLTEKDAVEIRKYQLCEIDKFVAGLEKTDRIAVEATCNTRWFAEQVEGKVWRVVLVNPRAFEVVKNSVKKTDKNDALNLARFLKADLLPEVRGKRQEAERVQSMVNTRTKLVRLKTSLTNKIHALGVANGRKLRKASLASEKGLEKVRHEEWNEMELLELEIIIEQIRCLKVSIKKLDKAIEAESEKLAGFESLVSMSGIGSLSAGILLSVIGEVKDFGTADKLASYFGIVPRVSNSNETLHHGRITKRGNKTGRTTLVQCSLAALKKSEYLKNYYDGIKARRGHGKAKIALARKYLAIIYTTLTKGWVFADFNNFELAE

SEQ ID NO: 483521 - protein, 352 aa, unidentified
MKYYIGCDAHKKYSVFSVVNERGQAGGPERVQHDKELYRKYLNYLPAGSKIAIESVGNWYWMIEAMEQAGHIPILVNPKKAKLLMGNINKTDKLDARGLAMLNLNGSLPEVWIPPAELRDQRELSRMRISMVGVRTQFKNRIHATLAKYAIEINEVSDIFGKTGRALLQEAIRELPPETKNSVEVQLKLLDQVSGQIEELENHIRKVVKETPAMQLIKSLPGVGDILAIVIALEIGDIDRFRSPQHLASYSGTVPRVSSSGDKTRYGRVRSDVNHNLKWAYIEAANCVALQQERQAGRHAVQLMKRIQKQKGYPKAAVAVARHLAEATYCMLKKNQPYQEPNLRKTVLSSQG

SEQ ID NO: 483522 - protein, 343 aa, unidentified
MHKSSAEEFLACGIDVSAAQLVVALQSENGGYGQRIFPKRASGHRTLIVWLQKAGSKVRVCLEATGLYSLDLALALHAACGIEVAVLNPKLVNRFAATLCRSKTDPADAQVLAEYARRMPFQLWQPPRAPALELRAITRHIAALTQQHTRESNRLHAASASSAGARCVQHDLKRSLRDLQHRIDKLRAQALALVQQDPELRSCLALLLSMPGIGEVSALNLLGELALLAPGLTVRQWVAHSGLDPVHHQSGTSVHQRSRISRAGNRYLRRALYMPALVAVRHDAHLRAFYQTLLQRHKAKLQALIAVARKMLHAIFGMLRWHNVYDGSRLLPNIKLPAADAVA

SEQ ID NO: 483523 - protein, 385 aa, unidentified
MTIQVQVSRFIPRDYDVFAGLDVDKRSMSVVFADHDGTQRALRMAHSATPLLNYVRKHYAGQRVAFAYEAGPTGFGLHDELVRQAYTCVVAAPSKVPRAPGDRVKTNRLDSRKLAESLRGGQLQGIHVPAGIYRDLRHLVQLRDTHVRQLMASKLRIKSLLLYEGIPFPDPQEKWTARALRELQTLPCSQTVRFKLDDLLETLHFHFQAAARATKQIRQHCWQDPELQQSIDLLLSLPGIGWIVASHLVARLGDPQQIKNGKQIAGFLGIVSSEHSTGAKENRGEITRSGDSRLRSKLIQSAWTAIRKDPELRAFYRRIYQRHPQKVAPRKAIVAVARKLTQRIYVVLKEQRPYVVRPDSSIAPLTAEETVGPRDRLDGAQNDQP

SEQ ID NO: 483524 - protein, 330 aa, unidentified
MLYGGLDLHKKSSEIVLKTKDGREIKKGSVKSEKEPIKEFFESIDEEIKLAIEASPQSQYFYDLIEELGIDVVLANPLKTRLIAEEKVKNDEVDANALCDLARGNLLPTCYIPEKDIRKLREIARTRFSLGKVKGDFKNHIKGLLDRKKIEYPGSDLFNNKGIKWLKNLNHPIINTWIPLLETAQKQCDEAERKIAKKAKKYYEIELIESIPGIATYSAAIIYGEIADIDRFSSEKKLYSYAGLTPSIHQSGEVEYHGSMTKRGSKYLRWVIIHAVGNHNRFCPNSKISQYYRRKKRTKPNKIARVNGARKLLQAIYWMLKNNDKFRAEG

SEQ ID NO: 483525 - protein, 410 aa, unidentified
MEVLCPVCCALDVHQASVTACLRAPGDGPQRRQEVRTFGTTTPELLRLAGWLTAAGCTHVAMESTGIYWRPVYNILEGRFELSLVNAQHVKMVPGRKTDVRDSEWLAQLLELGLLRRSFVPPAAQRELRDLVRYRKRLIEERAREANRVQKVLETANIKLASVVTTVLGVSARAMLKALIAGEQAPEQLADLAQRRLRRKRAALGEALTGRVTAHHRFLLDHLLRHIEFLDGAIAACDRQVETLTAPHAEALTQLDTIPGVARRTAEVIAAELGCDMTRFPTAGHAASWTGLCPGNHESAGKRLSGRTRHANRTLRQALVESARGAVRKRDSYLAAQYRRLVKRRGDKKAIVAVAHSILVIAYHLLRDGTSYRELGGDYFERLNADRLTRYHTKRLAALGYAVTLTKCAA

SEQ ID NO: 483526 - protein, 373 aa, unidentified
MQKTLENLSLVNLNNYLYLGVDTHKDQHTIVGMNCFYQIIYQKEITNSEENFKQLVKEVERIKDNRSLQPVFGLENTSSYGARLAQYLYLRGFLVKTVSPVLVERERRYQTHPEKSDSQDASGVAKALIQRIGKLPSFSISKTEEIANEIKELVVDREFLVKEQTRLKNQLHRLLHKAYNSQYRARFKNPFSGRALRYWLKSSLKLDSLLLKNQVRRKVKRLMDIKNEVKEIEEELRILVGQTGQKIETLNGCGLVLAACLLAEIKNIDRFRSADALAKYGGFCPREKSSGKKIKHIKTKAGNRKLNKAIHRIALSQIGRNGNIYSKTYFKKKISEGKSKAQALCCLKRRLVDIIFMMLKYREEYSYSEEILT

SEQ ID NO: 483527 - protein, 347 aa, unidentified
MNKVVAGIDLHSNNAMVGLLAEDGRRLGHQKLQCDLKQIVQFLDPYKDRLESVAVESTYNWYWLVDGLKAQGYPVVLANPAKIDQYSGIKHADDKNDAYFLAELSRLKILPTGYVYDPILRPVRDLLRRRMSLVRQRTALMLSFKSLYTRTTGQAMELGRLKKMTLSEATALYDHPANQLIAQEQKRHMEALTQSIDKIEQAVIKDAQDIPYYPKLKTLPGVGIILGMTITMEVGDVGRFADAGHFASYCRTVDSQRTSNGKKKGDNNQKCGNKYLAWAFVEAAHFARRTDELCRRWYDRKAAKTSTVIATKALACKLAKAAWYLMAEQTDYDPKRVFPELAMKTQH

SEQ ID NO: 483528 - protein, 338 aa, unidentified
MIHVGVDLHQRFCYMTALETRGKLLQSGAVNNERLALKRYFRQFRGQAVEVAVEACGFWPAFREVVEPEVKRLVLVHPQRVKAIASAKLKNDRVDSATLAHLLRCDLLPESWKADRDTQARRQQVRLRATLVRQRTRLKNQVHAVLHQQGQRSPVTDGFGKRGQQWLGQVKLPEKARQTLAVCLRMIDYYTQEIEEQNRQLSVEALKDARARWLMTIPGIGVYSAMLLLAEIGNIERFADKAGMCSYAGLVPRVRESAGKAARGGITRQGSPYLRWIMVEAAQVATRCSPAAKAYFERLRKKKHAHVARVALARKLLSAVHALLRDGVGFEESEFAAV

SEQ ID NO: 483529 - protein, 414 aa, unidentified
MLKIIYPICCGMDVHKNFVVACIASTDNRGVTSYKSKRFSTYSSDLRLCRDWLADNNCKDVCMESTGKYWIPIYNVLEASCNIVLAHPKYVKAIRGKKTDKKDAKWIADIFKHDLVNGSFIPPADIRQLRDLMRYRCKLTAFTTGEKNRAQNCLTVSNFKLDDVFSDVFGKASTGLIDYILAHPDETIDDISRFRTKHLRATNEQILSAIDGDMCVQQADKLRIIRSHMENLDLCKLNLESVILSLTDKYINELNLVLTVPGIQTFSAIAVISEIGVDMSVFPSSKHLCSWAGLTPQNNESAGKKKTTRISRAGVYIKPLLVQCALCAVRAKAFPEVSKRYNALKKRRGHKKAIIAVARMLLTAIYNILKKKEPYNSELFAHSNNTPPEHRTVSVEEAIFILQRQGYTVTPCAT

SEQ ID NO: 483530 - protein, 351 aa, unidentified
MLIIGCDYHPSIQQIAFVDSETGECGERRLLHKDGEAEGFYRDLRLRGVSVRVGIEATGHARWFERLLAELGFELWIGDPAQIKAARVRKQKTDRQDAQLLLKLLVEERFPRIWVPSPENRDVRQLLWHRHRLVQMRTRVMNQLQAVAMNEGVRRKKALWSKSGRAQLESFVLLPWTSRRRQDLLDVLDRLNPTIDELSTAVEQEAEKRPEVLRLMTHPGVGPLTALAFVLIIGSTKRFACGKQIGSYLGLIPCEDSSANRQRLGHISKQGNTLLRFLLVEAAQAAVRSDKEWRRKYLHLAMRRDPRIAKVAMARKLAVSLFWMWRKEWNYEQVIKFGSHAGQSDYVHGVK

SEQ ID NO: 483531 - protein, 394 aa, unidentified
MRFAGIDIGAETHVVAVVDATGAGLSKPTPFTEDADGYARLRDRLGAATDLLVVMEATGHYWKNVFATLAAQGIAVALVNPLRTHRFAGEDLERTKTDAIDALGLARFGAQKRPPATRLPDAATEELRELVRLRDRLVQDFGDRVRQLHRLVDLGFPEFTRYVKGLDTELATAILQEYPTAQAFQGVSVKRLARLCYDGRHQVGTELAQALISAAGRSVGRHHAEAYRVQVRYACEDLAVLRRRLRSLEADIERTLNDHEVGRLLTSIEGIGPQTAARLVGELGDPAAFRSAAALAAFIGVVPALRQSGKRTATRAGLTPFGHAPLRAKLWMPTLTAVQRNPWLRSYYQRLRARGKLPKVALVAAMRKLLIAVYHVAKHRRPFIAVPVAAESRP

SEQ ID NO: 483532 - protein, 378 aa, unidentified
MSIGRGVARKRLDRIDSNQECPPSAPTADRKAPAYVHHHRDRPAQGVPHRSRGRRLRDRRRRDLHSFLPAQAGLLRDWADGFRDDRVWAVESAQGLGYLLAQQLIAAGEIVIDVPAVRASRVRTLSTGRSQKNDPNDARSVAIAALRADDLARVLPDDHTRILRLLAKRQRDLGRQKNLECNRLHALLCEMFPGGADFRFDSMTRVNALIDRFVVTDSMSRQRLDLAHDLVDSINELSAKMKVSKRRITAAVKASGTSLTEIVGLGPITAAIIIGHTGNIDRFASRHHYASYNGTAPIEASSGDRVRHRLNPRGNRQLNWAIQVIAISQLRHDTIGRRYYDRKIEEGKTSKEALRALKRRISDTVYRHLVNDARRLHG

SEQ ID NO: 483533 - protein, 377 aa, unidentified
MHSENIAAYIGLDVHKETLAVAIAAPERLGEVRYYGTINNEAQAVRRLFQKLQGLYGNILSCYEAGPCGFGLYHQLTAMNIKCQVIAPSRIPKSPTDRIKNDHRDAISLARLLRAGELTPVWIPDLTHEAMRDLIRARAAAKRDSRVARQRILSMLLRTDKRYAGKHWTGKHRTWFANQSFSQPSQQIAFQHYCQSLEQIEDRILQLDQEISRLLPEWSLCNLVCQLQAIKGVGQLIAITLVAELGDFSRFSNPKQLMAFLGLVPGEYSSGNSIRPRGITKVGNSELRRLLYEAAWSYRTPAKVGAWLIYYRPDSVTQYSKDIAWKAQQRLCSRYRTLTAKGKKSQVAITAVARELTGFMWDIALAAQSSFSQQKQN

SEQ ID NO: 483534 - protein, 441 aa, unidentified
MAYEIDVDDAEEVVERVAAIDVAKASGMVCTRVPHPTTANRRVTKVWNVASTTNAIMALADELAALDIERVVVESTSDYWRPFVYLLEARGLHVWLVNAQEVKQVPGRPKTDKLDAVWLAKLNERGMLRPSFIPPQEIRNLRDYTRLRVDLVEERHRHKQRVEKLLEDALIKLSGVASDIFGASGRAMLDALIAGERDPVALAELAKGRMRVKHDALVQALTGRFDKHHAELLSMLLDQIDSLDAKVDAITARVSELLAEIPAARAPAAPPGASGDTIPLDVIARLDEITGIGMVAAQAIVAEVGLDMTQFPTADHLVSWAKLSPRTIQSGTKSRSARPGKGNPYLKRFLGEAAVSAAKTDTFVGERYRRLAKRRGKLKAVVAIARSILVIVWHLLSDPTARYRDLGVDYYPTQVNTARRTRNLVHQLEALGHQVIITPAA

SEQ ID NO: 483535 - protein, 356 aa, unidentified
MSHDVKYIGMDVHKEAIVIAVLNGTGKLVMETIVETKASSILQFLHGLRGELHVTLEEGTWAAWLYDLLQPQVQQIVVCNPRRNALLKEGSKSDKVDARKLADLLRTGMLRPVYHGENGLRTLRELARSYQTISKDLTRVMNRLKALYRGWGIPCGGTRVYAPRYREEWLSKIVQAGVRRRAELLYQQLDGLQALRRNLRPEFLAESRKHKAAKLLRQIPCIGPIRAARLIALMQTPHRFRSKRQLWTYSGLGVETHDSAQYRFVLGQLQRSKKPQQIRGLNRNHNHEMKEIFKSTATRASCGTGPFYDFYAALLTNGMKPEMARLTLARKIAAITLTLWKKEERFDAEQLKTQAA

SEQ ID NO: 483536 - protein, 348 aa, unidentified
MEQLSMIGLDLAKESFQVHGVDVNGRACVRKRLKRREVLKWFGALEPCIVAIEACGSAHYWGREIGRLGHAVRLVPAQYVTPFVKRGKTDAGDAEAICEAAGRPSMRFVPVKTVDNQAAGLLHSARSLLVKTRTMLINAVRGSLAEFGIVAAKGTDKLDDLRTKMDDACAQHMPDQVRRALAPLFEQIDQTTEKIHRLTLELKIYLKSSPLARRLMTIPGIGLLGATALSVMVPDVKHFRNGRHLAAWLGLTPKQNATGGKPRQGRISRAGDAYLRRLLVLGGTALVRSMKRGTSGMALWAQGLMQRRPAKVVAVALANKIARIVYALMATGEAFDPKRAVPIGDVAA

SEQ ID NO: 483537 - protein, 398 aa, unidentified
MYQQFCGIDISKDSFDITLLNSNGEIKLQDKLLMNRDGFNTLLKYLSSYSKENLLVAMEATGIYHLPLLSFLLENSFKSVVINPILIKSFIGSTTLRKTKNDKKDATSIALFSLKSYQSLHLATTDAIENIKPLIRERETLSKEIARLKTEIKAILTQLFPELSKNTNIFTRSILNLLLKAPSRKAIRNLKKQRIQKILDDTSGNKVRISADEILSLAKNSIAISDKYLEKVLTSKIRRLIYIQDELSFLDTELQNSLEDTDINNDIEILQSIPGIGSVTSKNFMIEVSSVEKFKSVKQLCAFIGIDPSVKQSGTSINYRGKISKRGNANLRRTIWQMAIGVIRSCDKFNAYFSKKREEGKKFKQAVIAVANKLLRTIFVLLKNKTKFDENLASGVSK

SEQ ID NO: 483538 - protein, 361 aa, unidentified
MNYGSKGATKMTAGVDLGDKYSYLFVLDNDGGEVVEEGRLRTTPDDLRRRFDSAERMKIAIEVGTHSPWVSRLLTECGHEVLIANPRKTRLIYGQRRKTDKLDAEKLARLARADPELLYPVEHRGCESQAHLAVVHSREALVRSRTQMINHVRGTVKSFGYRLPKCSTPSFHKKIPGQLPSELAEVLGPIVETIGSLTEKIKDYDRRIEELAAERYPETELLRQVSGVGSLTALTFVLTLEDPQRFAESRSVGAYLGLAPGTDQSGEQDPQKRISGEGDELLRRLLVSSAHYILGPFAPDSDLRRHGEKIAQRGGKNAKKRAVVALARKLCVLLHRLWVSGEVYEPLHNARRLGVQGEEVA

SEQ ID NO: 483539 - protein, 374 aa, unidentified
MRPDRSVPPAGHPKVTPVKYVGIDVHKKMCQAAILDDDGALLDEQRFPNTAEGIEEYAGKLASFNDDLRAVVESTGNLWIQIHDRLETRGFDVALSNPGKTRLIAEAKVKTDKVDARTLAALLRADMIPTCYVPDEELRSRRELLRHRLNLVKTRTTVKNRIHGLLDKHGLRMPETASFSRGNIDWLRGLSLGFMDDAILRSDLVLLEAVGEQVEVIEEKIAVIAAEEQQARLLMTMTGVGYFTAMLILSEVGDIGRFRSDKAFASWMGLTPSVHQSGERTRIGGVGPGNKRLRWAMVECAQAAVRFDPRFRGLHERVSRRRGAGCATVAVAHEMARIMYFMLCRNEPYRGADGGLVERKLKNMSRKAMDGLRN

SEQ ID NO: 483540 - protein, 369 aa, unidentified
MGQSTAVFVGIDVSKSKNAIAVAEDGRGGDVRFWGEVDASPTSMRRLVQRIASKHDEAHFCYEAGPTGYGLHRLITSMGHPCTVAAPSLIPRKPGDRVKTNRRDAIGLAKLLRAGELTAIWVPDAGHEAMRDLVRARAAAVELLGVCRQQVSAFMLKHGRVYPRKRGWTMRYLRWLQEQSFDHPAHQIALQEMVEAVRVAKERVERLETTIEEFVETWSLAPLVRALQALRGVDLIVAVTFATEIGDLHRFESPRQLMAYLGLVPSERSTGDTVRRGGLTKAGNTRVRSLLVESAWTYRHPPRVGTRKLYRLEKTTPKVRELAWKAQVRLTARYRALSARGKKSTVVCAAVARELVGFMWAIGQEAQVT

SEQ ID NO: 483541 - protein, 406 aa, unidentified
MRSIGLDSHRDFAEVAIAEGGELRSPGRIEMTPEALELFAQSLARTDQVALEVSGNAWEVARIIGPHVAKLVVVSPADTGIRAARAKTDRLDARALAKLLAAGSLRSVWVPDDHTRAMRRRLSRRRKLLVVRTKAKNEIHAALMRRLITKPAVSDLFGVKGRRWLESIELPAEEQETVDGCLRQLDFCESEIAAIEKVVAAEALKSAEIRRLMTVPGVNVVCAATFMAAIGDIHRFADRRKLVGYLGLDPKVRQSGLSQTSRGRISKQGSASARHALVEASWSVVKAPGPMHSYYQRIRARRGGQVAIVATSRKLACLFWCLLTREEDYAYAQPSLTAKKLRRLELAAGAPKGAGGATVWSTNKAMRQAEQALARQAESAYERTVADWQRQQRKRKGADATTGRAS

SEQ ID NO: 483542 - protein, 377 aa, unidentified
MIAAVRSDVSVNESVVYVAFELSKTDWTLALTSGFGVAPWLRTVSAGDLAAVDRALQQARARFGLDAGARVVSCYEAGRDGFWIHRALQQRGLENRVVDSASIEVNRRARRTKTDRIDALKLVMMLVRVCRGERQVWAEVRVPTAEAEAARHRSRERTALTQERTRLRNQIGSWLATCGCRVGARARQRPGWWTTVRDWADAALPAEVQARIAHAEARLALLAEQLAGLAAAQAGHARAVAEQAPLARLVQLKGIATTSASVLLDEGLVWRAFRNRRQLGGLLGFAPARYDSGASSRDQGITRAGNKRLQSVMVPLAWSWVHWQRPSALAQWYQARFGRGKRARKVGIVALARKLLIALWRYATDGVVPTGAVLKVA

SEQ ID NO: 483543 - protein, 419 aa, unidentified
MKVEYGNVAEDAVWAGVDTHAATNWLSVVDARGSELFSGEFATDPEGYRKLCDEIRRLGSPVAAGVECTGAYGAGLVRAMAAYGIACYEVITPGRPRRGPGCDKDDAADALRAAKQALSGENLAVPKSQDGWVEEVRNMTVAREELVKQCTSLANLALATVRKGPDEIRARLERLGTAKMMGVLAGWDEAEADPICDAVMFSLAALGRVWAEARRSARLLEERIERTLKAGNPALASMYGCGPISAAMLAIAAGDNPERMGSEASFAALCGVSPIRASSGKVERHRLNRGGNRNANKALHIIAMHRMRTDPRTTEYVERRRAEGLSDREIRRCVKRYIAREAYRLIMHPYDVPIEGKGPEMRAERIASGVSQKDAAIALGVTASTLCDLELGHHQFRELALRYRQWIDDGFPLEAGIAS

SEQ ID NO: 483544 - protein, 358 aa, unidentified
MKTVQRKGLNFEGQNVYIGIDVHKKSWQVAIQTETGYEESFRMSSNHVEELRKHLTTNFPQANYHSVYESGFSGFSTHRELISAGINNIIVNAADVPTMQKEQVTKTDVIDARKLVRALRKKSIEGIYVMTKQEESFRELERHRDSLTEDIGRLKSRIKHLLHRNGIRFEEKFGGSGHWTKAFVKWMKEEIELPQMTKRALDDELDLYLILRKKKLEISLEIRHLMKDEFASEHELLTSVPGIGLITAATLLAEIGNFDRFRNEKTLASYAGLSPTCHSSGEKETKGEITFRCNRRLRRCLIESSWVAIRTDSALSSSFLELRKRMPACNAIIRIARKLLNRVLYVMKNGAIYEKGIN

SEQ ID NO: 483545 - protein, 394 aa, unidentified
MHKQSITACALTPEGKEIRTFGTLTDDLEELVGWLKEKKVTHVAMESTGVYWKPVYNLLEAEPIEVLVVNAQHIKAVPGRKTDVKDAEWIADLLRHGLLKGSYIPHRAQRELRELVRYRRSLIEERARELNRIQKVLEGANIKLSSVVSDINGMSARLIIRALIEGKDDPAALAQLAKGRLKQKTEELRRALKGVMGPHQRMMLAEQWRHVEYLDEAIARLDREIEERTSPFHEALELIDTIPGVGRQSAEQIVAEIGTDMSRFPTAAHLASWAGMAPGNHESAGKRLSGRTRKGNKKLRSCLVECARAAARTKNTYLSAKYHRIAKRRGANRASVAVGRTILEMIYYILTRKEPYRELGADYWDRQREASIVRQTVKRLEGLGYEVKLEKTSA

SEQ ID NO: 483546 - protein, 354 aa, unidentified
MKGEFQNSKVLVRGKEVFIGVDVHKESWHVTARVDEEEVFHGRIPSQYHALRRLLDYFKDCGVKVAYEAGPCGFWLHDRLSQDGIEVIVVPPSLIPVESGNKVKTDKRDSRKLAKLLESNMLKRVYVLSEEDRADRELLRTRRQVLEHRSDVARQIKSKLLFHGISSPLATERWTKGYIRWLRELTLGRKVLKVSFESLIELYEYLTEHLIKINQEVIELSRSRKYLHKVKLLKSVPGIGTLVGMELLVELSEMERFRSADELASYIGLTPSEYSTGQYVRQGRITRCGNKRVRTCLVESSWILIQKDPLMRLKYNQLKQFKGAKRAIIAIARKLIIRIRRILLNNEPYVIGVC

SEQ ID NO: 483547 - protein, 387 aa, unidentified
MKSNTQNAKIEAITEKTLVLGIDVGSEMHYARAFDYRVIEYSKKPFKFSNTEAGFATFKEWVLDLKERHEKDKVVPGMEPTGHYWFNLGKFLQDNEMKPVLVNPHHVKKSKELDDNNPTKNDRKDPKVIAGLVREGRYMIPYLPEGVYADLRTASNIRFQLQAELTRIQNRISRWFNSDAKLRAVGKARAKTLIEAAEHSVGSKEGAVSARMEIRMLLEDYESRNTRLQEVMVLIEELVRKIPMAEKLLEIKGVGIRTVSGFLAEVGDISRFNNPKELQKLAGLALVENSSGKHKGETTISRRGRKRLRYLLFEVAMSLVSKNQEFRELHNYYTTRRLNPLKKMQSLMAIAAKLIRVFYAMLTKGVDYDPKKMVSDIKRPAVYLQAA

SEQ ID NO: 483548 - protein, 419 aa, unidentified
MPFKIFRKNCCGLDVHKTWIYACIGITDPNGRTEYKQTRFSAFTKGLQELADWLAKYNCKEVCMESAGKFWIPVFNVLEKSCLVTLAHPKYTKPQKGNKTDRKDAKWICDLFMCDMIKPSFIPPPDIRQLRDLMRYRMKLTNILTGEKNRALNCLTVSNLKLDDVFSDVFGKSSRSIIAYILEHPGEKFDVAPFIDKRCKHPLDEIQAAVDGAVSREQAAKLRECLQHIDEIGAHKENIEREIFRLAEPYAYQLSLIQTVPGLSGNPMTAIALLSEIGADMSAFPSAKHLVSWAGCCPRNDQSNGKVKSTRISRAGSYLKPILVQVANAVIKSDKYPECKERYRKLKARRGHKKAIIAICRMLLTAIWNILSKLEPYSADGYLADKISEHSVVITKAQGLALLRQRGYIFKDELPVESG

SEQ ID NO: 483549 - protein, 328 aa, unidentified
MCTLGIDVSKNKIDLCLLTAGHGGKKKHKVLTNEPAVARKVIDWLNAQKCVPESVTVVLEATGIYHENLAYGLHEAGVSVCMANPCRVREFAHGMDILNKNDAVDAFVLACYGELKSPAVWVPPSPEVRKLRALLRQRDALREDVQRTVNRLEKANSTSTPQEVIRSLERTKSWLNEELARIEKLITDHTDNDPGLKADLDLLKSIKGVKDQVGREMLALLKDGMFKSASQVAAYLGLTPVEKTSGSSVRGRTHMSKTGPSGVRAKLYVAALTASRWNKQAKAIYERLVAKGKAKKAALGAVMRKLVHLCFGVLKTRLPWDENYVTTA

SEQ ID NO: 483550 - protein, 341 aa, unidentified
MEEYIGLDVSMKETAVSIRRDGRRVWRGKCASDPAVIAQLVRKRAPSAKRVVFETGPLSVWFYHALSAEGLPAICIDARHAKAALDMAPNKTDANDADGLAHLAEVGFFREVRVKGFESMLTRTLVAVRRKLVRVTTMLSNQIRGLMKTFGLIVPTGAGSVFEKNVRRLLTDQLKLYEVVLPLLEVWRTTRLQVAKLGRQLVAEARQSEACRLLVSISGVGAITATSFVTAIEDPDNFRRSSSVGAWVGLTTRRYQSGEVDHDGHISRRGDRHLRGLLYEAATVILTRSRGDSDLRTWGLKLQERVGFKRAAVAVARKLAVMMHAMLRDGTPFVQTAKVVA

SEQ ID NO: 483551 - protein, 420 aa, unidentified
MSNKVIFNLDDLFISVGIDVGADFSWMSIALPNQQFVGKPYKILHNSIDSLTTAVSKIKEAEELYSLESRIFLESTGIYHYPLFCYLRDKGFNCSVINPIITKNSTNINIRKVHNDRFDSKKAALVGLKPDLKVSLMPSDLALNCRNLCREYYDLMDNRSAYVNKLQGELRMAFPQYLGIFSKVTINTSLTLLETYTSPSAFLEADKQEIIDIIKSTARFGLTYAQNKYNAIIQAATDANQFGYIIDSNIKRIRLYISFIRKYDEEINNILESLHELVDANEDADFVKQIHLIETFKGAGFLSAVSIMGEIGDFSAFSKPKQLFAYFGLDPAVKQSGKFEGTKVQMSKRGSAIARRVIHTLTLQSISISRNGEAKNPVLREYYLKKCDSKPKLVAMGAVSHKVCNMIFAILRDNKPSPAE

SEQ ID NO: 483552 - protein, 436 aa, unidentified
MNQTKLNRKTIASDGGDFAALIGLDWASQQHALALYDCATGKRENSTLEHAPEAIAQWAHGLEQRFGGRKIALCLEQAKGALINALLEYSFLVLYPINPATAARYRQAFKTSRAKDDPTDAQVCLEIVLHHREKLTPWLANDGATRELSRLLEARRSLIDLRTLLSNMLRDALKSYYPQALQLAGQDLFAPLGCQFLLKWPSLGQLQKARTESVRKFYYAHNCRRMDVIEKRLHSIASMIPLCRDPALIEPAIVQVKMLARQLLQLGIALKEYDSRIEQLFTQHKDASIWESFPGAGPTLAPRLCCAFGNERSRYQSALAIQQYSGIAPVIERSGKNQHWVHRRWGRPHFVHQSFFEYASQSVLHCSWAKVFIQDQIARGKAYPTAVRALAFKWQRIMFVCWYDRLPYNETIYLNSLKRRGSHLTSKLNHELPKAA

SEQ ID NO: 483553 - protein, 397 aa, unidentified
MIYVGIDVAKDKHDCFITNSDGEVLFKPFTISNNREGFENLFQRIESVSDDFTKVKVGLEATGHYSYNLLGFLLDKGLTTYVINPLHTNLYRKSLSLRKTKTDKVDSRTIATMMMSDMNLKSYSDTSYHNEELKSLTRYRFDKVKERAKLKSSVSRLVCILFPELEKLVPTLHMASVYALLFEFPSADAVANSHLTRLSNLLAESSKGRYGKDTAVMFREAARSSIGSHMPAKSLELKHTIKLIHELDAEIEEIENEIKSIMDEIHSPILTIPGISYRMGAMIIAEIGDFSRFDSPDKILAYAGMSPSTYQSGQLDNCYSHMEKRGSRYLRYALYNATKYVCHWDESFAVYLAKKRAEGKHYNVALSHATKKLVRTIYAMEKSGQPYQSASPVKKIG

SEQ ID NO: 483554 - protein, 407 aa, unidentified
MDLLKTVFGIDVSSRKSNVCIMVNGQKVDDYAISNDMVGFNQLLDDLKQVTKPQIIFEATGVYSRRLQAFLDMHELRYVMMNPLEAKRKTKDDLHQNKTDKLDALYLAKLQSEHPQRLAYVQSKEYQELMANNRIYEQASHDLITNRNRLHKAIQLTFPEIEHLMVNPRGKNYWSIVLRFPHPDIVLETKEADIIDFLKGLSGIGKKRANDIMQSLIRLAKVACPAVKKDSAHIRGLEMAINNILSAEEACQTALKEMTKLAPKRDLEILTSIPGIGENTALRIISELGDIRRFNNPSQLNAFVGVDPQVYESGNLTAHLSISKRGTAIGIKVLYLAINQIQSAKKAGNPSHIADYYEKRKRSSETASHKKAAIASIHKLLRTIFALIKNDQLYSYDVAKHNQRLLS

SEQ ID NO: 483555 - protein, 319 aa, unidentified
MASVSHLAPVHLGLDVHRDTISVGILEPDQQVPEVERIAHDEPSVRRLVGRLGDPRRLRACYEAGPTGFELARLLHSMGIGCQVIAPSLIPKAPGDEVKTDKRDCRRLARLHRAGELVAIRIPTLAEEAVRDLCRTRADMVADRTRARHRLSKFLLRHGRVWRGGATAWTQAHERWLCCQRFEEPALQATYAHYRVVLQSRDAHLDAIEADLAGWYDRPPFAAQVARLSAYRGVTRLGALTLAAEVCDWRRFARASQFMGFCGLVPSEYSSGTQTRRGHLTKAGNAHLRAQLVESAWSYQHRPGWAPRSPAARRVLTHR

SEQ ID NO: 483556 - protein, 391 aa, unidentified
MIIVGIDVAKDKHDCFITNTDGEVLFKSFSFTNKLDGFDELYQKIESVMEDSSKVKVGLESTGHYSYNLLGYLLDKGLPTYVINPLHTNLYRKSLSLRQTKTDKVDARTIASMLMSDVNLKSYSDTSYHNEELKSLTRYRFDKVKERAKLKISISRLVCILFPEIEKLVPTLHMNSVYELLYEFPGAKYVANAHLTRLANLVETASKGHYTKNTAITFRETARTSIGSNMPAKSLELKHTIKLIRELDSEIEEIENEIKIIMDKINSPILSIPGISYRMGAMILAEIGDFSQFDSPDKILAYAGMSPSTYQSGQLDNCHSRMEKRGSRYLRYALFNATTYVCLWDPTFKAYLAKKRSEGKHYYVALSHATKKLVRVIYKLETSRQQYTKAV

SEQ ID NO: 483557 - protein, 463 aa, unidentified
MSKKGQSNSPLRTDRLKGDWKALEIVHPHAAGIDIGGSEHWVAINPDRDEQPVRSFDCFTADLEQMADWLVDRGVHSVAMQSTGVYWIPVFEILQQHGLEVYLVNARHTKNLPGRKSDIAECQWLLKLHTFGLLSNSFQPSDEVRTARTLWRHRGELVAQASSAIQRMQKALIEMNIQLSNVLSDLSGVSGMAIVQAILNGQRDPQKLAALADPQVKASKKVIAKSLEGNWRPELVFVLRQQVEMYRMCHDKIAACDCQLQLHLQSMAPRVELEAQPLGPRTKRKRARGNAPKFDLRTELYRITGVDWTQVDGIDVQVAQSVIAEVGVDLKAFPSEKHFANWLGLCPTNETSGGKVLNRRTPKVVNRAKVAFRQAASTLIRSQSYLGAQYRRLRTRLGAPKAITAMARKLACLFYRLLQRGQQYVDKGTEYYEERYREQQVRFVIQRAKQLGIQIVTPPPSNA

SEQ ID NO: 483558 - protein, 414 aa, unidentified
MVEETIAWFAGVDWGSAKHQACVLGVQGTIVGEREFPHSGKGLSELADWILSMTDIASAVAVAVEVPHGPVVDVLLDRGFIVHAINPKQLDRLRDRFSIAGAKDDRRDAYVSADGLRTDRHLFRRLQIADPRLIELRAWSRLAEELQEERVRLSNRLHQQLWRYYPQMLKLTDDLTATWLLELWLKAPTPAKAARLRVSAVERLLKQHRIRRVNAEVVLRTLRQPAIKVSDGVAAAAGIHIHSLIVRLQVVSRELNDAKRKLDNLCTAIGETGAASEERAEHRDVAILRSLPGIGRINLATLLSEASGPLSRRDYQALRTLSGVAPVTKRRGKSHVVVMRYASHVRLRNTVYHWARVATQHDHESRTRYAALRRRGHSHGRAIRGVADRLLAVACVLLQRQTLFDPHFRQATAS

SEQ ID NO: 483559 - protein, 428 aa, unidentified
MNCNTQNAKIASITEKTLIIGIDVGSETHYARAFDWRNYEYSRKALEFSNTEAGFMAFRAWVEDIAEKHGKTAVIPGMEPTGHYWFALGKFLQDNGMRPVHVNPHHVKKSKELDDNNPNKNDRKDPKTIAALVNEGRFSYPYMPTGIYAEVRSLSNLRFQTQEELTRIKNRIARWFAIYFPEYKDVYGDLKAASGRMVLKVAPLPDDIIKLGAEGVNQIWRDAKLRGVGMKRAKTLITAAEHSVGSKEAPETARIELRHLLGDMDVYTTRLEELLRSIEGKLREIPYVDKLMEIKGIGLTTVSGFIAEVGDIGRFDNPRQLQKLAGYAIVANDSGKHNGESRISYRGRKRLRYVLYEAAISLIGKNAEFREIHEYYRTRKENPLKKMQSVVAVACKIIRVFYTILTKGVGYDANKLMGDIRRPQIQTA

SEQ ID NO: 483560 - protein, 341 aa, unidentified
MSIVGAFDVHRRQLTFEYLDTVTGELKRGRVMPADRPHLRAWLSRFAGLEDVQFALEGCTGWRYVVEELHAAGITPHLAEPADTAALRGKKRHAKTDKTDTRHLRVHLMAGDLPECWIPPEQVLEARATARLYKDLVDERGGWHQRVAATLFHQGVPAAVSVARPEGRAAAEQAFLSPAGRQAIQTGLRQIDRLTAELEPLRRQLDMLSRRQPGCAALRTAHFGIGAVTSVAIWAELGDVRRFGNSDDVVRHTGLDITVYSSDGKRSAGHLSRQGPPLLRWALYEAAKCAARPAAPDYGYYTAARDDRGGGRATLSVARKLARRCYHTLRELGEDALAPAA

SEQ ID NO: 483561 - protein, 407 aa, unidentified
MANEEFKVIAGIDTHADTHHVALITDYGKRLGDRKFLAVGSGYRQIAAYLTRFGPVTAVGIEGTGSYGAELARVLAEHGFIIREVNRPNRAERRLRGKSDPLDAYQAAESVLADRGTSTPKARDGYVEALRVLRTARTSAMKARTALMNQISAVLTAATDEVRAKYRGLSSEARVKAMASSRPTGDRADPVTATLMTLKRLGTRHRFLSEEINETDAALEAIILTYAPELMDVKGVGVVVASQLLVTFGDNPERMNSEAAFAALAGVAAVPASSGKTSRHRLCRGGDRQANSSLYRIVVVRMSTDARTRAYVAKRTEDGLSKKEIIRCLKRYVAREIFHVMKNPRSAPLTNDLRILRLKLGLTQVFVAAALGTWPGTISRIEHGKSQDCEAISRYRAWLEEQAPERN

SEQ ID NO: 483562 - protein, 344 aa, unidentified
MDHFAGLDVSVKDTSVCIVDDAGRIIREVKVASEPDALLTVLRNPSYHFKRIGLEAGPLSQWLFSAFVEADLPVICVETRHMRAVLKAQINKTDRNDARGIAQMIRVGLYRAVHVKTLRSQKLRMLLTHRHLLQSKAIAVDNDLRGTLRNFGLKVGMVGATRFEARIRELVGNLPDLAALIEPLLVVRRVLREQIAVLHRRLLAVVRDDEVCRRLMTAPGVGPVVALTYRATVDVPARFRKSKSVGAVFGLTCARDQSGERDRAGAISCCGDKMMRAMLYEAAQSMLVRSTKWSWLKAWAMQVAKRRGKKKAVVALARRLAVILHRIWVDGTEFKWTRQAVPAA

SEQ ID NO: 483563 - protein, 315 aa, unidentified
MTTTPVFVGIDVSKRQLDIALRPGGIRSVPNTEAGFAQILDHLNAVSPTLVVLEATGGLEIPLTGALAAAGVPVVVVNPRQVRDFAKATGKLAKTDALDAQVLAQFAEVIRPEPRPLPDDQTQMLAALVTRRRQLVEMLTAEKNRLGSARTPIRKNLRAHITWLERAFHQTDSDLAEAIRQSPVWREKDELLRSVPGVGPVLTTTLLATLPELGTLTHKQIAALVGVAPLNRDSGTLRGTRTVWGGRAQARTALYMATIVAARFNPVIRSFYRRLCAAGKAKKVALVACMRKLLTILNAMLKHHTPWHTDVIHHA

SEQ ID NO: 483564 - protein, 411 aa, unidentified
MKRFAGIDIGSERHVVAVVDEHGAVLLKSTPFGEEAAGYRRLMELLGSPQGCLVAMEATGHYWRNLFAYLIAEGFTVALLNPVRTRRFAEEELERTKTDAVDALGIARFAAQKDPPASQLAEEGLDELREVVRLRERLLQDFGDRVRQLHRALDLSFPEFTRYVRSLDSELATTILTHYPTAAAFRTVSVKKLAGLRYDGRHRVGEELAHELLAAARISVGRHQSEPYRLRIRYACEDIVMLRRRLHQLKADIEQRLERHQVGKLLTTIEGIGPQTAACIIAELGDPARFGSVKALASYVGVIPRLRQSGKRRLSGRRMLPLGNTRLRCALWMPTLSAIRVNPWLRAYYLRLRGAGKRPKVALIAAMHKLLAAIFSVARRRQPFVASLVSPPATIVAGGAVVDPAAGLTAR

SEQ ID NO: 483565 - protein, 370 aa, unidentified
MSVYVGIDVHRKRSQVAVVTEDGQVQLNKNTVNGTAPILRLIGDLPAGTPVAFEAAFGWSWLADLLEAYGFEAHLVHPLRCKAIASARLKNDKVDAATLAQLLRADLLPEAWIAPLQVRQLRGLLRHRTGLVRLRTQLQNRIHAVVADFGYDRSGSYLSGPGRGWLAELDLPVISRELVTDYLAVIDGLAPLTDRIDGELRQHAKADPRVKILTTLPGVGQFTALVLLAEIGDITRFPNARKLASWAGLTPTVRGSDLHVRHGHISKQGSAWLRWVLNQAAQTAKRSPEFAATYQTIANKRGKKIATIAISRKLLTRAWHLLAEAQAPGPATPQASTATAAHPQTGRVTKPRARSHIRHEQADGRARSSD

SEQ ID NO: 483566 - protein, 340 aa, unidentified
MTITTIGIDLAKNVFAVHGVDQNGKTVLVKSRVTRAALPGLIASLPPCVIGMEACSGAHYWARLFLQYGHEPRLMAAKFVSPYRMAGKSGKNDAADAQAICEAVRRPHMRFVPVKDESQQAMQCLHRTRQGFIEEKTATYNRLRGLISEFGVIAPQSTDALRRMVSVQKRSLPLQVQQCVDDLLEHVDRIEANITEYDRILSRIAKTDHRSQRLMKLKGVGPTTACALVACIGNAHDFKNGRQLAAWLGLTPSQYSSGGKSKLGRITKAGDSYLRTLLVQGARSVLIGAEKRTDSFSRWVCSLVERRGYWRAVVAIAAKNARLCWASLHYGDDFRLYSAS

SEQ ID NO: 483567 - protein, 351 aa, unidentified
MPRRSTVRAVTTIGIDMGKNTLHMVGLDSLGAIILRERVSRGRITSRLANLPPCLIGIEAGMATHYVARELAVLGHDVKQVPPAYAKPFRQGHKNDFRDAHAVAEAVQRPTTRFVPAKSNEQLDLQALHRVRSRLVSERTAVINQIRGFLLERGIIVRQGHRFLRHLLPDILAKRTDVLSPRMVRIVSDLAGDWRQLDERIETVTDEIETLAKSDDSCRRLMTVPGIGPIISSAMVAAIGNGTAFAKGRDYSAWLGLVPRQMSTGDRTILGGLSKRGNSYLRMLFMQAARVILLRPANWPKHGFGAWLARAAQRLHPNVLAAALANKLARIAWTVLAQERCYEARITKAAA

SEQ ID NO: 483568 - protein, 369 aa, unidentified
MNKFSKYVGLDVHQETIAVAVADTAGEARYMGEIVNTPESISKLVAQLRRGAGRLSFCYEAGPCGYTICRQLRELKQDCQVIAPSLIPKKPGERVKTDRRDSVSLARLHRAGELSPVWIPDEAQEALRDLTRAREDMKHLQRQAKQRLLSFLSRHGHRYTGRSRWTQAHWRWLEGIKFARPEQQIVLQEYIDTVQACGRRVASLDREVETAAHASPVWPVIEALMALRGISLLAAVTVVAELGDLARFANAPQLMAYLGLVPSEHSSGKRARRGGITKTGNSHVRRVLIEAAWTYRHAARKTAILQRRAERTAPEIQEIAWSAQKRLCQRFRNLMARGKLKNQVCTAIARELVGFIWAIGQHVIPLSRA

SEQ ID NO: 483569 - protein, 387 aa, unidentified
MPQLNDLSRSLVALDQNSTIIAVIELSQSSWLVAGVLPGIERQPCKKLEPSPERLLAVLHRWRDEAVRAGRNITRIAVAFEAGRDGFWLARWLEARGVEAHVIHPASVAVSREHRRAKTDRLDTELLKRGFLGWLRGERGHCSMAHVPTIAEEDAKRPNRERESLVGERTRIVNRIKATLARLGIRNFKPTLRKAAERLTTVHTPEGMPLPPNAEAELQRDMARLGFVVRQIREIEDARRKRLEQQPETGPHAMVRLLARIVGVGVETADMLVHEVLSRPMRDRRAVARYAGLTGAPDESGAQRREQGLTRAGNVRVRRGMIQLAWRFLLFQKESALALWYRARTADSRLGTRKTMIVALARKLVIALWRFVTTGETLEGVIVRPAG

SEQ ID NO: 483570 - protein, 491 aa, unidentified
MDISRGLKVAQLLAGFPDGITLYVDRPFIPREYQCFSWLGTAPSVYLCNLRACWLLHRDESVPIIEGGMEVDTVPVAGIDVSKRFSDLCILSPENQVFSATRIYHDKTSMDRARDLLLKAQAEFGHAPVIVMESTSHYHLVLYQYFTKAGFEVLVINPLQSHALRNMNIRRIKNDRVDAKRLALLYRTTVLRPSLIPQDVVRGLRILCRQRSELLRDSTRYKNHLTALLDQIFPGFDRVFSKVSGKGSLAALSLCPTPQAVLSTELERLAEVISEASRKPKAYGVEKAQKIRDAALHASMIGIVSSGDAAAVATATAMLKAVQQTLDSLEEEIKSLAAKNAEIMKNVELLSSIPGIGFWISMVLVSEIGDFSAFHHPKQLAAYIGLDPSERQSGTFHGTRNKMSKRGSPHARAMLHMAVHNSVYSSKGRPPHNPVLAEYYARKCLSKPIKVAMGAAMHKLCNIIFAVLRNQKPFELRQPELHAASLGIKVA

SEQ ID NO: 483571 - protein, 338 aa, unidentified
MESFVGIDLHKYVSQLAVLRESKSPSQLRFANDVVTVERVLKKLPEGSKIAVEAMGSWWWLVELAQKTGHEVFLSHPKQTKAIASARLKSDKVDALMLAKLLKADLLPTVWIPPATQRHIRELLSHRGRLVRQRTAVINELRAVYAKRNIDPAAKLQRARPIVSGAEDLSGYGPRIVEEDLKLLEFINRQIGGLDKELIKIALEDAQARRLMTIEGVGPVSAVAISCWIGEIGRFSNAKKLASYFGLAPRVRQSGDTERHGHITKEGNRMVRMLLIQAALVHTRRGKGPSRKHYLGVVKRRGKQIARVAVANKLIGAIFHMMKEGIDYPDFIRRSGAQ

SEQ ID NO: 483572 - protein, 345 aa, unidentified
MFYVGVDLHKNFTQVYGFNDATGEVVERRVSNDKSSIREVMSQFGENAKVVLEATRNWYWFVDLLQEMGIDVVLSNPLQTKAIAYAKVKTDKVDARMLSHLLRADLIPFAWIPSMEEREIREMLRTRLTLVRIRARFKNLVRSILAKLNIVLSHGDIWRGKGRKELEQLNLPSPYNEILPHYLSIIDNLDKYIEEWNRKIERIAKETPEVFLLKSVPGIGTISALTILYETGPIDRFPSAKRYSSYAGLVPRVKGSGGKFKTGHLSRQANMYLKWIYVEIATGIVRIGKGYLYEYYKKQMYKKGKNVAKIALARKISRMVYHLLKQHITYDTFVERNVNKMRRTG

SEQ ID NO: 483573 - protein, 332 aa, unidentified
MQTPRLFIGIDIHKKSWAVSIRTDLFEHKTFNMPSEPDTLIGYVNQHFNSYPVECCYEASCCGFIPYRKLTQAGWDVKVLNPSDIPTSAKNKDQKNDRMDCRNLAKQLQSGHLTGIYVPDEQQEQLRSLFRQKNNMAKVMRKLKSQIKGELLYYGIKLPLKFDNATWTREMTTWLNNLEWKYPTGKSSLQSKLRHLSFVRQEWLNINRELRQYVMMYFKNDFQLLMTIPGIGPIIAIGILAELGDIKRFRKFDQLASFVGLIPSIYSTGETVQVRGLTHRSKTLIRSYLIESAWVSVRRDPTMQTYYRSHAGKQPNKVIVKVAHSYYEEYGM

SEQ ID NO: 483574 - protein, 336 aa, unidentified
MNGSIGCWVGVDVAKSKLDVALLDEHGKLKSRVFANEAKGHAALMAWLGQRGCSRQHIRVCMEATGCYSEALAISLVDAGWCVSVVNPARIKGFGQGELLRNKTDRADAALLARFGQAMRPEPWVAPSLEVRQLRALVDRLHNLKEMHQQEANRLEAAMNQTGMRESIESHMQWLQAGIKQLERQIDDHIDGHPQLRADAKLISSIPGVGNTTAAKVMAYLGDVRRFKNAKALAAFIGVTPRLRLSGSSVRGRSMISRSGHAAIRHALYMPALVALKHTPIIKSFAERLKTGGMAPKAVVAACMHKLAHLIYGILKSGTAFDANFMVVRLDSQDGI

SEQ ID NO: 483575 - protein, 379 aa, unidentified
MMPSENRVLIAIELSVSSWFVAVRLPGSEKSRLHRVEGGDTTALLALIRDLRSRAETKLRHAADVACCFEAGRDGFWLHRLLTAHGAISYVLEPTSILVNRRARRAKTDRLDAEGMLRVLAAWLGGDRQVCSIVNVPTPEDEDAKRPHREREHLVQERQRLENRMEALLFTQGIRGRPSLRSWDRDIAKLRTGDGRALPCLMQAELNRLRRRLVLILELIHEMEAERAKALAAKGYDAMTRKIVDLQRIRGIGANFSTVLAREVLYRSFANRRQLASYVGIAPMPYQSGGMDRDRSISRAGNPRARTTLIQLAWLWLRYQPGSALSDWFRGRVGTLQGRTRRIAIVAMARKLLIALWRYVETGVLPDGVELRAMEEATA

SEQ ID NO: 483576 - protein, 411 aa, unidentified
MQVVHERCAGLDVHKQTVVACVLITQPDGTVEREVRTFATMTGDLLALSDWLDSLRVRVVALASTGVYWKPVFNLLEDGRTIILVNPQHIKAVPGRKTDVKDSEWLADLLRHGLLTPSFIPPQPIRELRDLTRYRKSLVEERAREVSRVQKVLEGANIKLASVATDVLGKSGRAMLEALIAGEQDPVVLAELARGRLRAKRQALQLALDGRLVAQHRTVLRHLLAHIDFLEQAIAELEAELARCLAPFEQAVALAQTLPGVAETAAAAIIAEVGIDMSRFPSARHLASWAGVCPGNKQSGGKRLSGATTKGNPYLRSVLAEVAWAISRTKDNYLAAQFHRIARRRGQQKAVMAVAHSVLIILYHMLRDGRPYTDLGAEYFERLEASRLERYHVRRLERLGYTVTLTPVPAA

SEQ ID NO: 483577 - protein, 392 aa, unidentified
MFFLGIDIGKNTHVASLIDDNGKTVFKAFSFPNSTIGATSLLDKLTPFSNGIEIGMEATGHYWLALYSFLVEHGFVIHVINPIQTDGWRNATEIRKHKTDIIDSLIIADFIRYGEFLETSLANEDILSLRNLTRFRNYLVSSIGDLKRKTICILDQIFPEYESVFSNIFGKTSKEILLHFSSPAEFESITSEQLETALEQVSFKKFASKKISYISNIAKTSFGITFGLQSLTLQLKLLIQQINFIEQQVHDVEIQIKQLLHKINTPITTIPGIGDIIGATILGEIGDIERFSNPSKLVAYAGIDASVHQSGDYISTNNKMSKRGSPYLRTALFRAALIASVHDPVFKAYYQKKRSEGKHHLTCLGAVARKLCYTIHAILKNNCEYKVQLPTE

SEQ ID NO: 483578 - protein, 420 aa, unidentified
MYLANATLYVGTDISGKANRTRFYDESGKEVGGRLESANDLPGSKLLAGEALWRAEGIGAEEVLWGLEATNLFWWHLATFLTTHPELLARGLRCYTFNPRQVKKFKESYPDIGKDDWTDAMVIADRLRFGRLPAECYLDERYQPLQRLTRYRRHLVTQLVREKQLALGYVYLKLSAYSTLERPLSDTFGATSQELLESYLTPDEIVAAPIEELAALLKERSRGRVADPEQVAKVVQQAARRSYRLSTSMVEPVNLILSSSLTTIRTLAAQLKPIEKAIAAELEATPPQTLSTIPGLGPVFTAGIVSEIGDVSRFEREESLAKFSGLTWRRHQSGEFEGEDRPLTKTGNAYLRYHMVEAANSVRLSCSEFGSYYQKKFREATSHKHRRALVLTARKLVRLIHSMLRSGRIYQPTGPRRASS

SEQ ID NO: 483579 - protein, 350 aa, unidentified
MSPRNAPRPAAVYGIDIGKNVFHVVGLNSGGEPVQRARFRRDTLLQFFERAAPAIVGMESCAGSQWMARRLQALGHKVRLIPAQFVKPYVKSNKSDIIDAEAIAEAATRPTMRFATIKSEEQADLQALHRVRDQMIGTRTRLINQMRAFCLEYGLALRQGAGLFKLDLPRVLDDASNDLSPAMRRLLTDLFADLRRLEQRIDGMTKEIAAIADREDVARRLMTIPGIGALGATALLAAVGNGRQFRKARDLAAWLGLVPREHSTGGKQKLLGISKRGNRYVRKLLVHGARSCFRHLDRTRDRLGNWLDGLQSRMHPNKAVVALAAKMARIVWVVLTKPGALYERRDPAFA

SEQ ID NO: 483580 - protein, 424 aa, unidentified
MNNTQNKKIAQVSDGTLVIGVDVGSNTHYARAIMARGYEVSKKPFDFENTRDGFDRFVSWANHLAVVYQLKKIFVAIEPTGHYWFNLADYLKAYDVTLVMVAPQHVKHSKEMDDNTQMKNDQKDPLVIARLVAEGRYMIPYIPEDVYAELRSAFNRRCDLVEALTRNTNRMIRWFDMYFPEYRTVYGKADAISGLLILKRAPLPSDILKLGVDGICRIWREAKLRGVGINRARKLVAAAESSIGLKGGEAIRQELWQHMEAHELFKKQLGDIMQMIDGLIAKIPGADRLLKVPGAGIVTVAGFLSEVGDISRFTDPKQIQKLAGLAVVENSSGKRKGKPGISRRGRSRLRRVLFQLAMTTVKSNNEMKAYHQYYTTRKENPLKKMQSLMAIAGKMTRIFYGILKNGTEYNPAIVMKDFKKEVAV

SEQ ID NO: 483581 - protein, 321 aa, unidentified
MKPKFYVGIDVSKDKLDVAVKEAGTDDKFSPAKRAAKVWTTSNTAKGHGELARRLKELGPERIALEATGGYEQKAFRALREAGLPAVILQPLSVREFAKAMGKRAKTDAIDALMIAFFAEVRQPEVLPLPTENQDRIAELRGLRTDFVKTRNQFTNRLETCGAEARAHIEQLLADVEAQIAALDAKLHEALQATPEDAAKAALVLSVPGVGPVTAATLIGELPELGKLDRRRISALVGLAPMNRDSGRQSGKRRIQGGRGDVRQVLYMAALTARRWNPVIRAFADRLATAGKPHKVIMVACMRKLLVILNDVLAHGDCQQL

SEQ ID NO: 483582 - protein, 317 aa, unidentified
MAKSTMVCAGIDTGKRKLDAALGEGRERRQVDNSPAGHSSLSGWLRRHRVKRVGIEASGGYEAPVVAELRRAGFVVILFQPAQVRAYARFVLQRAKNDRIDAELIARCTAAAERVHAPPDPRLAPLAEHLTMLDQLREDVARLKNRRENCRDPHIRQHWGEQIARLKRLYRSALKSLAAAIRRYPDLAQRLDLIASIDGIGLPTAVAILVRMPEIGRVSREESAALAGLAPYDDDSGERVGTRHIDGGRQRLRKALYTAAFAAAFHWNDQLKALYQRLTAAGKPHKVALIACARKLLIYANTVVQRGTPWRAKPAAA

SEQ ID NO: 483583 - protein, 338 aa, unidentified
MKLYGGIDLHSNNSVIALLDEEDKPVYRRRLPNDLSVILGELTAYQDAIEGLVVESTYNWYWLVDGLMETGYRVHLANTAAIVQYEGLKYSDDDSDACWLAKLLRLGLLPEGYIYPKAERAVRDLLRKRGQLVRQRTANLLAVQNLLARNLGYSLSANAIKRLALEAVDRLLPDAYLALAVKSNLAIMRSLDESIEQLEKTVKTCIKPRPEFQPLLSVSGIGDILGLTILLETGEISRFTQVGHYASYCRCVGSERISNGKRKGRGNTKNGNRYLAWAFVEAANFAVRYNPKIKRYYQRKCARSNGIVAIKTVAHKLARACYYILRDRVPFDVNKAFT

SEQ ID NO: 483584 - protein, 322 aa, unidentified
MTAIAMGIDVDSRNLEICVVIDEDASNAVRETVPNQQKDFHRILKCLKQQKISRVLMEASGGYEQNVANYLTANGLDVYVVNPRQARNFARGIGLNAKTDKIDAFALGRMAQVAKLPPKVRPRPNQVKLKQWVTRRSKLMENMQAERNRKRLADAEMKESIQTHIQFLKKEIEQIEKRIEEIIRSDESMAAKKRVLTQFKGIGDKTAAAMLGLVPELGYISNEKVSSLVGLAPMANDSGTFKGKRFITGGRTHARKALYMPAWVTVQRDPVMTEFYQRLISRGKLKKVSIVAVMRKMLVRMNAAIRNYIETEEKKSNQGITK

SEQ ID NO: 483585 - protein, 404 aa, unidentified
MSELWAGTDAGKTEHHCTVIDADGTKVLSRRVANNEDELLQLLGDVLDLADGDPVTWAVDLNAGGAALWIALLVNHGQRLFYIPGRTVHHASGAYRGDGKSDAKDAFVIADQARMRRDLQPLQETSEIAVDLKILTARRMDLSADRTRAINRLRAQMLEYFPALERAFDYSTSKTALILLTGYQTPAALRRIGRARLATWLKNHGVRTLRTAKSAADAAVAAAEAQFTVVPGEKTAAKMVHTLAKEVMALDQEIAELEVLIEGRFREHPDAELITSMPGIGDMLGAEFIAATGGDMTAFGSADRLAGVAGLAPVPRDSGKVSGNLRRPRRYSRRLLRMFYLSAQVAAIHCPQSKTFYQRKRAEGKSHKQAVLALARRRLNVLWALIRDHRTFEAVIPSPAATAA

SEQ ID NO: 483586 - protein, 402 aa, unidentified
MAKNPTRFIGLDIHKEYFVAVGVNVEREVVFGPQRVSNYQLDDWVQRVLTLEDAVVLEMSTNTYLFYDTMLPNVHSVIAVHPPNVALVTNAPVKTDKKAALALAQLHAGGMLTGVWIPPQKVRDLRSLIARREKMVRLSTMAKNRLHSALHRNHLVPPESPFGPEQRAWWESLPLSDTEQFLVRADLDMLEFAQKQVGQVEDCLKQESAGDKRMPLLVQLPGVAMLTAITILAAIGDITRFPNAKKLVGYAGLGTRLHDSGMTHSAGRITKAGRRDLRRAMVNAANHAVEHHVHWKKELERMESHLGRSKAIVAIARKLLVAVWHVLNEQVADRFANPRDVANSFFRYAYKVGVHNLPEGQSALSFTRDQLDRLKLGQDLLVVPVGAKKHKLPPSRLLLEKE

SEQ ID NO: 483587 - protein, 373 aa, unidentified
MPKYSTAFGMDVHLRSTTVCALDADTGEAVTRRFPGNPWGEIAGWMDGFPGPSLAAYESGYLGFAPQRELAGLGVECVVAAVSKIPRSAADSASKNDRNDAARMAKAILAHDISPVWVPSPEVEGIRDLAGAYDGATARLATAKQRLLAFLARRGFVYGGTTPAGNPRKYWTYDFLRWLDKVRPEDDGGVRALAALRNEVEAAAEARADLLSEYRAAVDASPIAAEVAVLQSIKGCAFALAAAFSAEVGDFTRFRSGRQVTAYFGLAPSQRSSGDSVRLGGISGAGSALVRKLAVEGSWCYAAARHQPKLMPRDTGVPLEIRMHGRKGSERLLRRREEMLARGVPAAKANAATAAELVRWLWALGMMCREGAE

SEQ ID NO: 483588 - protein, 312 aa, unidentified
MTKKICGVDVSSEWLDARLGRHGESLRVERSAQGISALAAFCREHGVELAVLEATGGYEQLAFGLLWAQGVPCALANPRSVRRFAEAMGLLEKTDRIDAGVIAWYAEAKHLVGQQPASAAQRQLRALSDRLRQLTELAVMQSNQRRLVEEPAVQAMFDELLATIRRQVRALERQIAALIEDDPLWARLAEAFREIKGVAGRTVARLMAEMPEIGTLNGKAVGKLAGLAPLANDSGKRQGWRSIRGGREGVRSILFVVAEIVRRHDPDFAAFHRRLKDAGKKPKVIRVALARKLLVRLNAKARDVRAELAMAA

SEQ ID NO: 483589 - protein, 426 aa, unidentified
MSERDYSKQVARRQRIRSTSLVVGVDVGKAYNAVGFMNKEGKILGSCAKVYNSREGFEQFMKMVEDLKVQYGLKDVLIGMEPTGHYWRKLAYFAKEHGYEVRFIRTTALKHHRELDESSSAKSDQRDALTLSNITREGKYIDTVIEDGRMRQLRTLVKLREKIQKRNGGAKNSLHAVLDDYFPELKEIFWSMHARGLWALLERCPFPVDVLALKGSVLKEIIGRASRRRAEASGKAKALYQAAKESIGLRQIGNADRYRLRMCLDEVKRTELMIKDIEREIKRMLKEIPQAEHLLSIPGIGPISAAVFLGELGNPSYFQTARQVVKYAGYDPQESDSGNWISRKFISKKGRWLLRKHLFLMSMRVVVLSRYFQEYYQRKLQAKNRFGQLPRKKEVLCAVAIKLIKVIFALLRDQRDFEDTVAYSVE

SEQ ID NO: 483590 - protein, 437 aa, unidentified
MRRKKSKASKSVNLQSLPVIHPDAAGIDVGAKEHVVAVPCDRDERPVRTFQAFTPELHELAAWLKRCGVRSVALESTGIYWISLYEVLEQHGFAIRVVNARHVKNVPGRTKTDVLDCQWIQKLHSFGLLNGSFRPDQQIRKLRTYLRLRDNLVVSSTQAVHHMQKALFEMNIQLSNVISDIVGESGLRIIEAIIAGERDPEELAALCGTRIKASRQTVAKSLHGNWDEALLFCLQSALETYRFSQLKIQDCDGYIERHLAEFESRAQLPSSPKDLQAHLHRICGVDLTKIPGIKEQSAQIIISEVGLDMTKWNTEKQFSSFLGLCPNNSISGGKVLRRATRKVYNRAADSLRLCAQSLTHSKSALGAKYRRLRARLGAPKAVVAMAHHLARLVYRMLRYGDKYVEKGIEHYEKKLRQQRIKWLKKEASSLNLQLVVL

SEQ ID NO: 483591 - protein, 408 aa, unidentified
MEVLHQRCAGLDVHKATVVGCLRVQERGRVRHEVRRWGTTTAELLALGDWLRQAGCTHVAMEATGVYWKPVWHILEGELDLLLANPAHIRNVPGRKSDVNDATWIADLLAHGLIRASLVPPGPIQALRDLTRTRKQLMREIGQHKQRIQKVLEDANVKLASVVSDVFGESGRRMLKALSAGETDPSQLAALRDGRLTASRETLAAALHGKVTAHHRFLLSQHLGTIAHLEQTVAAFERQIEAMVASFNTAVACLVTIPGISVTAAHVIIAEIGVDMSRFATAAHLRSWAGLCPQLNESAGKVMSRRLRHGAPWLKTVLVQCAWAATRNKNNYLHAQFVRLRARRGPQKAIIAVAASILTTAYYLLRDQVAYRDLGSLYFARMDKERTAQRLARRIKELGYEVEIRKAA

SEQ ID NO: 483592 - protein, 355 aa, unidentified
MNSEKYIGLDVHQATISVAVMDSQGKIVMESVLETKASTLLEFLAGLRGSLFVTFEEGTWAAWLYDLLKPHVTEVLVCNPRKLPVLKQGNKSDRIDARKLAERLRLHDLKPVYHGETGVRMLRELARSYLTVVKDLSRVMNRLKALYRSWAIPCAGRDVYYTRHRSQWLEKIPEAGTRRRAEQLYQQLDMLQHLRQQARRELLAEGRKHSITAKLRKIPSLGPIRSALAVALIQTPHRFRSKRQLWTYSGLGLETRDSGEYHYVRGQVRRRKKQATIRGLNKDYNHDLKGLFKGVATRASVQPGPFQEFYQRSLAKGIKPTMVRLTLARKIAAITLTLWKKGDDFDIDKLKSQAA

SEQ ID NO: 483593 - protein, 338 aa, unidentified
MKTYAAIDLHSNNGVLVVTDETDRVLRQKKLANKLELFVAELEPFRATLQGVAVESTFNWYWLVDGLLKHGFPMMLVNTAAIQQYEGLKYTDDPYDARWLAHMLRLGILPTGHIYPREERAVRDLLRKRSSLVQQRTANILSVQNLEQRNRGTKISSREVKKLTEESIGELYDNEDLGLALTTTIKVIEALTEQICCLEKAVLKKARLRDEFKLLLTVWGIGDILGLTIMYEAGDMSRFADAGPFASYCRCVQAQRLSNGKKKGENNRKNGNRYLAWAFVEAAHYAIRYYPEAKRFYDRKAARTLPVVAIKAIAHKLARASYHVLHDQKPFDPKKVFS

SEQ ID NO: 483594 - protein, 394 aa, unidentified
MGKLYVGIDISKDRSSAKGIDEHGRSCFEISFDMDGTGFTELLKAIEANSKGNEGVVAGMESTACYHINLYSFLSAKDIEAVVINPLLIANFAKLSLRKTKTDKKDASTIAQFILAHRESVKQLAVSQDQQDIRDMARERESLCHQMSAAKVEIRRLLNTTFPELESMCNPFTKVMLHFIQRFPSARLVSVTKPNSIAKTLKEKPCSCRIRFTPAELINIARKSIATVSPGKEIILSGKIDTLLHLQKRRDELSKALTKYCESSVIEDLKIVTSIDGIGNNTATTFLAEIGRIDNYASHKNLIAFAGIDPTVYQSGKYEGASKISKRGNRHLRRVIWIMTVRVINHNPTFRNFFFKKRNEGQPFKKAVFATAHKLVRVIFAMLSHRTYFQEECI

SEQ ID NO: 483595 - protein, 370 aa, unidentified
MERTFVGLDVHARSVVACALDDVTGELSKARLVPDHETVLAWLRGLSEPVAVVYEAGPTGYGLARFLTGRGVRCVVAAPSKMHRPSGDRVKTDARDALLLARLLRLGEITAVTVPSLAQEAARDLVRVREDVRADLMRARHRTSKLLLRQGILWSGGTAWTGAHEQWLGQQHFELAGLQAAYDTTLETVLLATSRRARLDRAIVEMAHEGQWWPVVARLQCLRGVSTLTAFGLAVEVGDWTRFSGSTIGAYLGLVPTESSSGEGRHQGSITKTGNTHARRLLVEAAWHHRRPYRPSKTMRDRWDLAPAVARARGHAGNQRLHERWVCFNERKKRTVIANVAVARELAGWCWSLATLTEDTPPTRGPRGGR

SEQ ID NO: 483596 - protein, 471 aa, unidentified
MSKEAPVKRQLRRRAPKPRQSPAALARLHPHAAGIDCGSAEHFVAVPPDRDPTPVQSFPTFTGDLHRLADWLQACRVTHVAMEATGVYWIPIFEILDARGFEVILVNARHVKNLPGRKSDVSDCEWLRDLHVLGLLRGSFRPADGIVALRGYLRHRTTLIESAGALVQRMQKALVQMNVQLPLVVSDITGVTGLRILRDIVAGQRDPQHLAQHRDVRCHASEAEIVAALRGNYRPEHVFVLQQNLELFDTYQQQLAACDGALEAHLAQLAVIPAPPGSPLPAPRRRRKPKEHEPGFDLRTPLHQLTGVDLSQIDGIGPYNALRLLSEIGTDMARWPTAKHFTSWLTLAPQNRVSGGRLLNSRTQPSANRAAAIFRMAAMTLGRTQTALGAFYRRVAFRIGKPKAITATARKLAVLVYRMLKDHLVYIDPGAEAYEAQDRTRVVRRLRQRAEHLGFGLVNLSTGEVIEGAVS

SEQ ID NO: 483597 - protein, 278 aa, unidentified
MDATTYGLDVAKRVFQMYWVEAETGEIVNQRFDRDELIRFLARRPPGRIALEAGGSAHWWARRIKAQGHEALLLHAKFIRPFVQTNKTDAADARAIWTAVQQPGMRTVAAKTEDQQAMLSLHRMRALLVKFRTMQVNQLRGLLYEFGATFRAGRAAGLAEIRARTAELEDALPGTMVCCLQDQLRRIEELQRDIDLLEKRIGVWQKQDAACHAITAVPGIGRLTATALVATMGDAKSFRSGREFAAFLGLVPRQSGTGGKVRLGPVNTIAVHRRSARS

SEQ ID NO: 483598 - protein, 359 aa, unidentified
MDSSRDEPRTIAGLDLGDKYSYLCLIDQHSGEVIEEGRLRTAPEAFRRRFVSEKPMRIAIEAGTHSPWASRILEECGHEVLVANARKLRLIYANKQKTDEIDAENLARLARLDPKLLYPLKHRGEEGQAHMAIIRSRQALVGCRTQLVNHVRGAVKSFGGRLPKCPARSFHNKAAEHIPAALWPALGPILEQIGSLTQRIRNYERQLETISKERYPETELLRQVEGIGPLTALTFVLTIEDPYRFEKSRSVGAYLGLVPARDQSGERDPQKHITKEGDEMLRKLLVSGAHYILGPFGSDSDLRRHGEKIASRGGKNAKKRAVVAVARKLAVLLHSLWVSGEVYDPLYNTHRRERREEAA

SEQ ID NO: 483599 - protein, 368 aa, unidentified
MMHTTTFIGLDVHARKIVAAALDTMTGEVHSATFGYDAAAVADWIRSVAPSAKCVYESGVTGLDLQKRLTGLGVDCAIGAVSKMIKPSADRRRKNDRNDAEFLARMLSVGNIVEVWIPDDECEAARDLVRALDDARDDLRRCKQRLSKFLLRHGLVFDETTPTGRRKGNWTAAHWAWIRSIEFSEKSDNDVLAYYIDAVRQATEDKKRLERLVEAEASKPRWKKRVDSLRCLKGVDIMTAADIVFEAGEFARFGNARAFAAWLGLVPSEHSSGEKIVQGGITKAGNRHLRRVMVEAAWHYNHCSAHSKDLSAGQAPDPAAMRHAAKGVRRLVERRRGLLGRGMQKKKANVATARELACWCWAVGCMAE

SEQ ID NO: 483600 - protein, 346 aa, unidentified
MTHSTTVGVDLAKNVIQVSVISARGKELSNRSLTRRKFAEFLAKQKPSLVAFEACATCHYWARAAQRHGHEVRIIPAKYVAPFRQGHKTDSNDALAVAEAARRPSIKEAPMKTVEQQGLQAIHRSRQLLIQECTALSNHLRGLLMEFGVIIPQGFASLLRAVPEVLEDGENELPDLYRPTLHRMYTRLLELREDIEAMTKEVEVLVRQHPICSRLTALEGIGPIGALLLYATLGSGNAFSGSREFAAYLGLAPRQYSSGGKTTIVGLSKKVGNSRLRSILILGARAYTYRLKEPKSAKDRWLKNAIDRNGHSRAAIALANKNVRTAWAMVTQGTEYQRRGQLKVAA

SEQ ID NO: 483601 - protein, 326 aa, unidentified
MTAIVGIDIAQDKFDVCLMDAEGQRHQEAFANTRSGINKLHTWLKKRGAKTAQVGLEATGIYGELVAETLHQRGYRVSVVNPARIKAYAASQMQRNKTDTLDAALIADYCRTQQPPAWTPPSPELKELRALVRHLDTLKREKQRARNRLAAQNASQAVARQLRAQITFLEKQIAQTEQLIRQHIDHYPDLKQQRDLLKSIPGIGDITACHLIAELGDLRRFDDVREVVAFIGLNPRQHQSGKKRVTHGISRMGRASLRAALYMPAIVAKRCNPRLKAWAEQLTQRGLTGKQVIVALMRKLVHLAYGVLKSGRAFDPHYGHPMPVAA

SEQ ID NO: 483602 - protein, 351 aa, unidentified
MRGAVHMQITTIGLDIAKNVFQVHGIDSNEKVVVRKQLRRSQVLAFFKTLQPCLVGMEACATAHYWARELTKLGHRVRLMPAKDVKAYVKRNKNDAADAEAICEAVRRPTMRFVPVKSAAQQSQLMLHRTRDLLMRQRTQVINALRAHMAELGIVAAQGRDGIKELLKIIASEQDARLPVDAHTSLVVLATQLQALQTMIGSIEKRIVVQHRSNEASKRLATIPGIGVIGATAIAATVPDPKVFRSGRDLAAWIGLVPREGSTGGKQKLGPISKQGDQYLRRILVVGAHAVLKRARQQPEKYPWLTGLLARKPFRVVAVALANKMARIAWALLAKGGTYRAPALTAASLTG

SEQ ID NO: 483603 - protein, 393 aa, unidentified
MPMERLMPKFDDLSRSLVALDQDSTLIAVIELSRSSWLVGGLVPGLAREPVKKLAADPDALLALLYRWRDQAAASGHAVMRICVAYEAGRDGFWLARWLRARGIDCDVIHPTSVSVSREHRRAKTDRLDLGLLKRSYLGWLRGERRHCSMVAVPTREEEDGKRPLRERDRLVGEATRLVNRIKGLLALHGIARFDVRSKAAPQVPPKLRTAEGEALPPNTLAELLRACERLQQIRAQIATIEAARRQQLQEAAEIGAHPMIRLVARVKGVGTATAELVVREALSRHLRDHRAVARYAGLTGAPDESGSKRREKGLAKAGNARVRRALIQLAWRFLRHQPDSALARWFRQRTQDGRGTTRKTMIVALARKLLIALWRLATAGEVPADVRLHAAI

SEQ ID NO: 483604 - protein, 364 aa, unidentified
MADCITWVGMDDSAKTINLAIFKGQEVNPREELVIVNDSTGLGRMAKKLKTLSGEVRCVYEAGINGYYLQRFLAKHGISCDIAAPSLTPRRAGNRVKTDKLDAKAIARLYRAGELTCIVIPQKEQESLRDLVRAREDALEDQQRARHRLARFLMRRGWRYRDGKNWSQGHLRWVKSLRFEDDRDQMVLDEYRLALAEQTDRLHKLNEKIEEVAMQPAYEKRVRYWMALKGVRVLTAMTIIAEALDLRRFTDAPAFMAAIGVVPSENSSGSVERKGRITKTGNSHIRRVMIESAWTYQHSSASSETVRKRRQGLPAEVMEIARQCDKRLHQKFRRMAGRGKERQKIAVAVSRELAGFVWAIGKVA

SEQ ID NO: 483605 - protein, 416 aa, unidentified
MDTMYERCCGLDIHQKTIEACFRSGKKKTHMSFGTTSAELRKLTMWLVENDCQSVAMESTGSYWKPIFNILELSGTDMEIIVVNARHMKNVPGRKTDVHDAEWIAELLQYGLLRPSFIPDREQRELRELSRYRKSLVGERAREINRLQKMLEGGNIKLTSVVSEVTGYSSRRLLDRLLRNDEPMTEDVISGLVHTSLAGKSKELETALDGLLSELQKELLIKVLDHIDDMSRRIADLDDFCRKQMKKYEDALDKLDEIPGIARRTAETILIETGLDMSRFPTAKHFARWAGLAPGNNESAGKRSSGRTTKGNPTLKSTLIQSAKVAARKKNSFFKARYQKIAAKRGANRASVAVAHSMLIAIYHILKSGERFKDLGEDYYNQFNREKKKNYYLKKLTKLGVNLKEATLSISIQTAT

SEQ ID NO: 483606 - protein, 401 aa, unidentified
MAVAVGIDVAKDFHWAVITVAESGKVLLSRRVDNTPSDIGALVGQIAEAQAAHGPATVGIDVLGGIAALLEAMLLQADLTVVHVPGIAVNRARRATVGGERKSDPKDARVIADQVRMRGDLRPVQPDRELDIELRLLVGRRGDLVTDATRRAARLRDLLTSIHPGLERIVDVTSKLGLHLLTRYVTPGEIRSAGVEGLLAHLGQVRNVKASTIRALAEAAARAATAQHVVIPGERVAADLVRELAAEALAAQERLKQIDARIRKVLDRHPDGALILSMPGMGATLTAQFLAETRGIARFASPDQLASAAGLAPVLKQSGKVRYLQRATAGNKALKRVFYQSAFIAITCDAASRAFYERKRAAGKRHHQALIALARRRVNVLHAILRNRTPYDPGHRVRAAA

SEQ ID NO: 483607 - protein, 379 aa, unidentified
MQRVIGMDIHRTFAEVVFWEAGRLRLGGRIDMTRSGLEGFGRSLSKEDEVVVEATGNAMAVVRVLSPYVARVIVANPLQVKAIAHAHVKTDKIDAGVLASLRAAGFLPEVWLPDADTELRRRLVARRNQVVRHRTRIKNEVHSILQAHLIPPCPHADLFGRLGRSWLGRQELPVDERAAIERHLRELDRLGEDLELLDREIAERVIDDPSVKRLLTITGVNINVAAGLVAAIGDIRRFSSPQKLVSYVGLNPRVRQSGLGLAQHGRISKRGRACHAGRGGLGCLQGTRPAAFVLPAYPSPTWSPGRSGRCSTQTRRALLAFADQRCRLPMGASRAGRPQNTRDAASGWTAGQKGQQAWRGLCLQHQGTAQSRDRCRAPR

SEQ ID NO: 483608 - protein, 341 aa, unidentified
MNSTVIAVDLAKSIFEVAVSEKPGVVSERHRLNRREFATFFGSRLAATVLLEACGSSHGWARRIGRFGHRVLLIPPHVVRRYVNGNKTDRADAKALLEAYRNAEIHFVPVKSEAHQAVTGLHRIRSGWVGTRTARINETRGLLREFGHTLPVGAARFVELASAVIGDLENSLPQALRSTLELILAEILELETRIDRVEKLIGTIAKQTPVVASLRTISGVGLLTSTYAWASIVDATRFPSGRHLAKSVGLTPTEQSSGNRRWLGHITKRGDRYLRTLLIHGGRSVLRAAKVKKNRSRFETWALDREKAIGHNRAAVAVANKLARFMWVVWTKGVDYQPQAA

SEQ ID NO: 483609 - protein, 416 aa, unidentified
MKLFIGLDVSSQKLDTCFLTDSKEILFEGSLSNDLIGASEIKQRILDYQETFGFCRIVIGMESTSVYSFHPAMFFYLDEDLKLLPVEVTVENPYRIKQYSRMFDQDKTDKIDAQIIADYLRVDLHTLSPIKEEVYVGLQRLTRSRYQLVTQMVEANQHFLENLTYKCNTLSKELANEDNKTSIFGASIMNLLTEGITLDEFSEMPLESAAELLQKLGKGRFKNPEQLVKSIQKAVRSSYRLGKVTKNSIDLVLGIIANEIKFLKKQIKEIEKAITALLETIPEAQCLLSVPGLGAVYTAGLIAEIGQIERFDDQSKLAKYAGLTWSKNQSGNSQSENTPLNRSGNRYFRYYLIEATNRVRSTLPEFKEYYQKKKNEVPKHKHKRALVLTGRKFVRLIDALLRNGQFYQPAKVVIEK

SEQ ID NO: 483610 - protein, 430 aa, unidentified
MNESVSEQPVNPKVAAFVGIDWADLKHDVVLRSVGDPTKSEHQIIKSEINALADWIAQMHERFGAKGKVLVCLEQSRGALIYQLMAYELFELYPINPSQLANYRKAFFSSGAKDDRPDADLLSELVMCHRDRLKPWKPDDQLTRELASLNEGRRNAVDRRTDLANEIKSQLKLYFPVALQLLENDITTALAADLLVQWPTLAELQKVSPAKLRKFFYGHHSRQEKKILERLALIKEAKPLTTDLAILRPNALRVKLLAQQLKSLLPFIAEYERRIAEIFGSHPDRFLFDNLPGAGPALAPRLLTAFGTDRDRFEVAGDLLSLSGIGPVRIASGKKTGKHASVHCRRACPKFLRQSFHEFGECSIRYSPWAQACYQAQRDRGKGHHAAVRAVTFKWIRILFACWKQRTPYDPQRYFQALQTRGSDYAQTTA

SEQ ID NO: 483611 - protein, 429 aa, unidentified
MNSTQNKKIEQVKETTMIVGIDVGSEKHYFRAFNWRGIELTRKPVAFSNSMEGFNSFYNSVVELMQKNELKEALVGIEPTGHYWFDLGQFMGEKNIKFVMVNPHHVHKTKELDDNSPSKNDRKDPRVIAGLVRDGRYFYSYMPTGVYAELRNASNRRFVLVEEQTRAKNRLQKWVAVYFPEYKGIYTHIDAKGGLLVLKQAPTPEEIVRLGVEGIIKIWKDAKLRGNGHKKAMLILNAAMKSIGLKAGLTEARMEIQDLIEDYELQTKRLERVNDLIKELCQQVRYADKLLEIKGIGITTVAGFIAEVGDITRFDSTKELQKLAGLELVADSSGKHDGKTKISKRGRKRLRYLLFEAAISVVGKNEEFKEIHRYYTTREKNPLKKMQSLIAVACKLIRVFHVILTKGISYDASKMLKDIRHPGEQLKAA

SEQ ID NO: 483612 - protein, 472 aa, unidentified
MFSWLGHLRVLPVSNARLFGVLHIVDALIHTEMKGCVTLSKFINDFVVGIDVSSEFSVVAMLEPNGSLIRKPFKIDHNPKGFNALLDILKKEEERLKQKPIYFVESTGIFHLPLFFFLRSNDLKGFVLNPLCVHSTKNFDLRKVKNDAKDAESIARLAKFQEVKYFLVPEPQILALRMMAREYYALSDMLTEMKNRLCTDLYLLFPGYINVFGNPFGKASLEILKRYPSPRAVLAADVTELTTMISKISRKTIPWAQQKVNTLLEISKLAESMPMDFGVLSIKIKYHLDGIESLQNSLDGLLEQLRFMIESPQFPVKVRRYIELLNAMPGIGFLTAVTLMAEIGDFTKFNSPKAFVAFFGIDPSVNQSGKFNGDRNKISKRGTRFGRRVLFTAALASIRTTRKGDAINPILRDYYHQKCENKKKKVALVAVMHKLLNYIFAVLRDEKPFALRSPNDHQSWRHTKETVLKLVA

SEQ ID NO: 483613 - protein, 400 aa, unidentified
MSLAVGIDVGAYKCAVAVCREGEREAERKVLNITTQRGGFSDLDAWMVQQAAPIDVVVMESSGHYWFNLASHLRRQGYPVAVVNPLQAKYFAKSRLQRSKSDPADARTLAALGTHDQPRISEPLVGAELKEAARFAMRLVREQAQVCQRIQRLVDIGFPELREVWDDPTCVSALAVLRHAPTAAAVTRMHQDRIARLKRPGVGGRVIGPMKAAQLKQLAQTSVAAPELEKQVRFEMRLLIAQHDLFDQQIASADARVASLLDGEVSQRLLSIPGVGPSTAATLMAEIGDIWRFSDVDQLLACAGVHPKEQSSGQKGANPETSWTMAKTGNTYLRAAAYRMAVVGVQHNPILRAHYARKRAAGKSAMNALGHCMSKSLAIVWGVWRGGKDFDPAHASAGSA

SEQ ID NO: 483614 - protein, 345 aa, unidentified
MSMVRMIVGGVDTHADTHVAAVVDSNGGVLGIESFPADHGGFEALLGWLASHGEVDCVGVEGTGSWGVGLARFLHDHGISVIEVDRPNRQDRRRVGKSDPTDALSAARAALSGSASVIPKTRNGPVEEIRILLVARRSARSQRIETLNQLRHLIYTGPETVRSRFKDRYKTGLVSEVAKLRPRKGSDPVLFTTQVTMRGLARRIQSFNSEIKGLDGMLVELVTNTAPSLVSLYGVGTDTAATLLVAAGDNPDRLRSERSWAHLCGVSPIPAGSGKTSGRHRLNRGGNRQANAALYRIVLTRMSQDPRTKTYVARRRGEGKNTAEIIRCLKRYVARETFRHLPRTA

SEQ ID NO: 483615 - protein, 312 aa, unidentified
MIEQCFGGIDVSQDRLDVLLLPQGTGFSVANDEAGWSTLIGRLRGLPVAAIGLEPSGGYERGVLRALLAAGLSVRRINPNRLRQFARARGALAKNDRLDARLIAEYVATMPTHVVRHDPAAARIAEIVTMRRQLCDEHVAIENQAAQLEDAMLRRLAKRRLARIETDIRLLEKRLTQMIAAEADLARRYARLTSMPGVGPVLAFTLIALLPELGRMSRKQIAALVGLAPYDFDSGKLRGHRSIYGGRMPVRNVLYMAALSACRYNPALRTFHKRLAAAGKKPKVILVAVMRKMITTLNAMLRDGASWQPQAA

SEQ ID NO: 483616 - protein, 460 aa, unidentified
MRKPTEKQLSGRKRTGKSGFPLLNPDAAGIDVGAREHYVAVPADRDAQPVRCFGAFTEDLQRLAQWLLQCGIKTVAMEATGVYWIPLYQILESYGLAVKLVNARHVKHVPGRKSDVQDCQWLQQLESFGLLSGSFRPEAKICVLRSYMRQREMLIRQASRHIQQMQKALTQMNIKLHQVISDLSGDTGLRIVRAIVAGERDRLKLAALKDRRIKSEVALIAKALEGDYRAEHLFALKQALELYDYYQRKIAECDAEIYKEMKTLETRGSAAPLAKHKPRSSHNPLGFASQAELYRIMGVDLTRIDGVNENTAQLILSELGLDICQKWPTEAQFTSWLGLCPNHEISGGKLLKHGTRKVVNRVANALRMCAQSLLNSKSALGAYARRMRARKDTPVAITATAHKLARLIYRTLKYGQDYVDVGSDSYEAKYKAAVVKSLQKRAQSLGYQLVSCQTPGAVVP

SEQ ID NO: 483617 - protein, 428 aa, unidentified
MNLTQDAKISQVTEKTIVIGVDIASEVHFARAFDWRGIELDKVYSFENSAEGFRSFTEWVSGISEKTKKGHVMIGAEPTGHYWFSLGIYLRDKGVKLVLVNPYHVKQSKELDDNHPGKSDRKDPKTIAKLVIDGRYNEPYIPEGVYAELRVVMNSRWRILREMTALKNQIHRWLKIYFPEHATVFGSFDCVSSMAILRTAPLPEDLRELGADGINAVWRRAKLKAVGLKRATRLHAAANDTIGCADGIAAARMDLWLLLDDYEAKCQQYSAVMSVAEELCNQIPEVAELLKIKGVGLITVAGFLAEVGDLRRFESPRQIQKLAGLAIKENSSGKHKGQTSISKRGRAKLRAILFRAAISLAATNSEFREIHRYYTTRANNPLKKKQSIVAMSCKLIRVFHTIVVKGRIYDPEKLLADIHRNQPDTMAA

SEQ ID NO: 483618 - protein, 321 aa, unidentified
MNTFYLGIDVAKAKLDCALRLANGKYKNKVIDNNLPGFKQLSEWLVKQQVTTLQVCMEATGVYWEAVAEYLADQGVLVSVVNPAQIKAFGKSHGVRSKTDKIDAQSIALFCAEHHPKAWQAPTPGERALRAMVLRLESLQVMRTQESNRLLVARDAVKPGITSHIEWLDKEIKALAKKISEHLDSDPDLKDKQALLDSIPGLGERTIATYLAFYANPADFGNARRAAAFAGLEPRHHESGSSVKHPPRMSKIGHAFLRKAFYMPAMVTLYKTAWGKRFRERLAAAGKPPKLIIGAMMRKLIHVAFGVLKSGKMFDPALHGC

SEQ ID NO: 483619 - protein, 380 aa, unidentified
MEKACGLDVHKDSVFACILDEEGKKRLEKRFGTVTGDLIALRDTLVEHGCGRVAMESTSIYWLPIWHVLESDFDLTLVNPYFIKQLPGRKSDAKDAQWLAECLQKNLLKRSFVAGDLLQQMRQFTRQHRRLTKNKVRIEQQQDNQLQRCNIRFSNYVSRQGNNVSLRKIIKAIISGERDPVRLCRLVHGRTRNKHGEQVITDSLSGIIQQTDVEILIQCMEQINLIEKQQATCLNHLEELANQHFAEEISLLCTIPGVKTFSALCILAEIGNDMSAFQKATHLVGWAGLRPRNDETAEKIRSRKILHGNKYLRQILVEISWAATRSNKSFLGRKFNILSKRMLSQKALIAITRKILVIIYNVLKTKQPFDINRNLQTVKV

SEQ ID NO: 483620 - protein, 314 aa, unidentified
MAMPASRPEIGIDAAKDNLVIHHQDLNQTLTIDNTPQAIRQWLATLPEGCDIAIEATSTYHMDLTERAHAKGHRVYVVDGYRLSHYRKGVGGRAKTDLADAQLLARHLHKEKDELRPWSPPPKAYRMLQSLLRRRAALVKARTALRQSLSGEPELKAPLQTLIAEMDRIDTLIQKRLKSAVSAAGLQTQVQRCDAIDGVGEITATALVMAFLRGDFKNSDAFVAFLGLDVRVRDSGKLTGKRKLTKQGDTEVRRLLHCAAMSASRHPVWRAFYQRYRDRGLHTTQALVILARKIARTAFALMKQQQEYCPAKLF

SEQ ID NO: 483621 - protein, 348 aa, unidentified
MVVLGIDAHKRTHTVVAVDEVGRQLGVRVTQATSTAAHLELVAWADRFGSERVWAVEDCRHLSRRLERDLLGAGERIVRVPPKLMAHARDAARTYGKSDPIDALAVARAALREPGLPTARLEGPERELRLLADHREDLVAERTRATGRLRWHLHELDPSWDPKPRSLSRRTHITAVEARLAGLEGMVARLAADLTARIAALTQDANALEREITIRVRALAPALLALPGVAALTAAKIVAETAGADRFKSKDAYARHNGTAPLPAWSANPNRHRLSRTGNRQLNCALHRIAVTQKRCHQPAQAYLQRRTTAGDTPTEALRALKRRLSDIIYRTLLADTADTTATSSQAA

SEQ ID NO: 483622 - protein, 330 aa, unidentified
MESWNVILGVDVSKLTLDICWAERNLHIKIDNCSAGFCVLKKWCKTQAIDLKKTIVVMEYTGGYEYRFIQFCESSSIFYCRIPGLEIKQSRGMTRGKSDQADAFRIGEYGEQKIKKLTPSKPLDCNILTLRQLLSFRKRLVCEKAGFESTVKERKHMYPIKKTDTVIHIAQAKIKADKKYITQVEQQIMEIIKANESMWLNYRIIRSIKGIGPVNAWMTIAYTENFTSFTDPRKYAVFVGVIPFEHTSGTSVKRRSRVSPLAHKGLKQELNQAAKAAIAHDPEIGAYAERKLKNKAYPLVLNNVKFKLILRMFSLVKRGEMYVENYQRAA

SEQ ID NO: 483623 - protein, 433 aa, unidentified
MIRAILEHCAGIDVGKSVVAVCVMTGEAAAEPHVEYGTYGTFTADLERMKEWLLAAGCTHVLMESTGSYWKPIFNVLEDRLEVYVANAEDVKGRKGHKTDKQDSWWLAHLFRHGMVRTSFIPPLAIRELRDLTRRRRKVLGMATSEKNRIAKVLEDANVKLGSVLSNLFGVSGQLMLEALLEGKATPEEMAQFAKRRAREKIPQIAASLEGHRMSEHHRLLIHMSLDVLRCLESQVMALDEEILRRIERHGYIRQLQLIESVPGIQQDAAVVILAETGGDMSVFPTEQHLSSWAGVCPGNKRSAGKDFRGHTTRGNRWLRSMLAQCAWALSHSKEGALREKFWKVAARGGKKKAVLATAHAQLRLVYRVLSTDHPYSQLPAHQCDQARRLRMIRHHLRCLGRLGISAGPMLAQLSGARHTKTRQIASVEPTQQ

SEQ ID NO: 483624 - protein, 350 aa, unidentified
MTDTSNIAWLGLDTHSQNCVLAHLDDQGVERHCWRFPTQPETLIEHVQAIPAADKHLMLEETNLARWIAQLLTPHVQQLVVCDARHNRLISSHPNKDDRRDAFALARLLRLGEFKPVWQPTSDLRVLFKRAAQAYDDAVRRQTRLKLQIKSRFQHWGLFPAGASVFSLTGRAGWLKHLPHDPLRPQAQLLFDQLDQALLAQAQARRLMLQTGRPFPEIKHLRSVPGVGIVGAHLFVAFVQDPGRFKDFSKVTRYCRLAIRDQSSDGKPLGFQQLDRQGLSILKAISYRAFLQAAKRKQGPVWDFYQLSLRHVGSTTHARLNTQRKILKVMWTLWRRQTDFDPKRFSHAQT

SEQ ID NO: 483625 - protein, 347 aa, unidentified
MNFYTRQHKHYCGIDLHAGAMYVCILDQQGTKLVHKNLPTTPEAFLRLIAPYREDLVVGVECMFTWYWLADLCAKEGMAFVLGHALYMKAIHGGKAKNDKIDAHKIAVLLRGGMFPQAYVYPSEMRATRDLLRRRCHLVHKRAELLVHIQNTNSQYNLPELGKKLAYKANREGVAEHFPDPSVRKTIEVEVSLIDHYDKLLGEVKLYITRTAKMHDGQTFTRLQSVPGIGQMLALVLRYEIQDIARFPRVQDFVSYCRLVKCAKESNGKRLGTSGKKIGNVHLRWAFAEAAILFLRQNQPGKEFFMKLEHQHGKAKALTVLAHKLARAVFYMLTREQAFDLQRFVTA

SEQ ID NO: 483626 - protein, 403 aa, unidentified
MNNVAGIDVSKGKSMVSVLRPFGEVVAKPFSVGHTGSELKELADYLKSLDGETRVVMEHTGRYYEPVARFLHDEGVFVSAVNPKLIKDYGNNTLRKVKTDKADSRKIARYGIDNWAELRQHTPMDTIRMQLKTLNRQQSLYTKTKTMMKNNLIALLDQTYPGVNALFDSPVREDGSQKWVDFATAFWHVDCVRNMSLTAFAERYRKWCKRHGYNFSQSKAVEVHAGAQDLIAMLPRDALTKTMVRQAIDALNAVSASLERLKAEMQALAAQLPEYPVVMAMHGVGDSLGPQLMAELGDVTRFTHRNAITAFAGVDPGADQSGTHEAKSTRVSKSGPPELRRALFLVMDCLLKTQPQDDPVYRFMDKKRAEGKPYLVYMTAGANKFLRIYYGRVKEYLAQLENS

SEQ ID NO: 483627 - protein, 408 aa, unidentified
MPVDSSREVTRMFYAGIDIAKRKHEVSIIDTEGRALSQSLSFTNDREGSDRLLALFERLSISPQELVIGMEATGHYWLSLYSWLLEKGYDVKVINPIQSDAFRRLSIRKTKNDSKDSLVIAQLMRFGEYSTTRLSEENIHALKQLSRYRLSLVEECGNCKRRVIALLDQVFPEYETLFSDTFGTTSKELLLNCPTPEDMLTISSRKLTTLLTKTSKGRFRDEKANQIRKTASNSFGVTFSRDAFSFQIRQLIEQITFLEKQTEELEKKIAALLRKTNTVITTIPGIGETIGAAIIGEIGDINRFDTPGKLVAFAGLDASVHQSGEFSGTKGGISKRGSPYLRRAIWMAASRAAFCDPILSKYYQGLKERGKHHLTAVSAVARKMCNIIFTILKENRPYEVNPPKPLRN

SEQ ID NO: 483628 - protein, 429 aa, unidentified
MNYNTQNAKIASITEKTLIVGIDVGSETHYARAFNWRNYEYSKKPFAFSNDEAGFSSFKDWMDDIAEKHGMKVVIPGMEPTGHYWLNLGAYLQEQGMKPVHVNPHHVKKSKELDDNNPSKNDRKDPKTIAGLVNEGRFSYPYIPTGIYAEIRNLSNLRIQTQEEITRIKNRIARWFSIYFPEIKDVYRNPDAVSGLMVIKQAALPCDIRELGVEGVNKIWRDARLKGAGIKRATTLVTAAEHSIGNTEAPRSARKEIRNLLNDYEIYKNRMDELMEEIEKTLSEIPYIDKLMEINGIGIKTVSCVIAEVGDIGRFDNPKQVQKLAGYAIVADSSGKHNGESRISHRGRKRLRYALYEAAISVIGKNKEFKEIHSYYRTREKNPLKKMQSVIAVACKLIRIFYTILTKGVDYDGQRMLADIVRPEMQLAA

SEQ ID NO: 483629 - protein, 365 aa, unidentified
MEKIGVVGGRGQEGLPAKRPPDGTPVWMAMDISRSKAVYCLRWDGSEQRRLSTPLGIAHVRALLEHYRGCQVHVAYEACGFGYELAWWLQEQGIARMVIAPSRVERVPGLQVKTDRVDVGKLARKLEKGDLKAIYIPSRTVHEQRQIGRTYAQCLKERKRAQVRIRSLMQEQGRLGPLPAAGWKVYSGWLGAQNLPQSVRLCVQAHEQLRALADQQAQRMKAELYKLARGAEYRPLVKALSAQSGVGWQSAIRLVLELGDIDRFRTTDALPHYLGLTPSQYSSGELDHRGHILKCGPGFLRALLLQCAWSAIRQGHDTELQERFANLAPRIGRKRAIIAVARKLAIKLRGRWRTHLMASKPASAV

SEQ ID NO: 483630 - protein, 385 aa, unidentified
MVSFIKYSVGIDMSKSDFQVVMLLQNSDLSTVVKGSRKFSNTDSGFNQFEVWISRHKKFDIPVHLTVEATGNYHENFAFFFDSHQFIVNVVLPNKAKKYLQSLGYKSKNDKIDARGLAQMGAEQPLRRWKPFSENIYGLRALTRYCEQLSGHRTMYLNQLSALEQGMYQIESVKSSLRELIKLTEQQLSETKQKIEDLVRADKKIWERMEKILLIKGIGIYSLATIVAETNGFELFNNERQLASYAGYDVIENQSGKKTGKTRISKKGNSHIRRILHLPSLNVVKFGEKKFVDIYNRIMSRNTKKKIAYVAIQRKLLALIYTLWKKNQNYIPDYKAISGNDESKVLFPVGFEKATKKSNLLKIEVAQDELPYNESSEVLFPVPQR

SEQ ID NO: 483631 - protein, 305 aa, unidentified
MSNSSVVHIGVDISKAYLDCDLQGRALRLPNSMQGFKKLLPLLPPNAHLCIEATGGYERPLVETLHRSQIRYSVLNPRQVRDFARAKGILAKTDTIDARVLSDYGHAMDPKPSTLPEPPQRQLAELNTLRDQFVAIQTQLINAGEHLTDPIAKRILKSQLLHLQKQIKKVEKACCDIIKSHPTLAERDATLQATQGIGAVTSITLIALLPELGTASRGQIAALAGLAPFNDDSGPRKGQRHIRGGRSRVRRALYMAALSAIRSDGALRSFYQRLRLAGKPPKVALIASARKLLLFINYQLKSSSI

SEQ ID NO: 483632 - protein, 418 aa, unidentified
MRVIGLDVSRSVAQVAYLQDGLVRPGGQIALRRADLEKFADRLGAGDHVVLEATGNTAAIVGVLKARAERVVVANPLQVRLIAEARIKTDKIDAAILAQLYAAGFLPQVWIPDESTLALRRQVSRRQQIVRQRTRLKNEIHAVLAANLIESCPAADLFGKKGRVWLANQPLPPDEQIGVEQRLRALDRLAEDLTQLEQPLAHATLASPRAKLLLSITGINGTVAMSLLAAIGDIGRFASPEKLVSYFGLNPAVYQSGLQPAKHGRISKRGRSHARGMLVEAAWSAATNAGPLRAFFMRVKDRRGQQIAAVATARKLAVIVWHVLTRGEPYGWERPALSAHKQRQLQIAAGMPVQKGPRKGISAAYNLKEVRDLERAQAEQAERAYQRLFSRWKQSRPKNAQPARWPQGVVKNREPSIG

SEQ ID NO: 483633 - protein, 359 aa, unidentified
MTLCIGIDAGKRKCVATLKHSDSKVILDQLTFMNSRQGITELIDHARRQSEFAVAVVESTGNYWIRIHDMLEENGVETLLANPLETKAIAKARLKDDRVDSNILADLLRADLVPESYVPDKEHRELRQLARTRIDLVHTRTTFKEKVEAIMAKYEFTNPPVSNIFSAKGTAWLSNLELSWVDRMAMDSYLAAIETFNRQVELFTVKIASICNEDDNARLLMTMPGVRFLTALTILSEIVDVRRFPTPWKLVAYAGLAPSRRDSGERKRRGSITRQGSRWLRYAVVEAANTTIKHDERLGTFYHRIAERRGPQKARVATAREMLVIMWHMLTNKEPYRTMNVEMVKRKYKRMEWTSARSA

SEQ ID NO: 483634 - protein, 326 aa, unidentified
MEQELHFIGIDVSKAKLDVDVLRPDGRHRSKKFANTLKGHNELLHWLNSHNVAPAHICMEATSTYMEDVAAHLSDAGFTVSIINPALGKAFAQSEGLRSKTDAVDARMLAEFCRQKRPAVWEAPHPVERALRALVLRHQSLTDMRTQELNRLETAREVQRPSIDAHLLWLHAEIKRIEKQIKDLTDDDPDMKHRRKLLESIPGIGEKTSAVLLAYVGLKDRFSQARQFAAFAGLTPRQHESGSSVRGMSRMSKSGHVSLRRALYMPAMVAISKTEWGRAFRDRLAGNGKKGKVIIGAMMRKLAHVSYGVLKSGEPFDASRHGVITA

SEQ ID NO: 483635 - protein, 402 aa, unidentified
MYNAVGIDVSKGKSTVAVLQPAGVIIRKPFNVNHTSSELDELAKYIGSLEGETRVVLECTGRYHEPVVKTLSEAGLFVSAVNPHLIKNFGNNSIRKVKSDPADAKKIARYTLDNWIELRQYSSMDNTRTQLKTLNSQFSFFMKQKVAAKANLIALLDNTYPGVNKLFDSPVRDDGSEKWVDYAYSFWHVDCVRKIGLKTFTERYQAFCKKHHYNFQPAKPAELFLASKDLIAVFPKEASYKLLIQQSIQQLNLASSHVEELRSKMNELASTLPEYATVMGMYGVGKTFGPQLIAEIGDISNFSHREALTAFAGVDPGVDQSGTHNSKSNKASKCGSNRLRKTLFQIMSTLLQTAPENDKVYQFLVKKRAEGKPYYVYMTAGANKFLRIYYGKVKECIRNLEQ

SEQ ID NO: 483636 - protein, 466 aa, unidentified
MSKLSRRTQESAAQTEVRPFEGLARLQSHAAGADIGAHEIVVCVPGPDDTQIVRTFGTYTADLESLAAWLTAQHVETIAMESTGVYWIPVFELLEQHDLHCCLINSATTKRMPGRKSDVNDAQWIQTLHSYGLLSDSFRPDADLIALRTLLRHRAQLIQHRSPHILHMQKALLQMNLQLSQVLSDVTGETGLNIIRAIVAGERDPHVLAAWRNSRCHKDEAEIALALTGTWRAEHLFVLQQALALFDFYTQQIAACDAEIERTYTAIRPEWGSDQPALLPLAHKPRSHSKNQPQGVQVRAHLYRIVGVDLVAVPGISESSAQTIVAEVGSSLERFPSVKHFCSWLGLAPHNDISGGKVLRSYRLKNHNRAGQAFIQAAAALIRSDTVFGACYRRLKSRLGPAQALVATAHKLARVVYKMLKDKVPYAHTTAQAEEERLRDREIAYLKRKAAKLGLILADTEGTVVS

SEQ ID NO: 483637 - protein, 322 aa, unidentified
MNKYSEIYGIDISKNVFDVYGSKTGHNQFKNDEQGFKSFLKSLPQGALLVMEATGYYHYRLAQFLYHEGVFVPVVNPLSVKRFIQMKLAKVKTDKSDAKAICEYGQMNDVPLYNALTDIQSECLQLFRLLDSYLKHRTATKNKLKGEEVLGVPSKFVYRSLKRNLKHLNKEVEVLEARLLELVKQDQQYQLTLLKSIPGMGVKTALFLIVVTDGFYKFETASQLCSYVGITPTIRESGSSVKGRSRISKVGNKKLRNLLFLCAFSACKHNKACRELCERIVTKGKSKKLALIAVANKLLKQAFAIAKSGRPYDENFVSKLAQ

SEQ ID NO: 483638 - protein, 324 aa, unidentified
MMIEVTDIQMDGVVVGIDVAKPELVFYADREKDLFTARNESAALRRIAKRLLKLKPRVVVFEASGGYEALAVRIFSELGLPVAVVYPKRIRQFVRGLGVLAKTDGIDARMIAYYARVANIKPIPPATPELQHLQALRTRRDQLIEMRIAEQNRLETAHTCMRRDIQKHIDSLNREVEKIEKKLASLIAESDALRKMSDSLRSVPGVGPVLSTTLIAELPELGLLSNRKIASLVGLAPFPDDSGSRTGKRSIKGGRNSVRRVLYMATISASRSNPVIQDYYQSLCSRGKLKKVALIAAARKLLITLNAIIKNNSSWHYEPVSSSA

SEQ ID NO: 483639 - protein, 343 aa, unidentified
MVHYVGLDVSLKQTSICVVNEVGLVVREGVVDSEPEAIAAFVRSKAPGAVRIGLETGPTATWLWTELKQLGLPVICIDARHAKAVLKMQINKSDRNDAAGIARIMQTGWFKEVRVKDLDSHSVRALLASRALLVKIKRDLENQIRGLLKNVGLVIGRAKFNVFTVRAEELIEDRPELMAVVRPLLKARQAIEQQTDDLDRKVLKLARYDAQVRRFMTVPGVGPITALCFKATIDDPTRFKRSRSVGAYVGLTTRRHASGEVDWTGRISKCGDAMLRSYLFEAAGVLLTRVPKWSALKAWGIRLAKRSGLRKAKVAVARKLAVILHRMWIDGTEFNWSTKKAAA

SEQ ID NO: 483640 - protein, 406 aa, unidentified
MNSVGIDVSKGNSMMAALRPMGEVALLPKSYLHTVVGLEQMAYAILALGEDTRVIMEATGRYHEPVAAALHEYGIYVSVLNPLYIKQSGGGSIRKVKTDKADAIKIAKYGLDNWVDLREYTPMEAVRQQLKLCSRQYNLYMKTIVALQNNLISLTDKTFPGVNELFSSPERADGHQKWVDFVMTFWHCDCINLLREKAFTERYQKWCKRKGYNFSEEKALDVYASSGGHFTTLPKNANTKLLITTAAQQLMTAKTTLVAIRTEMLRLAKQLPEYETVHAIYGVGEITAAQLMAEIGDVHRFPHRSSLVAFAGVDPAVNQSGKHEVQSNPSTKRGSPHLRKTLFQIVCTYLKKSPAAEPVYQFLDKKRSEGKPYFVYMTAAQNKFLRIYYARVKECLAAQDSSTIQD

SEQ ID NO: 483641 - protein, 394 aa, unidentified
MILVGIDIGKNQHTFSIIDKGTGEILSNHSVFNNNQEGFLSLIKKLCSYAKSNLLIGMEDTGHYHFALLKYLLDNRYTVALINPTTTDLTRKLQGGITKNDPLDSLTICDVISSNQRKKPYRITKVNRFDLYEQKQLTRHHHNLKEELNTYKNRLQKCIDIVFPEFNSLFCSKYGVVYMSILKTFASAEKIANADIRTIRKCFEYDGRGRRISLSAEQLKASAKTSIGIPSVAEGIQIRHLVCQIEMIEEQLSEIDKKIEEFSLQNNSPILSIPGISHFSGTSILAELGDICNYSKASQIIKFAGVAPYHYESSQFTAQHTAITKKGSRYLRKTLYQIILPVINHNKVFNVYYNKKLAEGKGHRCAQGHCIRKLLRIIYHLLSTGQTFNPALLI

SEQ ID NO: 483642 - protein, 407 aa, unidentified
MAGLDVDRDNVVACVRRLGPRGGVLFEKDRFTTTTAGLRELEAWLADRRVELVAMEATGVYWKPVLYALESRFAVWLCNARNVRRVPGRKTDLSDAEWLADVAAHGMIRPSFVPPPPIRELRELTRYRSTQIDARAAEIQRLEKVLQDAGIKLTSVASRVLTQSGRAMIEALIAGEHDGTRLAELAKGKLRPKIPALTEALTGHFGSHHAVACRRILGHLDFLNESVAALTEQVDARTAAFAPLYALLLPLPGLERLTIDVIIAETGADMSRFPTAGDLASWVGLCPGSHESAGKHRRVGTSNGNPWLRRALIESARAAARTKGSYFGAQYRQIARRRGPNKAAVAVAHSLIELVWHLLSTGELFKDLGDDYYTRRQDPQRRARRLVAQLEELGFKVTLEAAAALPA

SEQ ID NO: 483643 - protein, 338 aa, unidentified
MELKRVGLDLAKNVFQVHGVDRHEVVRCRRQLRRGEVLKFFAGRPPCLIGMEACAGAHYWARELTKLGHTVKLMAPQLVKPYIKSQKNDANDADGICEGVGRPNMRFVAVKTVAQQEVQSVHRIRSELIRQRTAKANQIRGLLAEFGLVVGKRIEVLRRALPELLEDGDNGLGGRLRRLLEGLRQDLVQLDERVAELDTAIKVVAKEDAACVRLQTIPGIGPLTASALVSAVGDGRQFKNGRQLAAWVGLVPKQDSSGGKTRLLGISKHGDAYLRTLLIHGARAVQQACAAKTDARSHWLRELGSRRHKNIAAVALANRNARMAWVLLTRGETYRAPA

SEQ ID NO: 483644 - protein, 424 aa, unidentified
MDKIYDKCCGIDVHKKLIVACFRCGKKQEVREFGATTRELLELADWLKDGGCEMVAMESTASYWKPLYNILESSDLNAIVVNARHMKAVPGRKTDVKDAEWIADLLQHGLLQPSYIPDKDQRELRELVRYRKSLVGERTRELNRLQKMLEGANIKLSGTVSDINGKSARSILEYLLTGKSIDGSKYDEMYEQKIIAHNLKATKEQIVDDLNGVMSPLQRRMMKELLVHLDELNIHIKNLDDEIDNFMKPEEKQASQAIQDVTGIGNTSAQAIISVIGSDMGRFPTDRHISSWAGLCPSDNESAKKRKSGKTRKGNALLRTTLITCAHAAVKNKKSYFYAQYVRISAHRGPKRAYVAVAHSMLISIYHILKDGVVYDAVIYADKSDSDNPEDIVIENRKVTSTDTLTIFMNPSGGQAITFMPARQ

SEQ ID NO: 483645 - protein, 334 aa, unidentified
MNDTIYDHYIAIDWADKNMAIARMTKKSNKIISMDVPSDLSNLKAYLKNLKGTKVLMIEETTTSQWLYVELQDYVDRIIVCDPHRNKLLSEGAKNDKIDATKLVTLLKAGLIKEVYHSNNKFIYFRRLVSGYDDLVKAGVRLKNQRSSLLKCCGKTGKNEPGKLELESDNFVLQCLNRQIDAYENEKSGYEKEFKSLAKKHPEIRYQTSLPGIGHINAVKIVARVVTPYRFADKGHYWSYSGLIKHEKISGQKSYGKRSPRYCRQLKEAYKTGTNAAIGGNNPINDYYEYLIREKGEIPYNARHKACRMLATLSLGVFKSGRKYNPFKKGYVNT

SEQ ID NO: 483646 - protein, 396 aa, unidentified
MTVCVFVDRGNGSAPEYHKRRFATHTEGIGQLRQWLEQHQVREVGMESTGVYWKPVWNALEGKWGLHLCNPQHVRAIPGSKTDLRDGTRITELLAYGKLPESFIPPRWQRELRDLTRLRACYAQEATRTGNRVRKVLEDAQIKLDCVASDTLGVSGRLMLEALIGGESDPATLADLARGRLKKKKDQLRRALEGGIREHHRFQLRLLLEDLKQCEEKIFQLDCQIQIYLEPYEEIIHRLDAIPGVDRIGAAVILAEIGPEVSHWEEARKLACWSCLCPGNCESAGKRLSGRTRKGNRWLRRAFCQMAWAATRKKDSYFKAQYRRLAGRRGKQRALLAVAHTLITIVYHLLRAPELQYRELGEDYFDKRDLEHTKNQLLKRLDRLGFTVTVTPKAAA

SEQ ID NO: 483647 - protein, 339 aa, unidentified
MFYLISKVMKKKCFIGIDVSKETLDTYIHGANHYFVAPNSTSGFPFLLEECCKSLGCKFSELFFCFENTGRYSRQLAAFLSESGITFTMAPAMDIKKSLGLKRGKSDRIDAKAIALYAWQKRDSIEPTVLNSGMVAQLRQLLTLRDKLIRHRTSYKNAIKDLQDTFFEGETEFLKESQVRMIAHLNQEIELAEGQIEQIIANSENWKNNYHLIQSVRGIGPVLAKYLIIYTENFNRIDNAKSFACYAGIAPFEYSSGSSIKGRTRVHPFANKHLKSLLNIAAMGAIQLQGEYKTYYQRRTLEGKNKMSTLNIIRNKLVSRVFAVVKRQTRYVDLGKFAA

SEQ ID NO: 483648 - protein, 373 aa, unidentified
MEGKMYCGIDVAKNKSSVCILGQDKEVKAEFEIEHTREGFEQLEKHLTKDTKIAMEITGIYCKTLYEYLKERYNVSYIDNIQMHNFAKLHFYYVKNDKVDAKLIALYLLSGHKTVEIVKFDELKDLSKVYQSTIKQLTRYKLMFKSQLNVIFPELEKEFSIQSFRAIASLLSKHPTPEKIAELEAGEINKFLANKAKSEKIKRLAGESIGIKDTPLFSFKNNIKIIIFYQSLIDKLKAEMSANLAKTPYCKLLDEFGYNVISLATIVGEIGDIRRFSNYKKLVKYCGLDVSEKQSGRAKSVNCFITKKGNKTLRFTFYNLVLTHLRNENNISNFYYRLKEAGKHPKQCHMAAARKLVVKCWFDMMRCHYHSSL

SEQ ID NO: 483649 - protein, 344 aa, unidentified
MSEVTTIGLDIAKHVFHAHGADERGGTVFSRRLTRGKLLDFFARHPRCVVALEACGGAHHWARELRTMGHEVRLIPPAYVKPFVKRHKNDAVDAEAICEAAQRPSMRFVAVKSEEQQAAALVFRTRDLAVKQRTQIANAIRGHLAEYGWVAPKGAAHLAMLADLLEDGEIGQTLPEAARPMFAMMIGMLANLDKQIAELDKEITRRAREDEVARRLMTIPGVGPITATAIAAIAPAAETFAKGRDFAAWLGLVPKQASTGGKQKLGAISRMGERTLRRLLIIGASAVVLQASKRGAPAGSWLEGMLARKPRMLVTVALANKMARTVWALLVRREDYRAPVAVAA

SEQ ID NO: 483650 - protein, 445 aa, unidentified
MAMRNRTATFELAHPNAAGIDVGSASHFVAVPADRDEQAVREFKAFTEDLKALADWLADCGVETVAMESTGVYWIPLFELLESRGFTVYLVNARHVKNVSGRKSDVLDCQWLQQLMSFGLLSGAFRPQEQICVLRALSRQQEMLTKYQSRHIQHMQKALAQMNIQLGNVISDIAGETGQKIIRAILAGERDGAKLAKLKNLRIRASDEEIVKSLQGNWREEHLFALKQAVELYDAYARTLQECDRQLVLQLERLARHELPVGPTKRRGRPPSSTKVQWRNALFRACGVDLTHVDGIDLSTALKILAEVGPDLSRFKSAKHFASWLGLCPGTKISGGKVLSGASKRTANRLAQALRMAATTLRNSQSALGAYYRRLCARLDKAKAVRAAAHKLARLIYTLLTKGTAYVDQGQNYYEERHRQRVLHHLHRKAAAMGFTLTPVEPLPA

SEQ ID NO: 483651 - protein, 398 aa, unidentified
MNTTICGLDIASTSVRAAMLGGTGVMTQECDLPATRAGEDQLLALLPPASVVVMESTGRYHLRWARRLVGAGHLVYVLNALLAKRLATSVNALREYKSDPIDARHLAHVGRLHGEAIRTYRFQENPARQRLRELCQVRTTQRGILTEVLAVAHHYLGLLLPEAQSLELHFAQHKGAVRLFLSIDSLARLRGLRLSTLQKHLGDKAAAFHALVREPLNAEAMFEAYLPALHAQLRLIEALHELLAQLALAIRQAARDSGRWRQVQLAESLPGFGEKSTPAIISCLPDGWEQWGDKRTTANKLQAYFGCDPRVRTSGKWAGRVKMTKRGSELARTALFQVAFCALRVDEGLLATYRAQIAAGKHHKVAISHVMRRQLRRLVAVLKDGTPFVPHQAIAHAA

SEQ ID NO: 483652 - protein, 429 aa, unidentified
MSYRIAGIDVHKRMLAVVVSDVEVDSEFHFERRKFSSSPEQLRSLAAWLLEQEAEEVVMESTAQYWKPVWESLERYWKPICEKREDARRKSGTLHLAQALSNRGRRGRKRDFPDAERLVKRLVAQELTLSFVPDAEQRLWRTVMRKKYQLRCDRIRLQNQLESLLEEAHIKLSSLVSDLLGLSAQRMLKAMAQGETSPATLAALADKHLRATPEQLCDALGACTELNVVYRRLLGMALQELQLIDEQIGRLDQEMATLLSAHQDAVQRLAEVPGLGVDSAQQIIAEVGPTAATFPSEKCLSSWVGACPGDDETAGVNYSHRSPKGNRQMRRILNQAANAAARTKGSIFEIVYRRSVPRLGHNQAIGAIAHRQCRLIWLILHQGVRYEERGPAVTKRSKQLRTWRMIRQLRSLGYHIEPATPLPSQAHAQ

SEQ ID NO: 483653 - protein, 261 aa, unidentified
MSHYQNFIGIDIGKFTFVVAMHSNSSCKEYENNAKGIHTFLKDSKAHLPSSLVILETTGGYEMELLLTLCDKNYHVHRANTRKVKSFIRSFGNTAKTDSLDAKALALYGFERHDHLKLFTLVSKQQSTLYALVQRRKNLKQFLVAEKNRAKAPKASVIKSSCELMIKTLIDQITQITKQIEALINSDPDLLARAEMLKEIPGVGDITAQDLLALMPELGTLTGKQAASLGGVAPRANDSGKFHGYRHTGRGRDSIKPTLFV

SEQ ID NO: 483654 - protein, 346 aa, unidentified
MTIVEDRRVITGGVDTHAGTHVAAALDPIGGLLGVREFPVTPAGYARLLGWLGGFGAVALVGIEGTGSYGAGLARHVTAAGIRVVEVDRSDRQDRRRQGKSDPLDAVSAARAAQSGRARGTPKGGDGAVEAIRALTVARRSARSGRTQAVNQARALIVTGPDDLRARFAGHTTAALVSGLASLRPRPGGTVGYATRIALRELGRRAEFLDGQIGRLDELIVPLVTARAPGLLALHGVGPDTAALLLIAAGDHPERLRSEAAWAHLCAVAPIPASSGKVTRRRLNPGGDRHANHALWRIVITRMSSHAPTRAYVERRTAGGLSKKEIIRCLKRYVAREVYRHLRPAA

SEQ ID NO: 483655 - protein, 430 aa, unidentified
MAKVEHTSDARVLVGIDISKHRHEVLIAVPGRTRRRRMTVLNTADDYRRLIAALMEYGLPVTIGFEATGNYHRALMFALGAAGFDLKLVSSVALARTREALHNSWDKNDPKDAQVILRMLEIGAVQVFHDPLVAGTSDIQELSKTYEMVARAKTELWHRILTHYLPLYFPEADRFHRSSRGDWFLAFLEVFPSPHMITTMDKDAFIKTAWPVIGRRVGKAALLADIYETSKTSVGLPVAPDSDAIRMFRLVLAQGRSLIQQRNAIEERAAELLADHPDYCLLRSIPGIGPINALAVLAEAGDLRRFRHHRQFLKFCGMDLATVQSGQFRGRSKISKYGNARLRRTLWIAAQAAVLKPANSFRDKFERYIAQDRHNPDLRRKAYTAIAAKMGRTIHAVIKSGEPYRPFFEGVSLGGRTSLIQGRGGATATS

SEQ ID NO: 483656 - protein, 379 aa, unidentified
MRTARECEVYVGEVVLLLALELSSKSWRLVFGANGRRRHVTLDPGDSAGLVEAIVRARAKLGLPVDAPVVSCYEAGRDGFWVHRWLAQHGVRNVVIDSASIEVSRRARQVKTDRVDGEKLWSLLHRWYGGDADALRVVRVPSREEEDLRVLHRERQTEVKKRTTVSNRIKGLLAAQGVVLEGRKSTWIDQLEHARTGDGQALGPNLKARLVREIEEYLKLSQRIKALEDGQRKQLKAAAGAGPFALVELLKTLRGVGMQSAWTLVFELFGWRHYRNRKELAASVGLVSTPYDSGESQREQGLSKSGNRRVRTLMIELAWSWLRYQPNSALSQWWQARFASTKRGRKVGIAALARKLLIALWRMSQTGEIPEGARFSPSR

SEQ ID NO: 483657 - protein, 362 aa, unidentified
MKTQTYKNSEPELVNFAGKTIYSGIDTHKKNWNVSIFIDDMFVRRFHQEADPKAFHSFLTKHYPGARYVTCYEAGFKGFSIQRDLSELGIECVIAHAADVPQTNKDKLQKTDKIDSRRLGEALSKRMINAIYIPDIQTEADRSLVRYRRKIKGILKSRKTAIKSLLFRLGIDIPPQFDKSHISKKYISWLRSLMFNESSANYTLKAMIDDVEWLRKREYEHTKQLRILAASERYSDTYNELHKIPGVGLITIMTLLTEVVDINRFCSFKKLNSYVGMCPTEFSSGEKIKHGKITPRANKGVRTVLIEAAWTAVKYDPALSLKYSELRKRMESNDAIVSIARKLLTRIYAVWKNHVDYTIGVK

SEQ ID NO: 483658 - protein, 444 aa, unidentified
MSFVARLASVVVEEGGGEVRFIALDIHRDFCEVAIAAGGAVRSASRVKTDPETLELFAASLGADDQVTLEATGNALAIARIIEPHVGRVVLADPRAVRGSANTALKTDKVDARTLARLLAGGLVPEVWLPDERTRRLRRLVSRRAQLVRQRTRAKNQVHAALIRNLRPRQPMRDLFGAAGRRWLAAQTLPVDEQETVASCLREIDFLAGEIELLEQAMALEVLADEQMKRLLALPGISGVAACTLLAAIGDISRFPDARHLVGYVGLNPRVRQSGADKPRHGRISKHGPGEVRHVLVEAAWHAMRTPGPLRIFGERVAAKRGSNVAVVAVARKLLVIAWHLLAREEEYAFARPSLVREKIRRLELLTGTGPARHKRGATRVYASRQQRDLELELVRQAERAYARLVKDWQPAINKGAGAAPGRASSSQPKRQAARQETAPPPAL

SEQ ID NO: 483659 - protein, 313 aa, unidentified
MKEKVEFEQVIERGCGLDVHKETVTATIKGEGIKQETREFSTYTRSLISLRDWLLKNGITHVAMESTGVYWKPVFNILGEHFQIILVNARHVKNVPGRKTDQLDSQWLAKLLMAGLLKASFIPARKIRELKDLVRYKTKLTHQVSSEKNRFVKILEDANIKLSSVLTDIFCVTGMKMIREIIECDYDPDKLLYHVHGSVKKSRSEIKEAITGYVTDHHRFMMQTILESIEKTEDIIAKIDSQIAEQTKEYGLEIELLETIPGVGHDGAIGIISEIGVDMSVFPDEKHIAKWAGMCPGNNETAGKKKKQPGKLR

SEQ ID NO: 483660 - protein, 354 aa, unidentified
MSQKSNCAIAVIGIDIGKNSFHVVGHDRRGAIVLRQKWSRGQVEARLANLPACLIGMEACVGAHHLSRKLRMLGHEARLMPAKYVRPYSKGQKNDFRDAEAIAEAVQRPTMKFVATKTVDQLDLQALHRVRERLVSQRTGVINQIRAFLLERGVAVRQGLRFLRVELPGILATRTDVLSPRMLRILEDLAGDWRRLDERVEGLSNEIEAIAQQDAGCERLMSVPGIGPIISSAMVAAIGAGDVFNKGRDFAAWLGLVPKQISTGDRTILGKISRRGNRYLRVLFVQAAWVVLIKPKIWERHGLKPWIEAARKRLHHNVLAIALANKLARIAWSVLARGRAFEARKLDQAANQSA

SEQ ID NO: 483661 - protein, 391 aa, unidentified
MIYIGIDVAKDKHDCFITNSDSEVLFKAFTIFNNLDGFNDLYQKIESVMDDVTKVKVGLEATGHYSYNLLGYLIDKGLPTYVINPLHTNLYRKSLSLRQTKTDKVDARTIASMLMSDVNLKSYSATSYHNEELKSLTRYRFDKVKERAKLKTSVSRLVCILFPELEKLVPTLHMASVYALLSKFPSTKHVATAHLTRLTNLLSESSKGRYCKDTAITFRDAARASIGSNMPAKSLELKHTIKLIQELDSEIDEIENEIKIIMDGINSPILSIPGINYRMGAMIIAEICDFNRFDSPDKILAYAGFSPSTYQSGQLDGAYAHMEKRGSRYLRYALYNATKYVCHWDPTFAAYLAKKRAEGKHYNVAISHAVKKLVRVIYHLEKTKQQYIKAT

SEQ ID NO: 483662 - protein, 409 aa, unidentified
MPNSLLVGIDVSSSDNKVRLLDSSGNSLSKFSVSNNQPGAKTLVSKIVSAMTLNRFDSLVIGLEATSVYGEPLVHFLKQDADIGPFKPSIHVLNPKQVNAFKKAYSDLPKTDDVDAWVIAENLRFGRINQEVYMDDKVTALKKLTRARYYTARNLTREKNHFLNNLFLKFSSLTQEKVFSDRFGATSLAVVEEFLSVDEIAYMPIEELSAFVNEKGKGKFDVPEDVAKLIQKAARSSYRLPKTVNDSVNQVLAISLVAIRALKDQLKLFDKAIEEQMKIIPNTLTSVKGIGPVYAAGIIAEIGDINRFKNQAALAKFAGICWSKYQSGKYTADNTHLISSGNRYLRYYLMEAANKVRVHDPEFKRFYDLKYRETPKTPHKRALALTARKLVRLVYALLHDNRLYIPPKE

SEQ ID NO: 483663 - protein, 288 aa, unidentified
MKITTIGLDIAKSVFHLYAVNQMGRLVKKKQLKRKQVLWYMAKLEPCLIALEACGGANYWAREFIALGHEVRLIAPQYVKPYVKGNKNDYNDAQAIAEAVQRPTMRFVPIKSVERQDIQNFHRQRELIKKERGALANQIRGLLAEYGVVMNKGVGAVRKKLPEILEDAENGLTVLARALFAEQLEALRTLDQRFDQCERRIQSINQGHDLCRRLDEILGIGPITASATYAAAGEGKDFVNGRHFSAWLGLVPGQHSSGGKTVLFGISKRGNAYLRTLFIHGARAVLRH

SEQ ID NO: 483664 - protein, 344 aa, unidentified
MDNHTQYSGFAGVDLAKKVMQIHFVTGDGEITDKQVKRAEFLDFFRNRTKCLIGMEACGASQDWARKLEAMGHEVHLMSPKAVKPFVSGQKNDYNDAIGIYKAMFNGVRRVPVKSTEIRDLQTLRRIRSQVTKDKVKEINHVRGLLAEYGIVMGKSITAFNKGISSALESLKERGDVSPLVAEELQTTVESIKTKIERQKRLDREIEQLARGCKNYENFLKTPGVGPFTAAMLCVLLCDPAIFANGRQFAAYIGLAPRSRGSGGKNFIIGIPSKFNCDSESRAVFVECAQALARYKNKSPWVDGILRRKPKKVAVIAIANKLARQVWAMANKGESFKQMTILTA

SEQ ID NO: 483665 - protein, 433 aa, unidentified
MLKINYMSTLFVGIDVSSKSNAVYAMDFEENKYISSSFDNNQPGADKFVTMIAECMQKHKNLDTLLIVLESTSVYSVHISNFLSTSEVLMPYKPYVFCVNPKATSNYRKSYIGMEKTDPTDAYLIADFGRVGRTKKLEPWRGGQFIALKRLTRHRMHLSECITREKTYMVSNLYLKFSELQLLEGDDKPFGSLYGATSSAVLTEFLSPQEIIDMPEEDLLTFLAQKSRNRISDISKTSDLLRKAARDSYRLDKCMYEPLNISLASSFNCIHAYQKEIKLIEQAIEKCINGMNPNALIILRSIPGIGPVWASGILSEIGDITAFHSSDALAKYAGLYWPKGDSGDFTSEDKQMSKAGNPYLRYYLGEAANSVRKHIPEYADFYARKYAEVTKHQHKRALALTSRKFVRLVFGLLAKNQLYTGEKLDTEHNIESN

SEQ ID NO: 483666 - protein, 351 aa, unidentified
MFALGPESPCLSKAGGPAMIVSNGWLGFVLVCKAEALMLDTRTYVGVDVSKDHLDVAFPDRAKVWRTGNDREGISALGRKLAGLDAPQLVCEATGGYTRQLQRDLAHRQIAFSCINPRQIRDFARATGRLAKTDAIDAGIILRFAQTMQPPAAPPPSEAQAKLTGLVRRRRQLVDMAAMEKQRAAHPDDRAITASMCRHLDFLRHEIEEIDQRIADRIEADPPLARRAELLRSIPGIGAIAAATLVAELPELGRVGKKQIAALLGVAPMNRDSGLSRGEAHITGGRASVRCVLYMATLSALRCNPLVKTFYQRLRADGKPPKLAIVAAMRKLIIAANSIIEHDTPWRNPLD

SEQ ID NO: 483667 - protein, 360 aa, unidentified
MEYFAGLDVAMEETSICVIDREGRVELATSVATDPDAIFETLRAYLPKLRRVGHEAGSLSPWLQVELKQRGLPAICLEAWNVRAALSAMRNKTDKADACGVAHIVRTGWFREVHIKSEESYRLRLLLTQRRNLKRKFLDIENSIRHSIKTFGLRLGKVSRGEFEARVRALVAGDALIAGLTDCMLRARAALWQEYQRLHNVVVAIVRRDELCRRFMRIPGVGPISALAFKTAVDNPHRFRRSKTVGAYLGLTSRRWQSGTSVDVRGRISKAGDGEVRHPLYEAANIMLTRYRGFSSLKAWGLKIAKKHGHKKACVAVARRLAVIMHAMWRDGTEFRFTEGKESTLRTAKGGPTKLIAVAA

SEQ ID NO: 483668 - protein, 351 aa, unidentified
MKKIVKQVLGTDVSQKELVVCLGRMYDDWTPELYARKTFANDSKGFSCLLLWLKNLIDPSLPIRFVMEATGVYHESFAYYLEGQGFEVSIVLPNKISNYVRTLETKTVTDKTACDAITLFGLERKLDVWKKPKDIFKQLRQLTRERDQVVAERTMVKNQLHAENAGTMPHRNSITRLEDRIDLLNKQDKEIIREISELINADEEMKNLAKLVCSIPGIGVLTFAIIVAETNGFDLIRNKKQLTSYAGLDVQEKQSGSSVKGKPKISKKGNKYLRKALHLPGLSAIRHDQRFKSIFTRLVSKHGIKMKAVVAVQRKLLEMTFTLYKSNQLYDKNFLTNNKKEGNKEHKNKAA

SEQ ID NO: 483669 - protein, 387 aa, unidentified
MYFVGIDISKFKHDCAIMDEIGDTIQPSWSFGNDCEGFSLLKERLDGLAGEKKIGLEATGHYGQNLKLFLEANGFAFMEFNPLLVSRFVHGKSLRNTKTDPIDARNVAQYLMTVEYKPYPPSFYHLDQLKSLTRFRSSLVRQRSRQLVELTNVLDKMFPEFKPFFKGKFSATALYILDHYQSPERIASMNARSYEPLRKISRGHFSLNDFVKLKALAKNTVGCTTDFLLQEMSILLELYSQLDAKVEELDDQIEECVRGIDPPMLSIPGVGVSSTAVILSEYGDFNKFKNPSKMLAFAGLEPGYFQSGQSESTGHMVKHGSPHLRCALLNCCLPLVSNEPVFAEFYAKKRAEGKTHQVAMTHVAKKLLRVIYTLQTKDIPYDPALIR

SEQ ID NO: 483670 - protein, 419 aa, unidentified
MSFKIIKNNCCGLDVHKTWIFACIGITDSNNRTEYKQARFSSFTKGLNELCDWLAKYNCKDVCMESTGKYWIPVFNILEQRSLWVTLSHPKYTKPMKGNKTDRKDAKWICDLYMCGMVKPSFIPPADIRELRDLVRYRFKLTCMITGEKNRAQNCLTVSNLKLDDVFSDVFGKSSRSITEQILQHPGETFDVAPFVDGRCKTPIVEIQAAIDGAISKQQAVKLRQCLDHIDELNKHISEVEQEILRLSDKYEAALNLIRTVPGFDKNPLTAIQVLSEIGGDMSVFPTAKNLVSWAGCCPRNDQSNHKIKSTRISRAGSYFKPVLVQVANALIKSKKHSEFTNRYKRIKARRGHKKAIIAICRMILTAIWHILSDLKPYTSEGFLESRPVKKEKVLSTSQALNLLKQRGYIIKDEPLAVS

SEQ ID NO: 483671 - protein, 365 aa, unidentified
MPSVSHLGLIHLGLDVHKDTISVAILTPDRDGPDVDRIAHDEASVRRLVGRLGDPRWLRACYEAGPTGYELARLLHSMGVRCQVIAPSLIPKAPGDKVKTDRRDCRRLARLHRAGELVAIRVPTVAEEAVRDLCRARADMVEDRTRARHRLSKFLLRHGRPWRGGNAWTLTHERWLLGQRFDQPALAATYAHYRAVLQGRDAQLEAIQADLAVWHDRPPFAEAVHRLSAYRGVTRLGALTLASEVCDWRRFPRAAAFAGFCGLVPSEYSSGTSTWRGHITKCGNAHLRAQLVESAWSYQHRPAVGLELHQRQQGLDPQVVARAWAAQLRLCGRFRRLAARKDSKNVVATAIARELAGFLWAEMVA

SEQ ID NO: 483672 - protein, 354 aa, unidentified
MHTMPDHAGEVILGVDTHEREHVAALVDEVGRLLETRSFAVNARGYRQLLCWARERGPVIRAGVEGTGSFGAGLARFLAQQGVEVIEVTRPSRRSRRHLGKSDTVDAEAAARMVLSGEATAIPKRRDGIVESIRVLQIARRSAIKSRTQAGQQIRSLVVTASDDLNGPLAGLSVKRQVERCARLRPGVRDGAAASTQRALRSLARRWQQLDREVHELERELHALIRTAAPRLLAEPGVGPDTAGKLLVIASDNVERLRSDAAFAALCGVSPIEASSGKTRRHRLNKGGDRQGNNALWTIANNRLIHHPETRAYASRRTAEGLSRREILRCLKRHLARRLYRLIVADLTAAATLT

SEQ ID NO: 483673 - protein, 359 aa, unidentified
MSTLTRIEKFFNTVKFTADDNLFVGVDVHKKSYHVALYLNDAPSVDFVMPANKEQLSQKLKVTAPALRQVAYETGPTGYGLARHLHQNDLPASVVATSKIPRPAGRDDKTDKLDSKKLAEYAAKGLLKPVQVPTLKQEADRQLYRMRHRQARNLAKVKTQIKSFLLMHGLDEPAGLTTWKQNAIEQLRTFPLSTTLRLSLDELLGDMDYYVSRIKGLDKSLAEQLDKGRLAQRMALLKTHPGVGPVVSCQFATELFHYREFNSTREVFKYLGLSPTIYQSGDHFTRGAINRVSNSRLRSNLVQAAWRWIAIDVQAKKTFYHLLNNCGGLKQKAIIAMARKLSGHLWTMLVRDQPYDPQK

SEQ ID NO: 483674 - protein, 350 aa, unidentified
MIVGIDVHKHNHAAALIDDHGGEVATLIVANTPKGYRSLIDWLVDHDAAQAVIGVESPGSYGRCLVTALAGAGFEVLQVPAWRTHRERHRRGPGKTDPGDAISIAHVVRTHRSDLGPAEEPEVVRALGMLELQRRRFVRDRTQAIQRLRSDWTQHDPVAEAGVIRCDRQRELNKLRRLQLGHGLAARTAARCIRELARDITDLNKRISELDREIAQLLTEHENPLADLHGAGSNLAATIIAQAGDVRRFRNASAFARFCGAAPIPCGSGKTASRHRLHRGGNRQLNAALYRIAIVQQRHHPDAKTYLARKIAEGKTPREARRALKRHLANVLYRRLYAWANTAPSMNLLT

SEQ ID NO: 483675 - protein, 318 aa, unidentified
MGTVMNLNSSVYIGIDVSGSTLDVAIHDTTEHFSVDNETAAIDQLVQRLIALGPTLVVMEATGKLELAVLKALCQAGLPAVAVNPRQVRDFAKATGKRAKTDRIDAFVIAHFAAVIKPVVRPLNDVQTEQLQALLLRRAQLIDMLVAEKARLERAHVAAKESLNDHIKWLKQQLTVADRDIDSFMRASPAWRQKEDLLRSVPGIGPGAAATLIAFMPQLGSLNRREIAALTGVAPFNCDSGKHIGKRRIQGGRAIVRRALYMACIPALRFNPVIRAFYDRLRKAGKPFKVAMTACIRKLIVTLNTMVHNSTPWRPSAD

SEQ ID NO: 483676 - protein, 425 aa, unidentified
MNLLILKGVPMSLKIVYKICCGIDVHKTFVVACIASTNDKGVTSYESHRFSTYTSGLKTLLQWLLKRNCKDVCMESTGKYWIPIYNILENDCSIVLAHPKYVKAIRGKKTDKKDAKWIADLFKHDLVAGSFMPPADIRQLRDLMRYRFKLTCFQSSEKNRLQNCLTVSNIQLGNVVSDTFGKSAQAILDKLLENPADTSFDLEPLVYKSLKKKLPQLRDAIDGYITPEQVGKLKVIKAHYESLESRKAELEELILALAAPYQQELAILQTAPGIRSDFTAIGIISEIGTNMEAFPSAKHLCSWAGLTPNNNESAGKKKSVRVSKAGCYIKPLLVQCANAVVTSKKHPEIRNRYLRLKKRRGHKKAIIAIARMLLTALYHMLKNGENYNAELYRKSDLPPANWEITVEQAIIIARNQGYKIKSATA

SEQ ID NO: 483677 - protein, 425 aa, unidentified
MDIVVQRCAGLDIHKKLIMACVLLWEDGRLTKHLREFGTTTRELLALSDWLAELGVTQLAMESTGVFWKPIFNILEDRFTMLLCNAQHIKRVPGRKTDVSDCEWIAQLLQHGLLSPSFVPERPVREFRELTRQRTSLVDDQARVANRIQKVLEDANIKLSSVATDTLGVSGRQMIRAMIEGEQNAEKLANMAKRRLRKKLPELREALQGQVREHHRFMLKLLLEHYEEHERLIEQLSAEIERVLTEQTAGAREADGQPLPFAEAKKLLMTIPGIGEVNAENILVETGTDMGRFPTEGHLASWAGMCPGSHESAGKRKRSKTRKGNRWLRRALVQSAHSAGRTKQTYLSAQYGRLSARKGRNRAGVAVGHTLLTIIYHVLKTRKPYEELGADFLEQLNQTQKTRYYTNRLKSLGFEVILQPLETAA

SEQ ID NO: 483678 - protein, 397 aa, unidentified
MYIVGIDIAKRKHEAAVIDGDGAVIIKPFSFTNNCSGYNRLLAMLAKAKLPLDEVSFAMEATGHYWLALFTRLQKEGFRVQVINPVQTNSIRSFYIRQAKTDPRDALLIAEVIRFGHFSESTLHPENIYELRELCRGRHAIVSMQADVKRKVVALLDQVFPEYETAFTNMFGDTSMAILQTCPTPKELSEMPLEELCHLIEVSSHKRFRMAKAQELQVLARNSFGFAMAGDVFSTMIRLYAKHLDFLKQQVREMDRKIAEIMDTLDTPITTITGIGPTLGAYILSEIGDISRFSSAAKLAAYAGIDPTMRQSGEYNGVRNRMSKRGSPYLRHAIWLAASSAVLHDPALKLYFQKKRDEGKPYMASVGHACRKMVSIIYAVMRDNKAYTPCIPNEISA

SEQ ID NO: 483679 - protein, 381 aa, unidentified
MAATRNHECSAFDPVLYLAFELSNVHWKLGFATGPGRRPRVRTINAGDLAALQEEVRRAKKRFELSEDTRVVSCYEAGRDGFWLHRFLLAQGIENLVVDSSSIQVNRRARQAKTDGMDVEKLLSQLIRYRSGERDVWSVVRVPSVEAEANRNLHRELETLKKDRTRHINRIKSFLVGQGIRMKVKGAFLEEIERVRKWDGLALPDSLRARLQREYERLQMVQEQIKGLERERVEAIRHSQEESVETVRNLLRLKGIGQNASWLFGMEFFSWRKFNNRKEVGALAGLVPMPHQSGASYREQGISKAGNRHIRAMVIEIAWGWLRFQPESELTKWYEKKFGQGSKRIRKIGIVALARKLMIALWRYLETGAIPEGAVLKTRLI

SEQ ID NO: 483680 - protein, 400 aa, unidentified
MRFYNRQHRHYCGIDLHVKTMYVCILDAAGQVLLHRNVPATPEAFLQTVAPYRDDLVVAAECMFTWYWLADVCAAEGITFVLGHALAMKAIHGGKAKNDKIDSHKIVGLLRGGLLPQAYVYPDAMRATRDLLRRRLHLVRKRGQLLAHIQNTRAQYNLPAFGRRLAYPANREGVREHFPDRSVRKSIEVDLTLIEQYDTLITDLELTIVREAKRHDGDAFHRLRSVPGIGKVLALTILYEIHDITRFDRVQEFASYARLVKCKKQSGGKILGTSGPKMGNVHLKWAFSEAAVLCLRGNPAAQRYLTRLATKHGKATALTILAHKLARAIYYMLHRGHAFDPNTFFHDPSHGAPALGTAVPAGATLEPEVRPAGRQGPAHQHAGHAAPLAEDMMATTTLAD

SEQ ID NO: 483681 - protein, 369 aa, unidentified
MPPASHPEVTPVKYVGIDVHKKMCQVAVLDEDGTLLDETRFRNTLEGIEEFASSLSVYRDEVKAVVESTGNLWIQVHDRLEEHGYDVALSSPMNSRLVSESRVKTDRTDARALARLHRAGVLSTCFVPGEEERSRRELLRHRLRLVKNRTAVRNRIHALLDKHGLRVPYKTKFSKKAVAWLKMQSLGFMDDAILHSDIALLEVLDEQIGLVEEKLAALAVDDARVPLLMTMTGVDYFAAMLVLAEIVTIDRFNGDKRFSSWMGLAPRVRQSGEKTWIGGVGGPGNRRMRWLMVQCAHSACRYDPRLRRLYERHSRRKGGKSAVAAVAHEMSRIMYFMLKRNEPYRGVNRGLWERKLKSMERRALSGLRN

SEQ ID NO: 483682 - protein, 372 aa, unidentified
MKKDIRFVGLDVHGETIAVAVAEPDGSVRSLGTIPNRPEAVRRLIKRLGPVTKLRVCYEAGPCGYVLYWQLTGMGVHCDVVAPTLIPVRPGDRVKTDRRDAEKLARSYRAGDLTPVWVPDAEHEALRDLVRAREAAKKDQLRARHRLGKFLLRAGRRPPAGVKAWTVKHREWMRGLAFEHTAQEATFLDYLHEVDHARDRVARLEHALDTAMDAAPAAMRSVIDALQAVRGISKLTAVTVVSEVGNFSRFARPRFLMGYTGLVSSEHSSGRRILRGAITKTGNAHLRRVLVEAAWSARYRPNLSAPLKKRQEGLSEEVKAIAWKAQHRLYTRYRKLSSQGKAPQQVVTAVARELVGFLWDIGVHAERAGMAA

SEQ ID NO: 483683 - protein, 358 aa, unidentified
MNRTAGMSAGQIIGMVDGRQVVGLDIAKSVFQLHTVDMGTGEIVNIQLKRAKVLEHFANKAPCLIGIEACGGAHHWARRFKAQGHSVRLIHAKAVRPFVAGNKTDATDARAIWLAVQQPGTKFVGIKTLDQQATLVLHRQRELLQKMKVMQTNALRGLLYEFGATFAKGKNALFSEIEAALEALVNDIPQYVADSLREQVQRIKQLSADIKVIEVRLGQRLRSDADMKRVAKIPGVGLLTATAAIATMGEAHAFKSGREFCAWLGLVPRQSGTGGKVKLLGISKRGDTYLRTLLIHGARSVLTHAKEPGPWLEQIKTRRPANVVIVAQAAKMARTIWAVVAKQQDFQRGYQSVRPQAA

SEQ ID NO: 483684 - protein, 426 aa, unidentified
MKSNTQNAKIAAITEKTLIIGIDVGSETHFARAFSWRGYEYSRKPLEFSNTEEGFATLLSWIDELKKKHSMEKVIPGMEPTGHYWFNLGRFLQDHGMRPVHVNPHHVKRSKELDDNNPSKNDRKDPKVIAGLVNEGRYLYPYIPDGIYAEIRVLSGLRGAAQSELTRIKNRFARWISIYFPNYKDVYGNVGAVSGLMILKEAPLPEDIVKLGVEGVNRIWRDAKLRGAGMKRAKTLIEAAEHSIGSREAHEAARIELRILLSDYERQAAREAELMGLIEEKIAEVPYIDNLLDIKGVGIKTVIGFVAEVGDIRRFDDPKQLQKLAGYAIVKNDSGKHKGESHISYRGRKRLRYVLYEAAVSVVSHSAEFKAIHQYYTTRSRNPLKKMQSMIAVACKLVRIFYLLLRTGATYDASKMMGDIRRPEAA

SEQ ID NO: 483685 - protein, 508 aa, unidentified
MRILTGKESIMKKTVYPQRSQVVNEVFARENRPDKILIVPLDYAKENHTVQFCFATGEHILHKALTVYNDSRGASYLLDRITKICKKYHLKHENVIVCCEDPPEYMVNFIHTVRLGGYSFVSVNATEASKYRSNSRASSDSLDLNGITQAVINRRAMDLRPVDELYSNLKAAGRNRRRLVMSETAMKNRIHKCVDILFPGFLNESNTGITPFSPVCLWMLENDFSVIKIRRMAAQTLMCGLKRHHICKPGEVYEQLKTYSKNVLTPPAELISYYQKSLSAKIGLFRSLQKASELEENEAVRCLIQSPGFYMLSIPGIGIKYAMHIIGEYGNPNSWRDTDKMASFAGIVSRQKQTGGQSKKEPVSQYLPKDCNKILKDYLLQAAQHTGTTLHPFRKISPSYDGEHTLSEHFQHVENNEGKSRLRNAKYLLKITRRLVKEQRFYFPDKHWLADDFSPDSDEHIQFYLSAIQNIKDKLKGYDLSGIKDENNYLVKEEKVISDIIEFRKNNK

SEQ ID NO: 483686 - protein, 422 aa, unidentified
MTVYLERGYNRKEYQWFYKQYQNIYSKEIFMIYVGIDVAKDKHDCFITNSDGEVLFKPFTISNNRNGFETLFQRIQSVSDDSNKIKVGLEATGHYSYNLLGFLLDKGLTTFVINPLHTNLYRKSLSLRKTKTDKVDSRTIATMMMSDMNLKSYSDTSYHNEELKSLTRYRFDKVKERAKLKSSVSRLVCILFPELEKLVPTLHMASIYALLSEFPSAEAVANAHLTRLSNLLSESSKGRYGKDTAVMFRDAARSSIGSHMPAKSLELKHTIKLIQELTAEIDEIEAAIKRIMDEEIQSPILTIPGISYRMGAMILAEIGDFSRFDSADKILAYAGMSPSTYQSGQLDNCYSHMEKRGSRYLRYALYNATKYVCHWDKSFGAYLEKKRSEGKHYNVALSHATKKLVRLIFAMEKSGKAYLPTT

SEQ ID NO: 483687 - protein, 336 aa, unidentified
MIMPFRCNFGGKKRTMTATQDKIEFDQVIERGCGIDIHKSVLVSTVQGKGIKTETRSCGAFTESIEQLRDWLKSLGITHIAMESTGVYWKPVYNILENDFVIVLVNARHLKNIPGNKTDKKDSRRIAKLLLAGLLKGSFIPPKPVREMRDLTRYKRRIIEQIASEKNRIHKFLEDANIKLSTVVSSLSGATATKIIDAMIEGEGKAEELAKLRHGKMKASEEELIVALTGNLTEHHKFMLKMVKKSIKEKELLINELDKQIDSKLKENEMVLDAGLLSTIPGVDKEAAAYILSEIGNDMERFPDEQHLASWAGLSPGNNESAGKKKVQEPHMETNG

SEQ ID NO: 483688 - protein, 349 aa, unidentified
MNRTTYGFDIAKNVMQLHWVEIETGEIGRKKLARAKLSDHFAQLQPVRVVMEACGSAHHWARVLGVLGHQVELLPARQVRPFVRSNKDDAADARAIWLAAQQSDIRRVPIKSVEQQAVLSLHRMRQHWVSVRTATINALRGLLYEFGVVLPGGKHAGLKALGAHRAEIDARVPATMQRLVDGQLATLKDIERGIERLEAEIGAVQKQQAKAVKLRKVPGIGLLGATALAATLGDGSGWRSGREFSASLGLVPAHSGTGGKARVGHLSKRGDPYLRTLLIHGARAVIEHAKDKPKWLEQLLARRPLNVAVAALANKMARTAWALVAHGREYQREWKSTAPRGCTAQAAAA

SEQ ID NO: 483689 - protein, 370 aa, unidentified
MKKKILYVGLDVHKKSIDVAITDARNNSKVRSWGKIDGSLEALDKLVRKLKPPGADLHFVYEAGPCGYPIYRHLTSKGHSCSVVAPSLVPKRSGDRIKTDRRDALNLVRLFRAGELTSIYVPTSEDEAIRDLLRCRVDIRRIERKTRQQLLAFLLRHDHYYPGKKNWTKGHMNWLTELKLAHRAQQIVLQEYIDAANECTRRIQRITEQIQDLVAQWSRAPFVKAYQALRGVSLIVAATVVSEIGDMNRFKNPKELMAYLGLVPSEHSSGNRIRRGSITKTGNGHARRVLIEAAWTYNMRARKTKAILKRQQGLDDRICEISWKAQLRLCNKYRRLFARGKSKQAIITAIARELSAFIWAIDKQVQQLTA

SEQ ID NO: 483690 - protein, 358 aa, unidentified
MNNLKRNKLDFTGQPIYVGLDVHKKSWSVSISTQYGQYKSFSQPPEVDKLVHYLQHHFPGAQYLSAYEAGYCGFWIHDRLREKGIGCLVVNPADVPTKNKEQRRKRDRIDCRKLSRSLRNGDLEGIYVPPRGKLEDRSLIRTRLSMVRKQTRCKNQIKSMLLFYGVVIPEEKEMGHWSRRFIRWIEGIRMERASGDMALQIHLEELSHLRQIIAKLDRAILALARTEEYRPWVLLLRTVPGISTLTAMILLTEIGEITRFPSIDELTSYVGLIPDTKASGEKEHIGGITQRSHSQLRWMLIEASWKAVQKDPALMMAFDQYCKRMRKTKAIVKIARKLLNRIRYVLKNRSEYVPAVLE

SEQ ID NO: 483691 - protein, 301 aa, unidentified
MFSRWIQDLLKLYKLNKIIVGVEPTCHYWLSLARWLSAKGIEAVLVNPHLVKKNKENRDNTPSKSDRKDALVIADRVKNGYYSPVRFNPEVYEELRILMAHRDTVAKRLNSAVNQIHRWVDIVFPELRHVFKILTCTSAIATLRLFPLPEEISRLTTEQVIAGWKQYVKRHAGVHRAEQLIALAKRSVGVTQALHAYKLHLGQLLEEHDLAQRQLEQIEHELHHILERIPYAQKMLAIRGVNATSLAGVLGEAGDLSGYAHGNALLRHAGLNLAEACSGKWSGKMVLSKRGRPVSGVFSIS

SEQ ID NO: 483692 - protein, 354 aa, unidentified
MSQIPNTAIAVIGVDIGKNSFHVVGHDARGAIVLRQKWSRGQVEARLANIPPCLIGMEACVGAHHLSRKLASLGHDARLMPAKYVRPYSKGQKNDFNDAEAIAEAVQRPTMKFVATKTAEQLDLQALHRVRERLVSQRTGIINQIRAFMLERGIAVRQGIGFLRTELPTILATRTDALSPRMLRVIEELAGDWRRLDQRIDGLSGEIEALARQDQACSRLMTVPGIGPIISSAMVAAIGTGDVFSKGRDFGAWLGLVPKQISTGDRTILGKISRRGNRYLRVLFVQAAWVVLVRIKNWERYGLKSWIEAAKRRLHHNVLAIALANKLARIAWAVLAKGRAFELRTDDAGVVRPA

SEQ ID NO: 483693 - protein, 325 aa, unidentified
MNNYAALDLHERTVQCVLKNQDGRIVKESKTVKDEGRILAFLEGTDASVVMESGRNHQHIYDVLKERGYDVTVAHPLMVKAIAYAKVKTDRVDARVLADLLRADMIPESYVPGRDIREIRDLVRRRHYMVKLRTMQKNKVHAELATRWLKYEGDPFTEDGKNYLRSLAIDAVNDYLETIEFLNRKIHQLDEKVRRVVESDKYAKLLMTVPGISYYSALLISSEIADIRRFPDHEHLCSYAKLSPGVRQSGETQHTSKSMGNSMMNWIMIQCTRIHVRRYDSAITRFYQQVSKRRGEKVAIVAAARKLMRAIYIMLKEEQAFRLDG

SEQ ID NO: 483694 - protein, 328 aa, unidentified
MTMNPASPAFNHVVAFEVAKDSLVIHVLPAGEQSVAANKPKAIRKALLAELRRNAKANLGPLLVVCEATGGYERPILDLCVELGIAAHKAHGSRVRYFAKYLGLLAKNDPIDARVLALYGLQTPELHLYVPLAPDVLALRDLKTRRDQVQEMLFAEKNRLEHARHASVSRGLNAHIASLRKTLAALEAEIAAHVKASETLASKARLMQTLKGVGPATVAALLAYLPELGALSRSGIACLAGLAPFDDDSGTFKGPRHIEAGRAVVRKTLYMAALVAIRYNPVMRLFAEKLRRNGKPSKVVITAVMRKLIVTLNAIVRSGEPWSHAKAA

SEQ ID NO: 483695 - protein, 347 aa, unidentified
MKKFVGVDLHKQRIVVCVVNQARQVLTSARFTHAESIKLAAWLKALGSFDLVLEATASYEWFVKLVEPLAGRVLLAHPRKMRIIAESTRKSDKVDARVLAEFLALDMIPPAHRPTPRQRAHRKLVRRRVYVRARQTSIKNRIRHVAAEYNADRKELFTSEGLKYLRGLKLDPVDRWLVQRLLRELKLYRDELKAVDRQLAAFARTAPAAEAGHRALLDSIPAVGPVTRETFLAEVAGPERFGSQKKLTSYVGLAPGQRESAGRRHDLGITHSGSPILRWVLHQAAWQLVRRSSPWRLTFERLALRRGKKKAITAIARRLLCLMLAVIRSGRPYEERPPAAPATPSAA

SEQ ID NO: 483696 - protein, 337 aa, unidentified
MFNLPVFVGIDYHTHTIQVCVMNAQRKILANESANNPEAIFRLVAPFSNNVSVAIEASTGTADFAEKLIDQYHWNVELAHPGYVARLKQTPDKSDWTDAKLLADITRVGYIPRVWLAPQYIRDLRELVRHRHGLVGQCTQVKLRLRAVLRNHRIVCPYSPWTINGKRWLLNKENITSPALLFLLQEHYETIEYINKNIANATERMVSHVVDDPVVKKLLLQPGIGVITAITMRASMGHFDRFRTSKQLAHFCAVCPCNRSSAGKTTTGGLIKAGDELLRQVLIEAAHRLIRYDEHWRAMAARLRANGKKTCVIVAAVANRWIRKLFHQMREPMAPIA

SEQ ID NO: 483697 - protein, 415 aa, unidentified
MGMDVIVERCAGIDVHQAQLTVCVRVPGADGKRVEELASFGTTTPDLLALADWLAAHGVTQVAMEGTGVYWKPCYWVLEQSFELWLVNAQHVKNLPGRKTDTKDAAWLCQLLEHGLLRKSFVPPREIRDLRDLTRYRKALIRERAAEVNRLHKVLEDAGVKLSSVASDIMGVSGRAMLDALVAGTSDPELLAELAKARLRAKLPALRKALDARFRDHHGFLVAQVLAHIDYLEEAIAAVGERIDAAIAPFQAAVELLVAIPGVQRRTAEVVGAEIGVDLSRFATSRHLSSWAGLSPGNNESAGKRKHARTTKGSPWLRTALVEAALGATRPHGYLRAKYWRVRGRRGHQRAVIAVAHGLLEIIHHVLSTGELYSDLGNDYFERRQAEYLRRRAVRQPERLGHHVILTQAPRPQPA

SEQ ID NO: 483698 - protein, 422 aa, unidentified
MPQSSNSLPTPAVRKDQPVHPNGRHVVGIDIGCKRHAAAACTRDGREFGRVIFCANDRHGVERLQTQLLLPLGGPPAVLIGLEATGHYWLPFHGELTRLGYQVVVINPLQTRAKFRARLRKTATDKLDARSIAEFVQQGKAHTARIPDTPTHILRLTVRQRWHYMALTSDLKRLALTYLDRLFPEFHHQFNSPLNATGRALLHQLGLAPQDLLAQPERVLEIASAASRRRVGKARVDELLEQARHSLGLVPLAATLVTQLRSVVHLIESLEIEVARLDEELEKWVKQKQSPLVSMGLSAPIIATIHAESDPMSDFTHPWQYAAYAGLDPSLSESGNMRSSHTPISKRGSPYLRHVLYLAALSRYRQNRSFQALYQKSCRKGHHHTSALIVVAHKIARIIWRVLTDERPFRQTPPPSKKKGEN

SEQ ID NO: 483699 - protein, 319 aa, unidentified
MDNLSHGRVIGIDVSRDWLDVHCLPDGHRCRVPNAPAGHAAVADLARDRDAVVCFESTGGQEWQLWARLEAGGVAARQVPPAQLKAFAQSRGTRAKTDRIDAELIARFFAFRPEAGRSLPAEKIRLLRALTTKRAQLVEMRKRLLAQIRAHQKLGTAAMFEDVDTELRERLDILIKELEDRISRAITSDDRLCETAIVLRSIPGIGPVASTMLIAEMPEIGTITGEEAAALTGLAPVAHDSGTLRGKRAIAGGRRALRHVMFQAALVAAHHNPSLRAFAERLRKAGKPHKVIITAVARKLVTIANALCKSRQKWTATTS

SEQ ID NO: 483700 - protein, 345 aa, unidentified
MTEAYDGRQVVGMDLHRRRSVLVRMTEDGRKLETARIDNSPAALRGVLARAGKNPRVVVEATYGWYWAADVLEAAGAEVHLAHPLGVKAFSYRRVKNDERDCQDLADLLRLGRLPEAWIAPPPVRALREVTRYRIKLVQQRTSCKDQVHALLAKAGIPVTRSDIFGRGGGLWLDALALPQPYAGKLASLRALTGVLDGEIARLEAQAAQMLAGDPGYAAIRQLPGIGPVLGAVICAEIGDITRFRRPGQLCSWAGLTPRHYESDTKVIRGHVSKQGSRILRWALTEAIQHQPAGTRPRQVKDAITARRGAGARSIAKTAAARVLLTDVFYALRDGHLRRAAAPAA

SEQ ID NO: 483701 - protein, 426 aa, unidentified
MNEITNLKINVGIDIAKQKHHASILLSDRFNPLAGKVLKEFFFDNSEKGFQKLHTNIRKYTQNFPEGKVAMEATAHYYEVLARWLEHHDYNLIICNPRQAKYLRNVIKPYFKTDPIDSLVLAKGAELGLLKGELYDKKYAQLKELLQLDKKLKRDLTRLKNQTTRLMDVIFPERSKAIKGLFGKTSLEILQCAPTPSDLIELGVEKLTILLKRHSRGRFRLSEANKMIDLARHSVGISDPIWVYELKLLIPRIVQLQDQVAEVKIKIHDYVFDGFPTEIEKISEIPGVGITAGAAIIGFLGDVHRFVGNRASRKVTAFAGLAVMQYSSGQKERMGKISKAGPSLLRFHLGWSALQAVKTKGPLQDFFEGLVKRGVLKSKALVAVAVKILRCCFYILRDGVEFDPTKLQRRDMGNVHSRMLIAPIQV

SEQ ID NO: 483702 - protein, 352 aa, unidentified
MRYDTKLDFTGQQIYVGLDIHKKSWSVSIYSEHSEHKTFTQPPAVDKLVYYLRRHFPGATYHSVYEAGYSGFWIHDRLREQGVRCVIVNPGDVPTKGKERTGKTDRVDCRKLARGLRSGELEGIYVPPRAKVEDRSLVRTRQSMVRKQTRCKNQIKSILLFYGICLPEKSRWSKRFINWIETVRMEKASGDLTLRVHLEELYHLRQIIADLNRAILALSRTDEYRSAVELLKTVPGIGPRGAMVLLTELYDISRFGSLDKLSSYVGLIPDTDSSGEKERQGGITKRRNVILRSLLVEAAWMAAAKDPALMMVFHRLCLRMRKTKAIVHIARKLLNRVRYVLKNQKPYVLATV

SEQ ID NO: 483703 - protein, 347 aa, unidentified
MRFYTNQHHYYCGIDLHTKNMYVCILNQEGKIILHKNANVCEKTLLQFIQPYLTDIVISVECMFTWYWIADFCHQHNIPFVLGHALYMKAIHGSKTKNDKIDSRKIAVLLRGGMIPMAYVYPQEMRATRDLLRRRMHFMRKRSELLAHIQNTRNQYNLPSFEKTISRKSNRTNVIDHFNDPAVQKSMELNLVLIDQYDDILRKTENYILNHIKAHNANEFYLLRSIPGVGEILALVMLYEIHDIKRFERVQNFTSYARLIKPQKESAGKLKGSGNGKMGNAFLKWAFSEATLLFIREKQEIKDLHARLKNKHGKARALAIISHKLGRAVYYMLKKQKAFNMNKFLNQ

SEQ ID NO: 483704 - protein, 341 aa, unidentified
MTDASPILFVGIDIAAKTLAAAWLRPAEAVSRPITLAQSPQGFATLHERLGQTGCTPTETHVVMEATGSYWIALATTLAHTGYRVSVINPAQAHHFAKALLKRAKTDAIDAQTLAHLAALLHPALWTPPPAVYYEVQQRLAQRDALLDVQRQLMNQLHALLFAPLVVASVKARMEELIETLGQQIRALDAEVSAALAADATWAASAARLQSIKGVGLITAAWLLVTTLNFTICSTPEAAVAYAGLAPNPYESGTSVRGRPRIGHTGNGRLRTALYLATLSAAQHNPVIKAFYERMRAAGKPAKVARCAAARKLLHIAWAVVCREQDFDPEYAQRHVQPVAA

SEQ ID NO: 483705 - protein, 355 aa, unidentified
MLSVKYIGMDVHKETVSIAVLNSSGKLVMESILETKANTIIQFVEGIRGDLRVTLEEGTWAAWLYDLLRPHVTEVVVCDPRKNALLKVGNKSDRIDARKLAELLYLDRLQPVYHGEHGVRTLKELSRSYLAISGDQSRVMTRIKALYRSWAIPCAGKQVYAPRCRSEWLGKITEAGVRRRAEFYYQQLDALRGLRQQVRRELLAESGKHQASKLLCEIPAIGPVRAAQLIAILQTPHRFRTKRQLWAYGGLGIETHSSADHRYVDGHLQPSKRQVSLRGLNRNHNHELKNIFKGAAIIAATKPGPLQQFYDALVAKGMRPEMARLTLARKIAAIILIVWKKGVCFDAQYLKPQTA

SEQ ID NO: 483706 - protein, 419 aa, unidentified
MSFKIFKFNCCGLDVHKTWIYACIGITDSNNRTEYKQARFSSFTKGLNELCDWLAKYNCKDVCMESTGKYWIPVFNILEQHSFWVTLSHPKYTKPMKGNKTDRKDAKWICDLYMCGMVKPSFIPPADIRELRDLVRYRFKLTCMITGEKNRAQNCLTVSNLKLDDVFSDVFGKSSRSITEHILQHPGEKFDIAPFVDSRCKTPITEIQAAVDGAISKEQVVKLRQCLDHIDELNKHISEVEQEILRLSDKYEAALNLIRTVPGFNKNPLTAIQVLSEIGGDMSVFPTAKHLVSWAGCCPRNDQSNQKIKSTRISRAGSYFKPVLVQVANALIKSKKHSEFTSRYKRIKARRGHKKAIIAICRMILTAIWHILTDLKPYTTEGFLESRPVNDSKILTTSQALNLLKQRGYVIKDDIVSVP

SEQ ID NO: 483707 - protein, 412 aa, unidentified
MQDILTCAMGLDVHRDVIVACLARGELGTEPEIEIRSFSTLIPEMRKLRDWVLEVECRHVAMESTGIYWQPIYEMLEPCFDGQINILVVNARHMKNVPGRKTDMRDAQWIATLLRAGLLNGSFIPDKTFRELRHLTRYRKSIVHDITAQKNRIDKFLQSSGFRFTAFLSDAFGASGRNIIRHLMEYGDISREALDKCLKTQTRKRIDEILVALNGSLSEHQRSFLRMIFEHLESLERHRHTVEDAISEEIVKHEAALSLLCSIPGIDVTAAASIIAEIGTDMSAFPDSQHICSWAGLSPGNNESAGKRKSAHINKGNPYLKSMLCEVGWVISGKRTLYLSGWYWRVKQRKGAKRATIALARKLLTLIYTMLKTGTPYNEECFEIRRKQSERKRASRMVNELQKLGYFVVAPD

SEQ ID NO: 483708 - protein, 276 aa, unidentified
MPIVGGLDIHRTQITFDYLDTETGQVCRGQIAPAGRAHLRAWLARFAGRDDVAFAVEACTGWRYIAGELAAAGIAVHLAEPADTAFARGRKRHAKTDKTDCRHLRMLLAEGRLPECWIPPGHILECRALLELYHDLRAEHTTWAQRIHAVLFHHGAPALGEGTLRTGQGVAALRAAGRFSSSRQAVRFAGLDVTVWSSDRKGPPGRLSRQGPPVLRWAVYEAGKTHARSSAPDHGYYAAVKDREGGKRAALSEARKILRQACHILAELGDDALSAA

SEQ ID NO: 483709 - protein, 369 aa, unidentified
MAETTEAFVGIDVAKLRNAVAVADAGRDGEVRFYGEVDASPESMRRLAAKLAGKHERLHFCYEAGPTGYGLHRLLTGLGHSCVVVAPSLVPRKPGDRVKTNRRDALSLARLLRAGELTPIRVPDTAHEAVRNLVRARAAAVKDVGLKKRQVGAFLLRHSRLFPRKKNWGARYRSWLETQSFEHPADQIVLQEGIESVRLAEERLARLDRALGEFLPTWSLAPLVEALQALRGVDLVTAVTFVVEVGDIRRFESPRQLMGYLGLVPGERSTGETVRRGSITKMGNARVRHLLVESAWTYRHPPRVGKAKLPKLERVSPKVREIAWKAQSRLTARYRALTARGKKTTVTCTAIARELAAFMWAVAREARPA

SEQ ID NO: 483710 - protein, 349 aa, unidentified
MKFYTKQHRFYCGIDLHADAMYVCILDSAGEVVVHQNLPTHPKLFLKLIKPYREGLVVGCECMFTWYWLADLCAEQGIDFVLGHALYMRAIHGGKAKNDKIDSHKIAVLLRGGSFPLAYTYPKEMRATRDLLRRRNHLTRKRGELFAHIQNTATQYNLAEPLGRIAKPSERGDLLKKFPDPVVRRMVEVDLLTIEHCEQLLDRLERELEKIAIQHDPVNLALLKSIPGVGKILGMVMLYEIEDIARFPREQDFASYCRLVKPAKESNGKNYGHGGKKIGNAHLRWAFGEAVVLMLKGNKPAQAMLQRLASKHGKGKALAILSHRLGRAVYYMLKNQVPFDQECFLRKAT

SEQ ID NO: 483711 - protein, 322 aa, unidentified
MAMLSFGGIDVSKDRLDITVLPDEQCSSVSNDAAGWAELVEQLRGSSITAIGVEASGGYERGVVRALLAAGMSVRQINPFKLRQFAKASGTLAKNDRLDARMIASFVAVMPTRPAQRQAPMIEQLAAMLTVRRQLSEQKVATENASRLLEGAMLQRLSRRRVAGLTADIDLLDQRLVEIVTADAALAHRFRLLTSMPGVGAVLACTLIALLPELGQMSRKQVAALVGLAPYDFDSGKLKGRRCIWGGRARVRHVLYMAALSASNWNPGLKAFHDRLKATGKKPKVVIVAVMRKMITTLNAMLRDGTTWVDRYSGRRSASTAR

SEQ ID NO: 483712 - protein, 382 aa, unidentified
MQPINTVNPTIYLAIELSASTWLIAARLPGSEKPHLHRIEGGDTAALFALISSLRARVARRLDAAIGVVCCFEAGRDGFWLHRLLTAHGIANYVLEPTSILINRRARRAKTDRLDAIGMLRVLAAYLRGDRQSCSMVRVPTPEDEDAKRIHRERENLVQEKLRIENRIEALLFTQGIRKRPSLRSWERDLAVLRTGDGREMPRHLRAELDRLRRRLVTILELIREVEAERDEVVTTNPEHQTSRKIVALCRIRGLGENFAGVLTREVFYRSFDNRRQIASYVGITPMPYQSGSMDRDRRISRAGNPRARTTMIQLAWLWLRYQPGSELAEWFRKRVGTLAGRTRRIAIVAMARKLLIALWRYVETGVLPAGAEIRLESVAAA

SEQ ID NO: 483713 - protein, 428 aa, unidentified
MTNQEIIRRGQYCQIVKEITGSDEYLVVGVDVAKEKHHAFMGTAIGKSLLRKLIFENNIDGFSRLLKTADAIKVQNGLSKIVYGIEPTGNYHKPLARHLIRCNGDVVLVAGLAVKNNRVLIDGRWDKNDKKDAANIADLVSRGKCLYYDCPTQSIIEIRVLLSLRRRLKKEEHSLRMRIRNNLLALYFPELDRFYSACESETLAIVGWCLTPDTIAAMEFEEFFHLVTKTRRGTAQALRLRKIHSLAIESIGCPMGPAGEHEAELLVEKLKQVRNQIKETNDLIEDFCLEFSEYSYLLTIPGFGPYISARVLASIGDPFRFENRKQLIKMAGYDLCANRSGRTSDKAIPVISKKGNSELRYALYQAANIAAARVDLFREYFAKLLCGRERERGIKTKMRVKLAAKMLVIAWTLMKKREVFNPDYIDIE

SEQ ID NO: 483714 - protein, 348 aa, unidentified
MRTYNTQHLHYCGVDLHARSLFVNVLDDKGRTRLEQDLPASPQAFLDAVKPYRDGLVVGCECMFAWYWLADLCEREAIPFVLGHALAMKAIHGGKAKNDRLDAQKIAGLLKGGFFPMAYVYPKAKRETRDLLRRRSFFVRQRAQLIAHIQNTNSQYNLPPFDKKLTYKGNRTAPIADRFEHPSTRLSITTDLNLIESYDTQIAALERHLVKSARVDDPATFQFLRTVPGIGPILGLVMLYEIDSIRRFAEAGNFLSYARLVACTHESAGKVKGVGGRKIGNAHLKWAFSEAASLMLRSFPAAKSWMQRQSKKRGVKKAHAILEAKIGRTVYHLWRKQIAFDGQKFLAS

SEQ ID NO: 483715 - protein, 370 aa, unidentified
MKVYIGIDAHSTNYTLSSYNSEADDCTNAVTLKPEYEGIVKYARKIKEMHGPNTAVLCGYEAGCLGYTLYKQLTDAGVACVIMAPSTIATVQHNKKHGKKTDKRDACSIAKALAYGLYSKVYVPDEHDVDVREYIRMRSDHKKALKKIKQQILAFCLRNGYLYTETAKWTQKHVDWLRTVEMRSMQRETLDEYMIAYDTFINYLDQIDTRIEEIAQEDRYKNKVAVLRCLKGIDTLTALALVSEISDFSRFSKADQFASYLGLVPGQDSSSDNMKYLGITKAGNSHLRTLLVEAAQTYSRGSAAVKSKALKSRQSGNDEQVIAYADKAKVRLSKKFRKLQARGVKYSVATAAIARELACFTWGLMTDHIN

SEQ ID NO: 483716 - protein, 416 aa, unidentified
MNSVGIDISKGRSTIAVMRPFGEVVISPFEVRHTDSELSKLARRLKSLNGETRVVMEATGNYHAPVAKLLHDAGLYVSVVNAKLVHGYGNNDLRRVKTDRKDAVKLANYGLDRWLTLPRYIPEEDTRLLLKNCYRQYRQYSKVQTILKNNLISLLDTVFPNVNRLFSSPARADGSEKWVDFVAEFWHCRCVSEKSEKVFTNKYQRWCRKHGYNFSEEKAHTIYVEASGHIGVMPKSETTKLLVEQAVAQLRATSAALAALKHEMQSLASMLPEYPVVMEMYGVGESFGPQLMAEIGDIRRFEHKKSLVAFAGVDPMPNQSGEKNVRSNRSSKRGSPYLRKTLFNIMGIYLRCSPADEPVYQFLDRKRVEGKPFYIYMTAGANKFLRRYYAKVRDYLATLDGLPPVDMDSTGLSQPD

SEQ ID NO: 483717 - protein, 402 aa, unidentified
MNCVGIDVSKGKSMIAVMQPLGEVIISPFEVYHTGSELSELARLLKSLDGETRVVMEYTGNYHAPVAWLLHDAGFYVSVVNAMLVHDYGNNSLRRAKTDKKDAIKLANYGLDHWLTLPRYVPEEDTRLMLKNCYRQYQQYSKVKTMLKNNLISLLDTAFPDANRLFTSPARADGSEKWVDFVDAFWHCECVCGLSAKAFVTKYQKWCKKHGYNFSEEKALDIYASACGHFGVMPKTNTAKLLVGQAVSQLRAISAALAALKQEMQALAERLPEYPVVMGMFGVGPTLGPQLMAEIGDVRRFYSKKALVAFAGIDAPPYQSGQMDVRSRSISKRGSAALRRTLFLVMSVFLQQSPTDEPIYQFMDKKRAEGKPYRVYMMASANKFLRIYYASVKAYLGSLETA

SEQ ID NO: 483718 - protein, 344 aa, unidentified
MSINYIGADVDCMMTEIAIEKNGKITARDRVPTNIRSLRKCLDSISGKKEMVIEEGPMAGWLYRNLKSDVDRFVVCDPRRNKLISSDGEKTDAIDAGDLAALLRGGYLREIYHTEDESRLALKDAVAIYHDRVREAVRQINKLRGRCRCYGVTVPGRVLKNPSFRKEWASQLNLPDLNRQLSILWVGFDAVSKQVKMARKEITRLSQSYPIISYWKDLPGIGPIRAITLFAYLDTPWRFSSPKKLWKYCGIGLRRFTSGSDKQGCPKPGNLRLFRGANRKLKDSIMGAALSAIGQSNNQFANHYRKMVQNGVTLSNARHTVARKMLTVMWGMWKTNSRFNESLV

SEQ ID NO: 483719 - protein, 397 aa, unidentified
MYIVGIDIAKRKHEAAVIDGDGAVIIKPFSFTNNCSGYNRLLAMLAKAKLPLDEVSFAMEATGHYWLALFTRLQKEGFRVQVINPVQTNSIRNFYIRQAKTDPRDALLIAEVIRFGHFSESTLHPENIYELRELCRGRHAIVSMQADVKRKVVALLDQVFPEYETAFTNLFGDTSMAILQTCPTPKELSEMPLEELCHLIEVSSHKRFRMAKAQELQELARNSFGFAMAGDVFSTMIRLYAKHLDFLKQQVREMDRKIAEIMETLDTPITTITGIGPTLGAYILSEIGDINRFSSAAKLAAYAGIDPTMRQSGEYNGVRNRMSKRGSPYLRHAIWLAASSAVLHDPALKLYFQKKRDEGKPYMASVGHACRKMVSIIYAVMRDNKAYTPYIPNEISA

SEQ ID NO: 483720 - protein, 332 aa, unidentified
MSIIGCDLHTRYQVIAMLETETGEVITRRLEHEGGEAKRFYAGLGKPALIGIEATGYTQWFERLLAELGHELWIGDPAEIRARAVRRQKTDTRDAEHLLELLLTDRFPRVWVPTPEERDFRQLLKHRDKLVKMQTSVRNQLHFLAMSQGVCRKQKLWSARGRQELEGLQLGPWASRRRQELLELLDRLEPRIAELDAAVKAEAARRPEAVRLMEQKGVGPVTALAFVLTVGPVERFPNSRKLVSYLGLNPREDSSGGRQRLGHISKQGNEMMRWLLVEAGHTAVQYDPELRRQYQRLKFRRGGNVAKVAIARRLAVRLYWSLRRYAAGSHVQ

SEQ ID NO: 483721 - protein, 409 aa, unidentified
MYFIGIDIAKNFHVAAVLGIDSDKVLHTLKFNNDEEGFEKLFLLLSSLDEISNFTVAMEATGLFFENLYLYLKAKGFKVILLNPYQTNRFREMDTMKKVKNDNIDALMIAALIKSGRYSKAYVSEDSYQSIKSLYRHKSSLQDELKKHKRQVSTLLAVVFPEMEKVIKDPFNITGLALLEKYPTAKHYHHASVDRILKTFRGIKGNNFNEVKATKLLELAKSSIYQGNGVDERSFVILSHIRQIRFINNEIEQCESQMLALFNQQPKLDDTEEQEIMNIIDNLRTIPGVSDKTIFALMSECGDLSRFTNQNSFIGYLGLYPTLEQSGNKTVHGPIAKRGARLAKKALYQAAIASVRHNKELNKLFHDKVSLGRAKKEAIVIVARKLAHIILAIYKNNVAYNPNRVFVAS

SEQ ID NO: 483722 - protein, 279 aa, unidentified
MENVTTIGLDLAKHVFQAHGADQGGAVIFRKKLRRQHLLSFFAALPPCTVAMEACSGSHYWGREFGKLGHSVKLIAPAYVKPFVKRQKNDASDAEAICEAAQRPTMRFVPVKSEESQAAAIIFRTRDLFVRQRTQALNALRGHLTEFGLIVAKGPQNFPKLIALVNDPASGLPEAAREILVLLVEQVHSLDARVAKLDREIARRAKEDKVARRLMTIPGIGPVTATAIAALAPPAEAFKRGRDFAAWLGLTPLQQSSGGKGGAPDASSCAKCRAAAATA

SEQ ID NO: 483723 - protein, 367 aa, unidentified
MERQLERCGGLDVHKETVAACVRVGGRTGQAEQHVQTFGTTVGDLLVLRDWLAAHGVTHVAMESTGVYWKPVFYALESDFTCLLVNAAHFKQVPGRKTDVKDCVWIAQLLEHGLLRGSFVPPAPIRDLRDLTRYRKAVIQDRTRVANRLHKALEEAGIKLAAVASDILGVSGRAMLAALVQGTTDPAVLADLARGRLRGKLPALRQALANRFRPHHAFVLGQLLTHLDYLDEAIATLSTEIERVMAPFAEPLRRLDTIPGINQRTAEVILAKIGPDMRVFPSARHLASWAVLCPGHHESGGKHKSGKTRKGNRWLRTALIEAAAGASRAKHSALQARFRRVLTTSRAEERRRGSGPRPVAHGLPRPR

SEQ ID NO: 483724 - protein, 433 aa, unidentified
MEEAGDEPLFCERAAGIDIGKQSVMVTVRVPSGTRRGGRAQETREFGTTRRQLLELADWLRCWGVERAGMESTSDYWKPVFFVLEREGFDCVLYQASKVKAQPGRPKTDKLDSVWLAKVTERGSVAGSFVPPEEIRRLRTHTRYRRRLTQARTAEKQRVEKLLEDAHLKLSSVISDIHGVSGRDMLRALAAGERDPRVLAELARGVMRRKLAALREALDCSFFTEEHAFVLSMMLGNIDHYSAQIAALDEKIAALCEPYERQVAQLDAIPGFGVKTAQDLIGEIGTDMSVFPTAGHLCSWARVAPRVKESGGRRKGGSATGKGNPYIGATLGEASAAVGRTQTFLGAKLRRLCRHMPKKKAQGAVMRTQLVAAHALLSDPEAGYRELGPGYYDQRADTGRQARGHLRSLERLGYKVTLEPIDPGTGELTAKAS

SEQ ID NO: 483725 - protein, 342 aa, unidentified
MEQTIVIVGLDLAKSVFQVQAIAAYGAVVIRRNLCRAEVIRFFTELPPCLVGMEACGSAHHWARDFMAIGHEVRLMPPAYVKPYVKRGKSDAADAEAICEAVTRLKMRSVAVKSVEQQAVLMLHKSRDLMVRQRTKLINALRGHLAEHGIVTGLGARGVVASLKALHDGQDRFPAHAHSALHGIAAQLRALASEIDRLEAQILDRHRKDETSRRLATIPGIGPITTSAVAAAVPDASLFRLCCQFGARFGLTLRANNSGGKERLGGITMQVDGNRSRLLVVGSTALMRMTRKNPARQPWMAGLLECKPAKIATEALANKTAPIAWAVMTRKEEYAAAAQRYL

SEQ ID NO: 483726 - protein, 331 aa, unidentified
MNYVGIDVHKQSFQAAVVDEAGSCLDEFRLRNNREGIQRLIDMARCHDGFKAVVESSANYWTKLFDVLEENRIPIKLSNPYKTKAIAEAKVKTDRVDARTLARLSRADLVAECYVPSREDREKRALIRERANLMKTRTELRNRIHDLLAKYEFQYGFSDLFGRQGMEWLRALKLSQHDQTILNVNMRMLMALNEEIERISIEIAKLAVDPTDKEKQSQVKLLLGLKGIDYHSALVLLSKIGDIKRFSTPEKLVSWAGLAPRTHQSGETLHNGHITKKGSTRVRWILGQATQTARNTTPSFKRSIKESHPRKATTRLWSPRCGRCSSSFGPF

SEQ ID NO: 483727 - protein, 422 aa, unidentified
MLEETQDTEEIIERIAALDVGKAELVCCVRLPSEDRPGKRLQEVSTHTTMTRSVLSPADRLRCLGVTRVVMEATSDYWKPIFYVLEAAGFETWLVNARDVKHLPGRPKTDRLDAIWLCKVAERQMIRPSFVPPPRIREMRHLARYRCDLVAMRTAEKNRTEKLLEDAQIKSSVVASDTFGVSGRAMMAALIAGERNPTVLAQMARASMRTKISALEEAFTGRFTDHHAFLLAKMLARVDQLNRDIAEVDAKIEELVAPFAVAVERLDEIPGIGRTAASLILAEIGLDMTRFPTAGHLASWARFAPTMKESAGKKKGRNATGHGNPYLARVLGEAAVSAGKTNTFLGERYRRIARRRGKKRAIVAVGRSILTIVWHLLSDPDAHFIDLGADFYDTRIGPERKKRTHIRQLEALGHRVILEPAA

SEQ ID NO: 483728 - protein, 340 aa, unidentified
MQITTIGLDIAKNVFQVHGIDATETVVVRRQLRRGQVMAFFESLSPCLIGMEACATSHHWARELTKLGHEVRLMPAKDVKAYVKRNKNDAADAEAICEAVRRPTMRFVRVKSAEQQGQLMQHRTRDLLMRQRTQTINALRAHLAELGITAAQGREGLKELLAIIADESDERLPVSARISLVVLAAQLQALQALIGSVEKRIVAQHRANEQSKRLRTIPGIGMIGATAITATITDPKAFRSGRDFAAWVGLVPRQDSTGGKRKLGPISKQGDRYLRRILVVGAHSVLRRAKHDPGRYPWLTRLLARRPFKVVAIALANKMARIAWALLAKGGIYQLRLAAA

SEQ ID NO: 483729 - protein, 350 aa, unidentified
MIIVGCDFHPSFQQIATLDTESGVTEEHKLVHASGEAEEFYRKLPAPAMVGIETVGNDLWFVLLLQRLGHEACVGDAAQIRASYVRKQKTDRRDAKHILQLLVEGRFPRIWIPDAEMRDHRQLLIHRHKLVQIRTRVKNELQHLMLNQGIQKKQLWNTAGRAALASLPMQPWTDRRRNDLLNLLAMLDGQLEDLDDAIKQVAKDYPDVHLLMSQPGVGAVTALAFVLTVGDVHRFPRGKQVASYLGLIPREHSSGGKQRMGGISKQGNRLLRFLLVEAANIAVRFDPELRKDYQHRCHQKHFTVAKVASARKLAIRMYWILRTQTPFAQANSVILTFRLQNGGGPYIPVS

SEQ ID NO: 483730 - protein, 340 aa, unidentified
MRLIGCDLHASQQSIAMLDRDTGVVIEQTLTHEGGAVREFYASIPAPVVVGIEATGSMGWFLRLMEELAIECRVGHPTAIRKAETRRQKHDRRDAALLLQLLAEDRFPAIWMPSTEYRDLRSLLLHRHQWVRMRTRVQNALHAIVLAHGVRRGHTLWNRDGQALLASLPLAPHTAHRRSELQALYQHLAEQVDRLDERVKLVATERPRATLLMTHPGVGPVTALATDVFVGDPTRFLDGKALASYVGMIPREYSSGTRQRLGALSKQGNPFLRFLWCEAAAHAVRRDPDLQRFYRRKVVQKGFAKARVAAARKLGIRLWIMLRDQIDYAEFCRRGQARQS

SEQ ID NO: 483731 - protein, 341 aa, unidentified
MKLFIGLDVALAKTAICVVSEHGKIVREAESASEPEPLLAWLQALGGDIAALGLEAGPLSQWLHRGLTDAGLDAVLMETRQVKGALKATPVKTDRRDAEGIARLLHLGWFRPVHCKSVSAQEVRVILSARKAIQQNMLALEMSLRGLLRNFGLKVGAISRGRFEQRLRELADGNAMLKLTTAPMLRARASLRQEQASLERLVRQMAQDDSVCVRLMTMPGIGAIVALTYRSAVDYPARFTSSKNVGPWVGLTLSRNQSGERDVSGGITKARDVTLRRALCQAATVMMNRGRATWRRTWSAPVAKRRGRKRAMVALARRISVILHRMWVDGTTFHMEAAPTT

SEQ ID NO: 483732 - protein, 344 aa, unidentified
MVETRRALTGGVDTHADVHVAAVIDPQGGLLGVESFRTDLAGYQQLSGWMCAFGEISQVGVEGTGSYGAGLARHLRRVGLVVVEVDRPNRQERARQGKSDSLDAVEAARAALSGRAFGVAKTRDGNVEAIRSLMVARRSARESRTKAMNQIRQLVYTAPDELRERFVGVPSWRLAEGVATMRVHTDPDPVRMATKTALATLGRRAVALGEEGKRLDVLIARLVNKVAPELVELVGLGPDTAALLLIAAGDNPSRLRNEATWAKLCGVAPLEASSGKVTRHRLNRGGDRQANHALWRIVLTRMSCHAPTKVYVARRTAEGKSKREIMRILKRYVAREVYHYLPRD

SEQ ID NO: 483733 - protein, 406 aa, unidentified
MELIYPCCAGLDVHKKSVVAHVKTPEGSEAKTFGTTTDAILALSDWLSTKKVTHVAMESTGPYWKPIWNVLEGNVDVTLVNPQHIKAVPGRKTDMKDAEWICDLHRHGLLSRSYVPERPQRELRELVRYRKSLIEERAREVNRIQKTLEGANIKLGSVASNVMGVSGRAILQQLANGVEDPQELVQLAKGRLRSKLEDLAEALKGLMQSHQRFMLKEQLLHVSDLEAVLEEIEQEIQTRLNPFEDAVARLMTIPGVGRRVSEVIVVEVGPDASHFASDRHLAAWAGLCPGNRESAGKRLGSRSRQGNHHLKQAMVEAAWAASHTPSYLGAQYRRLAKRLKGKKAAVAVAHSLITIVYHVLHDGAVYAELGQDYFDRRDREHIERQALRSLHGLGYDVTIKRRDPAA

SEQ ID NO: 483734 - protein, 457 aa, unidentified
MSQRSQKKKSRKFQVTQLPAQLQHINLNAAGIDIGSERHLVAVPEGRDDVSVREFGTFTADLEALADWLKKCGVTSVAMESTGVYWIPVFEVLERRGFEVKLVDARHVKNVSGRKSDVLDCQWLQQLHTYGLLAGAFRPPDEVCVLRSYLRQKEMLTQAASMHIQHMQKALQQMNLLLHNVVSDITGVTGMKIIKAILAGERDPKVLARNRHGLCKNSPSTIAKSLIGNYREEHLFALRQAVELYEMYQAKIADCEQAIIKQLEKQPNVSDDEPPPADKETQARSRMRADVDVQELLYKKTGIDLFAIPGLAADTLLTLASEVGFDMSPWKTEKHFASWLGLCPGTRRSGGKVLNSKTKRNPNRATQAFRMAASSLSRSKTALGAFFRRLKMRTGGPQAITATAHKIARIYYAMLTKRTSYIELGQQAYEQRYQQRRINSLKNQAKLLGFQLVPYTT

SEQ ID NO: 483735 - protein, 352 aa, unidentified
MEIIGLDLHKRESQLAIKAEDSTITDRRIVTSRARFTAVLGGRPRARILLEASTESEWVARHLESLGHDVIVADPNYAPMYANRSRRTKTDKRDARTLLDACATGAYRPAYRLSEARRHVRAELAVRDALVRTRTRYIALAKALVRRDGLRVPTSASAWVPARIAALDLSPALTTELAPLFAVYASLNEQIAAADRRIAVVAASDPIVARLATAPGVGPVTASAFVATIDDITRFRSAHDLEAYLGVVPRERSSGEKRQLGRITKAGNGRMRWLLVEAGWQILRSKSAETTALRAWTRTIAQRRGKRIAVVALARRLAGILYAMWRDGVPYEAQRIRPLAPGASQAVDQRAG

SEQ ID NO: 483736 - protein, 377 aa, unidentified
MSTIRFIGLDVHADTIAVAVAEPDGEVRSLGVIPNRLESIRKLVAKLGPVGNLKACYEAGPTGYVTYWQLTALGVACEVIAPTLIPVKAGDRVKTNRRDALKLARSYRAGDLTPVWVPDAAHEALRDLVRAREDARQDQHRARHRLSKFLLRHGQRPPDTIKKAWTLKYMTWIKEQVHFDESASHATLLDYVREVDHMAERIERLERAITEAIEKAPPEMRAVIAALQALRGVAMITAVTVVAEVGSLSRFQSPRQLMGYSGMVSREYSTGNHTQRGSITKTGNAHLRRVIVESAWAYQYRPWVGGFLRKRQQGLDQDIKDLAWKAQWRLHTRYKKLAAAGKKKPQIVTAVGRELLGFIWAIAVRIEAQFKTERKVA

SEQ ID NO: 483737 - protein, 372 aa, unidentified
MEKFSKYVGLDVHKDTIAVAIAAEDSEVRFYGEIANNPTAIIKLVKLLSKEGELVAFCYEAGGCGYKIYRQLTAMGKECIVVAPSLIPRKAGERVKTDRRDSINLARLYRAGELTPVWVPEDEQEALRDLTRAREDMKHFERQAKQRLLAFLLRHGWVYSGKARWTHAHYRWMETVKFDRQAQQIVFQEYKDIVNSFGTRVEEIESQMQIHAKESLSWPVIESLMSLRGVNFITAFTLIAEIGDLQRFASAPKLMAYLGLVPSERSSGNSVRRGGITKTGNSHVRRVLIEAAWTYRFAARRTPIIQRRMDKVPAAIQEISWSAQKRLCQRYKTLQTNGKLKVQVCTAVARELTGFIWAIGQATPIMKNTPTN

SEQ ID NO: 483738 - protein, 385 aa, unidentified
MANQNDLSRSLVAFEQDNTIIAVIEMSLNSWLVAGIVPGIERRPLKKLSCDEQMLLQLLYRWRDEAVKAERKITRMVVAFEAGRDGFWLARWLRSRGIEAYVIHPTSVAVSREHRRAKTDRLDTELLIRAFLGWLRGEPDHCSMAAIPNLQEEDAKRPTRERENLVGERTRIVNRMKACLIRFGIRNFNPILRRATERLNALCTPEGVSLPPNTLAELRRDMARLRFVMDQINEIEAARLRRLEQAPAEEAHAKVRLLARVIGVGLETADMLVHEILSRKLRDRRAVARYAGLTGAPDESGSKRREKGLAKAGNARVRRGMIQLAWRFLLFQKNSALSQWYRTRSESAGKKRKTMIVALARKLLIALWRLVTTGEVPAGVVLRAV

SEQ ID NO: 483739 - protein, 354 aa, unidentified
MSQKLNSEITVIGIDIGKNSFHIVGQDRRGALLLRQKWSRGQVEARLANLPPCLIGMEACVGAHHLSRKLKALGHNARLMPAKYVRPYSKGEKNDYRDAEAIAEAVQRPTMKFVATKTADQLDLQALHRVRERLVSQRTGIINQIRAFLLERGIAVRQGLHFLRAELPGILAKCTDVLSPRMLHLIEDLATDWRRLDERIEGLSDEIGALARHDKGCERLMTVPGIGPIISSAIVAAIGTGDVFSKGRDFGAWLGLVPKQISTGDRTILGPISRRGNRYLRALFVQAAWVVLVKIKPEGWERYGLRSWIEAAKQRLHHNVLAIALANKLARIAWAVLHKGRAFECIKTNASRAA

SEQ ID NO: 483740 - protein, 315 aa, unidentified
MSDVPCFVGIDVAKAQLDIALRPSGERWAVPNDAGGVVMLVERLQALHPTLIVLEATGGLERAATAALATADLPVVVVNPRQARDFARATGQLAKTDALDARALAHFADVIRPTPRPLPDAQTQELRALLGRRQQLIGMRTAEQNRLAGTNARLTKDIAAHITWLNAAIATLDDDLETILRASPLWREKDDLLQSAKGIGPVCARTLLLELPELGTLTRQQIAALVGVAPLNCDSGTLRGRRTIWGGRAHVRTVLYMGTLVATRYNPQIKAFYERLLAAGKVKKVALTACMHKLLTILNAMLKHRTPWQPQEVQN

SEQ ID NO: 483741 - protein, 464 aa, unidentified
MAFTLGIDIAVRAAHQATLARDGATVWRGRKFWTRPSDLERLWTDLDVADPGELTVVIEPTRNAWIVVAEWFRRRGARVVMVPTTQSADLRRYYSKHTKNDRIDSELLARLPLLHPDGLREYSGQGPADALRRLVKQRSTMVKRRVAVYARLDALVELLGPSWYAMLGSNYGLAALEFLARYADPNTVIRLGQARLSRLLIARSRGAWREDHAAGLVAAARETLALWGADGMDFAELAEDIAHEAEQALFLTRQIKQIDERVTNLYADADPDGIVASAPGVGPVTSAVIAGRIGDPHRFTSLAAVRASTGLVPKVSQSGVSKVESSITKAGDPLLREVLCHAADQARKVDPQIAAKYQRLMAGDRHHDSAICHLATLMVTRIVACMRNGQPYTLRDVDGTPITEAEGRAIVKERYAIDQKNRVAAAGRRMQQRHRQAAGRESQESQSAPTSQPANTKPTSRHVA

SEQ ID NO: 483742 - protein, 351 aa, unidentified
MKTNTPPKTETQDRIQQLKLGVDWHADHFRVVRMCDGQSPQPAQRFTPASFLLLVQKQLTLADHVFVVYEAGPGGFHLHRQLIALGVTTYVVHPQKLDPNHKGVVTDKTDARELTLNLDRYLRGNQRAMSVVRVPTEAEEQRRALSRQREQLRRERQRLAAQGRSLCLTQGIRLRGEWWAQTLALPEWLAPRLQVWRQLITAVEEQLDALTKQVEALAPKARPKGLGPLTLGMLIAELCDWSRFENRKQIGSYTGLCGGVSSSGQSHCDLSITKAGNARVRWSLIELAWRMVLYQPQSKAVQRWKHVLLNPKAAARQKKRALVALARQLAVDLWRWQTGKVTPEQLGWVMV

SEQ ID NO: 483743 - protein, 406 aa, unidentified
MNTISSSVQRVIGLDVHPDSFTAAILCGPTPAAAIVEKTFAHVPLPRLVSWAAKQARAGDLLVLEASGNSFHIARQLRAAGYETRVLESNQLGKLKEAHANNDKLSAVRIGKAFLAGTAKEVWVPDAKTQERRDLFHAHRKAVKRAVQARNRTLSFLSDQGVRLKKGSKLTAAGDAEELLRQSKAWTTGQWRIIEGLLLELRQADQARAHWRGIIAQEVLSDPLLLSLVRLCGVREVVAFGLGAIIGDIHRFAEPRKLVKYLGLNPAFDQSGAGKWEGGIGGHGRKDLRVLLIEAAQALLRSKDPAARWGKRLMARKGSLNLAVAALARKLTVAVWYLMMGRWSQLEEVDRRLSIKVCKIVGQLKPEAIAQLGCDAKALREKTKELLQHGRVYVLNPIPNANSAGA

SEQ ID NO: 483744 - protein, 316 aa, unidentified
MKTFHSFVGIDISKLTLDACVLQAGEPNKITLSKKTGSLEDTLFVCENTGIYTTPFMTVMGSMGLHYWIVAAIEIKRSQGLNRGKNDKADARTIALYGLTHQHKYEPAKPIKTELQQLKLLFTQREKIQKAIALFAQTEENEGYLPKEVFAVVKKLNQQQIGHLQKALCKIDRQMLEIVKREDVLHKQHELLTSIPGIGKQTALYLIITTRSFTSFSTWRQLACYAGVAPFEHSSGTSVRTKVSDIADKKMKSLLQMCVLSAIKCDREIKHYYEKKKAEGKPTMLVMNNVRAKLLARAFAVIKRGTPFVNTQKFAA

SEQ ID NO: 483745 - protein, 344 aa, unidentified
MDHFAGLDVSVKETSVCIVDDTGKIVREVKVASEPKALLQVLGKPAYRFKRIGLEAGPLSQWLFSGLAEAGFPVICVETRHMRAVLKAQINKTDRNDARGMAQMMRAGIYRPVHVKTLRSQKLRMLLTHRKLLQSKAIAIDNDLRGTLRNFGLKVGMVGTVKFEARIRELVANLPDLAMLVDPMLIVRRALREQFVILHRCLLAIVRDDDVCRRLMTVPGVGPVVALTYRATVDVPARFRTSKTVGAAFGLTPSMHQSGESERTGAISKCGDEMMRVMLYEAAQIMLVRSTKWSWLKAWAMKIARRRGLKKAVVALARRLAVIMHRIWIDGTEFRWSRQEAATA

SEQ ID NO: 483746 - protein, 343 aa, unidentified
MGEVSTIGLDIAKSVFQIHGVDAAGAVVIRKRITRAKLLEFLASLPACLIGIEACPSAHYWSRRLQALGHTVRLMPPSYVKAYVKRSKNDANDAAAICEAVTRPSMRFVATKSEQQQSGLMLHRSRQLLVCQRTMLSNAIRGHMAELGIICAKGRNGTAELLKIIADEQDDRIPAAARFSLDVLARQYAVVRAEIVAIEKRIHAWHRSSEESRRLEGIPGVGPIVATALVAEVGDWKVFSSGRSLAAWIGLVPRQHSTGGKERLGGISKQGNRHLRWLLVAGAMAVIRYARQHGTKRPWLARLMDRRPIKVAAVALANKIARMAWAMMVRGERFKEPKLLPAA

SEQ ID NO: 483747 - protein, 360 aa, unidentified
MDKIHDTSLSFKDQDFFIGIDVHKRQWTLSIVSMNMLLKKYLSIDPSPSVLLKYMQKHYPDGNYYAAYESGFSGFWAVRELNNSGIKCMVVHPSDIPSSQKERLNKNDRVDSRKLSRSLSNGDLIPIYIPEKLAEEYRYLNRHRFKTIKDQTRLKNRIKSALHLFGVTIPLQYQERRWSGVFIDWLLTIKFDTEYAQFAYDDLIDQFIQIRTRITQQLRKMRVMAKGQEPFNIIIPLLISVPGIGFITAMTLVTEIIDMNRFKTLEKLASYVGLVPSMQSSDETEINYGISPRRNKYLRTLLIEAAWKAVKKDPALTMKFNQLSRRMNRNKAIVRIAKILLSRIRYVWNNQKPYVLSVVS

SEQ ID NO: 483748 - protein, 440 aa, unidentified
MSKRAYRATRVNDVNWDQLAQEKDGLDITLGVDVGKYSLWAVCRWADGRFERPWRVQNPGEIPTLLTLLKRVSAGRKLVVAMESSGTYGDALRQALADNQLEVRRVGGKAAHDYAEVFDGVPSQHDGKDAAVVAELAALGKAMPWEYQPADPWEQELAYWVEWMVAHRQMLTIWQGRLEGLLARHWPEATQVLKLSSGTLLRVLKRYGTPQALAADGEAAKLLARWGGAFLAPEKIEQLLAGAGASVGVRLGEWQQRQIQNYAQQALAARQEANRAQRRLRSLAAGHAVLQAQGKVVGVPTACVLWVSTGDPRKYHAAGAYRKAMGLNLVERSSGTYQGRLRISKRGSPRTRQWLYFAVLRLVQKCGVRPWYEAKKAHDEADARRALVAVMRKLAVALYYVGVHNEEFQPRRLFGRIRRHRGSPGEQKSRTKRRSRAEQL

SEQ ID NO: 483749 - protein, 347 aa, unidentified
MKHYAGIDVSLNSSSVCVVDESGKIVRETKVASEPVALINWFKSLGLRMERIGLEAGPLSQWLYGALRESGLAIELLETRHVKAALSAMPVKTDRNDARGLAQLMRLGWFRPVHCKSMAAQEVRALLTARKLVQSKLYDIEMSLRGILRGFGLKVGPTTSRSFAARINHLVVGHASLELVAEALLSVHAAALSAFKSLEKQVRQISRADERVRLLMSTPGVGALVALTYVSAIDDPKRFTSSKSVGAHFGLTPKKYQSGETDITGRISKIGDGTVRTALYEAAHIILTRPIKGGALKSWAMRLAKRAGMKKAKVALARKLAIVLHRMWLNATAFNFDQPSRCSHAVA

SEQ ID NO: 483750 - protein, 417 aa, unidentified
MTDDARWFVGVDWASQVHQACLIDAGGKIISEQAFAHGGAGLAELCTWLLAKTAAAPTAIAVAIEVPHGPIVETMLERGFQVYAINPKQLDRFRDRFTVAGAKDDRRDAHVLSDSLRTDQHCFRRLAAENAVVIELREWSRMAEELQQERNRLANRVREQLWRYYPQALAIGDDLAADWFLELWAAAPMPAKAARLRASAVERVLKAHRIRRITAPEVLRILRQPALAVAPGTAEAATAHIRALAERLKLVNRQIREAHRRLDGLCAKLAGDDRENSPGPATEQRDVTILRSLPGVGRIVLATLLAEAAEPVRRRDYHALRSLSGVAPVTKRSGRRCVVIMRRACHRRLRTAVYHWARVAIQHDELSRRRYASLRQRGHSHGRALRSVADRLLAVACVMLTRQALFDPEHVGNRAAA

SEQ ID NO: 483751 - protein, 291 aa, unidentified
MMDAVLGIDIGKAKFHVTLRFGDGTRRRKACANSPAGCAELLTWMARHGAGRVHACLEATGAYGELLATTLVDAGHQVSLLNPAIIHHYAKSRLSRAKTDPVDADVIADYAAKEHPPTWTPLPREVRDLQALVRRLDALLGMQTDERNRAQAGALTPAVQHSIEAVLGHLEAQIGEATAALLLAELFTKAFTSARQAAAFAGVVPRPHDSGIHTGRRVMCKLGPGRLRKGLYFPAIAAIRFNPSLQPLARRLRSAGKPPMLIIGAAMRKLIHLAFGVLKSGRAYDPDLAKA

SEQ ID NO: 483752 - protein, 366 aa, unidentified
MFSVSQLRGPIHLGMDVAKDAIAVGILGWGEQIPVVDRIFHDEASIRRLIARFEDPAVLRACYEAGPTGYGLHRLLVSLGVRCDVVAPALIPRRAGDRVKTDRRDAQRLAQLHRAGELTAIRVPSPGEEAVRDLCRARADLVADRRRMRQRLKAFLLRHDRVYRAGQSWTQQHQRWLAGQDFDDVALRLTYAHYRSVLAARDGELAAIEADLMPCCEQEPLAATVHRLAAYRGIGDLSALVLAAEIVDWRRFPTAPLFMGFTGLVPSEYSTGETTRRGHVTKAGNRSVRTTLVEAAHAYRHRPALGVTLKARQLRVEPATTARSWTAQQRLCGRYRRMSAHHKPTGIIVTAIARELAGFCWAEMTS

SEQ ID NO: 483753 - protein, 373 aa, unidentified
MEQDTTYVAFDTSKETLAVAIAESGRRKEVRFFGTIASRQEAVRKLIENLAKRHQRLAFCYEAGPTGYGLYRQIRAMGYECQVVAPSMVPVRPGGHIKTDRRDATTLAALFRAGELTAIWVPDASHEAMRDLSRARQAAIEGLRRARQQLLSFLLRHGRIYPTRSHWTRGHRRWLAEQRFEHAAQQIAFEELIQAVEQAQSRRGRLEQQMTALLPSWSLRGVVTALQALRGVALLSAITLMAEIGDFRRFANPRELMAWLGLVPREHSSGATTARGAITKAGNGRARRVLVEGAWTYRLPARISPELLRRNRALPEAIRAMAWKAQVRLCARYRRLLRAGKPANVVTVAIARELAAFVWAIAITVMPPLEPTT

SEQ ID NO: 483754 - protein, 369 aa, unidentified
MGHRTWKLGNVKSVSVSEGDVMTVGLDVHKASAHAALRRNGQEVATWVMPMDNKTIVASLKRFAPALKKVVYEAGPTGYGLGRALKKAGLPVEVIAPGKVPQEPNPDSKSDRLDCRKLAEYAEQGALKKAVIAIPTEQEEADRQLARLRDQQERAAYCARLVGKQRRVKQQIKSLLLQQGLPEPAGLTHWSAEGLAALKRMRLRHQLQLSLEVMIEELEHLVASRKRVERHEAWLMKQRRHRKSVQRLQTHPGVGVVTATAFRLEVYQPERFATPEQLAKYVGLAPRVHQSGPKRRGGPLIKAGRGSLRSLLIEASWRWIRDDAAAAKTYRRLVRNTGSGQKAIVAMARRMAVHLWCMICRGEAYRRAA

SEQ ID NO: 483755 - protein, 400 aa, unidentified
MLLFFEVITMIFDGIDVAKDTHYAAVSDDSGAVLVKPFAFQNNAEGFCLLLKKLSEFDRSKLLIGLESTGIYSENLICFLYESDFRLAVINPIQTATLRKTAIRKTKTDKVDTMLIIKSLMVNSYRLYSQRDADSLKLRTLCRFRQNLKKSKARLKIQLAGYVNLVFPEFGKFFKSGIHIAASYALLKKYSSPKEIAALRTSTLCTLLSKASHGRFGKDTAEALKSLALSSVGVKNPYISIQIAQTIAQIELLEQQIKDLNSAIEEAMESLNSVLMTVPGIGAVNAACILGEIGDIKRFSKPCKLLAYAGLDPTVRQSGQFTAKSTRMSKRGSALLRYALINSAWQLTLNDTTFKAYYDLKRSQGLNHYGALGHVAHKLTRVIFKLLTSDTPFNPAILVA

SEQ ID NO: 483756 - protein, 410 aa, unidentified
MSTLNGSVTRFIGLDVHKRFVMVGAVDAHQQVVLRPRRLSWDAFALWRQQHLRPTDAVVLEATTNAWHLYDQLVPCVATVVVANPLLIRWISSAAIKTDGHDTLKLARLLAAGLIPAVWVPPEPVRQLRALVSHRHRLIRQRTQVRNRLHSVLHRHNLRPPEGELFAAAHRAWWEQLALEPLEKLRVTQDLQLLDSVEALLAQVDQQLYLESGREPWVQHVPYLVQHTGIGVLTAMVLLAAIGDITRFPHAHQLVGYAGLGARVHDSADTHRGGGITKQGRRDLRAALIEAAWVAVRYNPYWKARFEALCRRLCKEKAIVAIARQLLVVVWHVWHDRERNRHIDAEALARKLMTWAEQGGRAMRQGLTAPQFVRLQLDYLGVGQDLTELRYGSHVYTLPPPGSVKIAEAR

SEQ ID NO: 483757 - protein, 418 aa, unidentified
MQMELSQFTAIIGIDWADKKHDVCLQVTETGQRQVSQIAHKTDKIDEWARSLQQRFGGPIAVALELSKGPIVSALQKYDFFVIFPIDPTTLAGYRKAFRPSGAKDDPTDAELALDLLLCHSDHFQTLTPQSVEMRTLMTLVEQRRRLMNDRVRITNRLRNTLKQYYPQALEWFDRIDTQLFCDFIKRWSSLAQAKRARRSTLEKFFREHNMNRKALLERRMTAIKSALPLTEDEAIILPYRLQATTLVAQLEVALTSIRTYDDEIAALAPQHPDYSLFDRLPGAGSSLAPRLLVAFGEQRERYSKAAELQKYAGIAPVTERSGQSTWIHWRWQCPTFLRQTFVEWAAQTINKSYWAGLYYYQQRAKGCSHQAAVRALAFKWIRILYRCWITRTPYDEAKYLKALQERGSPLLKMAEAA

SEQ ID NO: 483758 - protein, 345 aa, unidentified
MMVTLGTDAHKRNHTVVAVDAAGAEIGSVTVAATPEGHLRLVKWVAQYEQRRWAIEDCRALSRRLESDLLAAGEQVTRVPPKMMAGTRRSARTRGKSDPIDALAVARAALREPDLPVAQLDGPSREVRLLVDYRESLVKDRTAAQNRLRWRLHELEPGYDPPSGSLNRYKTLDHIDQLLAAHSSMVAVLAHREVTRIRELTREANQLERDITQRVTDLVPSLLKIPGCGALSAAKLIGEAADIARFKSRDAYAMWAGVAPIPVWSANQERFRLNRGGNRQTNAALHRIAITQLRIHPDAQAFIKRRLETGSTKREALRLLKRKLANVVYRTLLADTQQPALANAA

SEQ ID NO: 483759 - protein, 406 aa, unidentified
MQGPVITVDVSKGSCHYQPYVSNGHPMRKPKVLHDTVEGFQSLSDLIDTMKDRYECETIPVIFEATGVYHRCLQKYLDDHQIPYYIISPLMSASYRKTTPNSNKTDDLDCSHIAKAYYGECNLFPYDKPSKSFHNLRGLNRYYECELNHLRMRKNTFRKYLDIVYPRLDKCFKGHSSLYDEIPMEVIKQYPHPSLLLKHKEETIVKKIEKKTSHNASFIQNIVHEMYECSMHCYSGADVTDVESMILPELVDDLQSQEERCDEILKQLVSEAQKTPYFTSIVSIVGIGDNLAARIIAELGDMNRFSCRRAITAYAGLNPKIRQSGDMDGIHLAISKKGNKHLRCLMYLAVSCNYRLKKGDVLYEFNQKKRQQSFSPLKPKAATIATAHKLLLIIYALCTNGTVYHS

SEQ ID NO: 483760 - protein, 457 aa, unidentified
MTQRKRKPRKSKINVNNLPKHLRHINLNAAGIDVGSDRHLVAVPEGSDEVSVLRFGTFTSDLHEIADWLQKCGVTTVAMESTGVYWIPLFEVLEERGFEVKLVDARHVKNVSGRKSDVLDCQWLQQLHTYGLLQGAFRPPDEICVLRSYARQKEMLTQASSMHIQHMQKALQQMNLLLHNVVSDITGVTGMKIIKAILAGERDPNVLALNRQEECRNTKETIAKSLVGNFRADHMFALKQAVELYETYQAKIAECEQALIKHLGTQPDVTDDPPPDSGKRVRARERMRAGVDVREKLFKMTEVDLFAIPGLAADTLLTLASEVGFDMSPWKSVKHFTSWLGLCPGTKFSGGKALDRRTKRIANRATQAFRMAASSLARSQTALGAFYRRIRSRTDGRRAITATAHKIARIYYSMLTKGTGYVEAGQQAYEQMYKERRIKALKKQAASLGLQLLPCVS

SEQ ID NO: 483761 - protein, 428 aa, unidentified
MKWLEAKRQIYDGELRTMNNVAGVDVSKGKSMVSVLRPFGEVVAKPFPVGHTGSELKELANYLKSLAGETRVVMEHTGRYYEPVARFLHEEGIFISAVNPKLIKDYGNNTLRKVKTDKADAQKIARYGLDNWAELRQHTLMDTIRMQLKTLNRQQGLYSKTKTMMKNNLIALLDQIYPDVNDLFDSPVREDGSQKWVDFAATFWHVDCVRTMSLTAFTERYRKWCKQHGYNFSQNRAVEIHAGAKDLIAMLPKAPLTKTMVRQAIDALNAVSKSLERLKLEMRTLAAQLPEHPIVMAMHGVGDSLGPQLMAELGDVTRFTHRNAITAFAGVDPGADQSGTHEAKSTRISKSGPPELRRALFLVMDCLLKTMPQDDPVYQFMDKKRAEGKPYLVYMTAGANKFLRIYYGRVKEYLASLPPEENPGSILP

SEQ ID NO: 483762 - protein, 394 aa, unidentified
MLYLAIDQHRKQLTVEDRNQHGDPTVRRQVSTAWDRVRAFFDEYRGRADAEGGFVAILEVCGFNHWLVQMLRECGCREVILVQPERRSKRKTDRRDAAALAELLWVNRDRLLSGQGVQGVRRVEWPTQQDADDRQLTVLRHRLGRQRTQTINRIKHLLRKHNIEQDCPTKGLDTIKGRRWLAAVPLEAVDRAEMDLLLAQWKLWDEQMEALDGEIRTRQADHKTAVLLASTPGCGAYSSLALASRIGSIERFPGPRSLANYWGLTPGCRNSGDVTDRLGSITKQGSAMARFILGQLVLHVLRGDAWMKAWYGRIKKRRGAKIARVAVMRRLATILWHMVKHNEPYQKGGPAHVQRMRQTLDALAPSRAPARARPKRAASSRRPHASVAAGCAAE

SEQ ID NO: 483763 - protein, 328 aa, unidentified
MFEHYIGVDLHQAFLQACAVTPTGVRVWEDRFPRTDVGIAAFVARCSPLTAIAVEASTPTWHFADAVCDAVGDLRIVDPAKTKLKAGYAAKTDRLDARRLADALRRDSVVGIYYPPLAIRELRELCRFRHALVQARTALINRLRAVLLRQGLVDRRRLARTTQDDWLATLTLPPRAEQSVVGLRRLLATVRAEVAVVDRDVHAAAAADPIAMTLQQTPGIGPVLALMIRAEVADIRRFPTPGHVASYAGLVPSVDNSARRIRYGRITRRGSPWLRWALVEAAIHGTRRSDRVGRWGRGLAVRKGALKARVALARRLCEEVFRSWSAIV

SEQ ID NO: 483764 - protein, 342 aa, unidentified
MQITTIGLDIAKNVFQVHGIDANEKVVMRKQLRRSQVIAFFKALPPCLIGMEACATAHHWARELTKLGHEVRLMPAKDVKAYLKRNKNDAADAAAICEAVRRPTMRFVRIKSAEQQGQLMQHRTRDVLIRQRTQIINALRAHLAELGIVAAQGDAGVNELRAIVADEQDTRLPIDARASVIVLAAQLEALQTMIGSIEKRIKMQHRSNETSQRVETIPGIGVLGATAIVATAADPTIFRSGRDFAAWIGLVPRQDSTGGKQKLGPISKQGDRYLRRILIVGAIAVLRRAQENPGKYPWLTQLLARRPFKVVAVALANKMARTAWALMVHGGTYRAPELVEAA

SEQ ID NO: 483765 - protein, 343 aa, unidentified
MDTHGDTHHAAVVDEVGRHLADHEFPTTPAGYRRLLAWLRSFGRLDRVGVEGTGAYGAALARMLAQAGVTVVEVDRPDRKVRRSKGKSDPVDAYAAAWAALSGRAAGTPKSRTGRIEAIRTLRVTRRGAVKARTQEINQLRALLLTGPAELREQLRGLATAALVGACARLRPTVDLADPRQALKAALRRLARRHQQLSAEIAELDADLAALVTAAAPDLLDLPGVGVETAGQLLTTAGDNPERLRSEAAFAHLCGAAPIPASSGRTDRHRLNRGGDRWANCALHTIALSRLRWHEPTRAYAARRRHQGLSTKEIMRCLKRLIARQVHYIIRRLPSINQALMTT

SEQ ID NO: 483766 - protein, 340 aa, unidentified
MSKVTVFVGLDYHKDSIQVCIMDHAGKVLSNRKCPNRLMALVELVAAFGNEVFAAVEASNGAANLTDELLTRHGWSINLAHPGYVARMKQTPDKSDWTDARVIADLVRVGYLPKVWLAPEDVRQLRTLVRFRQQLVDQRRTIKLRISALLRDARLVEPKSRWGKAWMSWLKSVEGLGTEGRFVVDRHLIRNEQLRREITEVETRMAAVTAGDPVVEQLTNLKGLGTVTACALRAEIGRFDRFNTGKQLARYCGLSPRNASSGQRQADAGLIKAGNVQLRATIIETAHRLMRFDPQWAQLAGRLRKAGKPTNVIVAAVGNRWIRWLYHQVEGGTIRLAKVG

SEQ ID NO: 483767 - protein, 440 aa, unidentified
MSVDVVADCEFAAFVGIDWAEQRHVLALQDVQSGRIAIDEVEHTPEAVDAWAMELSQRYQERPIAVALEQVRGSLVFMLTKYRHLVIFPIHPATLANYRKSFRPSGAKDDPHDAGLLLDLLTRHREKLRRINPDIAETRTLRFLVEERRKLVNERIRFSQRLNSHLKLYFPQVLNWFCDMSSQIAEHFLERWPTLEAVQKVKAKTLERFFADHNSRRPERIQTRLEEIRCAVTATHDSAVITASSSAALALVKILRELRNAISSYDSQIEKLAQAHPDFIIFDSFPGAGAALAPRLIAAFGTCRDRYRTAYEIQCYSGIAPVVESSGKQHWVHYRWSCPKFLRQTFHEWALHSMASSTWAKDYYKQQRTNRKSHHSAVRALAFKWIRILFRCWQDRKPYNAALYESARQRRSSESQACASPVNIEWKTRSGFSKLSRAGS

SEQ ID NO: 483768 - protein, 347 aa, unidentified
MQQFIGCDAHKRFSVFVAVDERGSATKPVRIEHVREDYARFLSQLPEGSEIAVESTGHWYWLVDEMERTGHHVHLANPMEAKKRMGRTNKTDALDAKGLARNGTLPESWIPPSTLRDQRELLRTRMALRDLRASLKHRIHAAVDRYGLHTDSISDLFGSKGREYLASRLPEFPPETARMIEVQLSALDQLAAHIDSVEERIRTEIALSVEVQLLRTIPGVGEILAPVIALEIGDVHRFPRAANLASYAGLVPRVFSSGGHTRLGGISRFVNQYLKWAFVEAANCAVRLKAHRHSHVGCLYQRLLVKRGHGRKVVAVARHLAEASYWILRKKEAYRAPQQNRISSRNG

SEQ ID NO: 483769 - protein, 357 aa, unidentified
MSYKVAGIDIHKKVLMVVVASAGEEVPDVAGEALEFECRRFGAGAGERKHLVSWLQERNVSEVVMESTAQYWKPVWLDLEPHFGKLHLAQAHSNRAPKGRKNDFPDAKRLTRRLLAGELMLSFVPDAVQRTWRTVTRGKLQLVRDRVRLQNQLEALLEEARIKLSSVISDLLGMSGRRILQAMADGETDPDRLAELGDDRLRCTKAQLTDALHGSLEPIQRQLLKLHLKRLALLDEQIGKLDQMIADALKQHQDAVVRLAEVPGFGVDSAQQLIAEIGVDAEAFPSAGEFASWAGVCPGSDVSAEENHSSRSPKGNPFVRRILDQAAHAAPSKRRVATSNRFSASSCRASNTAARYG

SEQ ID NO: 483770 - protein, 459 aa, unidentified
MKEKAVSALRERGLRPVMRVAEPPVVGLAPQTTNERRANTMKKYILRDPQTVEPQESVRQPRPQTTVPTLIQGPILFIGLDVHNDSIAVSLAPSDATEVRRYGIIGGEHDDVLKLAKKLQAAHPGATLKFCYEAGPHGFALCRCLRAHGLDCIMVCPSKVPRKPGKRVKTDRRDADQLARLYRAGELTGIYVPQPEDEAMRDLIRARFQVGKGQHRARQQLKMYLLRHNLRYTGQTSWSAAHLRYLAQIKMPFPVQQIVFQEMLNVITEATERLERYDQEIERAVPGWRWEPVVRAWMSLRGMALLHAATLVAELGDFRRFEHPSQLMGYLGLVPSEHTTGNDRQQGGITKMGNGPARRALVEAAWQYVAPARISPPLRKRQEGLPKAVTDIAWKAQGRLHHRYQYLTRVGKKSPRPPSPPWPANSRALSGPSAVWSSPGRPSREPVSTVWMNRKTKNA

SEQ ID NO: 483771 - protein, 339 aa, unidentified
MVIVGCDFHPGWQQVAVFDSGTGEIRELQLRNSEGEAERFYGSLPSPALVGFEACGNTHWFEDMLDRLGHEVWIGDAAEIRASYVRKQKTDKRDAAHILKLLMEGRFPRLWRPSKADRDLRQLLIHRDRLVGVRTRVKNGLHHLMLNKGVQLKRKLWSKTGQKILHELPLEGWAAQRRTDLLQLLSTLDPQIEELDVAVERAAYANERARLLMTQPGVGPITSLAFVITMGDVTRFPSGKQVSSYLGLIPSEHSSSKRRRLGAISKQGSPFLRMLLVESVQTVCRLDEGFRKQYNHRCHRMKKGIAKLAAARKLAVRLYWMLRTNTAYPEIAHIEGSPR

SEQ ID NO: 483772 - protein, 335 aa, unidentified
MQINYFLAVDIGKSELFVLLRTREKILWEGKVENHYSKLKTMFKTLIKEYGVDPKECLVSMEYTGMYNFHLLLFLNNYHIPAWVIGGQHIKLSLGMQRGKSDPIDASRIAEYTIRFLDRLELWIPPRIIITKLKVLLKTRDRLIQGKIRLEIPINEMKAFATASEYRAVKAICQKPIDEMQKAIIAIEKEIKALLESDEKIKNMYNKVTSIQGVGFVTGATFIAETNEFKDFADGKKLACHSGVAPFSYSSGKRIGKAHVSKKANLKLKTLLDLGARSAINCKAGEFKDYYFRKLAEGKPPLVIRNAIRNKIILRMVALIRNNTTYEKNYNLKVA

SEQ ID NO: 483773 - protein, 359 aa, unidentified
MTAMSIVAHSHAFVVGVDTHARNHVYAIITATTGELVDTRDFPTTGAGINRATAWVARRTGADLAVLWVIEGAASYGAILAGTVVTKGYSVVEAARMDAESHHGVGKSDVLDAQRIARAVLPMQEKQLRRPRLNEGVRAALRVLVSARHSMTGERTRAVNGLTALVRVNELGLDARKALTGAQIAEVSRWREQDEELALSVARTEAVRLAKRIGDLDKDVAGNTQQITDLVKVSEAAPLLDVKGFGAITAATCLTVWSHQGRVHSEAAYASLAGVNPIPASSGNTVRHRLNRGGDRSLNSALHMVAITRMTHDEETREYVQKREAEGLSTKEIRRCIKRYLARRVYRIFNSQAEALIAG

SEQ ID NO: 483774 - protein, 344 aa, unidentified
MNNTIVGVDLAKEVIQVCIYTNKRVRSNKEMTTSEFLTFLVNLKSSIVVFEACSTSNYWKQKSCSLGHDGRLICPKLVNSVRQNQKTDKNDALAVVQASLLPDVNFISGKNIEQQQLQSIMRFRELAIKQKTALSNQLKGLLLELNIRVSSRKGGLKGVIQSTLEDGENELSFEFRSALKMSWTQYSGLLKSIAHYEEILAKISTKHSECKKLLKLEGVSTINAVNLYIALGCQPEIFNKGKDASACIGLTPIQYSSGGKVKLGSIGKYVKNSILRSNLVVGAMAAINRIITREAITKKEAWIQALVERRGKRCAAVALANKTVRTAFAMLTQGTEYKAELISA

SEQ ID NO: 483775 - protein, 409 aa, unidentified
MTYRVAGIDVHKKVLMVVVCAVGEVERAPERKRFGTTTSELRRLAGWLCERGVEEAVMESTAQYGKPVWYELEPHLRLQLAQAFSNRAPRGRKRDFKDAERLVRRLVADELQLSFVPQPEQRAWRTLTRMRVQLSQEGSRLHNQVECLLEEMRIKLSSLLSDLLGVSGRRILRALAEGESDPQRLASLADPHLRCTPEQLIEALSGAPQPLHRQLLGLYLQRYQLLQEQMERLKQMTATAMQAHAEAVQRLAEVPGFGVDSAQQVIAEVGFEAGAFASAAQLASWVGTCPGKQESAEQNRSSRCAKGNRYLRRILNQAAHAAVKKNGSHLQSVFRRLLPRLGYKSAIWAIAHRLCRLLWKILHERVRFREQGDEPSPRAKRQRAQRLLRSLRRLGYQVTLNPSPAEALP

SEQ ID NO: 483776 - protein, 354 aa, unidentified
MHATTVAIDLAKDVFELAFADAQHRIVQRARLSRRAFGHALENRGPLRVVMEACGSAHYWARRFAAQGHTLRLLPARDVRPYVRRNKTDRTDAAGLLEADRCAQIEPVPIKSPEQQGILALHRIRERLKAQRTATINLVRGVLREFGIVIPVGAAKVRPAVLAALEDGGNDVPMALRHTLGELLDRLMDLTRGMAAIEQRLSQFARHDPVSACYQQVPGIGLLTATALRASVGSLDRFRNGRYFAAWLGLTPREHSSGNQRRLGRISKRGDGYLRLLLIHGARASLRAAHLRAQRGQPLNRLQTWALNLLHRLGHNKAAVALANKTARRLWAMRHHGMPFDADHVSARPANSTN

SEQ ID NO: 483777 - protein, 379 aa, unidentified
MEAKKEDPRSLRHRCARVEMLRNHSQNRGSDMQVTTYGVDLAKQVFQVHWVEPDSGEVKRKVLTRGQFREFFARRSVGLVAMEACGSAHHWGRALSGMGHRVRLISAQFVRPFVKSNKTDAADAQAIWEAAQRPDMRFVALKSEAQQAVLGLHRVRAQLVRMRTMQANQVRGLLYEFGIVVPKSWRALLKQAGPILAESSCHDVPELIRGELQQQLQGLRELTQRIEQLERSIGSYRAQDEQCRRIEAIPGVGPLSSTAVLASVGDVRTFRSGREFAAFLGLVPRQSGTGGRIKLLGISKRGDPYLRTLLIHGARTVLKHASRPGRTLPLWLQGLLSRRPKNVAIVALANKIARTIWALLAHDRIFDPRWGQTMSVPVV

SEQ ID NO: 483778 - protein, 427 aa, unidentified
MLNNDYNKQYERRQRIKKTTLVTGIDIGADFNAVGFMNKDGNVLGRLPKVYNSREGFDKFVRTTEELKAKHGLKDVLIGLEPTGHYWRKIAYFAKDQGYAVRFIRTTSLKHERELNESSSAKSDTKDALTLTNLTREGKYIDTVIEDGVSRQLRTLSKVREKILRQNTGAKNMLHAVLDDYFPELKQLFYAMNTKGLWAVLENCPFPEDVLKCDKTAIADIITKASRSKTDGARKAAALYLAAETSIGLKRVGDADRYRLTVCLNEVKRTERMLQEIKKEMKELLKHLPAAQSLVSIPGVGHLSAAIFLGELGNPAYFHHAKQIIKYAGYDPQESDSGKRIGRKVISKKGRWLLRKCLYLMSVRVVKHSRFFRKYYQRRLKIKNRFGQLLKKKEALCAIAIKLIKVIFALLRDKREFQDTVSFALAA

SEQ ID NO: 483779 - protein, 408 aa, unidentified
MNPLFVGIDVSSKNNVAYLMKPDGSKHSSFSVQTNLGGAKLLSERIVSALSSMRLSDVVIGLEATSIYGDSLVYALREDGRLGRFQRKIHVLNPKQVRKFKEAYSDLPKNDWVDAFVIADHLRFGRINREVYMDDYRYKALQTLTRARFDVIQNLTREKQRFANYLFLKCSGMAQDKDIQNTSATTIALMEHFETVDDLANADLEELTAFITETGRGKFADPDATAKAVRAAAKGSYRLPKTVNDTVNQAMAVSIASMRALKGQVKVLDKAIEQQFEIIPNTLTSIPGIGKVYSAGIIAEIGDIHRFDSQASVAKYAGLVWNRSQSGDFEAEHSRMIKSGNRYLRYYLLEAANSVRRCDSEFRRYYDLKFKEVNKYQHKRALALTARKLVRLVFRLLKDNRLYIPPEG

SEQ ID NO: 483780 - protein, 343 aa, unidentified
MIGLDTAKSVFQIHAVNESGQMELRRKLRRSELIRFFEKQEACTVVMEACGAAHHWARMLTGLGHKVKLIAPEAVKPFVKKGKKNDAADAAAICAAASHPDVKFVPAKSLEQQGVLTLHAARSLLVKQQTMLANAIRGLATEFGLTVPKGIGKLGELMTLVDTDETVPETAREAVQGLFDQTHALAEGIEALETKIVDHARHNETARRLATIPGIGPITASLIVATVVDISLFKTARDFAAWLGLVPRQHSTGGKTRLGRITKTGNREIRKLLVLGATSMASRASQWNSAAGAWTRAAMERRPFRLVTVALANKMARIAWALMTRKEVYHAKGRVAAAADAVV

SEQ ID NO: 483781 - protein, 345 aa, unidentified
MFRPELYVGVDIGSETFTASIGKFEEKEGWRISAKPMTFGNNFDALNQFLSWLNENKAQTHNCIVCMEATGVYGEALAYFISTNGYKMVIEAPLKVKRAFDPKGHKSDPVDSRQIAEYAYRFFDELRPWKPKKEAIEQLKTLLAVREQLVEQRTEHKNANKAIKRKVVRTPLAENVHDKSIEELTKHIKAVEKEIKRLIDDDPSSRDLHNLIVSVPGVGSILATFFVLTFYSAPEPFNPKALAAYIGICPYKNTSGISRNKKSTSRRYGPSTMRRLLHLAAMSARTHCPKFQKYFLRKLAEGKPKQLILNNIKNKLVKIVCAIARTKSPYIAGHRSIHPQLIKAK

SEQ ID NO: 483782 - protein, 429 aa, unidentified
MICAAVERCAGIDVGKEFLAVCVMTGPLQGEARKQTRRFGTIIAELERLRDWLKQEEVTHVVMESTGSYWKPVFNVLEDTVKVYVANPQEVKVRKGHKTDDKDGWWLAHLLRHAMIHPSFIPPRAIRELRDLTRRRKKLLGAGTGEKNRVQKVLEDANVKLGNVLSDVFGVSGQLMLDALLKGDAKPAEMAQFAQRRAKRKIPQIIAALEGHRMSDHHRKMMGYSLEHMRFIEDQIGKLDEDIVAKIQEAGLEREWQLIQSAPGLQETSAANVLAEIGPDMSQFPSAKHISSWGGVCPGNNRSAGKNKSSHTTGGNPWLRAALTECAWAAAAKKGCFLKEKFWRITTKSGGKKAPAIVAVAHTLLGLVYEALRTGEPYQETKVADLNPGQRDRMIRHHVKRLGKLGVQVRSNPLKRQTKVVKTKNAKRT

SEQ ID NO: 483783 - protein, 338 aa, unidentified
MHYIGLDHHRKFTQVAVIDSDDAVVLEMRMPNTLEAVQDLLSRLEPSPLAVVEAGPSWGWIYDTFQKLGVNIVLANPLQVRLIAETRCKTDRRDALTLARLLRVGWIPKVHVGDPMTRLQKQLWRERIWLVRMQTRLKNRIRRLLDHYHVTLPELSDLFGTAGHTFLSALELPGPAQRILESQLRLLGTYKEAIRDVQAIAQASTAHRPEVSLLKSLPGFGDTFAPIAALEIGDVHRFQDAAHLAAYCGLVPSVSSSGGITHRGDTGPGGNHWLKWVFIEAAWSAIRTMPSLRLRFDRIKKRRGSKIAIVACARHLCEIAFSLLKHQRCFEERSLVYA

SEQ ID NO: 483784 - protein, 360 aa, unidentified
MIIVGIDPHKKSHTAVAVDAAMGTVRGELQVQADKAGHRRLLAWAEELDYERRFALEDCRHVSGQVERFLLAAGEEVVRVSPNLMGATRRGARTYGKSDPIDARAVAEAARREPDLPRACLAQTEDDLRLLVDHHDHLVGERTRIQNRLRWHLHDLGLEASIPPKALRNACRLDRLSRELASLSSVRVDIARQLLEHCRTLTLEIDDLEREIAHMATDVAPELLALPGCGALSAARLVGDTGGVSRFRNEAAFAMHVGAAPVPASSGNRTRYRLNRRGNRRLNATLHRIAVTQLRICESARAFIARKQQEGKSKREALRCLKRHLARRVFGLLQLVDRRLRRRVNDIHSQSTPIVVMALT

SEQ ID NO: 483785 - protein, 346 aa, unidentified
MEHYAGIDVSLELSSVCVVDGRGKIVKEAKVASEPEALVYFLKELGFAVDRVGFEAGPLSQWLHAGLTQAGFETVLLETRHVKAALSAMTVKTDRKDACGLAQLLRMGWFQQVHAKSIGSQEIRALLVARKQLLGRLLDVELSIRGILRGFGLKVGQVTRKTFEARIRELVTGHTTLERIAEAMLPARATLKAQYEKLHKAVLAIVREDVVCRRLMTVPGVGPLVAVTFKSAVDDPSRIAKSKAVGALFGLTQRKYQSGEKDVTGGITRTGDEMVRTALYEAANVLLSRITRFSKLKRWGMDVAKRRGSKRAKVALARKIGVILHRMWIDGTTYRWAEAKPIAAQG

SEQ ID NO: 483786 - protein, 340 aa, unidentified
MNKITKKTDFVGIDISKDYIDCALINEDRPGSFKEKQFGNHLSGFEAMEQWLLKSSSELKRCLFCMEHTGTYGLLLFSWLSQKDLDFCVEPGLRIKRSLGMTRGKNDKVDARRIADYALTHNTKLKLFSFPTEKLVQIKQLLTYREQLVRIRTSLKNSIKSHEQYEQITGKDIVTREIRGQIKEYNKRVHQVEKEIIESIESDQKLRKNFELATSVKGIGLVIASFMLVTSNNFSGFEDGRKYACYAGVAPFDHTSGTSIRGKTSVSHLANKTVKTMLSRGANSAVTWDPEIKAYYNRKRTEGKDHKVLINAISCKLINRVFAVIKRQTPFVLTYQQKIA

SEQ ID NO: 483787 - protein, 327 aa, unidentified
MNVSFEQNFVGIDVSKSTLDLAVRGQSRTVQFKNTSEGISGMLEHLKSIEHIAVVLMEATGGLEREAAGQLCLAGFAVMVVNPRQAHNFAKALGYLSKTDATDAQALAQFAHTLHNGDRREKLLFRLPSEQQQMLQALVTRRAQLIVMRVAENNRQAGAHSSQRKSIESVLKVLNLQIEKVDKDIGANLDKHFHEKLDLLKGIKGVADGTKAVLMASLPELGELNAAEISKLAGIAPLNCDSGKMRGKRTTWGGRADVRSALYMATLSAARFNPVIRVFYTRLRAAGKPPKVALVACMHKLLIIINAIIKSGKPWQADYGCPQAAAA

SEQ ID NO: 483788 - protein, 321 aa, unidentified
MTIISFDVSKNELVGARINKSGLLKESLVLENTRGAIAQFLEKTRQQYPKLLIASEATAEYHRILAEECIGRSIPFCLLNPILTKQFTRATIRKQKTDRSDALIIAKLALAGEGTILTKESLHPAKSIARVAYKLARLERILAAMRARVLRVFPEEIEMSAVIEQPRKAMENSVRALRNCLAKQVDTNLAALLTSIPGIGPTLASTFIAEIGSIHQFPSGKSLVAYAGLDPRVRQSGVSLRRNTKLTKRGSPYLRKAAYIAAYIAKRHDTELGAYHAKKMLEGKRYKEATVATARKILYRVYAVWKRGTPYQKHALSTTIS

SEQ ID NO: 483789 - protein, 343 aa, unidentified
MKLFIGLDVSLAKTAVCVINEYGKIAKEAQVPSDPQAIVDFANTLEGAVAIIGLEAGPLSQWLHRGLADAGLDVVLMETRQVKGALKAMPIKTDRRDAEGIARLLHMGWFRPVHCKSVSAQEVRALLAARKAIQQGMIALELSLRGLLRNFGLKVGAISRGQFEARIRELVDGNAMLQAAAGPMLRARASLRHELAGLERQVRLLAKDDAVCRLLMTMPGIGAVVALTFRSAVDDPARFSSSKKVGPWVGLTPSRNQSGERDVIGGITRAGDANLRRALCQAATVMIHRGRSTWLRSWAAQVAKRRGAKRAMVALARRIGTILHRMWRDGTEFSTVPLIVKSA

SEQ ID NO: 483790 - protein, 329 aa, unidentified
MERIAFYAGLDYHQGSVQVCVLDREGRVVANRKCPNAWRAIVASVPGGRVRAALEACSGAAELAEELGRAGWEVTLGHPGYVSRMKLNPDKTDHSDARLLAELVRGGFLPGVWLAPRAVRELRLLVRHREQLARQRRAVKLRVGALLREQRIAQPPWVGRWSRAWVGWLGQAPLSEEGRWVVQQHLAQLAWLQERMGAVEARLEALTKDDPVVARLRGLRGVGPVTAWWLRAEVGDFSRFGTGKQLSRFCGLSPRNASSGSRQADAGLIRAGNPGLRACLIQAAHSLIRFDPRWQKLAGRMLAGGKPRSLVTAAVANRWLRCLHHQMAA

SEQ ID NO: 483791 - protein, 387 aa, unidentified
MIKTRGRVIGLDVHPDSFAGAVVEGSDPAQARVLSSSTRVELEQLEQWALRHTSTEDRLVLEASGNAFAVATRLRTIGRKVEILDSHRAGKVGKVYCANDGVNAVKIARIYLSALSPIVWQPDAKTLERREIFSAYQAVVKESTRAKQQLRSMLNEHCVRLEKGFRLCHPNAIRRLVALREWTAARTMLLQQLHGTLVAARARRTLLRRHMAQEIVAEEALLRLTRLCGINLITLYGVVAAVGDVRRFSHSKKLVAYLGLNPSVSQSGNFEGSGALKRHGRGALRALLIQSAKKLLEVNNPLQKWGLAVAARRGRNKAAVAVARKLCVALWHVLMGHTIGVLERLDTLETKLSKFATEMGPAALRAFGYNNKAEFVEKKLYVLRSYP

SEQ ID NO: 483792 - protein, 318 aa, unidentified
MRIIGLDIHRAFAEAVAWKDGKLSRLGRVIMRREQLEEFAKQLSNSDIVVIEATGNAASVAAVIGPHVSRVVIANPKQVRLIAHAKIKTDKIDAGVLAQLYASGFLPEVWIADEATQALRRQVTRRNQIVRQRSRLKNIIQSILHAHLIPSCPHQDLCGPVGRAWLCEQILPGDERLAVERHLREFDRLTDDLKVIERDLAQSALADERVTRLMTIPGIDMVVSLALIAAIGDIERFAKPEQLVGYRGLNPSVRQSGPGPAYHGRITKQGRGHARGMLVEAGWAAARSPGPLRSFFLRVQSRLGNTSPPSRRHASSPS

SEQ ID NO: 483793 - protein, 318 aa, unidentified
MAEPLVFVGIDVAKAELVIAVRPAGTQWSVPQTEAGWAGLAPRLAALAPTLVLLEATGGLEIPVASTLAAAGLPVAVVNPRQVRDFAKAAGILAKTDAVDAAVLARFAEAVRPVPRPLPDAATRALDALVTRRRQLVEMLTAEQNRLGSAPPPLRPRLQAHIRWLRRELGAVTEALRHAVRAHPGWRVQDDLLQSAPGVGPVCAVTCLAGLPELGTLSRRAIAALVGVAPWSRESGGWRGPRRCWGGRAAIRPVLYMGTLAAIRHNPVIRAFYQRLRQAGKLKKVAIVACMRKLLTILNAMVKHQTPWAAARPVGDSC

SEQ ID NO: 483794 - protein, 316 aa, unidentified
MDGKRVIGVDIGKQWLDVAREGVAKVERHANEAAAMAVLVGTFDPARDVVVFERCGGYERALEAALATAGVPWAVAHSARVKAFRQVEGIKAKTDAIDARLLQAFGRERLNVGALRLGRAEDVVLDALIARQRQLKAALHAEQCRHETAAIAPVRASIERTIAQLEAELAVIAAQLASHEANAPQLAVKEAVMCERIGVAQATARSLLAALPELGRLDGKEIASLGGLAPRVHQSGRTQRRRGLAHGRAAVKVILFNPARSAMRWDPEIRAFCARLRARGKPGKVIMVAVMRKLLVRLNAAVRDALNRDIAARAAA

SEQ ID NO: 483795 - protein, 403 aa, unidentified
MNNVAGIDVSKGKSMVSVLRPFGEVVAKPFSIGHTGSELKELADYLKSLDGETRVVMEHTGRYYEPVARFLHEEGVFVSAVNPKLIKDYGNNTLRKVKTDKADARKIARYGLDNWAELRQHTPMDTIRMQLKTLNRQQSLYAKTKTMMKNNLIALLDQTYPGVNALFDSPVREDGSQKWVDFATAFWHVDCVRNMSLTAFAERYRKWCKRHGYNFSQSKAVEVHAGAQDLIAMLPRDALTKTMVRQAIDALNAVSASLERLKAEMQALAAQLPEYPVVMAMHGVGDSLGPQLMAELGDVTRFTHRNAITAFAGVDPGADQSGTHEAKSTRVSKSGAPELRRALFLVMDCLLKTQPQDDPVYRFMDKKRAEGKPYLVYMTAGANKFLRIYYGRVKEYLASLEEN

SEQ ID NO: 483796 - protein, 332 aa, unidentified
MKKKQIIIGIDVSKAILDVFIHSFNYHFIVENDPKGFVILLETICKICNCKKEDLFFCFENTGKYSRMLSVFLHTQEITFVMAPALEIKKSLGITRGKNDKVDARRIALYAFEKKERLVPTVLPGEKIDRIKMLLSLREKLIKHRTAYKNGITDLHDCYIEGETRMIKEIQQRLINNINTEIEAIEKEIFVIIEKDHSMHKNFKLILSVRGIGKIIAFYFIAYTANFTLFANARAFACYCGIAPFENSSGTIIGKPRVHHYANKQLKALLNLAAMSAIQMKGEYRQYYNKRINELGMNKMSTLNIIRNKLVFRVFAVVNRGTPYVDLYKFAA

SEQ ID NO: 483797 - protein, 315 aa, unidentified
MGTQLCIGIDVSKDKFDVASDPACLRASYDSDAAGIRALIKAVRALHPTLIVLESTGPYHQALTVALDAAGLPVVVLNPSWVRHFARADRLLAKTDGIDAAALARYAACMGPQVRPLPDSAQRELQALVRRRRDLVDAMAAEKKRRYGAVPAVRADIDHHLDYLRGRLAAVEHQIDQLIASDPRRSEDYALLNTAKGVGTVGAATLVALLPELGWLDHKQIAALAGVAPFNCDSGQHQGTRRCRGGRAQVRHALYMCAVSATQHNPQIKAFYHRLLDRNKPIKVALLACAHKLLTTLNAMLRDRTAWREQLAPAA

SEQ ID NO: 483798 - protein, 324 aa, unidentified
MIDGILGIDVCKNTLDVSISSYTKVRTKSFTNSPDGWRHLLDWLIAQKIQRVHACLESTGRYSLGIACALYEADHVVSIINPAQIRDFVRTKLGRNKTDGVDASHIREYCELFKPSPWAPPSEAHRRLGELQTIRSGIIAGLTEWKNRKNSGIVDAEAQALADATISHFTSQLGAVDKAIALTIDNDCDLQSKRDLLLSISGVGETLAGVVLAELPGPDVLRSSAEVAAYAGLNPRQHQSGTSIDRATRISKIGNAVLRAALYMPALSAMRYNSAIVALVSRLKSRGRLKPKQIVVAAMRKLLVLCFGVLKTGRPFDAAIAMGG

SEQ ID NO: 483799 - protein, 347 aa, unidentified
MNATTYAVDTAKNVMQLHWVDVGSGQIHRRKLSRAKFVEFFAVLKPARVAMEACGGAHQWARSLGAMGHQVELLPARQVRAFVRGNKDDAADARAIWLASQQSDIRRVAVKTAQQQAVLSAHRLRAHWVSVRTATINALRGLLYEFGVVLPKGKVLGLKVLAARRAQFDAQLPELMQRLVDQQLAALRQMEAEVARIETELGAVQKTDQCAKRLRQVPGIGLLGATALAAMLGDGSGWRNAREFSCSLGLTPRHSGTGGKVTMGGINKRGDPYVRTLLVSGARSLANAPSAPEWVRKLMLRRPANVAVVALANKLARTAWALVAHQREFKRDWVSKPPGQATAAAVA

SEQ ID NO: 483800 - protein, 466 aa, unidentified
MTHEVMDQVNYPQIILDDRATAIRRRPETQTPERTLTMKKSLRGRPVQPRGRAAVGIDIGKRKHAATALSPQGEVIARLASFSNTRQGVDQLEKDVLRKAGGPSKVLVGMESTGHYWMCLYHELTRRGYTCIVLNPLQTNARSKINIRKTRTDKIDSGTIARLILSGEAKATRVPDPKTTELRLLVRHQRRLMQASADMERYAHTLVDRIFPEYAGIFCKPFLSAARRVMREIGFAPDKLVANAARVREILSKVGNGRIAPKTIDQLLQKAKESIGTRQAEDVAEAQLRSILDYLDTLRRQIAEIGKQLDERIEQLDSPLSSLGLTSRLTGVIHAESDPIGDFASPEQYVAYTGLDPSLHDSGDSIHGRGKISKRGSPLLRHALYLAAYVVCRRHDYFRRIYRKHRNRGKTHRTALVIVARRLARVIWRLLTDGRPFTARPPKTTPPPTKARKSKLSTKKAACARV

SEQ ID NO: 483801 - protein, 368 aa, unidentified
MLKNSTFFVGLDLGDKHSYVAILNQDGELIEESRLPTTKASFQRKFSTLQPCRIAMEVGTHSRWASHLLRELSHDVLVANARKLRAIYHNPRKGDRADSETLARLARLDPALLSPIHHRSPQAQADLAVLRSRDAIVRSRTLLINHARDIVTLAPARSAGETSGSRFPSCSADSFARKAAPDIPESLRPALAPIIDAIASLTQQIQSYDKKNEELCSERYPETRLLRAISGVGPLTSLAFILTLENPDRFRASREVGPALGLVPRRDQSGDQDPQLRITKTGDAYLRRLLVGSAQYILGPFGPDCDLRRWGLKLAERGGKNAKKRAVVGVARKLAILLHHLWKTGEVYDPFYLAKKHDQAPEAVPVAA

SEQ ID NO: 483802 - protein, 404 aa, unidentified
MGGLFLFYCGIDIAKHNHEASIIDAEGKALLDSISFANTKAGCEKLLALLERLNITKADIVIGMEATGHYWLSAYEYLTERKFEVRVINPIQSEAFRKMYIRQTKNDSKDSFIIAQVMRFGQYSATTLSEENIVAMRQLSRYRLALVDSCGDCKRRVIALLDQVFPEYDKLFSDTFGSTSKELLLKYPTPDDMLSISTRKLTTLLTKASHGRFGESKAKEIRTVAADSFGVGFAKNAFSFQIRQLIEQLMFLENQIEELEEQISYLLHQTNEVITTIPGIGDILGAIILSEIGDIQRFDAPGKLVAFAGLDVKVSQSGEFTGTKQKISKRGSPYLRRAIWLAASRAAFCDPILSDYYQSLKARGKHHLTAVGAVARKLCNIIFTILRENRPYEQTPPKKGSKGI

SEQ ID NO: 483803 - protein, 323 aa, unidentified
MVVSDEEDRIVFNKRLPNDLAQNRAVLEPHRPDLAGVVVESTYNWYWLVDGLMDTGYQVHLAHPSAIKKYEGLKHSGDFADAAYLAHLLRLGLLAEGYIYPREERGARDLARKRMQLVRYRTAQILAIEGILMRQTGTRMKGEAVKRLTAEQVDGFAFAPDVSLAVEANRAVSQTLSQQIAALEKRLKQRVILRPEYHLLKTVPGIGDVLATTIMLEAGTINRFTQVGNFSSYCRCVDSLRESNGKRKGEGNTRNGNKYLAWAFVEAANFALRCCPQAKSFYDRKKSRSNRILALKALAHKLARACYHMLRDQKPFDVHLCFG

SEQ ID NO: 483804 - protein, 358 aa, unidentified
MKIKNNILSFAGQDIYVGIDVHKKSWMITILTEETEHKTFSMSPQSINLINYLRRYFPEGNYICAYEAGFSGYWLQQELTGNGIRCIIVNPADVPQRDKDKRNKTDKVDSRRIAKALRNGQLEGIYVPKIEDIENRGLVRTRNAMVKNQTRCKNRIKSLLNLYGVAITEDQVQSYWSGDYIRKLETTELLGPTAKASLMVLITELKGIKGILSQLQIQLRELSRSPRYRDKIELLKTVPGVGLLTALTLLTEIIDINRFKKYDQLVSYVGLMPMEHSSGETIIKTDITPRCNSMLRYVIIESSWTASRNDPALIMAYKGFIKKGISKNKAIIKIARKLLCRIAHVLKTGESYSLAVVQ

SEQ ID NO: 483805 - protein, 338 aa, unidentified
MHITTLGIDVAKNVFQLHGVDARGRAVLSRRVKRQQLLDTVANLPACVIGMEACGSAQHWGRAFEQLGHTVKLMHPKYVKPYVKTNKNDGRDAEAICEAVGRPTMRFVSIKTVEQADMQALHRTRSLFMKHRIAVINQIRGLLAEYGLVIAQSPEKVRPAVVRFLDDAASGLTAFARDTFSELSEQLTELDARIERVTHRITRVYRTHPVCQKLAAVPGIGPLTATALLATVGRPQAFRNGRHLAAWLGLVPRQYSSGGKERLGGISKRGSRYVRTLLIHGARAVVQRAARRTDTQGRWLCALTHRKGTNVAAVALANKNARVVWALLAHDEAYRPPA

SEQ ID NO: 483806 - protein, 352 aa, unidentified
MTVTNLARSITGGVDTHLDVHVAAALDERGALLGVESFATTESGYKKLLGWLSDFGPVELVGVEGTGSYGAGLTRHLQAERIRVVEVDRPNRQRRRRKGKSDPQDAISAARAALSGDACGEAKTRDGNVESMRVLRVARSSARKGRTQALNQMRNLVSTAPESIRAELRGLNVFHLLERASTYRPGSKRDIVSLTKFSLRMLARRAITLEEEISEIDAILKPLVKETAPALVGALGVGTDAASALLVTAGDNPERLRDEAAFAHLCGASPIEASSGKQERHRLNRSGDRQANSALWHIVITRMVYDPRTTEYIDRRTKEGLTKKEAVRCLKRYVAREVFSLLPHEKLGLDSP

SEQ ID NO: 483807 - protein, 313 aa, unidentified
MSKLVTKITLGIDVSKNELVICDWDTEALTTLSNQGNIIKSWLKSLYGPVRIAIEPTSSYHLKVLEQAHALGLEVYLISPRQLVHYREAVNVRNKTDPQDAWLLARYLAHESGSLRPAKPLCAKAQQLWSLLKRRAAVVKARTQLKQSFAETTLSTKSLFTELKRLLDRIDQRMRTLVRALGWWADYQRCLSIPGIGPLNATALVAAYHRGVFASSDAFVAFIGIDVRLRESGKYKGKRKLTKRGEAELRRLLYCATQPARSYSLFDDYYQRQLEKGLSKIAAKVILARKLARIAFTLLVNQQSFKKKELAYS

SEQ ID NO: 483808 - protein, 403 aa, unidentified
MEVCYERCCGIDVHKKVIVCCLRIGNKRETRSFGTSTEDIRNMAEWLLENRCEKTAMESTGSYWKPVYNVLEVLGVEAIIVNAAHMRNVPGRKTDVKDAEWIADLLQHGLLKASYIPDRAQRELREVARYRKSLVEERAREINRLEKTLQGANIKLSSVVSDITGRSSRNLLSALTGDGLNEKNIDELLCGSLKEKRSELLKVCDGYLTILQKKLVRAILDHIDDMTRRIADMDDIVKGEMKAYEEAMERLEEIPGIAKRSAQVILSEIGLDMTRFPTAAHLCAWAGLAPGNNESAGKRYSGKTRKGNATLKTTLIQSAKTAKNKKGSFFKAQFERIAVRRGKNRAVVAVAHSMLIAIYNMLKHNCPYNDLGDTYYLQFNTERKIGYYLKQLDKLGWQVPITA

SEQ ID NO: 483809 - protein, 343 aa, unidentified
MQTVTTIGLDIAKSVFQVHGIDAAGQVVIRRQLKRRYVLAFFQKLPPCLIGIEACASSHHWSRELQALGHTVRLMPPAYVKPYVKRQKNDATDAEAICEAVTRANMRFVVTKTPEQQSGLVLHRARHLFIRQQTAVINAIRAHLAEFGIIAPVGRHGVEELLNVVADPNDKRVPEIARACLLAFGAQLRRLKEQILEFDRMIRAWHRSSETSRRLDDCPGVGPVLATALVATVADPKSFRSGRNFSAWIGLVPKQHSSGGKNRLGSISKQGDRYLRGLFVAGALAVIRYAKIHGTKHRPWLTALLARRPTKVAAIALANKIARMAWAMMAKGERYKEPVALAA

SEQ ID NO: 483810 - protein, 472 aa, unidentified
MTEEKALCVGIDVSSRHLDLACCDGWGVPVGRTHSLPNSPAGIEALCDVVVASGQKLGSDLQIIAGLESTSDFHRPAAKALSAETRVSIQVHVLNPRKVKWFRHLELKDTKTDRVDAELIARFVAKIRPQPQAVVSEGCVQLQDATRTRRRCMEDRSRLKNRLHRLLRSYWPGWREAMSKHFGGRTLVALKACPSPHDARRRGAGRIAQLRNSDGKRLGRIFSDNFVAVAKVGPTPQLPIMVCISIQDAAARILQLNCLLKRLDAAIAEELAGVFPDNVLLSIPGLGPVSAASILAEIGDIRRFPNKEVFIGYCGLYPIAWESGNTKLRFGMTRKGNRMLKLSLLLASGPARQCNPFLRHFYTRLRERGKSAKAAGGAVARKLAEIVWVTLTRNEPWSEEIALRGIAKSERMTQTDQGERCLTRDAAGQTPVAQPIKAASRSSAPRPDSTKSPGASQAPNHRLLPSGRLVAP

SEQ ID NO: 483811 - protein, 384 aa, unidentified
MQKPNDLNQSRIVLKQDSTLIAVIEMSLSSWLVAGIVPGVERQPLKKLAVDESALLKLLNRWREEAEKAGRRIERIAVAFEAGRDGFWLARWLRARGIEAQVIHASSVAVSREHRRAKTDRLDTELLKRAFLGWLRGERDHCKMVAIPTTKDEDAKRPNRERQSLVGEQTRIVNRMKAALIRLGIRGFNPKLKKAAGRLENLRTPEGEPIPPNTLAELHRDMERRRLVSDQIRQIEEARLERMEQAPGDGPHAMVRLIARVIGVGIETADMLVHEVLSRKLRDRRAVARYAGLTGAPDESGSKRREKGLAKAGNARVRGGMIQLAWRFLLFQKDSALAHWYRTRTEGGRNRKTMIVALARKLLIALWRLVTTGEVPAGVVLRAA

SEQ ID NO: 483812 - protein, 367 aa, unidentified
MKKVSTAVTKQRRNVSQPKRTIGLDLGDRNSWYCVLDEGGQIRLEQRVRTNAKALREVFGEMPRSRIALETGTHSPWISRLLNDLGHEVIVANARKVRLIGESRKKDDRLDAQTLARLARIDSVLLCPVKHRSAQAQADLTVIRARAALVRARTGLVNSARSLAKSYGERLRGCNVRNMNPEKAESLSPELQVALEPLLHAIESLSERIVEYNDRIGALAEQRYPQVELLKQIKGVGTLIALTFLLTLEDPHRFRKSRDVGCYLGLQPGRRNSGQSEPQMHISKEGDPYLRTLLVQGAQHILGPFGVDCDLRRWGLKLAERGGKSGKKRAIVATARKLAVLLHHLWVSGEVYEPLHNSSRATVAAAA

SEQ ID NO: 483813 - protein, 355 aa, unidentified
MSILAERLDYVIGVDTHLHSHTAAVLTATGGLVASARIDAEEAGYVQLVQLVGRKAPGRRVWAVEGTRSYGAGLTGHLLRLGEVVGEVDRPRRPARKHGKSDEIDAVRAAREALSMGELASPRSSGRREALRIAATTRQEVMGERTRAMNQLRDLVVSSPEHIAARFRDRSGRSHSLERLTKRCLALRVTATHDVEDRSRLDTMERVANRIVQLEREAAHYESEMTELIRQLAPGLLELPGLGPATAAMVITAYSHRGRFRSEAAFASMAGVAPIPASSGQQQRHRLNRGGDRRLNQALDLIVKNRIRYDPETIAYMKRNKGGQRTDRDLRRILKRYLARSLFRFLERTPPLDKG

SEQ ID NO: 483814 - protein, 457 aa, unidentified
MRKKSKLTPRIEEAHPFTGMSKVNPNAAGVDIGAVEIVACVAGDESTQIVKAFGNYTVDLQALAGWLKGHNIRTVAMESTGVYWVPLFEELERQGFECLLISSRSLRRVSGRKSDITDAQWIQTLHSYGLLESSFRPQGELVALRTLLRHRSQIVEQRSPHIQHMQKALLQMNIQLSQAVTDVTGITGLTIIRAILAGERDPETLASLRELGCKKSAEEIGKALTGTWREEHLFILKQSMEMYDFYTWQSQACDEEIERVYGMTRPDWDGGEVKPLTRRKRNSHSKNAPQNPEGIRKHLKRISGVDLSVVDGFRVSLAQTVIMECGTDMSKFPSEKHFCSWLGLAPKHEISGGKVLKNKTLKTKNRAGQAFRMAAQSVKQADCVFDVLYRRLRARLGPAQATVATAHAIARVVYRMLKYQVEYETISVEEYEKNYKEQQLKYMKKKAAKLGFQLVPA

SEQ ID NO: 483815 - protein, 366 aa, unidentified
MGKISTMALDRIEIFKDQKLTIGLDLGDRFSHYCILNEAGEVIWESQLPTTPRGIEEVFRRIPRSRIALETGTHSPWVSRQLNQLGHEVIVAHARNVRLIGESSRKDDRLDARTLARLARIDPGLLSPVRHRSAKAQIHLTVIRARATLVSARTALVNAARGLTKSYGARLPKCGSEQMNREIAKGLSEELRDALDPLLGEIESLNERIAEYDRRIARVSKEVYPEVALLQQVKGVGPLIALTYVLTLDDPHRFRRSRDAGCFLGLRPGRRNSGRSEPQMHISKEGDRYLRTLLVQGAHYILGPFGQDSDLRRWGLKLAKRGGKNAKKRAVVAVARKLAVLLHKLWVSAEVYEPLRNNHKVMAAVA

SEQ ID NO: 483816 - protein, 402 aa, unidentified
MSMPLAVGFEPAERMTVRDESASMCLEHEEMDVRALPIGEQGGPVRFLGIDSHKHYLVVAVLEQGKVVERFRVELPHELDSFRLKLRPKDQLVVEATSNCFRLHDELAPHVDRFVVANPAQTRGAAAHAAKTDNRCAETLARLLAAGFTREVWVPPPHVRSLRHLVEQRRHLSVLRGSASQRVRAVMQQELLEPFKGSVFNDKNLGFLAGALARDPHMRKCFDSQVLTHDSLDREIVALDKHLAEWCKHSEEAQLLLTAPGIGPVVACTLIAQIGDIARFASPGHLCSYAGLVPRVELSGMSSRRGPITRAGRSTLRWAVSIAAMNAIRVPGPLRDFKLRLQERRPKGVAMTAAARKFLVIVWRILTYCEPYRDAPADRTRRKLHRCLSWGRRGKRRDRPKL

SEQ ID NO: 483817 - protein, 386 aa, unidentified
MKKNITTKKNAKKVQGKTQEKQIRQLAAKQRLTVGLDLGDRSTHYCILDESGEVVSEGAVPTTKTGLESMFGKMAASRVALEVGTHSPWISRYLAEFGHEVIVANAHKVKLITQSVRKNDRIDARQLARLARVDPQLLSPIRHRGEQVQVDLAMIRARAEMMEARTQLINSARGLVKPMGERLANCDADQVGLKLAEGLKEESRRVVEPLLKMVEAISTQIGEYDKQIAKIAERYPEEKLLQQVYGVGRLIALTYVLTLENAERFAHSRDVGPYLGLTRKQRDSGDSEPELGISKTGDGLLRSLLVQGAHCILRKGAPDSDLREWGLGKAKGGKRAKKRAVVAVARKLAVLLHHLWVTGEVYDPRYNRKLAEAAAAKAMGKAKAAA

SEQ ID NO: 483818 - protein, 318 aa, unidentified
MSSEIFVGLDVAKAQLDVAVRPSGEGWSVPNDEPGSAQLVARLRALRPTLVVAEATGGFERAAIAALATAGIPVVVANPRQVRDFARATGQLAKTDQLDAAVLALFAERVRPTPRPLPDAAAQLLDALLTRRRQLLEMLVAEKNRLGFAPRPLHTSLRQHIRWLERQLDDVTAELARQVEHSPLWRAKDDLLQSVPGIGPVVSVTLLGELPELGTLSRQQIAKLVGVAPLARDSGTLRGKRMVWGGRASVRTALYLAALSGRRWNPTLQTFYERLRAAGKPKKVALIACARKLLAILNTMVRNNTRWAVPAPSAQHSC

SEQ ID NO: 483819 - protein, 345 aa, unidentified
MKDIKVLGIDLAKNVFQLHGTDTSGKVVLRKRLSRTKLIEFMSNLAPCLVGIEACGSAHYWARTFNSMGHSAKMMAPQFVKPYIKSNKNDMRDAEGINEAVTRPTMRFVPIKTIEQQDILLLHRARELAVKQRTAQANQIRGLLAEYGVIIAKGLSHLQELPTLLEFSVKEQKISDKGKNIFLNLYDQLKAYEEQVNYYEKEIEQNAKEDSRCVEIQKIDGIGPISASAVVATIGDPNVFKNGREVAAWLGLVPKQHSSGNKVVLGSISKRGDRYVRKLLVHGGRAAVKTCENKTDKRNLWLADKKHRIGFNKAAVALANKNARTIWAILKTGECYRQPEQVQGV

SEQ ID NO: 483820 - protein, 353 aa, unidentified
MNNIKYVGMDVHKSITVIVVLNELGHFESRSQIKTKGENICDFFRGISGKVEVVFEEGTHSAWLYKLLKPLVASVTVCDPRHNKLIEDGNKSDDEDAETLAQLLRLGAVKAIYKGDDQHQQLKEICRAYDNLIEDSIRVQNRLKAIYRGRGISCSGHDLYRADQRSDWLAKLSEDAARFRAESLLEQLESLSQLRKQAKQRLLAQARAHADYRILIKLPGFGPVRVAQLIAVVGTPHRFRTKRQFWPYCGYAVVTRSSADYQIVEGKIVKQRKKVSTRGLNHNHNPQLKQVFKGAALTALRHEAIKTYYQRLIDHGTRPELARVSIARKLASIALTVWQRREEFDVKKAFAQD

SEQ ID NO: 483821 - protein, 346 aa, unidentified
MNATTYGMDIAKNVFQVHWVDGNTGEICRKKLPRGKVTEFFAVRPAGRIAMEACGGAHHWGRTLGPLGHQIELLPTHQVRPFISGNKDDAADARGIWLAAQHGDIRRVALKSSEQQAMLSLHRMRTHWVSVRTATVNALRGLLYEFGVTLPRGRHSGLRQLAQQRAEINDAVPAVMVRLVDDQLLALADIERHVQAMEEEISLMLKSQESARRLRDTPGIGVLGATALAATLGDGTSWRNGREFACCLGLAPGHRGTGGKVRIGSISKRGNAYLRTLLINGARALASREHPAPWIVALLGRRPFNVVVVAIAHKLARIAWALVAHGRAYEASWKASAPPAASAGAV

SEQ ID NO: 483822 - protein, 358 aa, unidentified
MKKIVIGIDISKEKIDASAIDVRNAQQGIQKLGYETFENRPMGFRRMLVWARHLIKGVALDEVLFCCETTGGYDRSLCDYIYAKDLDIWRESALQIKRSMGVRKGKDDKADSLMIAEYAMRHMDKAVIYETPSQTIRELKALLQYRHKLVQEKTEKKVRMSHLADTAAKSKSMSFILRDARKSIKALEKSVKQCERQILELIKGDEELSRSYRHIISVSGIGIVNATALIAYSNNFRGITTANRMASYYGIAAFRDTSGTSVDKKAYVKCYSNSLLKAYLTQAAEWTIRENGIYHDYCLRLKEKGKPYGIIINNARNKLIHLVFSLVQNDLDYERNHEYIRMQRRVNADFTTELKNIN

SEQ ID NO: 483823 - protein, 356 aa, unidentified
MKNKKTIDFTGTNIYIGIDVHLKSWYVTILHGNVSKQISFDSKAESLVNYLEKNYPNGTYKAVYEAGYFGYGAYEKLTLLGIETIVVNPADIPTTDKEKRNKTDKSDSYKLAIGLKSGYLTSIYIPNKQSQELRGLVRRREQLIQNQTRVKNRIKSLLRLNSIDFPNRFSKSGSHWSRAFITWLKEIEFNTRAGKLTLSSIIREIEFVRQELLEINRFIKDELSKDEIAENYRKLQNIPGIGKVGAAVLQTEIIEINRFKTRDDFISYLGLCPTEQSSGESRKIGSLTRRCNKRVRMILIEASWIAISQDPSLGDFYNKQCERIGKQKAIIKVSRKLASRIRHILLTNEEYETGIA

SEQ ID NO: 483824 - protein, 315 aa, unidentified
MAKQHFVGLDVSKQQLDVAIFPTGKSFSCSNSYAGHKKLVQRLRRLKPALIVLEASGGYESAAARALAQADLPVAVVNPRQVRDFAKATGELAKTDKIDAAVLALFADKLRPQVRPLPDEAAQQRRDLALRCQQLGKQLATERTRQHQASGGQADSIARHIAWLEEELQQLQAQWQASLQSDEQLSQQQRLLRTVPGVGPQLSAVLVTYLPELGRVSRQEIAALVGVAPFNRDSGQHQGKRCVWGGRAQVRCVLYMAVVSAIRHNPDIRAFYQRLKDNGKATKVALTACMRKLLCILNAMVRNQTQWHPQTLPTP

SEQ ID NO: 483825 - protein, 453 aa, unidentified
MRTNLSVLDPLAAFVDVGSEHMHVSIAGGPPEVFGAVTVELHRLRDWLRERGVRSVAMEATGVYWLPLYGVLEGAGMTVRMVNGRHTRNLPGRKTDMSDCQWGATLHAHGLLPAGFVPPAQIRQLQDYLRLRQDHLMLGASHVQHMQKALERMNLKLHDVISNVVGVSGLAVIEAILAGERDPEQLLKLCDAQIQKRKAERFRQALQGTWAEEHVFALRQALESWRHYQRQMQACDERIQAVLQRMEERLTPSEGPVQDPGAGGGSVGGKRPGINAPQIEGLGALLARLCGGKDLSVLPACTAYSMLQLIGEIGLDLKVWPSEKSFTAWLGLAPGSYQSGKRHRGLGRKRNRAGRLLCVMARSLARSKDMALGGFYRRMAARRGGLVAIIATARKLAVLIWQTMVKGLDYVEEGLKRYEERVLQTKQHTLKRLAKQLGVVLLPAHPESGCAQP

SEQ ID NO: 483826 - protein, 457 aa, unidentified
MTSHKRSRPRRDMAPVHSHAAAVDIGATLHVAAVSPRCDPEPVRSFGTFTTDLHRLADWLAQCRVKTVAMESTGVYWIPLYEILDQRGFEVVVVNARDAKNVPGRKTDVSDAAWLQRLHEYGLLRASFRPKGEIATLRSYLRQRERLLEEAAAHIQHMQKALTEMNLQLHHVVTDITGVTGLRILRALVAGERDPDQLAAYRDPHCKAPIASLRAALVGNDREEHVFALGQALELYDVYQAKVAACDQRIEAVLERVKAVSPPPAAPLPPLRPRRRQANEPGFAVREALHAILGVDVTQIDGIGPSLALKLVGECGTNLAAWPSAKHFTSWLSLAPHNKISGGKVLSARTRRSGSRAAALLRLAAAAVGRTATALGAFYRRLSARIGKAKAVTATARKIAVLFYNMLRHGMNYADPGASSYEERYRQRVLSNLRRRAKSLGYILQKADPAPTAMAVS

SEQ ID NO: 483827 - protein, 337 aa, unidentified
MEYFAGLDVSMEETHVCVVDRDGKVILEARTPTTPKTIAAALAKGPAVERVLFETGRMAPMLFHGLTALGLPVVCVESRQAYQALRSLAAHKTDRNDARGLAHLARTGFFKPVHVKSLSSHAVRALLIARKKLVSQRVTLENQIRGLAVAFGVRLPRGLSSGFAEKAMAAGRGIPGLDGAMRGLLAARDAILKAIVAINTDMKSLERSSSACRRLMTIPGVGRLTALAFAATIDDPDRFRRSRDVGAYLGLVPRRYQSGELDYTGSISKCGDGRLRTLLYEAANVMLTRYRGSLALKTWALNIAGRSTMRKARVALARRLAIIMFAMLKHGTEFEPV

SEQ ID NO: 483828 - protein, 389 aa, unidentified
MFYVGIDVASEKHDCCILNEKKKIIRSFSFLNSPVGFQSLLSALSGIQPDEIKIGLEATGIYSENLSVFLRRKGFNVTTINPLLLKKHQCATTLRKTKTDKADAKGIALFIAEEGFQPDLPVSYHIQELKSLTRARFSFVQDRSALKNKVKRLVALLFPELLEQFSDIFGASATALLKQYPSAEKLAACHTDALAALLRKSSRGRFGRAKAAYLKQLAKCSIGNHSPARVMELKMLLARIDLLSEQIKDYDKQIKIIMDELDSPVLTIPGIGYTLGATIIAEVGNISRFSSPAKLLAFAGLEPSIYQSGKFVPASGRMVKRGSPFLRWALLQAAGYVPNYSSTFALYREKKLSEGKSAAVARSHVAKKLVRIIHSLMTHSTTFSDQLTA

SEQ ID NO: 483829 - protein, 346 aa, unidentified
MEHYAGIDVSLELSSVCVVDAQGKIVKEAKVASEPEAVVAFFEALGFAVKRIGLEAGPLSQWLHAGLKEAGFETVLLETRHVKAALSAMTVKTDRKDARGLAQLLRMGRFQQVHAKSMASQEVRALLVGRKQLLGRLIDVELSIRGILRGFGLKVGAVTRKGFEARIRELVTGHATLERIAEAMLSARAALKAEYEKLHKAVLAIVREDAVCRRLMTVPSVGPLVAITYKSAMDDPSRIAKSKAAGALFGLTPKKYQSGEKDVTGGITRTGDEMVRTALYEAANVLLSRITRFSKLKRWGMDVAKRRGSKRAKVALARKIAVILHRMWIDGTTYRWAEAKPIAAQA

SEQ ID NO: 483830 - protein, 412 aa, unidentified
MQAIIERCFGLDVHQETVVACVLVGGPGAKPTTEGGTFRTVTRDLEALGDWLRAAAVTHVGMESTGVYWRPVYAVLEGHFELIVGNARHIRNVPGRKTDVKDSEWIADLVRHGLIAKSFVPPRPLRELRELLRYRRKLVESQAAERNRLLKLLETANIKLASVASDVFGVSGRAMLRALIEGEASAEAMADLAKGQLRRKRADLILALDGRIEEHHRFLLAMQLRRLEAIEADIAALDLRIGERLEPYCMQHALLMQIPGVDWLVAAVLIAEIGVDMSVFLSVYHLAAWAGVCPGSHESAGRQKSGRARKGNIHLRTILVSAAISAARTKGSYLKDKFHRLKARRGALRAALAIAHKILVSAYHMLAKNLAYRDLGEAYLDQIGQTRTVANLKRRLERLGYHVTLQPTAHTA

SEQ ID NO: 483831 - protein, 374 aa, unidentified
MDSSRDSRGILVPESPCAPEGSGEEESEMHSTTIAVDLAKSVFEVAVSQRPGKVTERHRLSRGQFSRFLAKQAPATVVMEACGTSHFWGREAGSRGHRVVLLPPHAVRPYVLRNKTDGADAKGLLEALRNDDVRPVPVKSVDQHVLAGLHRLRSAWMTTRTARLNTLRGLLRELGFSIPVGARQVLPHVGALVSDIDSGLPDTLRPVLAEATREIRELEARVRQVERSLEAMSRESDLLMRLRTIPGVGLLTATALMAFVGDVQRFPSGRHFASYLGLTPRESSSGLRRRLGAISKRGDPYLRMLLIHGARSVLLHAKKAPPERDRLRTWALDRESARGHNKAAVALANKLARIVWAVWRNERAYNASVTRGTQ

SEQ ID NO: 483832 - protein, 377 aa, unidentified
MESIIYVGIDVHKDTYSLCSFDMRKDLFFSQHTMKASTANVVSYLKKISESNGNAITICGYEAGPTGFRLCLDLQRQGFNCVIMAPTSIAKTAKDKMLKTDRADAQMLARTLAYHSYKQVVLPTENILAIKEVVRLRASVLKSCKKAKQNLLSFLLYHGISYPGGGRESYWTVKFFTWLKTVTFASDYLTYCFEEYVSEVSRQIQRLDHLNSKLKELEGDREISDGVKKLKCISGIDTVTAVSLIAETGDFSRFKSAKEFASYTGLIPGRHDSGLSVGNSVGITKQGNQNLRHLLVESAKSITRATALSHGQKSKRLLERQEGMDPEIINYADRAAFRIKARMRKLECRGINYNKAAVACARELACFAWGMMTNHIQ

SEQ ID NO: 483833 - protein, 292 aa, unidentified
MQVSTIGVDLAKNVFQVHGVDSAGKVVITRQLRRKQVIEFFSKIPPCLVGMEACGTAHHWAREVSKFGHTVRLMPPSYVKGYVKRSKNDAADAAAICEAVTRPSMRFVAVKSADQQALLMLHRTRDLLIRQRTQLINALRAHLAEFGLIAETGREGLAQLAAIITDESNREALPSAMKQALQAIVDQLAALELQIGTLDRAIHAQHRANDMSCRLETVPGIGVIGATAITSTVTDPSGFKSGRDFAAWIGLVPRQHSTGGKERLGGISKQGDRYLRRLLVTPGSARKSIPGS

SEQ ID NO: 483834 - protein, 448 aa, unidentified
MGNGSGVSRGDRNRNARLERLRALVPVTNAIAGIDLAGKKQMVVVTDHDSKVIARRTFQCRAWDLGAALDWAAGRAAAHGWAGVTVACEPTGHRWRVLGQLAAGRAMPFVCVQPLVTSWSRRTEDLTSDKTDDKDAVLIARLTAQLRCYVPEPADETWARLRHLGTRREQLLSDAAGQVQQMRDLLECAWPAVLDAARQPFRSVTWIASLWVITSRDGADLARTRRLGLPRFEHAVRREVIRRGRQKPCLRIVRAVFAGLDDPTGVIAHRPGALERVQLLLEDWQYLQGRLADTEQRMTAMLDELGLTGLVTSITGLSPIGAAAILAETGDLNRFATARAVVKHAGLAPREKQSGAFTGRTKLTGQGRPALRLAAWRAVWGAQHGNPVYRARYQHLTSREQNKLTPTQAQTVIAAAILRQLHAVITTGQAWDPATAAHGLRHLTARAA

SEQ ID NO: 483835 - protein, 361 aa, unidentified
MPTQKNDLNFEGQNIYAGFDVHLKDWKVTILSEEMMLKSFTMPPKPEVFSDYLLRNYPGASYHSAYEAGFSGLWAHYRLCNLGIHNIVANAADIPGTQKDRLQKEDRRDSRKIANALRGGTLTPIYTPSESTLNDRSLIRSRRALVRDLVRFKLRIKSFLNFYGIEYPEEIKTSGKYWSNRFLDWLGELPMQEESGRQALDILVSEAKTQKKLLKEVTSQIKQLSESDRYSKRSKILRTVPGIALINAMAILTEVEDINRFPNAERFASFIGLIPMTKSSGEKEKVGEITFRSHDFLRCMFVESAWVAIRLDPALLMAYQKLVRRMEPNNAIIRIAKKLANRIYSVLKYDKPYELCKTDNL

SEQ ID NO: 483836 - protein, 353 aa, unidentified
MQYIAFDAHKHYTLASVARPDGQVLREERIEHERGALREFLARCEPGSPVAVETIGNWYWIVDEIEAARCIPRLVHARKAKLMMGEINKTDRLDVRGLNRLQRNGTLPTVWIPSGELRDQRDLPRTRMVLVRQRTQLKNRLHATLAKYALHDFEVSDVFGVRGRVVLRQRLELLPPHTAYASGHLLKQVENLSSQIREFEQRIHTTFKPTAAIQHLMTVPGVGLTLAVVIALEVGDVARFATAEKLAGYAGTTPRVHASGGRTRFGRSRPDVNRYLKWAFVEAANAICLHRSRAPRRHVSRLYERVARRKGHQKAIGAVARHLAEATYWILTKQQTYREPNAAAVSSTGDKRG

SEQ ID NO: 483837 - protein, 400 aa, unidentified
MNRTRTVAGLDVHKDSIYLCIMGYDQAIIWENTYGVLTPDLRQMHHDMRAHGVTEAAMESTAVYWVPVWTELCESMELRLVNPYFIKQLPGRKSDVKDARWIAECLLKNLIKGSFVPEPIVQDMRKLNRRIMDLCEDTTYNSNKLDAALQRCGFRLSNYVATTKSKSYRSVLKAIIDGQTDPDELLRLVHGRILNKHGRERVKAALTGSFSETDLIVLRQLKETLDLIEKQTADCQQELVRLCKEHYPKPYERLQTIPGVKERAATAIIAETGVDMKMFATAASLVGWCGLKPRNDVSNGRFKSRKVTHGNRYLRQILIEIAWAASRTRNCFFSHFSYLQTTVKKKNKMKIQVAIARKILVAVWHMLSKEEDFIDIYLKRQEELKRTEEQIKLLESYMAD

SEQ ID NO: 483838 - protein, 358 aa, unidentified
MAGKVTETAVVGGVDTHKDLHVAAVVDQNNKVLGTQFFSTIRQGYRQMLAWMTSFGALKRVGVECTGTYGSGLLRYLQNAGLDVLEVTAPDRMERRKRGKSDTIDAECAAHAAFSRIRTVTPKTRNGMIESLRVLKTCRKTAISARRVALQIIHSNIISAPDELREQLRNMTRMQLIRTLGSWRPDASEYRNVTNVYRISLKSLARRYLELHDEIADLDVMIAAIVDELAPELIKRNAIGYESASQLLITAGDNPQRLRSESGFAALCGVSPVPVSSGKTNRYRLNRGGDRAANSALHIIAIGRLRTDDKTKEYVARRVAEGHTKMEAIRCLKRYISREVYTLLRNQNRQLNSIPITA

SEQ ID NO: 483839 - protein, 338 aa, unidentified
MSSLPSLYHVFVGIDIAATSASVACATDPRTVAAAFTIAQTPAGFTDLQTRLERHGIPRREILVVLEATNTYWMSLALHLHNAGYAVSVINPAQAHQFAKALLKRAKTDAIDAQTLAQLAATLQPKPWTPPPAIYEELRQRLQQREDLLRALTQERNRLDALRHRPTVVVSVQARSERWIAWCEAEIATLDAELSGLLDQAGEWQAAAERLRSVPGIGPITAAWLLVETLAFTTCATPQQAAAFAGLAPHPYESGTSIRRRGRIGQGGNAALRRALYMASVSAGRHNPHIKAFYERLRAAGKPVKVARCAAARKLLHLCWAVVTREVDYDPNYGPHTP

SEQ ID NO: 483840 - protein, 366 aa, unidentified
MEKSSTAFVGMDVHKDSIDVGIADATEARHYGRVGGDAASVDRVVRKLRSAHRHLVFVYEAGPCGFWLYRRLKARGLQCMVVSPSKTPRNAADRVKTDRRDSLKLARLARAGELEPIYVPDAKDEAVRDLVRAREDAVCMQRQARQRLAALLLRNEIRYAGKTAWTQAHRRWIAHLKLPNPAQQIAFQEYVQAVHEGGQRLERLTSAIAAELEHWRWRPVVEALQALRGVSAIHAVRIVAELGDLARFESPRGLMGYLGLIPSEDSSGPRRRQGSITKAGNSSARRALVEAAHAYAHPARVSWVIARRHTGLPKSVCDIAWKAQLRLCTRFRRLRARGVLKNKVVVAIARELSGFVWAISREVKPL

SEQ ID NO: 483841 - protein, 314 aa, unidentified
MHYEKRLANELETTLNALRPYRDDLVGIAVESTYNWYWLADGLIEAGFVVHLANTARIGEYGGLKYTDDKHDARWLAHLLRLGILPEGYILAKPQRALRDLMRRRMRLVQGRSAQILTVQGLVERSTAQRLNTKRIRALDAEALIGLFPDPNEGLAAGAHVGLIDAYDRVIDMLETQLTRRLKPDPMWRLLKSIAGVGDVLAWTILLETGPIERFAQVGHYASYSRCVDSRRVSNGKNKGENNRKNGNRYLAWAFVEAAHYAIRYHSPVKRFYQRKQAKTNGIIALKAVAHKLARAAYYVQRDRVPFEMSKAFS

SEQ ID NO: 483842 - protein, 344 aa, unidentified
MKEVITIGVDLAKNVFQIHGVDDAGNVVIRRQLRRSRVLPFFEKQPRCLVGMEACATAHHWARQLIGFGHEVKLMPPHYVKPYVKRGKNDASDAAAICEAVTRPTMRFVSVKGTEQQSVLMLHRARELLVRQRTMLINAIRAHMAELGIVAPVGVPQIKKLFRIIADTDDARLPPLARTCLESLVRQFLSLDKEINAAEKRIHAWHRMSEVSQRLETIPGIGPIVASALAASITDPEVFKNGRELAAWIGLVPRQNSTGGKQRLGKISKQGDQYLRWLLVAGAMSVIMHAKRRGTTNQPWLADMIARKPTKVAAVALANKTARIVWVLLRHGGTYQKPVAVQAA

SEQ ID NO: 483843 - protein, 403 aa, unidentified
METCTVFPQCGQANFAESCFRVIFRPIRAMGRVSGVPIKKAMMPSAEFSAEVSKMGLVIGLDAHTKACVYVVKDDGANVVDRGTLPATPADLAVLAERYPGATVVVESSGVTEWIYDRLIELGMAVFPAHPMNIRRIEGKKSDAVDAGFLVDAYRLGALRPSYVPPKEIRHLRQLARRCAFLTKERTRLKNRVHAILKRKGVRLMDDTVEDDVPDIFAAKHRERLLAVGDPEIPVLLDLIGAVTEKREDLDAELLVVADSNEDVRNLMTIPGFGPLAAVCVYAEVGDVSRFPSAESLCAYFGLVPAESQSGETRVRGHITRRGPPHVRWILNQASWQHVRRCPRGSIARAHKRTARRAGKKRAVTATSRRLTKVCHCLLRERRRFHDERPRGSLDSALRDEAA

SEQ ID NO: 483844 - protein, 412 aa, unidentified
MEVFCGIDWAEDHHDISLADRDGTLLARRRISDDAAGLAQLLELLAGHGDTAEDPVPVAIETPRGLLTACLRATGRKVYPINPMAVARYRDRHSVAGRKSDHGDAFVLANVLRTDLHAHRPLPDDSELAQAIAVLARAQQDAVWARTAAHNKLRSHLREYFPGFLAAFADARGGIMRPGARVILAAAPTPAAAAALTLTQLRGLLKEAGRSRGIDTEATRLRDAFRVRQMRQLPLVEDAMGRQALALPGQLDAACTAADDLEQAVTGSFNQHPDAGIITSFPGLGPLTGARVLAEIGDDRSRFADAKGLKACAGAAPITRASGKTRSVTRRHIKNNRLNAAGYSWAFSALTASPGARGHYDRRRDAGDRHAAAQRNLFGRLLGCLHHCLITGQHYNENIAFPENPKKLPQAA

SEQ ID NO: 483845 - protein, 431 aa, unidentified
MKVMYERVAGIDVHKDMIKVGVRSPGDKAWTRKTEILEYRTFYGVLQLMAADLRKRAVTHVVMEASGVYTEPVYYALCELDFERVEVINPAHAKALKGHKTDAKDCARLAELYECGLLRGSYIPAAELKELRDLTRYRVKTVQARTSEIQRLGKALESGGIKIGSVVSDITGKSAIAMIEALIDGERRGTVLADLAIGRMRTAGKLADLSMALAGRFTGHHAMLCRLHLDRLAVFDTAVSGLDERITARAVPWRREQDLLMSVPGFGDIVSQVWLAEIGPAPHQWFSTHEKLASWVTLSPGNNISAGKRKHGRTGDAGTYIKPMLVQAAWSAIRTPGRLQARYGRLVRRFGGAKNPAAKKKAIIAIAHTLLKIAYQVLKSGTPYQDLGADFYTQRESPQQRQAYLLRQLEKLNPGCTITISLPEAALTPGA

SEQ ID NO: 483846 - protein, 452 aa, unidentified
MQQNTPVFDEIRRNVAGIDIAGCADHYVCGPRRDDGQTDICHFGTNTSELHRMLTWLQARRVVSVAMESTSVYWIPVADLLESAGLEVILVDTREVRMVPGRKSDVKDCQWLQKLHSCGLLRGAFRPPESITAVRTLLREKENLTTARTQWVQQMQKSCDQMNIRIHHAVSDIDGKTGLSIVAAILEGQRDPVELAKLRDKRCKKTEAQIAEDLTGTWREEHLFNLEQAYKMLMFTDEQIARYDEKIAEMYQRIAGASGRPETPLAPGNVPTSGKTARDRAGKADLQRIMGFDMTVIPGIGYDTAAVIVSELGSDFSRFPTEKHLAAYIGLAPSLGKSAGKNVRQRRRCRNTSKAGRALRMAASTLHRSQTEIGAFFRSVARRSDRKTAVKATARRMAHMIYRGVRFGAAYLDKGAEAFEQRLRMRTLKTVKSLVKRHSISALELQSVFAAG

SEQ ID NO: 483847 - protein, 440 aa, unidentified
MIDAVIERCAGIDVGKKFILVCTLCGPSDQAPQIQIRTYATTTHALQTLEKWLYELGCRHVVMESTGDYWKPIFNILEERMTVVLANPVHVKNIPGRKTDVKDCQWLAHLLRHGLVRSSFIPPRPIRELRDLTRRRRQLLSAATSERNRVQKVLEDANIKLASVLSDLFGASGQEMLEALLAGDPDPEQIASFARCRLKRRVPEIKAAVEQHRLRDHHRFLLRQSIAHIGFLEEQIFELDRQIMQLLLPYQEGFDLLQTIPGIRRDAAAILIAEIGPDMSQFPTPDHLAAWAGVCPGNNESAGKRRSAHVRKGNRWLRGILTQSAWGATRKGNSYFRERYARLAARRGSKRAVIAIARILLITVYHVLSRRIPYRDLGPNYLDERQRNRQIRYHLKRLAEFGITIPPITYSPQLLTPPRTKPRLCFRSILRANDIKQNLS

SEQ ID NO: 483848 - protein, 373 aa, unidentified
MPRYSTAFGMDVHLRSTTVCALDAETGEAVTRRFRGNPWGEVAEWMSGFPGPSLAAYESGYLGFAPQRELSGLGVDCVVAAVSKVPRSAADLSSKNDRNDAARMAKAILSHDVTPVWVPSPEIEGLRDLAAAHDAATARLAAAKQRLLAFLARRGYVYGGTTPAGNPRKYWTYGFLRWLDGIRPADDGGIRALAALRNEVEAADETREALLAEYRAAVAAGPLSAEVEALQSIKGCGFVLAAAFASEVGDFSRFRSGRQVTAYFGLAPKQRSSADSVRLGGISGAGNALVRRLAVEGSWRYAQAGHQPKLMPKGSGVPLEIRMHGRKGSERLLRRREEMLERGMPQAKANAATAAELVRWLWALGTMCREAGE

SEQ ID NO: 483849 - protein, 356 aa, unidentified
MSRDTKYIGMDVHKEAIVIAVFNDSGKLVMESIVETQASSILQFIHGLRGELHVTWEEGTWAAWLYDLLKPHVHEVLVCNPRRNALLKEGSKSDKVDARKLADLLRTGMLRPVYHGENGLRTLRELARSYQTITKDLNRVMNRLKALYRGWGIACSGTQVYAARYREEWLHKIPHAGVHRRAELLYQQLDGLQALRRSLRPELLAESRKHKASKLLRQIPCIGPIRAARLIALMQTPHRFRSKRQLWTYSGLGIETHDSAQYRFVRGQLQRSNKPQQLRGLNENHNHEMKEIFKGAATRASCGVGPFRDFYLALLDKGMKPEMARLTLARKIAAITLTLWKKGGRFDAELLKTQAA

SEQ ID NO: 483850 - protein, 344 aa, unidentified
MAEYVGLDVSKEETAFCVMDKAGKILSQGKALSDPRSLFEALREHTLCPDRIVLETGTMSGWLARGLRGLGLAVDVIDARQAHAVMKLQHNKTDANDAVLLAEIARTGFCRPVSVNSEAAQVQRMLIKARTHLVRQRRDTENAIRGFLRALGIRFAKGSGKLAGRVREALEERPDLKVMIEPLLASVEALKTQIKRLDEDVVLEARGSPACRLLMTVGGVGPITALAFAATIDDAARFAKSRAVGAYLGLTSRRFQSGEMDYSGRISKHGDAMLRSLLYEAANSMLTVVRRAHPLKDWARRIRKRSSHKKACVALARKLAVIMHRMLVTGEPFRWPQMEEAATA

SEQ ID NO: 483851 - protein, 355 aa, unidentified
MTITKYIGMDVHKESISIAVMNAAGKLVMECVIETKGSMLLQFIDGLRGDVHVTFEEGTWAAWLYDLLKPHVSEVVVCNPRKNALLKDGSKSDRIDARKLAELLRGNHLKPVYHGEQGLRTLKELARSYLNISKDVTRVMNRLKALYRSWGIACAGTKVYAPHHRSEWLGKISEAGVQRRAEHCYQQLDALRLLHQQVRRDLLLESKKHQAWRLLGLIPGIGPIRAALLIALIQTPHRFRTKRQLWTYSGLGLETHDSAQYRVVEGQLQRSKKPVTLRGLNQAHNHDLKDIFKGAATRVSSSSGPLHDFYEHLLAQGRKPTMAHLTLARKIAAITLIVWKKEVRFDASYLKSQAA

SEQ ID NO: 483852 - protein, 350 aa, unidentified
MSLKLNTEIAVVGIDIGKNSFHIVGLDRRGAIVLRQKWSRSQVDARFANMPPCLIGMEACVGAHHLSRRLQALGHDARLMPAKYVRPYSKGQKNDFRDAEAIAEAVQRPTMKFVATKTVEQLDLQALHRVRERLVRQRTGVANQIRAFLLERGVAVRQGLRFLRTELPIILGSRADVLSPRMIRIIEELAGDWHRLDERIDGLSNEIEALAHQDPACKRLMTVPGIGPIISSAMVAAIGNGAAFSKGRDFGAWLGMVPKQTSTGDRTILGPISKRGNRYLRVLFVQAAWVLLVRVKNWERYGLKAWIEAAKKRLHHNVLAIALANKLARIAWAVLHKEREFECKVRAIAS

SEQ ID NO: 483853 - protein, 410 aa, unidentified
MIFVGDDWAEAHHDVYVCDEAGTKLAARRVPEGIGGIAVLHELVAGHAEDPGEVVIGIETDRGLWVQALVETGYVVYAINPRAASRYRDRHTLSGAKSDPGDAKMLAELVRTDRHNHRQVAGDTALAEGVKVLARAHQTLIWERTRATNRLRSSLREYFPAALETFDELAHRDTLAVLAKAATPTEAAKLTPGKIRTVLRNAGRRRNIETRADAIAAGLRTEALRAPGPVETAHGATTRATVAIVVELNAQIEKLAGELADHFEQHPDSDIYLSLPGIGVVLGARMLGEFGDDPNRYANAKSRKNYAGTSPITRASGTRSVVLARFVRNPRLADALDQGAFCSLSWSPGARLFYDQRRANGDSHHMALRALANRWVGIMHGCVQNRCRYDEHTAWAHRSDVDTKRIEQAA

SEQ ID NO: 483854 - protein, 421 aa, unidentified
MSNSTLSKKLASVKPGTMFVGIDLALDRNVAVVLTEHAEQLARFGFPNDREGYDYFYRRLEAIQESQQAPAVLVGMEPTNYFWKLMAGDMEQYRPEYSYRLVNPYTVKKNREGDQLDRSKDDNRDAFTIGDLLRSGKYTETRLLHGGYAELRQYVTLYTRLRRDVRRQKTLIRNAAGQLFPELQQVFKDLSGKTAVAMLSHHASAAVIREMSEEHFIASVRIDFSGRRMQVSKLRCAHALAQRSVGLPDGNEALQLALHLHIEALEGLQQQLEAVHTALVDTFLALPESKYLLSVHGLGAITAATILSEIGDPSHYTKAKQLIKLAGTQPVPNTSGRKTRSQTPMSHKGRPRLRTALFFAVMRLIQVDEAFAREYLRLQTRKKNPLVKMQALGVLMNKLLRILWALMRNRTFYNPGFQGMA

SEQ ID NO: 483855 - protein, 427 aa, unidentified
MAAVVIGIDPHKASHTAVAVDEREVALGDVRVRATAAQSERLLAWAGRWPQRIWAVENAEGLGYLLAQQLAGAGEHVVDVQPKLAARVRLLAADASSKTDPHDARSVAIVGLRSAGLPRVVVEDHAAVMRVWIRRRRHLSRLRTKVVNQLHALLCEVVPGGFAREISARQATVLLQTVHPSSAADQARVELAAEILDDLRRVDAQLRELHKRLTAVVLASKTSVTSIVGVGSIVAAMVVGITGDVSRFRTSDHFAAYAGTAPIEVSSGPHKIFRLSRRGNRQLNHAIHMAAVTQIRYPTTEGRAYYDRKIAAGMQHRSALRALKRKISDAIYRKLINDANAQRHKASRGPGGQSGNDSVSSVAGSHPTAPDLRTSHSRTRPQPTTTTSTKTPTAGLAPRRRQTGRRAAGVKMQPRPRPRSGRRQERS

SEQ ID NO: 483856 - protein, 374 aa, unidentified
MMPQQRRAFRYLGLDVHKASISVAIADESGPPTTYGRIPNEPSAIRTVMTRLAGPGLELRVAYEAGPTGYALHRQLTRLGIACMVVAPSLIPKQPGNKVKTDRRDALKLARLLRSGDLTPVWVPDEAHEALRSLVRARADAKADQLRAKHRLSKFLLRQGCWPPIGVRNWSKRYFTWLHQLEFEHLPDRIVFADYLAEVNAAGERINRLDGALSQCAQSSSQVALIRGLQAFRGIGFLSAVTLVAEAGDVRRFRTAPQFMAYAGIVPSESSSGNQHRRGSITRTGNRLLRHVLGEAAHHARHAPRVTSKVKQRQADVPAEIVDLAWRAQVRLHTRYRQLSARIGSLKALIAIARELAGFIWAAGHVLQEVPAAA

SEQ ID NO: 483857 - protein, 391 aa, unidentified
MVFVGIDVAKDKHDCYICDSDGLELYSPFIIANNREGFEELMERIRCVSDDLSKVKVGLEATGHYSYNILGYLISHGTPISLINPLHTNLFRKSLSLRQTKTDKVDARTICMMLSSGMDLSSYSESSYHMEELKSLTRYRFGKVGERAQLKQSLSRLVTILFPELEKLVPTLHMKSVYALLSEFPGAIYVANAHLTRLKHLLADSSKGRYGKEFAETIRDTARKSIGSDMPAKSLELKHTIALIHVLTEEIDEIEFSIQKIMDTLDAPILGIPGINYRMGSMILAELGDLRRFSSPDKILAYAGMSPSTYQSGQLISSYAHMEKRGSRYLRYALFNATKYVCMWDPTFKSYLAKKRAEGKHYYVAISHAAKKLVRLIYHLQMTGEAYCPQT

SEQ ID NO: 483858 - protein, 315 aa, unidentified
MEAELWVGVDVSKAQLEVALGAAGELFSVANDQRGVAALVARLEKAAPQRVIVEASGGLEVAVVAELGAAGLPVVVINPRQARDFARATGQLAKTDALDARMLALFAERVCPPLRALPSQEQRELKALVARRRDLVEMITAERNRLSSAPKLLHKEITAHIRWLEGRLKQRDRDLERTLRSSPLWREQENLLKSMPGVGPVNCFTLVAELPELGQLNRRQIAKLVGIAPLNRDSGAMRGKRTTWGGRASVRAALYMATLAAVRCNPVLRAFHARLRAAGKPPKLALVAAMRKLLTILNPMLKHRTPWRTPCSGAA

SEQ ID NO: 483859 - protein, 342 aa, unidentified
METAATIGLDLGKSVFQVHGVDAGGAVVFQRRLTRGKVLAFFAKQTPCLVGMEACAAAHHWGRELSKLGHRVRLMPPRYVKPYVKRQKNDAADAEAICEAVTRPSMRFVEIKTCEQQGTLVLHRVRLMLMRQRVQLSNAIRGHMAEYGLVAPVGRNGLQRLIAILSNPNDERVPAVARASLAPLVSQFGLVNDQVLENDRRVRASAHSTEIGCRLMEVPGVGPVLASAMVAAVPDPAAFKSGRDLAAWIGLVPRQNSSGGKEKLGGITKQGDRYLRQLLVAGALAVIRYAHRHGTKRPWLVHLLARRTPKIAAVALANKMARMIWAMMMTGERYREPVVAAA

SEQ ID NO: 483860 - protein, 407 aa, unidentified
MELIHERCAGLDVHRDTVVASVRIASGKEVKRETETFSTTTKELLRLGDWLTEHGVTHAVMESTGVYWKPVWQVLESFIELSLANASEVKNLPGRKSDVSDAEWLADLLAHGLLRRSFVPERPIEELRDLTRTRRQTVREITRHAQRIDKLLQGANIKLRSVLSGVLRESGKAILRAMVSGENDPKKLANLAKGTARNKRAQLEEALDGFVTGHHRFLLGQHLDAVEHLEGMVAAIEARIDEVLRPFAEAAKLLTTIPGVSDTAARIIIAEVGVDMGRFPTAGHLVSWAGLCPRLDESAGKHRSTKLRKGNSWLKTALVQCAWSAIRSPGYLRARYHRVRSRAGKMKAIIAVARTMLIAVYYMLSDNQTYRDLGEAFLEARDKERVARALTRRLARLGYEVELRPAA

SEQ ID NO: 483861 - protein, 348 aa, unidentified
MRIIGCDYHPSWQQICWLETTTGETGEEKLNHASGEATRFYRGLAGHALIGMESTGNCQWFVEMATTAGHDVWIGDAARIRASDSRLQKHDRRDAALILKLLLEGRFPRIWTPSGEQKDLRQLLIHRYKLVRLRATVKNELQHLAMNQGVTRKQKLWSKAGEKVLCELPLKPWASRRREDLFKVRTMLNEQIDSLDAAVVEAAEHNEKAKLLMTQPGVGPITSLAFVLTMGDVNRFPRGKQVASYLGLIPREYSSGGKQRLGSISKQGNRFMRMLLVEAAQAAVRYDPQMRSEYLHRCHRMAKGVAKVAAARKLAIRLYWMLKTNTAYPAVVRVESSSRVALVVPQLG

SEQ ID NO: 483862 - protein, 343 aa, unidentified
MTHYVGLDVSQKITAVCVVDSDGARLWRGVCASRPEEIAHIVCLHAGAEARIGIETGPMTPWLIHELRALALDVVCLDARHAKAALQMQINKTDQNDAEGLAQIMRTGWYRSVYVKSYAAHRARALLGARAQLVGMTTRLSNHIRGVLKIFGLLPGAMRGLSFAARVEAVIADRTDVAPIVRPMLTAWQDLREQIATFDKAVRMQVKENQNCRLLMSVPGIGALSVLAYVSAIEDPDRFGRSRSVGAHLGLTPRQYQSGRIDRSGRISKCGDPLTRTLLYEAAVVILTRVKRASPLKEWASRIAGRSGAGKARVALARKLSVILHSIWRSGEPFRWTDQPVVA

SEQ ID NO: 483863 - protein, 339 aa, unidentified
MELYCGMDLHSSNTVIGITDEKRNHLIDRKLPNNPELIRNFLEPYKAELKGIVVESTFNWYWLVDMLQEEQYRVHLSHPVANQQYNGLKHLNDKHDAFWLADLLSLGILKEGYIYPRQVRSLRDVLRKRAHLVRVRSALIVSLQHIIHRNCAVKVRTGDIKRLTADLISPCLSKEEALLLAGTTSKEVIDCLTRQIDKIERWGLKHLRREGVFMLLVTLPGVGDILGMMILLETGPILRFREVGNYASYCRKVSSQWTSNGKIKGRGNIKNGNKYLAWAFSEAAEHARRTNETCRRFYERKLRQTNTKVAHNALAHKLARAAYYIMKDHVPYQEDKMFS

SEQ ID NO: 483864 - protein, 319 aa, unidentified
MAQNDVVVVGIDVAKDKGDACIRKLSLRQTFPSPEQGHRKLIAWLRKHKVTKAVMEASGGYERTWARALRDAGIEVRIVDPKRVRAFALSAGRLAKNDTIDAEMIAWFAETFDEIAGQPRDAAREELQALVKARKTLQDQQMRLQSQGEHDAPAAVQKAYARVLKSLASEMARFEAAIAAKVKATPEFAERAEIIESVPGLAGTTSAKLIAGMPELGQVCNKIAPALLGVAPYDDDSGRRRGERHIKGGRRWVRNAFYMPCLSAATQHNPVLKAFYQRLIAKGKKPKVALVACMRKLIVILNTMLARRQKWDPSCYALS

SEQ ID NO: 483865 - protein, 413 aa, unidentified
MTNSIITAVGIDVSKGKSMVAVRRPGGEVVCLPFEVKHTTSALKDLTRNLKQIGGEIRIVMEHTGIYWYPIARTLHEAGFFVSIVNAILIHNFSDNSLRKVKTDKADALKIANYALAFWDSLCPYTPEDEIREILKVQSRLYERTTQSSVVLRNGLISLLDQTFPDANKLFASTYRTVSGHYKWIDFVRRFWHRDCVAGMSEKAFSECYSKWCDREGYKFSRPDACRIYSAAKQAVAVLPKNDSVKAVIVQSVDTLNAVYDSLQVMRDEMEHMAQLLPEYSVVMEMDCVGPITGPQLMAEIGDVRRFKSKAALVAFAGVDAPPYQSGSFDAKSRHISKRGSPHLRRTAFLICSAVLQHSNSDDPVYSFMDRKRAEGKHFYVYMVAGAAKLLRIYYARVTEHLNNIELQEAISA

SEQ ID NO: 483866 - protein, 338 aa, unidentified
MKLYGAIDLHSNNNVTVLIDEQDQVVYQKRLANDLSLIGEQLSPYASSLEGIVVESTYNWYWLVDGLMGKGHRVHLANTAAIQQYNGLKYTDDDSDARWLAHMVRLGVLPQGYIYPQQERAVRDLLRKRSQLVRQKTANLLSIQNLYTRNTGLSLSANRIKKLRSEEVDDLFTLGDVALAVKANLSVMRCLEAEIKTLEQVVKERVKLKPAFRYLLSVSGIGQTLALTIMLETGDIRRFPSVGNFASYCRCVGSEKLSNGKRKGKGNTKNGNKYLSWAFVEAANFAIRFEPLIGRFYQRKKAKTHGVVAIKAVAHKLSRACYYVMRDQVPFNVARAFS

SEQ ID NO: 483867 - protein, 393 aa, unidentified
MICVGIDVAKDKHDCFILSSEGEVLADVFTIQNNAEGFDMLLQTIRRCTRPEDKIKVGLEATGHYSYNILGFLLDKGLSTYVINPLHTNLYRKSLSLRKTKTDRVDARTIAAMLMSDVDLKSYTDTAYHNEELKSLTRYRFDRVRERAKLKQSVSRLVTILFPELEKLVPTLHMESVYALLSEFPGAKQVAEAHLTHLKAVLYGASKGRYGRDMATTLRDAARCSVGSVMPAKSLELQHTIRLIRELDAEIEDIETAIQSMMDEIQSPITTIPGIGVRMGAMILAEIGDFSRFGSPDKILAYAGMSPSTYQSGQLSLSGAYSHMEKRGSRYLRYALYNATKYVCLWDPAFAAYLAKKRGEGKHYNVAISHAAKKLVRLIYAMEKSKQSYRNAA

SEQ ID NO: 483868 - protein, 331 aa, unidentified
MYVGVDYHKRYSFATKMDERGQIIEQIKLNNHPETLRAYAATLPPGSKIALEATEGWYYFYEMLESYCPEIYLAHPLKTRAIAEARIKTDKIDSTILAHLLRANLLPTSYIPPRDIRDIRESLRYRASLVSLRTSIKNKVHAILSKNGVVMTYADVFGKKALRSLDLLPLRACYKQELQGYLQCIETLKRLILEVGVTIKRLAEDNAQARLLMTIPGISYYSSLLIISEIGDIGRFPSAKKLCSYAGLVPRVHSSGGKTRYGSITKQGSKWLRWILVELSHHFVQGSPRLKHLYARITKAHGRNTARVAVAREMLKIMYVMLRDNRAFVIQ

SEQ ID NO: 483869 - protein, 380 aa, unidentified
MIIGLDVHKDLVYVTRMENDGKITEQYEIKNSEESWNKFVGKYILEMPEIALEASTSGKHVARILSYAGFSVHIADPKKLALIFKSSKKNDKLDSENLAKLLRLNEFPEAYLPSREYEEMRTLTRHRKYLGEEVVRIKNKMHSILSLNGIKIKATDIFGKKGLSELSKSIERLSYSEKIVINDMLKRIIDIKERSEKIENEMAKIGKDREDVKRLMTIPGINIYIATGIIGEIGDIQRFRNKESVASYAGLVPRQDQSGKNDRKGHITKEGPSILRYLLVLAAHTVIKYSKKMKNKYLSLVKRIGKNRAIVAIARILAETIFTMLKKGVDFEDEIIPLTERKVRKMIERANSGIGEINIQESIKLISSKGFRSLSNRPFS

SEQ ID NO: 483870 - protein, 374 aa, unidentified
MATTRTTRRSRSMTDEANDVGIDPHKHTLTVSVLDCRGGVLGTASFRISGEGHREMEAFVSGFGPVRRWGIEGAASFGRHSAMFLIRAGYDVRDVCPTRTALDHRSRGRGKSDAIDSVRIARLTQSDPGLPVAFKRAGNDRGPDALHEQLSLWHNVRKSLVKTRQHLTSEVEALLCALPEAIRDQLPATRAIRPRLAAVVGCDRDVAADPVTQLRLRLLDNYLDQLVDLDARETEAAAELATLRAHAGSTLAGLCGIADRSDAELLVEVGDVRRFASEGAFARFNGTAPLPASSAEGDGPVRRHRLSRYGNRRVNAVLHRMAVTQLRCEPRARAIYDTARRRGHTNKEAMRILKRHLSNVVYRRMLTDQNTDRS

SEQ ID NO: 483871 - protein, 399 aa, unidentified
MHKAQLTACVRLLIEGVVTEIVETFGTTTPDLLALRDWLKAHAVTDVAMESTGVYWKPVYYMLEDEFEVRLVNAAHIKHVPGRKTDTIDAAWIAQLLSCGLLRGSFVPPKPIRRLRDLTRFRKALIEERSRAVNRLHKLLEDAGVKLACVATDVMGVSGRAMMRALIDGNADPEALSELAKGKLRAKLPELRKALTHRFTDHHAFLLERMLAHIEELESDIDAISRRIDEEIRPFEAAVELLRSIPGVERRAAEAILAEIGTDMSVFPTAAHLASWAGLCPGQNESAGKRKSAKTRKGSKWLRKTLTESARAAARTKESYLSERYRRLAARRGDKKAIIAISHEILTAAWHMLSTGELYREQGADTLRQRDQDRIRRRAISQLEKLGHKVTLEELPQAA

SEQ ID NO: 483872 - protein, 361 aa, unidentified
MHDSITWIGMDVHKESILVAAVNGAGATAARWEAPNTLKGKERLAKRLSEFGTIRCAYEAGPCGYDLRRFLEGKGIACDVIAPSLIPKKPGDRVKTDKKDAEKIARMHRMGELTAIRVPTPAQEALRDLLRAREDATEDLVRRRHRLQKFLLRQGRRFEGKNWTRDHWRWIRVQKFADRNFETVLSEYIAAIDQEIERIGRLDAQIEEESKNPEIAPAVARLKTLRGVKTLTAMTILSELIDLNRFDSPRKLMGFVGLVPGEYSSGGKQWRGSITKSGNSHVRRVLVEAAWHYRHSPRKTGEAIRKRREGQPPEVIETARKAELRLYKKFTRLVMRGKKTTVAATAVARELAGFVWAIGRI

SEQ ID NO: 483873 - protein, 358 aa, unidentified
MTRMTQPTPLDQGNPDIVLGVDTHKDVHVAAVVTAAGVFVESRSFPTTADGYEQLLAWAGTLGRLSQAGVECTGSYGAALSRYLHGQGITVFEVNQPDKATRRRRGKSDIVDAEAAARAVITGRATATAKAGDGPVEMLRLFKMAKASAIKSRAQAINQLKAVLVATDPELRESLAGLSNPKLIRACAALDSSASGTAGAAAHTLKLLARRIQRLTEEIEDLTTRIRHVITQHNPQLLACYGVGPDTAATLLIAAGDNPERLRSEASFAALCGVSPVEASSGKTQRRRLNRGGNRQANSALYTIVLARLRWDTRTRGYIDRRVSEGKTRREALRCLKRYVAREIHRLITRTTTHVLAA

SEQ ID NO: 483874 - protein, 338 aa, unidentified
MGRYIGIDLHRNCFTSCILTENGRNYLRTWRLEELGAFCSKLRRSDEIAVEVTGNTRLFYDAVSPCVSRVAVVNPHQFKVVSDSVNKTDDNDARRLALFLSKGLLPEVRMTKKEHAQVKSLTQSRDKLVKLRTSLKNKINNICSAHGINLKKESLSSDKGLDRILEIPFDPMVTIEVRVLIDQIRSLNQSVKELEDAIKDAGGKLPGAKNLKSIKGIGDLGSAILLSVIVDVNDFSDEGKLASYFGIVPRVSNSNETNRSGRITKRGNELGRTTLVQCALIAKRYSPYLSNYYERIKARRGTGKAIIALARKFLNVIYNTLKNDWVWENFPNGVLAEG

SEQ ID NO: 483875 - protein, 410 aa, unidentified
MEVLYEICAGLDVHKDTVVACVRTASGRRVERETRTFGTMTRELIEMFDWLASKECTHVVMESTGVYWKPVWRVLDGGFELLLANATEVKNVPGRKSDVNDARWLADLLAHGLLRSSFVPPEVVQDLRDLTRTRRQLIRETTQHKQRIQKVLERCNIKMASVVSNVTGATGRAILDALIKGERDPVKLADLAQGSIKQSKWLALAQAVRGCVRPHDLFMLDLHLKTLDGLDEQIRRIGARIEEVMPDPFREATRRLETMPGVSRRVAETILAEIGVDMSTFPSPGHLISWAGLCPRMDESAGKRRSTRIRKGAPWLKPVLVQAAWAAVRKKEGYLRSFFFKLKARRGPMKAIVAVASKLLTAAYFILKDKVDYHDLGAAHLDRIDKERASRNLVRRLHRLGFEVELRPAA

SEQ ID NO: 483876 - protein, 346 aa, unidentified
MRDNSEVFEILVVGIDLGKNSFHIHGTDAKGHVILKKQVTRTGLVRLMSQLPPCLVGMEACGGSHDWARRMLKMGHDVRLMGAQFVKPYVKSNKNDFSDAAAICEAVTRPNMRFVPIKGMEQQDVQSIHRARSLAVSHRTAHANQMRGLLMEYGIVLSQGMASLRSQIPDILADADNDLTPIFRELLYQLADEVRRLDERVACYDLQIRQLAEQSDACKRLMSIPGVGPMSATALVAAVTDAKAFGNGREMAAWLGLVPRQHSTGGKPKLLGISKRGDSYLRKLLIQGAQSALRGAEKKTGRQNKWVCELSKRRGRNVAAVALANKNMRTAWALLTKHECYQPVIG

SEQ ID NO: 483877 - protein, 372 aa, unidentified
MEERSKIHVGLDVHKDSISVAAAEPGRAPGRLIGKVTHDVSKLLKVLAKVGTAEQLHIVYEAGPTGFGLQRALKIRGYICEIIAPSQIPRRPGDRVKTDTRDCVQLAECSRAGQLSAVWIPDPDDEAIRDLSRAREDAVNSRVQARHQLKGFLLRHDVRYTGKTSWCGAYYRWLGTLNFGTGAAQTAFTEYWQAVTAADDRVDRLTKALQTSIAGWRFEPVVCALQALRGVAAITAIGLVAEIGDLGRFAHPRKLMGYLGLTPSEHSSGERTSRGSITKTGNAHARRLLTEAAWNYRFKARICKQAQVRQQDLSEPIRRMAWTAQLRLTQRYAALNARGLQANKACIAVARELAGFVWAIGMQAQREKFEST

SEQ ID NO: 483878 - protein, 456 aa, unidentified
MSNYYLGIDVSKGYADFIMLDETKQIVESGFQLDDTFEGHHQLFDFLTKFFTDHQAAGVYAAVESTGGYENNWFSSLHKFQETFQLKVARLNPSGVNHNSKAGLDRIITDKIAAKNVAQYLIAHPEKVSYHAVDYYYSLRRKWKFIKSLVKEKTKLFNQLEKMLYETNPDILTYCKDGVSQWVLKLLQVFPTATALAAASIDTVAQIPYLSKTKASKLIERAKVSIAAITDDLAADTIMTIATEILRLEQLIDQQVKLITEYCPLPEVTLLKTFPSFGDFSAIGLLIEIGAVERFGSVKQLASFFGLHPVYKTSGDGTRCVQMSKQGRKEPRAILFMVTMTAIRHNPLIKEIYLYNLCKGKAKMDAIGICMHKILRIVYGMLKNKQPFDPEIDRKNREKQLQSKPAIQDDRRRRFQKNDENAPISRRQNKKRNEKKIIQTEHIILNQVKLPPLSLN

SEQ ID NO: 483879 - protein, 420 aa, unidentified
MPDDRCRLGSDDVVIGLDLASVEHQVVVLTADGQRLTRFKIPHSRVGLEELLRRTMPAALSRTGGSRVFAFEATGHVWEAVAYILRARGERYVVINPLTTFRVREARQLSREKTDLTDAEQIAELCRSGLVTRTQLEARPYLALRRAWGEYRRLREERARLKVLVAHQLYGLFPEFLRVWADLLQPGALAVLRTGLTPATMAALSLGEFVARVREHRAGRRVWRFKLAQVHRYAEQTIACPDGVDVLAREVQRAVARIDVLTAQMTTVATEIDALLADLEETPYLRTIPGLGWASVAGLLAHVGAITKYRHGRQLIKLAGTNPSRRDTGQTVGRGQTMSRRGRAGLREVMYLATISCLQHNPRIRAHYDRLIQRADRPLSKMQALGACMNKLLLYAFAVMSRREAFQLDHDWQRTMSRVA

SEQ ID NO: 483880 - protein, 409 aa, unidentified
MATEIPSVIVGVDTHSDTHYVAIIDEHGKHLTAEEFLAVGSGYRKILSFITHFGLAIGVGVEGTGSYGAGLSRVLRTAGLPVYEVNRPNRQARRLRGKSDPLDAYQAAESVLAERGTSTPKTKDGPVECLRVLRAARSSAMKARTIAINQIKGILVSAPEQVRSRFRGLTSAQLIPALERSRPMGNLTDPDTATALTLKKLAGRYQFLEREILDTDKTLAEILRDCAPLLRDVPGVGIEVASQLFVTVGDNPERIATEAQFAALVGVAPIPASSGTTSRHRLSRGGDRAANAVIHHVVVSRLGTDSRTREYAARRTAQGKTKKEIMRCLKRYVARELYRQLTNPHAAPAVTDLRPAREDLHITLREAAGQFNTWPGTLSRIERGLNRDDDLANQFRTWLHEQKETQKIN

SEQ ID NO: 483881 - protein, 407 aa, unidentified
MGITCGVDWAEDHHDVVVMDDLGMVLEGRRIDAGVDGYTDLLALIADHGGSAADTPVALETDKNLLVLALRAAGFTVYPINPRAVARYRERHYQAGKKSDHGDASVLADILRTDRHQHRPLPATSDHALTIKALARQHQEAIWALHQTTSRLRSMLLEFYPQALKAFPNLNHKAALTILAAVPTPTAAQRMTSRRVVALLHRCGRRNDPDLVARILTELKAPALRQPPSVEEAMGLAAKTLIDILTQMHAAVASLNDALAEQFSQHALAPVLTSAPGLGTVLAARILAEVGDDPHRFKTPASLRAFAGTAPVTRASGRSSYVKARKVRNKRLRDACHWWAFSTLTKSPGARAHYDHRRTIGDTHNAALRNLANKLLGRLWWCIQNQLPWDESAAWPTASSCSQAAAA

SEQ ID NO: 483882 - protein, 429 aa, unidentified
MNYNTQNAKIASITEKTLIVGIDVGSETHYARAFSWRNYEYSKKPFAFSNDEAGFAAFKEWMDDIAEKHEMEVIIPGMEPTGHYWLNLGAYLQEQGMKPVHVNPHHVKKSKELDDNNPSKNDRKDPKTIAGLVNEGRFSYPYIPTGIYAEIRNLSNLRIQTQEEITRIKNRMARWFSIYFPEIKDVYRNPDAVSGLMVIKQAPLPCDIKELGVDGVNKIWRDARLKGAGIKRATTLVTAAEHSIGNTEAPRSARKEIRNLLNDYEIYKNRMDELMEEIKETLSEIPYIDKLMEINGIGIKTVSCVIAEVGDIGRFDNPKQVQKLAGYAIVADSSGKHNGESRISHRGRKRLRYALYEAAISVIGKNKEFKEIHSYYRTREKNPLKKMQSVIAVACKLIRIFYTILTKGVDYDGQRMLADIVRPEMQLAA

SEQ ID NO: 483883 - protein, 478 aa, unidentified
MDEIHYIGFDVHKKTIQYCIKRADGTRVQEGRIAATHAALAEWAAQRTVPWKGALEATMFSGWIYDALAPHALELKVAHSALLQAIAAGKHASDRLDAATICDLARANLIRGVWMAPPELRALRTLLRFRALLVRQATQTKNRLAATLMERGVEYSKSRLHGRDYFEQLLAGLQQQPAGVRTVLRLGRGGVAQLQRLQGLILKSLETHPQLAERVRLLRTIPGVGQVTALTWALEIGDPQRLASAGRAMSYCGLVAPLQESAGKKYRQPLSKKRNPHLQTVLIEAAHLAVRYHAGLRRLYDQTKQRKHSGAAALAVARKLVSYLLWVDRHRQPFQMPPPPPEQAPGAASAQTAAGSAQPLHSAPPTAVAVPQPAAAPLAPAPDSAAQPAAAPPAPAPDSAAQTATAPPAPALSLPPGTTTAPPAPPIGHAALARRSSPSRVRSAAAAAPAAPWTAAGRRAQKPVKMGGAARPAPRPLG

SEQ ID NO: 483884 - protein, 407 aa, unidentified
MYVVPGVLQNGDLLILCTRIFWGVDPTFSGVITPGHRHFAKLQLYLGIDQHRKQLTVCVRNEQGDVIFRRQVSTRWEQVRAFLAEIREKAGEAGFVVILEICGFNDWLVKLLNEYGCSKVLLVQPEGRSKKKTDRRDANALSELLWVNRRRLLEDKRVQGVRSIHWPTEDEARDRQLTELRKRMGQLRTRSINRVKHLLRKHNLEQEQPAKGIDTITAKKWLEKLPLPPMDRLEMDLLLAQWKLWDEQIKALNEEIAKRQAVNKTAMAIATVPGCAAYSSLALASRIGPIERFARPSSLANYWGLTPGCRNSGDVTDRLGSITKQGSATARFILGQLVLHVLRRDGSMRAWYGRIKKRRGSKIARVAVMRRLATILWHMVKNNEASMVGGPPRLKLKNQRGKQRGEP

SEQ ID NO: 483885 - protein, 408 aa, unidentified
MAANELPIILSCGCGLDVHKDTVVASIKGTDIPSQTKTFATFTDDLYSLVGWLQGYGISHIAMESTGVYWKPVYHILEEFFEIMLVNARHIKNVPGQKTDKKDSEWITKLLLSGLLKGSFVPDQSIRELRFLHRHRRKLMGMRTAEKNRLQNILEDANIKLASVVSDVFGVSGMAMVESMAQGQTDPLVLAALAKGSLSRKKALLIKSLTGKLTEHHQFMLQFVLQSINHIDDQIAQLEARMDQYTLQYREQMQLLQSIPGVSRQIATGIIAEIGVEMEAFPSHANLASWAGICPGNNESAGKKYSSRTTNGNKYLKTTLVEAAWAASRSKVNPVLADKHRKIAIRRGQRKATIAIAHKILIAAYHVMRDQEPYQPHTQDCAVLEKRRLKRIERLEKQLSSLKNTSYN

SEQ ID NO: 483886 - protein, 355 aa, unidentified
MDTAKYIGMDVHKETVSIAVLNSSGKLVMESIVETKAITIVQFVRGLLGDLHVTLEEGTWAAWLYDLLRPHVRQVLVCDPRKNALLKAGNKSDRIDARKLAELLRSNLLGAVYHGEHGVRALQELSRTYLAVSGDQARVMTRLKALYRSWAIPCAGKQVYAPRYRAQWLGKITETGVRRRAEFYYEQLDALRSLRQQVRRELLAESGKHDASKLLCQIPAIGPIRAAQLIAILQTPHRFRTKRQLWAYGGLGIETHSSADHRYVDGQLQRSKRQVSLRGLNRNHNHDLKNIFKGAAIIAATKPGPLQQFYDALVAKGMRPEMARLTLARKIAAIALIVWKKGVCFDAEHLKPQTA

SEQ ID NO: 483887 - protein, 333 aa, unidentified
MNKFKHFLGIDVSKDYFDAVVLVAGKKENAIHNQFSNDLKGIKSLVVWLKEQDSDFENTLVCLEHTGMYGKLIVKYLTVYKFTIWVEMSLKIIRSIGVQRGKNDKLDAERIAYYAMKNVDEAQIFTTPRKEIEKIRNLLSLREKLVETQTHLKRNAKELSQFDKEVAKFSATLQKNTLKGIALDLKSIEKQLDTIIKEDENLSRIFKLTTSVIGVGKVTALFLICFTNEFTMYATPRQLACYTGVVPFEYTSGKSVRAKPKVHYMANKKLKKQLHMCALSAITSDPELKHYFERKVGEGKSKMLVINNIRNKIVHRICACIRNNKAFEKRQVA

SEQ ID NO: 483888 - protein, 369 aa, unidentified
MADRITYVGLDVHKESIVVAVAAGGLRGEVREYGRIANTAAALDRLMRKLSGEGVGLRFCYEAGPCGYGIQRHLSAHGHECMVVAPSLIPKRAGDRVKTDRRDAASLARLHRAGELTAVWVPDAGHEAMRDLVRARLDAVHALRRARQQLSGFLLRQGCHYRRPAWTKLHRRWLAGLKFAQAVHHIVLEDYIAAVEAAEARRNRLTAQIEAMLPDWTLAPVVAALQTMRGMALVNAAALIAELGDLSRFANPRQLMAYLGLVPSEHSSGASIKRGRLTKAGNSAARRLLIEAAWSYRFPARVSRELLLRQESQPKLIRDIAWKGQLRLCARYRRLARTGKPANIVTTAIARELSGFVWAIARQVTVTTD

SEQ ID NO: 483889 - protein, 409 aa, unidentified
MMKQNIIFGIDVSSKSSTVCVVIDRIKQGETFKITNDSFGYQDLLDRLNQYLITPLVVFEATGVYSLSLQAFLEDYHIKYLKLNPLKAKKLMDNNLRHNKTDKVDTYRLALIQFNAPQKLRAPQPKEYHELQNASRYYEELTQALIINKNQLHRNLQSTFPQIESILSTSSGRVYWTIVSLFPHAQYVLNHNENQVFQSLLAISGIGRQRAHYLTTRLYALARQAYPYDNESSITIRAIQRNIANLLSLSAERDNVINYMEKLAMQANARSLNIYESIPGIAKTTAVRLVAELGDLRRFDTSAQIDAFVGIDPGRYQSGEKDSHLGITKHGNHLARKILYRTITQMETVKATQPCHITDYYDKKKRSSNSRGYKKIAIASVHKLIRTMFALIKHDQLYDYNVATHNQRL

SEQ ID NO: 483890 - protein, 405 aa, unidentified
MYSVGIDVSKGKSTVCVLTAFGEVVRPPYEIAHTELDMKGLADLIKSFGGGDDIRVVMEATGSYSIPVLYYLLGQGIFVCQVNPLAMKRYRSDFNFRGVKTDRIDSLSIAQYGLDKWQDLHAYQRADGTYEALRSLSRQYLSYQRAHVLLTQNLDHVIDLVMPGIKEEFKGYDPITGVDRMSEFLEEFWHYGYIVSLGAKKFEERFGRWAKKKGYHPRADKPTTIYQIAANGIPSIACDLTTKSLVLHAIEALKGLNHVLYEILAQIRGLAEQRPEYSAVRAMAGVGDVLAPLLIAEVGDPRRYYAGKALIACIGIDVPPYESGQFKASERKISRKGSKQLRRLGFLVVKSLYKLKPTNDRAVYDKLIQKRAEGKPPKVAIVAAMNKFYRIYYARAMEAYAQLDQ

SEQ ID NO: 483891 - protein, 358 aa, unidentified
METQLSDVRFDGQVFNLGLDVHHRSWKVTIRTAGTEVRTMTMPPDPRGLHTHMVKNYPGGIYRSVYEAGFSGFWAHRQLVDLGIANIVTHAADVPTTDKERRQKEDRRDSRKLARGLENGDLIAIHVPDPAIERLRSLCRLRERSSSHMRRLKNRIKSFLKYYGIPVVEDSAYRCWSGAFLTRLEGLCSEPGPHSDCLLITLEALREESRRLALIVRKLRAHCREGEAARITRLLQTIPGIGPKTAFMLYTEIQDISRFANIDKFNSFVGLIPSTDSSGENEKATGITPRRNRVLRSLLIETAWVAIRHDRGLLRDFSKLTSRMKKQEAIVRIARKVAARVACVWRTGTPYKPIVPIG

SEQ ID NO: 483892 - protein, 343 aa, unidentified
MKVTTIGFDLAKNVFQVHGVDERGHVVVRKQLRRDQVAVFFANLPACLVGMEACGSAHHWARKLQGIGHRVRLISPQFVKPYVKSNKTDAADAEAICEAVARPNMRFVPIKTMEQQAVLSVHRVRQGFVKARTAQANQIRGLLTEFGLVLPQGISNVMRGVPQLIDVATDLPASMRQLIARLLENMKVLDRQVKELEAQIKAWHQGSELSRKLEKIPGIGPLAASALVASIADARSFKNGRQVAAWLGLVPKQDSSGGKPKLLGMSKRGDTYLRTLLIHGARSAIVAAQRRGKPNVWLSGLLARRHPNVAAVALANKNARTIWALLAHEREFRPDYVPRLATA

SEQ ID NO: 483893 - protein, 347 aa, unidentified
MKFYTNQHKYYCGIDLHTRKMYVCILDEKGEIREHRNMKTDRDAFLKAIAPFREDIVVAVECIFSWYWVADLCHNEGIPFVLGHALYMKAIHGGKAKNDKIDSQKIAALLRGGMIPMSYVYPEKMRATRDLMRRRNHLMRKRSELFAHIQNTNSQYNLPDPFGCISRPQQRNGIIEQFEHPSVQQSIAVDIEMISSYDGILSQLEKSIINMANHHDPVSYALLQTIPGVGKIIALIILYEIENIRRFASVQDFVSYSRLVKCAKESNGKKCGSGGSKIGNAHLKWAFSEAASFFVKNNDPAKKYLDRLINKHGKSKALSIIAHKLGRTVFFMLKNKEAFDQQKFLNL

SEQ ID NO: 483894 - protein, 415 aa, unidentified
MALKIVYKICCGIDVHKTFVVACIASTNSKGVTTYESHRFSTYTSGLKNLLQWLLDRNCRDVCMESTGKYWIPVYNILENDCSIILAHPKYVKAIRGKKTDKKDAKWIADLFKHDLVAGSFMPPADIRQLRDLMRYRFKLTCFKSSEKNRLQNCLTVSNIQLGNVVSDTFGKSAQAILDKILENPADTSFDLEPLVFRSLKKKLPELRDAIDGFITPEQAGKLKVIKGHYEDLESRKSELEELILALAAPYQQELAILQTAPGISSTFTAIGIISEIGTNMEAFPSAKHLCSWAGLSPTNNESAGKKKSVRVSKAGCYIKPLLVQCANAVVTSKKHPEIRNRYLRIKKRRGHRKAIIAIARMLLTALYHMLKNGENYNAELYRKSDLPPVDREITVEQALIIARNQGYRIKSATA

SEQ ID NO: 483895 - protein, 341 aa, unidentified
MNESTLSDFDAVVGIDVSKKKVDLVLVRGGKSNSKVFANNAPGHAQLGRWLIERGCSHEATHVCLEATGPYSEALALALVDARWKVSVVNPARIKGFAQGELSRNKTDQADAGLLARFCAAMRPSLWEPPSAAQRQLRAWVDRVQALKDMRQQELNRIEALQGAEQDALKAHVQAHIAWLDEQIGALERDIDDHIDGHPQLKNDASLLESIPGLGATTIAKLLAYAGDLRRFRSAKALAAFIGVSPRQRLSGTSVRGRAMMSRTGHKALRRALYMPSLVARRHNQALKTFADRLASRGMAPKAVIGAVMRKLTHLIYGVVKSGMPFDIVQAMPKLDTQDGI

SEQ ID NO: 483896 - protein, 342 aa, unidentified
MGYFAGLDVSLEETAICIVDDAGHIVREARAASEPEALVAFFAACGMTMERVGLEACSLTAWLHAGLSEAGLPAICIETRQAKAAMGAMPNKTDRNDARGIAQIMRTGWYRAVHVKSPACRSWRALLSARRMVLNKRRDVENGIRALLREVGLKVGTPSRKDFPARVRDLAAGDPVLASLAESLLSVIEVMTREVERLTKRVLDEVKHEPTCRRLMTVPGVGPLTALAFRATIDQPGRFRKSRDVGAHLGLTPPRYQSGETDVQGRISRCGDELARTALDEAAHSLLIRSSKWSALRAWGMAIAKRRGMAPARVAVARKLAVILHRMWADGSEFRWGKQAAA

SEQ ID NO: 483897 - protein, 342 aa, unidentified
MDHFAGLEVSVKETSVCIVDDTGRIVREAKVASEPEALLQVLTNPVYHFKRIGLEAGPLSQWLFSALAEACLPVICVETRHMRAVLQAQINKTDRNDARGIAQMMRVGLYRPVHVKTLRSQKLRMLLTHRKLLQSKAIAIENDLRATLRNFGLKVGMVGTVRFEARIAELVENFPDLAALVEPLLIVRRVLREQMVILHRRLLAIVRDDEVCRRLMTTPGVGPVVALTYRATVDVPARFRKSKAVGAVFGLTCSKYQSGEIDRNGRISRCGDEMMRVMLYEAAQSILRSKKWSWLKAWAMQIARRRGMKKAIVALARRLAIIMHRIWVDGTEFRWIREVAAA

SEQ ID NO: 483898 - protein, 358 aa, unidentified
MDNVKSSKLDCTGQPIYVGLDVHKKSWSVSVFSRYGEYKSFTQPPQVDTLVNYLKRNFPGGEYHSVYEAGYCGFWIHDRLKERGINCIVVNPADVPTKQKEHQHKRDRIDCRKLARSLCHGEMEGIYIPSPAMREDRTLVRTRQAFVKKRTRCKNQIKGMLLFYGIHLTEEQTYAPWSGSFIKWIESIRMERESGNTALKAHLEELAYLRQLIATVNRAILKLARSEEYAIPVNVLKSAPGVSTLSAMILLTELCDMARFASLDSLCNYVGLIPAIKSSGETEYVRGITPRRNAHLRWILIEASWVAVRKDPAMMMAFTEYCKRMRKNRAIVKIARKLLNRIRYILKHQTPYVPCVTE

SEQ ID NO: 483899 - protein, 356 aa, unidentified
MDQLTTVGIDLAKDVFAICVLDATGAVLQRRVLRREAFTRWAEQLSPCRVAMEACASAHHWGRWFAARGHTSRLIPAEFVKPFRLSGKNDAADAEAIAVAARQPTMRFVAIKSVEQQAILVWQSVRAGWHEERTALLNRTRGLLAEFGVVIARSADRFLDALPTLIEDSRLPDPVHAMLLEVREQLAALNLRLARCDQQIAAHARSSDVARRASELLGIGPVTSSALAATVPDAKIFRNGRQFGAWLGLTPRQHSSGGRTRLGHFSLRGNVYLRTLLVQGARSTLQSALRADPTHASRLQRWIRQLHERKGYHKTLIAIANKHARMLWAMLAKGERYDADAWQRHPLHPRLPPAAV

SEQ ID NO: 483900 - protein, 453 aa, unidentified
MKLLYRCCAGLDIHRDTVSACVRRRVRGSAEATIEEEVFGTFSQELERLRAWLKQHKVRQVAMESTGVYWIPVWNVLEGGSLILTLVNPATVRALQGQKTDRIDARRIAEYLQYGLLRGSFIPPKPIRQLRELTRMRVQIQQDRNRVINRIARLLETVNIKLASVASNIVGKSGRAMLRLLASGVGDAEQLAELALRKLRAKMPELILALDGRPDAHFCWMLSELLSKLEGLDTELAQLDAHLTDVAAPHADVLRRLATIPGVDLTTALVLVAEFGVDMTQFPTPGHLASWAGVCPGNAESAGKRFSGRTRKGDRYVRRILVQSAWAAARTKDCFLAALFFRIAQRRGLKKAAVAVAHRILIIAWHILAEGVEYRERGGDYFDRRHPERAARKLAKRLENIGFEVTLVRKKYAALRPPKPTVDPAECPRCARWGAPRCICLRKHKRKPAPAPK

SEQ ID NO: 483901 - protein, 346 aa, unidentified
MMIIGCDYHPSWQQICWLDTATWETGEKKLEHASGEAERFYRQLPAPALIGMESTGNCQWFIEMAAKLGHDVWIGDAAKIRACEVRAQKHDRRDAALILKLLREGRFPRIWIPSGEEKDLRQLLIHRYKLVRIRAQVKTELQHLAMNQGVTKKRKLWSKAGEQVLRELPLKPWASRRREDLFRVREMLNGQIDLLDQAVVEVAEKNEKARLLMTQPGVGPITSMAFVVTMGDVNRFQRGKQVASYLGLIPREYSSGGHQRFGSISKQGNWFLRMLLVEAAQGAVRYDPGFRNEYLHRCHTKAKGVAKVAAARKLAVRLYWMLRTNTGYPEIVRAESSSRVPLVSAS

SEQ ID NO: 483902 - protein, 437 aa, unidentified
MNFAKLNQKKQMVKNKLAIGLDLAKSTHLVSFMLPDGMLLGKPFKMGQDRASFDKLWADASAVQQKHGLDGIVMAMEATGSFWEPLAHHFAGYPTVDLVFVSGLVMKRSRQVMDLCSTKNDPKDSYLIAQLAQEGKYLPMRLPRGVWAELRGLGNLRFDLLKARVAFQNRIQAVQDRYWPEREAVLKKCLGKTSLYLYEHCPFPQDILELGVEGVLPLVLTGSNRRRGRKVAEALVEAARDSIGVREGLLSARAELLESVEQCRMLNDQLARIESQLLALVRQTGYAELIASIPGVSELGAACLLGEIGDPAQYRNAKELVKLAGLNLVERQSGGKPGAKRESVKRISRMGRPLLRHLLYQMAVTTLRHNETLMASYLSLRLESKATVKALVANMCRLLRIVLAICKSRSQFRHRDRAADDVVSLKARLAARRRKVA

SEQ ID NO: 483903 - protein, 413 aa, unidentified
MDKIYDICCGIDVHKKLIVACLNHKRKKELREFGATTRELMELAEWLQKNECEIVAMESTGSYWKPLYNIMESYDLHAIVVNPAHMKAVPGRKTDVKDAEWIAELLQHGLLQPSYIPSKDQRELRELVQYRKSLVGERTRELNRLQKMLEGANIKLSGTVTNINGKSARKILEYILTGNEIDEKKYDEMYEEKLIAHNLKASKEQILDDLKGFMSPLQRRMLKELLQHLDELNVHIENLNDEIDNFMKPEEKQASQVIQDVTGIGNTSAQTIIAVIGTDMERFPSDRHISSWAGLCPGDNVSAKKRKSGKIRKGNALLKSTLVLCAHAAVRHKSSYFHAQFKRISTHRGKKRAYVAVAHSILIAIYHILKDGVKYQDLGAEYYNQFNAERKIHAYLKKLKALGWEPPKEAVPA

SEQ ID NO: 483904 - protein, 386 aa, unidentified
MHDSTDLPFPERTAIRGDSATLFVSLELSRSTWVATSLAPGSKKMSKHTLVGGDGRKLLDLLARLKTRAEQRIAAPVKVVAIHEVGLDGFWIHRLLEANGVESHVVDPASIAVPRRHRRAKTDAIDGETLLRTLMAWQRGEPRVCAMTVPPSPSEEDCRRVSRERATLLRERIQHTNRIRGLLFGQGITNYNPLHKNRRECLEELRTGDGRSLPTHVKAEILREIDRLELVLRQISEVEAERDEMLRPAEASSPAALLMRLKGIGAEFATVLYFEGLFRHFENRRQLAAYAGLAPSPWKSGSIDHEQGISKAGNPRLRTTMVELAWMWVRYQPDSALSCWFRQRVGSERGRTRRISIVALARKLLIALWRYVTHGEIPAGAVMKPV

SEQ ID NO: 483905 - protein, 346 aa, unidentified
MRVLIGVDPHKTSVAIAAVDEATGELLERAGFPQDRAGLRSLERWARRFPERRWAVENAGGLGRYLAERLAGSGESVVDVPPKLSARVRVLSTGNARKNDGLDALATALAASRNERLAAVDHGTASEVLRLLSERREDLVAERTRALNRLHGLLRDLLPGGVAGTLSAHRAARVLRSIRPRGVPSRVRRQLASEVLRDVRTLDRKIADLNERIEAELEASGTALTEIFGVGPILAARIIGTVSDVGRFPTKAHFASYSGTAPVEASSGEKVRHRLSLAGNRKLNYCLHMVAVCQARSDARGGMYYRKKIAEGKSRKEALRCLKRRISDAVFKNLVADSQTPSRSAA

SEQ ID NO: 483906 - protein, 315 aa, unidentified
MTKPLLALNVGVDVGKSQLDLYLLERDRALSVPNDEHAIASLVRRLRRYRLERIVIEATGRLEQPFVRAALAAGLPVVVVSPLKIRRFADAIGQLAKTDEIDARLIARFAAAVKPLARPAPDANAQIIKDLVVRRRQLVSLRTMEKNRRQVMPQELKAGIDRIIKTLDRELKRLEQLIDHAVDQHAPSRHKRDLLTSMPGIGNSVAATLLGDLPELGSLNRREIASLTGVAPFNRDSGKLHGKRRIRGGRAHSRTALYLSAMVATRFNPDIKRFYDRLVSAGKHKKVALTACIRKIVTALNAMIRDNSPWQPAMT

SEQ ID NO: 483907 - protein, 356 aa, unidentified
MPVYIGVDFHARQQTISYLTTEDGEIQRLRLDHDLEDPRQQRVREFYLQFTGEVIVGFEAGGYSQWFETMLAEIGHQVWIGDAHEIRLLARRKQKNDKRDANHILDLMVGGRFPRLFRRSAHSQEILRQMGYRHKLVKMRTMAKNSLQAISLGAGLSLRSRLHSERGRARLKQLNLTPATACQADKLIALIDYLTTEADRVEKWLAEQAKTDERVTLLQTHPGIGLLTSLALVHTLEPVERFPNPRKVTAFIGMDPVEDSSADRKRIGAISKAGSRMVRFLLTEAAQVAIKRDEELRSLFNRVMKRRNTPKAIVAVSRKLLVRSFIMLRDRIDAEEFLRRGVEARSSRKAHGPSNA

SEQ ID NO: 483908 - protein, 426 aa, unidentified
MKYTQNERIMQITEKTLIIGIDVGSEKHYARAFNFRGVEYGKLLIFHNDAEGFTMLEDWIRKLAEQNGFKDVTVGMEPTGHYWFNLGEHIKGKGMRIVLVNPHHVKKSKELDDNNPSKTDRKDPKTIAMLVKDGRYMEPYIPEGIYKELRTLMESRWRITKELFAIKNRIRRWISIYYPEFTKVFVDWEGKAAMLILKECPTPAKVIEKGIDGIIAIWKEHKIRAVGRKRAVMLLEMARLSIGTKEGMISAENELQMLLEDYGSKKRQYEKTMELVERLAREIPGFEEMLEIKGVGLVTAAGFIAEIGDVSRFSHPKQIQKLAGLSLKENSSGKHKGKTTICKRGRKRLRYYLTFGMMPLLSKNEEFKALHEYYTSRKENPLKKMQSLVALSNKLIRIFYVILTKNVAYDPQKMMSDIRRTGVKAA

SEQ ID NO: 483909 - protein, 245 aa, unidentified
MNKDIKYFGIDISHLVFDVTDSQGNYYQFKNSISGFKKFVKLLSINSHCVMEATGYYHYQLAYYLLECGMKVSVENPLAVKRFIQMKLSKIKTDKSDSKLICEYGKQVELKLWKGTSKHQTECLQMTRLLAVYTKQSTMLKNKLHGEAVLGNPSKIVVSSLKRSLKQVQKEIKTLEDKLLILVKEVHQDLLTRMKTIPGIGSKTSLMLVVLTDGFKRFKSGSELCSYAGLTPVIRKSGSSVNGRS

SEQ ID NO: 483910 - protein, 316 aa, unidentified
MNGAKLTWVGIDVAKATLDLHLLPSGQAHSLANNNAGHQQLRKLLPDPVGCLIVLEATGGYERKVVADLLDAGYRVAVINPKRVRDFARALGLVAKTDRLDARVLALFAEKVQPPSAQKTPENQAEIQQLVARRRQLIDLRTMESNRLEITPSKAARKSIQAVLKILERQIDGIEAAIEKLVESDDDWRQKTQLVQSVPGLGGVTATTLVADVPELGQLNRQEISALVGLAPFNRDSGKHQGKRSIGGGRKSVRSVLYMAALAARRCNPIIKAFADRLTQHGKPFKVVLTACMRKLLVIVNALVKSGQAWNPKLAS

SEQ ID NO: 483911 - protein, 341 aa, unidentified
MAITTVAHPQLARITVGVDTHGEVHVAHAKDGLGRRLATVSVPTTPHGYAGLLAWARGLGQVEAFGVEGTGSYGAGLARFLHAAGQVVLEVNRPDRSARRRHGKSDPLDAEAAARAVQAGEVSVIPKTGDAIVEMIRSLRVVRATAVKARTQASNALKGLLVTAPPELREQLRELSTIQLVRAAARLTPGTLDTPLAAAMLALRTLAARHAALTAEVKALETELDRLTARAAPGLVARFGVGPEVAGALLVAAGDNPGRLRSEAAFSMLCGSSPIQASSGKTTRHRLNRGGDRQANAALYRIVIVRLRHDQRTKDDLARRIQQGKSKREVIRCFIGRVSVL

SEQ ID NO: 483912 - protein, 407 aa, unidentified
MIRSVGIDLHQGRHRARCLDDRAQPCDSFSFQTTPEGLATMEERVFRDGANPIVVLEPAGLPWLMVAVYLRSRHPDCRLVKAKTQKVAALRRYLRGPVKTDRLDALTLAKMPFIDPEKLDDIYLPPAEIHALQRLTRQRKRIEQDITGRKVRISAIVDGYLPGVRRAFNDVWSSPVRAFLRSRLNPFAVVRDGEDALHAYLSKASNRSKWSRAQTQEVFLTCRSVATVCELSVAAGTVNEEFFKDLQDEIARELRMLEADEAEAESLARRIAELYQKLHPSDNLCSIPGVGEHTAPIFLATVGDPARFQNQSAFANWEGVVPGARQSSDVQAKGLRMTKAGPSIMRMALYQAGDIGRRWDPQLAAVYHREMVYQGKNHRQAMGAVMSHLGARVLRVLKEDSPNELRY

SEQ ID NO: 483913 - protein, 296 aa, unidentified
MASMHDSARFKTTVYAAIELSKKSWVVAIARPDRDQPSIHRIAGGNLADLIGRLRKAAGEKQRIVVCYEAGYDGFWLARSLAKIGIDCRVLDPASIQVNRRARRVKTDRIDSLALLRALIAIDRGERHVCAVVRVPTVEEEDARRSHRERQRLVRERTGHINRIKGLLFAQGIRGIEPKRRRTRIDFGKLTTAEGRPLAERLRRELEREYQRLELVQSQLRIVEKERDTADAQDPAIERKRELLCALQGVGGASAAILAREVFARPFASRRQLGSYLGLTPSAYDSGSTTRCQGIS

SEQ ID NO: 483914 - protein, 412 aa, unidentified
MKRVSRRVGIDWGSESHQVCRIDGEEQPKQRAFPHTREGLSALVAFVVEGEIDPEQVAIAIEVNHGAVVEALLAKGSRAYSINPKVLDRLRDRFSPAGAKDDRRDAFVLASCVESDAHVFRRIEVGNEENTRLQAATRLREDLKSDLRANANRLWDALREYRPALLALCPGADEPWLWVLIEKAPSPSEGAKLTRASIGAVLKKHRIRRLTAEEVRTVLRGDILPLSSIYIESHVARVLVLIARLKLAQAQIATIERQIQTALAERVKSEEQTERRDLTILLSLPGVGPFTVATALGESGDAFERRDYNALRSASGAAPVTKQSGGTRHVVMRQVCQPRLRVALHISALQAIRIDPKFHDLYVRARARGQSVGRAIRNIVDRLLFLAVQLLRKNQLYDIELRQLAPEVVAAS

SEQ ID NO: 483915 - protein, 336 aa, unidentified
MIIIGCDYHPGFQQIAFVDTETGECGERRLEHREEAEKFYRDLGAQGATVRVGMEASGHARWFERMLSELQFELWIGDAAEIRAKRVRKQKTDRQDAQLILRLMLEDRFPQIWVPSGENRDLRQLLWHRHRMVQARTRIMNQLQAVALNEGLRCKKRLWRDAGREQLESFKLAPWASRRRRDLLELLDRLTPTIAELTQAIEQEVEKCPEAQRLQTHPGVGALTALAFVLIIGRAERFQCGKQIASYLGLVPLEESSGQRRRLGHITKQGNSLLRFLLVEAAQVTVRSDQEWRSKYFHLALRRGRKIAKVAMARRLAVPQFNYAICVLARFIWPWR

SEQ ID NO: 483916 - protein, 347 aa, unidentified
MAFIGVDLHSNSFTVCRLQPDEPETFETYQLSEADIDRFCQSVDADDQVAVEATGNTAWFCGEIRACVGRIVVVNPRKFQVIRKSVSKTDRNDARALAFFLSKDMLPEIRLKTVSEAELGSLVQTRDVLVKSRTMLINKIHAVHLRRGVKLKKESLTTRKRLRELDLSPFTPLEQVELGALRDQALSLSETLVGLDREIEKAASALKGFEELSSIKGIGSRSAAILLAGIGNIDDFESADKLAAYFGIVPRVSQSNDTDNRGRITKRGDKPVRTTLVQCTLIAKRYSGYLNTFYQRIKARRGSGKAIIATARKLLTIIYDTLKNGWIFEDFPTFKIKENQCPAGQPS

SEQ ID NO: 483917 - protein, 455 aa, unidentified
MQAARKSNDPRGYGLFPLRTLQTHPCSNSKTVDFTCTATKCPGRPSDVEIDSEYQFERRRFSSSPEQLRSLAAWLLEQEAEEVVMESTAQYWKPVWEALERYWKPICETREGARWKSGTLHLAQTLSNRGRRGRKRDFPDAERVVKRLVAQELTLSFVPDVKQRLWRTVTRKKYQLRCERIRLQNQLESLLEEAHIKLSSLVSDLLGFSARRMLKAIAEGETNPATLAALADQRLRATPEQLCDALGACTELNAVYRRLLMMALEELRLIDEQIGQLDQEMASLLSAHQDAVQRLAEVPGLGVDSAQQIIAEVGPTAATFPSQKCLPSWVGACPGDDESAGVNYSRRSPKGNRHMRRLLNQAANAAARAKGSLFEIVYRRSVPRLGHNQAIGAIAHRQCRLIWLILHQGVRYQERGPAVTKRSKQPRTWKMIRQLRSLGYRVEPPNPQPSQAQAQ

SEQ ID NO: 483918 - protein, 428 aa, unidentified
MSNQEIIRRKQFCQIVKEIRGSDEYLVVGIDVAKDKHHAFMGTAAGKSLLRRLVFENNIEGFTRLLTTADEIKSQNGLSKIVYGIEPTGNYHKPLAMHLIRCDSNVVLVTGQAVKNNRGLLDGRWDKNDIKDATNIADLVSRGRCVYYDCPSPSIIEIRSLLSLRRRLKREEHGLRMRIRNNLLAQYFPELDQFYSACESESLSIIRYFPDPDTISAMEFGEFFHLVTRTRRGTAQTLRLRKIHGLAIESVGCPMGPAGEYEADLLVEKLNQVREQIKKTADLIKDFCLEFDEYSYLLTIPGFGPYISARVLASIGDPFRFENRKQLIKMAGYDLCANRSGKTSDKAIPIISKKGNGELRYALYQAAKVASSRVDLFRTYFTRLLRGRERERGIKTKMCVKLAAKMLVIAWTLMKKREPFDPAYLNIE

SEQ ID NO: 483919 - protein, 346 aa, unidentified
MKVLIGVDPHKASLAVAAVDEATGELLERASFPQDRAGLRSLERWARRFPERRWAVENAGGLGRYLAGMLATSGESVVDVPPKLSARVRVLSSGNARKNDGVDALATALAASRNERLAAVDPQDSSEVLRLLSERREDLVAERTRALNRLHGLLRDLLPGGVTGTLSAERAARILRGIRPQSSSSRVRRRLASEVLRDIRTLDRKIADLNRRIEAEVEASGTTLTEIFGVGPILAAKIIGTVGSVARFPSRGHFASYSGTAPVEASSGEVVRHRLSLAGNRHLNYALHMVAVCQARSDARGGTYYRKKIDEGKSRKEALRCLKRRISDAVFASLVADSQAHSRSAA

SEQ ID NO: 483920 - protein, 443 aa, unidentified
MARKNQKRFEIIHHHCAGIDVGLREHWVAVDSGRCDSPVRQFSTFTDDLIALADWLQSLSINVVAMEATGVYWIPLFEVLDARGFEVYLVNSRATRQTSGRKSDVLDCQWIWQLMTHGLLSGAFRPSDEICSMRSLVRQRANKVCDQAKSINRMQKALSQMNIQLAQVISDITGVTGLKILRAIVGGERNPEQLATMKDGRIKADQATIARSLHGNWRAEHLHALSQELACHDFLETQIAECDRAIAQALERLPVLEHEPVAPGKPLRSPHRSTDQQQALHRALNKVMGVDLTAIPTIGIDTALVLASELGPDLSRFPTSQHFCSWLGVAPPTRISGGKPLPGKAPKIINRAAQALKQAASNGRQDKSFIGASHRARLTRMDTRCAIKATAHQLARLIYAMLTKGQPYVEKGIEEFEEKSRSRQLRALERKARKLGMQLVKAA

SEQ ID NO: 483921 - protein, 340 aa, unidentified
MDCGIARGLNLSNPRVISPVILKFGVYLMKDVLEICCGLDIHRDTVVACLLKGSIDGLPSKEIRTFSTLLPGLEELKTWLEEEKCYHVAMESTGVYWQPVNAILECAFDGNMVIIVANARHMKNVPGKKTDIKDSEWIATLLRAGLLNGSFIPSQKTRELRELTRYRKSLTEEFSSHKNRVEKYLQSCGFKLSTFLTDIFGVSGRAIINHLAKYGEINPDTVQLYVKGRARIKTEDIKIAVNGKMNKHQMDFLNILLSHLDESEVRVNCIDLKIEEALESFRTQLNKIDGIPGINIVAAASIIAEIGVEMKHFKTSDHICSWAGLAPGNNESAGKKKAHE

SEQ ID NO: 483922 - protein, 346 aa, unidentified
MDHYAGIDVSLESSSVCIVDAQGKIVKEAKVASEPEALIAWFVSQPILPARIGLEAGPLSQWLFAGLKSAGLAVELIETRHVRDAFKAMPVKTDRKDARGIAQLMRLGWFCPVHCKSLPAQEVRALLTARKLLQAKRHDLEMSLRGVLRGFGLKVGPTTPKTFEGRVRDLVAHHGTFGMIADALLKARTVLMQEFKAIEKRLYAFARGDTPTRRLMTMPGVGAIVALTFSSAIDDPGRFRSSRVVGAHFGLTPRKHQSGESDVTGRISKIGDHGVRVALYEAANVILTRAVKGSDLKNWALGIAKRAGMRKAKVALARKLAVVLHRMLADGTSFMARKAAQSALVA

SEQ ID NO: 483923 - protein, 339 aa, unidentified
MNYMGIDHHKQYSQMTLMDEDGKELRNDRVWNFRSEVEKFLQGAGDEVKAVIEAGRSSYTMVDLLEELGVDVKIANPKEVKAIAKAKIKTDKRDSRILAHLLRADLIPEVYQRSGENRRMQRVLRQRAFFVGTMTRTKNKIRVLLAQQKEEIQGEVSRVKNLFSRKGLEALKGLDLPDTDRELLDGLLKMYHQLEERVKESDELVESLYNKIPEARLISTVPGFGKFFSVLVATEIADVGRFSRVEKLHSYAGVIPSTYSSAEKVYHGKIIKEGNKWLRWAAVEAVWPAVKSDFDLRLFFNKHAKRKNINAAKVATARRLLTIIYRILKEGRCYVPYKR

SEQ ID NO: 483924 - protein, 355 aa, unidentified
MISTKYIGMDVHKESISIAVRNSAGKVVMECVIETKASMILQFIDGLRGDVQVTFEEGTWAAWLYDLLKPHVSKLVVCDPRKNKSMREGNQSDKIDARRLAELLRLDHLTPVYHGEHGLRTLKETVRSYLTITRDLARVKSRVKAIYRSWAISCTGKQVYARCHRAEWLGKINELGVRRRAEFYYQQLDALRALRQEVRRDLLAESKKQKAWKRLCEIPSIGPIRAAVLLGILQTPHRFRTKRQLWTYSGLAIEMHSSADHRSIDGQLQRSRKNVLVRGLNRNCNHDLKNLFKGAAAVASSKPGPLEQFYAALVAKGMRPQMARLTLARKIATIVLIVWKKGVCFDAQHLKPQTA

SEQ ID NO: 483925 - protein, 462 aa, unidentified
MKLLYRRCAGLDVHKASVTVCINRRVKGSAEIETEEAVFGTYTQDLVRLRQWLRERKVRQVAMESTGVYWIPVWNVLERGGGNSPLQRKLVNPASVRALQGRKTDRIDARRLAEYLQYGLLRGSFIPPLAIRHLRQLTRMRVHIQQDRNRVINRIGRLLETVNIKLGSVASNIVGKSGRAMLGLLAEGIERPERLADLAIGQMRQKMPQLLLALEGRPDEHFRWVLTRLLHKLDRLEGELADVDGRLREQMQEYADLIDRLSTIAGIDRITAQVLIAELGTDMTQFPSAAHAASWAGLCPGNAESAGKRFSGRTRKGDRYIRRILVQSAWAAARTKDCFLAALFSRIAQRRGMKKAAVAVAHRLLKVVYSLIAEGGVYRERGGDYFDRRQPAQTAKRLTRRLERIGFQVTLQPKPLDPVAPKDVVPAEICSRCNRWRLAQCIHNVPRPKRKNQSRTATKSEI

SEQ ID NO: 483926 - protein, 348 aa, unidentified
MAHFAGLDVSVKETSVCVVDDAGKVVLEQKVPTEPTDIIALLTSLGVSYGRIGTEAGPLSQWLVSALMAAELPVICVETRHMKALLTAQQINKTDRNDARGIAQMMRVGLFKPVHVKTLVAQQQRMLLTSRKLLQRKLLDLECDLRGTLRNFGLKVGVVSSSRYEARVRELVEGFPRLAAIAQPLLNVRRVMRQQLAILHKMLLDTVRDDPVCRRLMTAPGVGAVVALTYRATIDQPQRFVHSRAVGAHVGLAPKRYQSGETDYDGRVSKCGDALLRTMLYEAAHTLLTHSGKWSWLKAWGMRVAQRRGIRRAIVAVARRLAVVLHRMWVDGSEFRWSKDSAAVPAVA

SEQ ID NO: 483927 - protein, 408 aa, unidentified
MDLTPMHKRVIALDVHQAKITACAVVEHDDGQLEVTKRDFGAFKRDRRALAQWALEIAPEVVVMESTGVYWKSPFAALEAVGIIAWVVNARHVKAVPGRKTDMADAQWLATLARAGLLRASFIPPLQMRQLRLVARQRQKLVGMCSAEKNRLHKVLVDAGIRINVLVADIHGASARAMVKALIAGKPMHEVLDCKGRLRASRDELFEALSTEQFSAVHRFVAEEIMQHIEQIEQRIARLDQYLLEGLQPWQPQLRLLQTLPGIDEQGAAMLLVEIGADMSVFGSAERLASWVGICPGNNESAGKRKTGRIRKGNAWVRRLLCEFAQAAARTRCALKAKFDALAIRKGRKKSVVALAHKMLRTVYAMLTNGTHYQDKEVDYEALNVQRNAPRWIKMLRKHGFIATPATA

SEQ ID NO: 483928 - protein, 340 aa, unidentified
MPSPAVIGLDIAKNVFQVHGADAEGRCVLRRRLRRAEVITFFAQLPKALVGIEACPGGHHWARELRSLGHDVRLIPPQYVRPFVKTNKNDAADAEGICEAVVRPNMRFVPIKSVAQQAAMMLHRTRALLLRQRTQLINAVRGHLAEFGLIARRGAHNIQELTDLVRDTGSDKLPDAARAMLVLLLEQIREVQLRVQKTEHALEAWAKQSDACRRLMTIPGVGIMSATAIVLAMDDPKRFRSGRHFAAWLGLVPRQSSSGERQVLGGTSKRGDGYVRMLLIHGARSLTRWHRESWGWLAGLLRRRPTNVAAVAIANKTARTAWAILARGRQFQPTRRAEAA

SEQ ID NO: 483929 - protein, 349 aa, unidentified
MTTMASTAAAVIGGVDTHSDAHVAAVCDQLGAVLGTRSFPTTGRGYRQLLVWLRSFGTLERVGVEGTGSYGVGLTRVLLASGVEVVEVLRPNRQTRRRHGKTDVVDAVAAARAALTGEAAGQPKSHDGAVEALRLLKMVHRSAHKSRTQALLQIRDLVTTAPDELRDQLRGMRRRELLATCAAFRPAGRDDLVAITKLTLRALARRVAELDEELAELDTRRRRITTAIAPALCAAHGIGPDTASGLLLAAGDNPERLRSERSWSALLAANPIEASSGKVVRHRLNRGGDRQGNSALWRIVIVRMHSDPKTKTYVARRTKEGLSKTEIVRCLKRYVARETFALLPRELLG

SEQ ID NO: 483930 - protein, 350 aa, unidentified
MNLFVGLDVSVRMTSVCVMEVNGKVLKEAKVESEPQAIASLLGSLAGQYRRVGLEAGLLAQWLYSGLAAAGFPIICVETRHMKAALSAQINKTDRNDARGIAQMMRVRLFCPVHVKTERSQEIRMLLTARKFLQLKIIDAENSPRGMLRNFGLKVGAVTRLQFEARVIELIEARPHLTITIAPLLKVRRVLREQYQFLHKAIERLAADDGICRLLMTAPGLGPLVSLTFRAGIDEAARLSRSRSVPAQFGLTPASCQSGELDRGWGISMCGDSGVRWALVEAAGIIMRQKTKSSPLKVWGTALAKHRGPAKALVAVARRLATILHRMWIDNTEYRWQAQPAESVRSFVYE

SEQ ID NO: 483931 - protein, 404 aa, unidentified
MIFVGVDWSEAHHDVCVLDEAGDVLARKKIPDTFEGVRALHEMLAAYVEEPDEVLVGIEKERGLIVVALLGANYRVYALNPLSVARYRERHVTSGSKSDPGDAKVIADVVRTDRHNHREAGSDSENADAIKVLARAHQRAIWSRQREKNALRNALMDYYPGALLAFGNDLDDGDAVEVLAVAPTPALGAALSLAKITSALRRGGRQRNLERTAKKIQAALRAEQLRERPMVELAYGTITGAHVAMIRAYSAEIVQLEVALASDFEQHPDAKIIRSLPGLGMVLGARVLGEFGDAPNRYADAKSRRNYAGTSPVTKASGKFRVVLARYSRNAQLASAADQWAFCSLTPSPGARAYYDELRARRKTHRQALRQLANRWVGILHACLDQRALYDEDLAWKHRVDTAA

SEQ ID NO: 483932 - protein, 378 aa, unidentified
MNASGTALQGKHTVEASKLYMAFELGEKNWKLALSDGVRSPSRYTVSAGDTAALLECIAKTKARCGLAPQARVRSCYEAGRDGFWLHRWLVEQGIDNIVVDSASIEVNRRARRAKTDRLDADKLLSMLLRYHGEEPRVWSVVRVPTPEQEDARRAHRELGRLVHERSAHINRIRGLLVLNNVRVKYVGGRLWQRWWTGHAKELPPGVRAEIERESERLLLVKQQMDTIEAAQRQAVAAGSEAQVARLAQLRGIGMSSGWVLAKELFGWRRFRNRREVAGCLGLTPSPYASGQSETEQGISKAGNRRVRTLMVELAWSWLRYQPQSELSQWFNRRFAGGGKRLRRIGIVALARRLAIALWRYLEDGLIPQGAQLKAIGA

SEQ ID NO: 483933 - protein, 331 aa, unidentified
MSMHVGLDVGSRTTAMGWRNDGRFAGACNIDQTPAGRKAAVNRLLELKPLSVVMEATGIYYLDLAMELTAAGLPVSVINPKSFHNFAKLMLKNSKTDAIDAQLLAEYGERMSPKLWTPPTTIQLELRAIGRHINRLTCHRTRAKNELHALKATQTTVKMLIEDEEEAIEAFDKRIERFRLAGRALIDNCPTLSAQFGHMIAAPGMGEISVFAALAELTTLPVTLKSAQVSRHAGLDVRLTQSGTSIDKPGRISKGGNAYLRSAMYMPALTAIRCDSNVKAFYEALIGRGKRKMQAIVAVMRKYLTGLWACMRAGEDFNTAKLFSAKDLAKA

SEQ ID NO: 483934 - protein, 438 aa, unidentified
MSNKVIFNLDDLFISVGIDVGADFSWMSIALPNQQFVGKPYKILHSSIDSLTTAVSKIKEAEELYSLESRIFLESTGIYHYPLFCYLRDKGFNCSVINPIITKNSTNINIRKVHNDRFDSKKAALVGLKPDLKVSLMPSDLALNCRNLCREYYDLMDNRSAYVNKLQGELRMAFPQYLGIFSKVTINTSLTLLETYTSPSAFLEADKQEIIDIIKSTARFGLTYAQNKYNAIIQAATDANQFGYIIDSNIKRIRLYISFIRKYDEEINNILESLHELVDANEDADFVKQIHLIETFKGAGFLSAVSIMGEIGDFSAFSKPKQLFAYFGLDPAVKQSGKFEGTKVQMSKRGSAIARRVIHTLTLQSISISRNGEAKNPVLREYYLKKCDSKPKLVAMGAVSHKVCNMIFAILRDNKPFKIIAPQEHIKQYNASKCDMAA

SEQ ID NO: 483935 - protein, 387 aa, unidentified
MIKKRGRVVGLDVHPDSFAGAVVAGSDPASAQVSSTSTRVELERLEQWALRHTRTEDTLVLEASGNAFSVAERLRGIGRKVEVLDSHRAGKVGKVYCANDRIDAVKIARIYLSALLPIVWQPDPKTLERREVFSAYQAVVKESTRARQQLRSMLNEHCVRLEKGFRLCHPNALMRLLALREWTPARTMLLQQLHGSLVAARARRTLLRRHMAQEIVAEEALLRLTRLCGINLVTLYGVVAAVGDVRRFSHSKKLVAYLGLNPSVSQSGNFEGSTALKRHGRRALRALLIQSGKKLLQVTNPLQKWGLAVAARRGRNKAAVAVARKLCVALWHVLMGHAIGALERLDTLETKLSKFATEMGPAALHAFGYNNKADFVKKKLYVLRSYP

SEQ ID NO: 483936 - protein, 317 aa, unidentified
MSEILYVGIDVAKDSLVVASAPAGLHCTVPNTPQGHRRLLKCLQDQAIAGVVLEATGGYERDLVAFLLEAQLPVRVVNPRQVRDYARADNQLAKTDAIDAEVIARFAQSIKPPPRPQPPPETVALAELVSRRRQLLDLLTQETNRLPMVRFYNVRKSITKMIKTLKFQIKELDQIILEQIRDSDELRAKDEILRSVPGVGPQTSAMLLSHLPELGRLNRQEIAALAGVAPWDRRSGQWVGQARTWGGRPEVRSVLYMAALTAYRCNPVLRQFALRLKAEGKAHKVFITACMRKLLVILNTMIRNLQPWHHEKPQKKS

SEQ ID NO: 483937 - protein, 412 aa, unidentified
MKIVHEICCGIDVHAKMLVACLILADGKKEIHSFSTMTADLLRLRDWLVAAGCTHVAIESTGVYWKPVFNILEDALTVILINPDHARALRGRKTDVKDAEWLGDLLRHGLLRASFIPPLEIRELRELTRYRQSLVHEQSAVANRIQKVIESANIKLGQVASDALGASGRAILWELTRGETDPVKLASLAKGKLKEKRSELERSLQGRLTPNQRFVLRESLLHWEELERAEGRVTKEIDQYLKDRPKLSQARDNLDSIPGLATRAAENIVAEIGVEMEGNFPSDAHLASWAGMCPGNKSTGGKRLSGRTRKGNTYLRSALVQAAWGATMKKNCYLSSQYARLAKRLGRKKALVAVGHSLLIIIYHVLQSGQSYTELGGDYFDRNHVEQQRDYFIRRLQMLGLKVTIEESSAAA

SEQ ID NO: 483938 - protein, 410 aa, unidentified
MKHQNGVDVSIVPQLDKACGLDMHKDKIVGFISAKDGSGQELKEFTFICELRQVKEWVQNHQVEHCLMESTGIYWMSLYAILIEAGIHVTVANPTHIKQVPKRKTDRKDAKWLCTLLLNGLVRPSFMPTAEQRILRDHCRSRLFYMRQQNKTQNRLLKILESNNIKLRSVISSIKTKSAMDMIRLLAIGVTDKEQLAGCARGQVKRKKDALIKALDGTLAPHHLVQLQMLLQDFDHVQTQLNTLEVIITEITQEHYSLAFECLDSITGIAGRSAQIILSEAGSDMSRFSTADHLTAWCGLAPGNNESAGKRRDTSVKKGNPYLKTAIVTAAWAAVRVKDSYWRALFERLRKRMKVQKAIVAIARRMLKVVHKTLDTLTMYQEKGIAHFVDLQAKAALYHRMKQQWPSTES

SEQ ID NO: 483939 - protein, 422 aa, unidentified
MNESKQFKATIGLDWADQKHDLWIRPADGSKSEHLRLEQSPKALHEWAAKLRKRFDTGQVAIGVETSRGPVISALMSYDFIVLFPINPKALKDYRAAFSVSGAKNDRTDAQLIEEFIRLHSEKLKALQPDTELTRKLSGFVQDRRHLVDERTRIVNQVHSKLKTYYPLAETLIGSEMNSLLAAEFLSRWPDLESLRAAQASTLRAFFYKHNSRSAKKMEQRLEAIKTAKALTTDPGIIEPARELVLALAGMLKCLHKSVARLEQAIELAMDQHPDAPIFRSLPGAEPALAPRLLVAFGTQRDRFESAQEVAQFYGVAPVVIQSGNSELVRIRRRCPKFGRQTFHENASCVAKTEPWGRAYYEQQRKKHDDKHHQACRALAYKLIRIYFSCWKTRTEYKSNTYLNALQKHGSPLHNKLNRIGE

SEQ ID NO: 483940 - protein, 414 aa, unidentified
MESVDRCIAGIDVHKKMLAVVIRKPSEQKVEYIQRKFGTTKNEILHLVAWLQHYQVSEVVMESTANYWRPVWYGLEPHFQLHLTHPLKTRAPRGRKRDFRDARRLADRWHSGDLEESFVPGAEQRSWRWLTRSRVQLKRKLGVIRNQVEGILEEGGIKISAVITDIFGVSGWAMLEKFAQGEADIDELMGEARGRLKKKRAQLEEALVGALQPVYRMLLTQHMEQVRLLWKQVEEINHWLSEAMKDHLPALIRLAKIPGVDLYAAQELLAEIGVRALAFPSGDQFVSWVGVCPGSQESAGINYSHRSAKGNRYLRRLLCQIAWAAIHTKNTFFGTLFARLKPRLEAKGAAWAVAHRVGYVIWLIMHNEVEYQERGAAPLNPKTLKKKLQRIVRELARQGISAKSLLEQEVAAVA

SEQ ID NO: 483941 - protein, 378 aa, unidentified
MRIVCGLDVHKDSVYLCILSSTGEIVEKVFGVLTFQLAKMRDLMLKHHVQEVGMESTSVYWIPIWRILEPHFKLKLVNPYFIKQLPGHKSDVKDAQWIAECMLKELVRGSFVPPERIQQLRQYDRRIFDLDDEINRKLSKLDAALQRCNIRLSNYVSNTDSKSYKEVVARISEGITDPKVLVEEIHGRIINRHGRKTIIAALTGVITQADSDMMRQIREEIDIAERHKQECIDKMQEICEKEYSDQLRNLQTIPGVKLRAATSLIAEIGTDMSHFETANHLASWSGLKPRNDESNKVIKSKRITHGNRYLRRTIVECGWAASRTKGCFFSRFSYHQTQVRKKPKMKVQIAISRKLLICAWHILSKNVPYQDFCEREIS

SEQ ID NO: 483942 - protein, 355 aa, unidentified
MTSTKYIGMDVHKESISIAVMNSVGKVVMECVIETKASTILQFIDGLRGDLHVTFEEGTWAAWLYDLLKPHVSEVVVCNPRKIALLKDGSKSDRIDARKLAEQLYMNKLKPVYHGEHGLRTLKELARSYLTITKDLTRVMNRLKALYRSWAIPCTGSEVYAPRHRAEWLGKISEAGVRRRAEHYYQQLDVLRLLRQEVRRDLLQEAKKHKAWKLLRQIPGIGLIRAALLLALIQTPHRFRTKRQLWTYSGLGLETHDSAQYHVVEGQLERSKKPATVRGLNKDHNHDLKDIFKGAAMRASSTVGPLKDFYEALLAKGRKPTMARLTLARKIAAITLIVWKREVRFDANYLKPQAA

SEQ ID NO: 483943 - protein, 369 aa, unidentified
MTSIIYVGMDVHTTNYTLCCYSIEKDEIFAQTTMMPDSRNIENYLRQVSLRYGDCHFLCGYEAGYLGYSLYNELIWKGIDCVILAPSTMPTTNRKGIKNDKRDAINIAKCLAYNTYSSVYVPTEEDNAVKEYIRMRNDARNALKTVKQQLLAFCARQGKRFTEGRSNWTLKHLAWLKKLDLGNAVLQETLREYLASYHQAADKVGVFDKRIAELAKSESYEEKVNRLSCFIGIKAHTALALIVETGDFKRFATAQHYASFLGLVPGETSSGDSIRRTGITKAGNTHLRSLLVEASNCYSRGAVGAKSKALKERQSGNDPTVIAYADRANERLKRKFYRIQFRSKRNIAVTAVARELACFVWGMMTDNVA

SEQ ID NO: 483944 - protein, 373 aa, unidentified
MKKVSTIVANESRNFSRQQELTPQKLTIGLDLGDRTSYYCVLEESGQIVLEQRVSTTVKALREEFGGMPRSRMVLETGMHSPWVSRLLTELGHEVIVAHARNVRLIGESRKKDDRLDAQTLARLARIDPELLSPVKHRSAKAQADLTVIRARAGLVRARTALTNTARGLAKSYGERLRGCNVRNLNPEKAQRLSPELRKALEPLLAASAALSEQIGEYNERIEQMAKESYPQVALLKQVKGVGTLIALTFLLTLEDAHRFQKSRDVGCYLGLQPGRRNSGQSEPQMHISKEGDPYLRTLLVQGAQHILGPFGVDCDLRRWGLKLAERGGRSGKKRAIIAVARKLAVLLHHLWVSGEVYEPFHHRKPNALAIAA

SEQ ID NO: 483945 - protein, 356 aa, unidentified
MRENATLTAGLDLGDRRSQICMIDESLAVVEESKIPTTRTGMERYFRAREPMRVALEVGTHSRWVSRALEELGHEVVVANPRKLALIYKSHQKTDRADAELLARFGRLDPNVLSPIRHRGPDAQRGLTLIRSRDVLVQARVKLINSVRGTVKAHGARLPTKATDRFHTVSDEIPEDIRESLSPIMACIEKLSEEIRACDKTLEAMANEDVHVEALRQVSGVGPVTALAFLWTIEDPDRFPDGRTVSAYLGLCPRLDQSGAQDRQLPISKVGDPYLRRLLVGSAHYILGPFGPDTDLREWGLAIAARGGGNAKKRAVVAVARKLAVFLYALWKSRATYEPLRQRQRQTCAHAAVSPA

SEQ ID NO: 483946 - protein, 413 aa, unidentified
MLKIVYPICCGMDVHKNFVVACIATTDDKGVTTYKKKRFSTFTCDLRRCASWLAENNCTDVCMESTGKYWIPVYNTLESTCQIVLAHPKYVKAIRGKKTDEKDAKWIADIFKHGLVSGSFIPPADIRQLRDLMRYRWKLTHYTVGEKNRAQNCLTVSNIKLDDVFSDVFGKTASAITDRLLESNEPFDVAPYLSRRVKTPVEKIQAAVDGELCAEQAEKLRIIRSHMNSLDLCKANLESLILSTAQKFLPQLELVMTVPGIQAYSAIGIISEIGVDMSVFPSSKHLCSWAGLTPQNNESAGKKKTTRISRAGAYIKPLLVQCALTVSKSSKHPEIRNRYLTLKKRRGHKKAIIAIARMLLTAIYNILQKNEPYNPELYLRCNNTPPEHRAVSVEEAIFILQRQGYLVTPSAPG

SEQ ID NO: 483947 - protein, 405 aa, unidentified
MNRFAGLDWASRTHAVCIVDDTGAVLERFEVTHDAAGLHELLARLHRCAALPAQLPVAIQRPSGLGGDTLVDAGYPVVPIHPNIVKATRPRYRSHGAKSDASDAYLLADLLRTDGTRFHPLQPQSDAIRALRALVRGRDDLVATRVQLANQLRSLLESFWPGAAGIFAEIDSPIALAFVQRYPTPASAARCGEKRLAAFLAQHRYCGRRAPAALLERLRAAPPAHAEELETDAKRTLVQALATSLTTIVEQIAQLTARIEHTVADSDDGLLVMSLPRAGHVCAAQILAELGDVRDRFPSDVQLAAEAGVAPLTYESGKSRSVTFRWACNHRLRRAITCFADNSRHASQWAATIYANARARGCDHPHAIRILARAWTRVLWRIWTDRCTYDPARHRAALRLNAAGG

SEQ ID NO: 483948 - protein, 451 aa, unidentified
MSKDRTRSKPSGLPIIHPFAAGIDIGSRFHVVAVSPDLCDEPVQTFQAFTGDLQRMADWLVATGTKTVVMESTGVYWVAAYEVLESRGLEVILANAREARAVPGRKSDVNDAQWLQRLHACGLLRASFRPGRDIAELRAYLRCREKYTDYAAAHIQHMQKALTFMNIQLHHVIATITGVTGMRIIRAIVAGERDPDRLAAMRDVRCKENLETIRNALVGNYQPEHVFALKQALALYDFYQQCIDECDVEIERAVAILNIAHSFPEAPLPKAKHRNKMPSDPNFDVRTAMYQLAGTDLTQIHGIGPFLALRLIGECGTDLSRWPTAKHFTSWLTLAPGCKISGGKVLSSHTRKTSSRITVALRLAAVTVGRSNTALGAFYRRLAGRIGNAKAVTATARKIAVLFYNAMRYGMDYRDPGADHYEQQYRDRVIKQLHRRAAQFGYSLQPQDSPA

SEQ ID NO: 483949 - protein, 348 aa, unidentified
MDKVVAGMDLHSNNVVIGIMEMSGKRLASRKLACDLKEVVKFLAPYKKRLERAAVESTYNWYWLVDGLRALKYPVVLANPAGMQQCSGIKHADDTNDAFFVAELLRLNILPTGHIYDPRLRPMRDLLRRRMMLVHHRSALMLSFKSLYTRTTGQEMSLSRLKELEIKEAQGLYEHPANQLIAGMQIQHIDQLSESIEKIEKVVLASARELPCYAKLTTLPGVGRILGMTITMEVGEIERFASPGDFASYCRAVEAKCTSNQKKKGENNSKCGNRYLAWAFVEAANFARRYYPQCRQWYDRKAAKTSNVIATKALACKLAKAAWSVMSTGSDYDPNRMFGPMAKSKMKA

SEQ ID NO: 483950 - protein, 320 aa, unidentified
MNQNQSPVYAGLDISKANLQLHLQNKQFVLPNQPKGYATLLRKINAVGNVHIICEATGGYERGVVGALHGAVRPVSVLNPARVRHFALAQGQCAKNDPIDAAVLTDYGVALKPAPTPPADPARAELRALVQWRDQLKEQLARARQTVEHGVPLWIARQQKKLVHHLEKQMAEVDQACRDALARLPALQAQVRELETLDGVGSITAMSVLSHLPELGELNRQTAAALAGLAPWVRQSGPWEGQRHIGGGRAAVRRALYMSAVGLARMQATTLGKFYHHLRAAGKPAKVALTAVMRKLLLQMNRVLKALALKSINETEAQLA

SEQ ID NO: 483951 - protein, 428 aa, unidentified
MADLLEGTLPLNLVAIDIARYSNAVLIELSDGKRQRFRMTNSAPDFDRLLSYLQALPGNCRVALEPTGDYHRPLAHRLLTAGHEVVSINSVAQARYREAMFNSWDKNDPKDAQVILEMLRRGTYQRYVDPQIAGHHDLQELAKTYYQVSRARTKVQHSLINHSLPLYFPETHRYWCTTRNEWFVRFLLEFPTPTYVRALDRESFVAAAWDLVGRKVNKRAKLEEIWETAAHTAALPHAPDCLAVETFRITLRRYQELNVLRAAIEARAEAELHDNIDFAHLKTLPGIGSVIAMTILAEAGDLRRFGHHRQFLKYCGFDLAKIQSGTQRGREQLSKRGNARLRLAFWMAGMAAVRMKENSFRSKYERYVHADPDDADLKRKALTAVAAKMARVAYSMIKKNQPYRQFFELGLPSGSIPLSAAVGAQATP

SEQ ID NO: 483952 - protein, 337 aa, unidentified
MKRIAVDLAKSVYQVAESVRSGQVVQRKRLNREAFRRYIQEQTESVEWVMEACGTAHYWGRLAQSLGHRVKLLHPRYVRPYRRRNKTDRNDCDAMLEAERCTDIHPVPVKSHDQQQLQQLHGLRETWKKSRTQRINLLRGVLREAGIEAPTSTVAFLQAVGELVEQPEVAPLSRLLHIVLAEINLYEECMAECEQQIKRWHADDDIVRKLDEVSGIGLLTASALTAAVGKPERFANGRQLSAWLGMTPREFSSGDRRKLGHISRQGNVYVRTLLIHGSRAALLAAQRCQSRTPEKLTQLQRWAVARIGHNKAAVALANKLVRICWAVWCHERRFNGN

SEQ ID NO: 483953 - protein, 339 aa, unidentified
MNRTVVGVDIAKRVFQLHWVELGSGEIVSVQLKRAKFLEHFANRLPCLIGMEACGGSQHWARELHKLGHEVKLLSARMVKAFVSGNKNDAADARAIWTAVQQPGIKAVAVKSEGQQAVLALHRMRAQLVKFRTAQVNGLRGLLAEYGEVLPQGRAGIRRDVPGALERVAERLPAMLIETLREQYARVGELDEQVQRIERRLQQWHRQDEASRRLAEIPGVGVLGATAALATIGDAKVFRSGREFAAWLGLVPRQSGTGGRVRLLGISKRGDPYLRTVLIHGARAVMTHSKAPPEWARQVAERRPKNVAIVALANKMARTIWALLAHQREYEPLYASRPA

SEQ ID NO: 483954 - protein, 368 aa, unidentified
MKQQTSAATETRIKGNTIIDFTGKTLYVGIDVHQKDYQVAIVHEDICLGNHRMPADSKKLIWHLQSRYPGATLKCVYESSAWGFNLQRQLSAAGIDCIVVNAADVSTNDKERRRKTDQVDALKLARKHASHDLKAIHVPNKDDQKQRNLIRLRKRIVNDLNRSKNRLKSLLKYEGIEIPERFGKANWSNKFLLWVEEQANKDFLLQDVLLLMLEQIRGLRQLLLKTEKKVREMMSSEKYNKQSQLLVSIPGVGPITSALFLLEIGDIKRFSSFDRLNDFVGFCPDTDSSGETQKDTGITTRRHKQLRTALIEAAWVAKNTDPALLEAYVQLTKRMPGNKAIVRIARKLLRRMRAVLISEISYQKGIVS

SEQ ID NO: 483955 - protein, 317 aa, unidentified
MNFVGIDVAKDSMEVMVHESSKRWNFMNDESGLHKLIVKMKRLSPCLIVLEATGGYENTVATGLQCKGFSVAVINPRQIRDFARSIGTLAKTDILDARVIAHFAAKIQPPTRILPTEEAKRLGAILMRRRQVVTLLTAEKNRLLQANPAVRERVKNHVTWLKQELSDISKELKQMVHDDPEWKEKDKIIQSVPGVGPILSVTLLADFPELGTLNRKQIAALGGVAPFNRDSGKMRGKRTIWGGRGVVRTATYMAAFAAIRCNPLLTSFFNRLVAAGKPRKVALVACMRKLLCILNAMLKNRTRWTCYSPQLVGLCYC

SEQ ID NO: 483956 - protein, 358 aa, unidentified
MTTVSKKQKWFNTIHLTKDDDLYVGIDAHKKSLHVALWLNGAPAIDFVSPPDSVKLIETLNNLRPALRMVVYEAGPTGYSLARAMQNVNLPVSVVAPSKTPRQAAPDSKTDSLDARKLAEYAAKELLRHITIPTKHQEAQRQLTRLREQLVAKQTRIKLQIKGFLLQHGIDQPQDLSRWSRAAIEYLKNIHLSEPLRYCLDTLIEELLSVAVHIKSTEQKIKEAFSEKPLSTTCKLLATHPGVGPTIAAQFAAEIFNPKRFTDKTQLAKYVGLAPSIRQSGQTLRDGPILKTGRPQLRCNLIQGAWLWIRKDQDAYKTFCRLVQNTGHKNKAITAMARKLAIHLWKMACDNKPYNCAV

SEQ ID NO: 483957 - protein, 412 aa, unidentified
MQVVYERCAGLDIHKRTVVACATTPSVGGQAHKERRTFSTMTKEVSQMRDWLGSLGVTHVAMESTGVFWKPIYNVLEGHFELLVVNAQHIKAVPGRKTDQKDAEWIADWLRHGLLRPSFVPSTQQRERREFTRHRTKLSEERSRVINRLQKLLEDANIKLAAVASDLMGKSAHAMLQALLQDDAEPAALAELALGKMRTKRESLEQALTGLLKEHHRILIREHLGHIKTLDEAIVRVSHEIAERMRPFEAQLIRLETIIGIKRRLAEVILAELGTDMTRFPSARHLASWAGMCPGNRQSGGKRLSGKTRKGSPWLRTALIEAAHAAAHSKNTYLSAQYHRLAVRRGVKKAAVALGHTLLVIIYHVLTQEKDYQDLGGNYSDERARQAVEKRLVRRLENLGYQVSLTPTASMA

SEQ ID NO: 483958 - protein, 440 aa, unidentified
MRMMYERCCGLDIHKASIAACALISEKGKPQEETRRFGTMTADLRELAGWLQQKGIRHVAMESTGVYWKPVWNILEPAGFELLLANAQEVKVVPGRKTDQKDSQWIADLHKHGLLRNSFVPPRAIRDLRDLTRTRAILTQEHTSICNRIQKVLEDANIKLGSVASDVFGVSGRAILRALMKEENDAEALADLSKGLLRKKIPQLRRALEGQVTAHHRSLLTGQWSRMEFLEREIVDLETQIAERMKPTPEETALTLPNTAEDAPAPLSPREEAIQLWMEIPGVGWTAACSMVAELGVNMDQFPSAAHVASWAALCPGNNESAGKRLSGKTRKGNVWLRRTMCEVAWAASHTKDTYFAAQFHRIASRRGNKRALMAVAHSILVTAYHMLKHKRHYQELGADFFDAINRDKVRDRLVQRLAKLGFDVTLKSKDSIASDSQKN

SEQ ID NO: 483959 - protein, 512 aa, unidentified
MPADADYSVGCEPVYEPGVGARPGRVTHCCFEHAGQTFGSLTDAPGQPARWKICGLGWRTSEVRMQPEEIPDDDHELVIERVCAIDVAKASGKVCVRTPHPNRPDRRTSRVWDVSATSRAVTELAEHLIGEGIERVTVESTSDYWRIWFYLLEAAGLDVQLVNAREVKNVPGRPKTDKLDAVWLAKLTEKGMLRPSFVPPVEVRQLRDYTRLRVDLTRERTRYWQRMEKLLEDALIKVSSVVSRLDSMSVRDMLEALIVGERDPRRLAELARGKMRPKRAALIEALTGRFDDHHAELARLLLSQIDALSSHIDTLTRRIDELLAILTDPRRGPDDGYRIGDDGAAPFVNGLQAAKRLAEITGIGPVSAPVILAEIGMDMTRFPTAAHLVSWAKLSPRTIQSGATQRGGKTGKGNPYLKGVLGEAAAVAARTDTFLGERYRRIVKRRGKLKALVAVARSILVVVWNLLADPTARFHDLGADYHTRRADTDRRLRNHLAQLAALGYRVTVEPAA

SEQ ID NO: 483960 - protein, 371 aa, unidentified
MKKNTIFVGLDVHKNSIAIALADVGRDGDVRYYGIIDGDIESVNKLVRKLQSTGATLRFVYEAGPCGYELYRSLTNKGFDCTVAAPSKIPRKSGDRIKNDRRDALTLARLHRAGELTPVYVPTPEDEAMRDLTRGREDAVKALRVARQHLLAFLLRYGHRYNGRTYWSKAFWNWIADIKMPHRAQQIMLQEYVHAVREQFERVQRLTDQIRALVPQWQLAPMVKALQALRGVSLIVACTTLAELGDLTRFSKPKQLMAYLGQVPSEWSSGDSNHRGSITKTGNSHVRRALTEAAHAYSYPARESRVLLKRLEGLPQPVQQIAWKAQVRLCGRFRSLVARGKNRNKVVSATARELSAFMWAIAQEMQPKSQA

SEQ ID NO: 483961 - protein, 362 aa, unidentified
MKSTTVAVDLAKSVFQLAVADASWKVIESHRLTRSQFERWFHNRDVSLVVMEACGSAHHWARYLSGLGIEVKLLPAKYVRAYVKRNKTDAADAAALLEALRASDIEPVRIKSIEQQALQGLHRTRSLWMSTRTSRINALRGFCREFGLVIPQGARTGVEAMARLLADPSSAIPELIRGSMKLLIEEIRLLEARVAQLEQQLAVLAKQSSACKELLTVPGIGLLTATAMVAATGGEVSHYRDARHFASWFGLTPKEHSSGSTRHLGRISKRGDRYLRMLLTHGARAVLRAASVARLASKQVDGLKDWALQVQGRTNHNKAACALANKLARICYAVLKHHEPYGSQTRREENKKINRTAYAVAI

SEQ ID NO: 483962 - protein, 322 aa, unidentified
MLAGIDTHKDTLAVAIIDAAGRPIAVREVANTEAGFDVLERLLTEHQVRRVGIEGSGNWGRGVASRLALGGAIEVVEVPPSLTSRERSARPGQGKTDPVDAALIARITAREATLPPVRLAVGDAADLRALAGYRRQLTDERTALANRTHAELHGLNPGYHAKIPRLTAATFITAALEMLDGDRTTRAALTRRRLQRLAALAAEIKDLGKQIADAVEAQQTSLTSIYGAGPVVAATILGEVVDVRRYRSRHAFAAANGSAPIPASSGRTSRHRLNRSGNRTLNRALYTIAITQIRGDTEGRTYYLRKRAEGKTAREALRCLIG

SEQ ID NO: 483963 - protein, 402 aa, unidentified
MAADQLWAGVDVGKEHHWVWVVDDTGAVVLSRKLVNDEQPIRALVAEVDGLAERVSWTVDLTTVYATLLLTVLADAGKSVRYLAGRQVWQASTTYRGGEAKTDAKDARVIADQSRMRGDDLPVLHPDDELISELRMLTGHRADLVADRTRTINRLRQQLVAVCPALERVAQLTQDRGWVVLLTRYQRPKAIRQSGLSRLTRVLADAGVRNAATIAAAAVAAAKTQTVRLPGEQVAAALVAQLAQGVIALDDRIKATDADIEGRFRRHPLAEVITSMPGMGFRLGAEFLAAVGDAALIGSADQLAAWAGLAPVPRDSGKRTGRLHTPKRYSRRLRRVMYMSALTAIRCDPASRDYYQRKRDQGKRPIPATICLARRRTNVLYALIRDNRTWQPDSPPIIKSAA

SEQ ID NO: 483964 - protein, 378 aa, unidentified
MKKHTTTMKDRKAQTKTKKNQVCKLAAKQRLTVGLDLGDRNSRYCILDEAGQVVSEGQVPTSSTGLNSLFGKMPSSRVALEVGTHSPWVSRLIAAGGHEVIVANPRKVKLITQSDRKNDRLDAEKLARLARVDPQLLSPIRHRGAEAQMDLTVIRARAELVEVRTALINSARGLVKTSGERLKPCDADQVKETTAASLSEDIRGAIGPLLRSVETISQEIREYDQKIEQMVKRYPEVALLTQVYGVGTLIALTFMLTIDDPNRFTHSREAGPFLGLNPKQRDSGKNRPELGISKAGDPLMRSYLVQGAHVILRKGAPDSDLRVWGLAKAGQGKKAKRRAVVGVARKLAVLLHRLWVTGEVYDPHYQRRAEEAAKKVAA

SEQ ID NO: 483965 - protein, 415 aa, unidentified
MKGTEDTRKIDRYIALDIHKEYVLAGGQTAGQEWVLPPRRISMTKFREWATANLHAGDAVVIETTTNVWDIYDIVAPLVTRTAVAHAGAVRQIAEARVKTDKEDVKRLIRLLIADIVPEVWVRPVEVRELRGVISYRNRLVKMGTMVRNRLQSLLHRHNIILPKGRLLDAAWWQEQKMSALEKMQIQQELVMLEELDRHKREVDMELGRQCLREPWGKQAVRLLQLPGFGVVMTMIVLSAIGDIQRFESAKQLVGYAGLGAGVHDSGKEHIEKRITKSGRKELRWALVEAAWQAIRISPYWKEQFETYLRRMRRPNQAIVVIARKLLVAVWHVLTKEETDVHASEEDLAYKMLVLSWDLDESVRMGLTYKQFAKYALMKLGVETDITRFVRKNVPRRIAPREEVLARMQELGLRT

SEQ ID NO: 483966 - protein, 321 aa, unidentified
MAAILGLDISKETVDACLIDAAGEHSKKVSNNAKGFEQLKRWLQNRRVKEVHVCMEATGSYYEGAAEAFSDACYMVSVVNPRQIKSFSETLLLRAKTDKIDANLIARFCGAHHPPAWTPPTPEQRKLRGLVRFCSNLKESRASFLVQLETPNLVPQVKSSIAEVIDNFDEQIEKLEAEIDDLIDRDPDLRRRRDLLCSVQGIAKATAATILVEAPKLEEFVNAGAVAAFAGLSSRTRTSGTSVRGRGAICKTGNARLRRALWWPAIVAMRYNPRLRQFAERLRALGKPSKKIIVAAMRKLLILAYGVLKSGRPFDGALTTS

SEQ ID NO: 483967 - protein, 423 aa, unidentified
MDVVYPICCGVDVHKKFFVATLITTDGIQPKYKKRRSSTFNNQILAFKAWLLENNCRDVCMESTGKYWIPVFDLLEDSINVTIANPKWVKTVKGNKDDAKDSKWIGDLFRIDLVPGSFIPCKAIRILREFMRYRFKLVSCKSSEKNRYQNVFTVCNVALDAVVSDMFGVSASSITDYIVNSDTFDPAHCVLLLKKTLKKKVDEVVASIDGFQMTDAQKVRARMVKEHYDYLLGHIEKLDAVVDELAKPFEPAIQLLCSIPGIGRHSAIAIISEVGTDMSQFDSSKRLCRWAGLTPGNNESAGKKKSVRITRAGVYLKPALVQVAHAAVKDKKNPYYRIKYEAIAKRRGKKRAVIAIARMILTAAFHMFSTGEVWNPSDLNQIDMPPELREKELQKSLRRAAKLLVAHGLINPDAVKIPQTVPA

SEQ ID NO: 483968 - protein, 393 aa, unidentified
MSLNHHFDEPTAIRTNLDAIFVSLELSRSTWLITSVSPGGGEKMSKRGVSAGNVAALLTRLSELKQKAFARTGKSFHVVAIQEAGLDGFWIHRVLQSEGVESHVVDPASIATSRRRRRAKTDKIDGEALVRALLAYKRGEPRVCAMVRAPTPEEEDRRRLCRERKTLTNERVQHVNRIKGLLFAQGISDYQPLRRNRHQRLDELKTGDTRPLPPHVKAQISRELDRLELLLEQIKAVEIERDALISAMKPGGMNADAVRSPPAMLTKLNGIGPEFAAVLWSEGLYRSFANRRQVAAYAGLAPTPWQSGSVRHEQGVSKAGNSRLRTTMLQLAWLWLRHQPQSALTLWFHERVRRNGARLRKTTIVALARKLLVALWKYVNAGVVIDGAVTRAV

SEQ ID NO: 483969 - protein, 352 aa, unidentified
MQTQSNELDFSGQNFYCGIDIHKKSWSVTIETDDMPLKTFNQEADPKQLVKFLRKNYPGGKYIIGYESGYFGFNLYRYLLNQKIDCKVIHPADIPTTHKEKDQKRDPLDSRKIARVLRTGEVESIWVPPSNLEQDRQLLRLRRTLAKDITRVKNRIKSILQIHGIKYPDAFEKNGTHWSKRFIAWLEDIQLSKETGTESLQVAVRYLNYLREEQLTVSRKIKSLALTERYNTAYTELIKLPGIGVLIAMIILTEVGQISRFKNVDNFRSFIGLIPRSHSSGEKDYQGRITNRSNTHLRALIIEATWSAIKKDPYYLNVYYNYKNRMQHNKALIRTARKLANNIYYTLKQVDY

SEQ ID NO: 483970 - protein, 343 aa, unidentified
MKLMRIGVDLAKNVFQIHGVDCHELPIWRQRLPRDRWLQTVLEKIEPGCEIGMESCGGAHHWARQLQARGFRVKLIAPQFVKPYVKSNKNDANDAEAICEAMSRPSMRFVAVKTIEQQDIQATHRIRASLIEQRTAKANQIRGLIAEYGLVAPKELLMLRRAIPCWLEDADNGLTARFRRLLNGLWDDLRALDERVGQLDSEISAIAASEPTAIRLQQLRGVGPMIATALIAAIGDARQFANGRQLAASLGLTPKQHSSGGKDRLLGISKRGDAYLRTLMVHGARSALRTAKSKDDRLSQWVVRLAERSHPNVAAIALANKTARMAWAMLRNDTDYQPDRAAA

SEQ ID NO: 483971 - protein, 416 aa, unidentified
MRRTRPCPPINPDTLVIGIDIAKETHVAVALAADGRSAKPHRFSPTRSGFESLVHYARDSVKRLGATGFVVAMEPTGHYAETLVRWLAEKAVPTYSVQPLHTNRAKTLLDGSSRKTDPKDAEVVAMLCRQGLARPYRVPTGPFAVLRVASHQRQQLVKRRCQVVNRLHRHVDVVFPELRGLFSKIESRTSLWVLRTMPAPTDVLAWTLEDLSEALHKASRGQLGTERAQQLVDAASSSVGVTEALAAHRLAIRQLLVELERVLGQLAEVEGQMEAALAQVPYAALLRSIPRLGKVTTATLLGEFGDFRNFKVAKQLISMAGLSLVESSSGQHQGHHHIGRNGRAYARQILYLAALRVGWGFLAEPRRRKVEDRKGSATKAAVANMARLLRVMHAIVRDSRPFDSARFTPTTEPLAA

SEQ ID NO: 483972 - protein, 415 aa, unidentified
MSYKVAGIDVHKKVLMVVVLDASTPECEPERRRFAAMPSDLRRLSSWLREKEVKEAVMESTAQYWRSVWLELEPYMRLQLAQAFSNRAPRGRKHDFKDAERLARRLIADELILSFVPNGEQRTWRTMTRMKTQLTRDRVRLQSQMECLLEEMRIKLSSVVSDLLGVSGVRILRALARGESDPKKLAALGEERLRCSEEQLIDALTGSPQPMHRELLSLQLQRLQLIDEQIAKLNGMIAEALKPHQETVMRLAEVPGFGVDSAQQVIAEVGVKASTFPSAAQFTSWVGTCPGKDESAEENHSSRSAKGNKYLRRVLSQAAHAAVKKNGSHFQAVFRRLLPRLGYQSAIWAIAHRLCRVLWKILHEGVGFIERGNEPDPQAKKQRARMLARALRKLGYNLAISPMNPPTAENATPTQ

SEQ ID NO: 483973 - protein, 433 aa, unidentified
MNPPPPYDLVIGLDRADKKADLCLLETRTGQRRAVLLDTAPEALCEWLAELRQQHPQARVGLCLEQPAVHLIPFLEAYAWITLHPINPVTLQKYREAFVTSRAKDDTKDAEYLADLLLTHADKLPTWAPQDSATRAVQQLVVHRRAVVDERTGLSNRLLALLKQYFPQALVLCGEDLWRPLATAFLLKWPSLAAVRKAKPATVKQFYHLHGSRSATLLEERLALLAKAVPETDETAVIASFVLRVQLLARELQAVMRTIAEFDRQIAAAYAAHPDHGIFASLPGAGPVLGPRLLASLGAQRERFDSAASVQCYTGVAPVTKRSGGSERIHRRYCCPKFHRQSFHEYAKESVLWSRWAAAFYLQQRTKGAPHHTAVRALAFKWQRVIWRCWQDRQPYAEKTYEAALRKAGSPVVALFDQVELGKSPWKNPSKKS

SEQ ID NO: 483974 - protein, 344 aa, unidentified
MMIIGCDFHPRWQMISWLDRETGETGERKLMHATGETRQFYEGLRGPVRVGLESTGNSHWFVDLLAEMGHEVWIGDAARIRASQVRKQKTDRRDAEHILDLLAKDSFPRIWTPSRQERDQRQLLIHRYKLVTLRVRVKNELQHLALNQGMQKGRSLWSKNGQKQLLDLPLQFWASTRRKNLLELLQQMDQQMVVLDQAVKKVAEEHEKARLLMSQPGVGPITSLAFVLTLGDVTRFRRGKQVASYLGLIPREYSSGGKQQLGGISKQGNRFMRMLLVEAAQAAVRYDPGFRSEYLHRCHHKPKAVAKVATARKLAIRLYWMLRTNTPYPEVVRIESSSRVPLAG

SEQ ID NO: 483975 - protein, 391 aa, unidentified
MIFIGIDAAKDKHDCFIANSDGEVLCDVFTISNTLTGFNDLLSKIKSFSKDLSKTKVGLEATGHYSCNILGFLKNVGIETIVINPLFTSLSRKSISLRKTKTDKVDARTIASMIMSDVSLKPYSDTLYHNEDLKSLSRYRFDKVSERAKLKQSVSRLVNILFPELEKLVSSLHIAVVYALLSNYPGASYIANANTEELAETLCTASKGRYTKSKTAEIQVAAGVSIGSKMPAKSMELKHTIALIRELDKEISEVESAIDKITSQMDSPIFTIPGIGRHMGAMILAEVGDFSNFASADKLLAYAGLSPSTYQSGQLQNCYAHMEKRGSRYLRYALFNAAKYVCLWCPTFSAYLEQKRSEGKHYNVAISHAAKKLVRLIFAMQRSGKAFSADY

SEQ ID NO: 483976 - protein, 347 aa, unidentified
MTTLARSVTGGVDTHLDVHVAAALDEKGTLLGVEYFETTRAGYKKLLAWFENFGPVVLVGVEGTSSYGAGLTRHLHAEGVAVVEVDRPNRQRRRRKGKSDPEDAISAARAAFSGDASGAAKTQDGNVEAIRVIRLARLSARRSRTLALNQMRSLISTAPDPVRDELRHLSVPRMLERAASYRPGTKTDLVSLTKWTLRTLARRAIALENEIKSLDDILKPLVVETAPKLVSTLGIGTDSAAALLVAAGDNPHRLRSEAAFAHLCGTSPIDASSGKHERHRLNRTGDRQANSALWHIVITRMVYDARTTAYIERRMKEGLTKKEAFRCLKRYIAREVYGLLPMDRLTA

SEQ ID NO: 483977 - protein, 357 aa, unidentified
MVKSIRNLSSVTVIGLDIAKNVFQVHGVDAAGAAVVAKAVRRGQLMSFFSSLPPCLIGIEACSSAHHWARSLVALGHQVKLIPPAYVKPYVRRNKNDAVDAAAICEAVGRPNMRFVPVRSVENQAQLMRHRARELLAGNRTQMLNALRGHMAEIGIVAAQGVQHAYGLKRLLADGVDANGEIVVADGVRKALAPLVHQIDAIDAEIAAIDEEIKTQVKADDRARRLMTIPGIGPLTAAAIVATVQDTSAFASGREFAAFLGLTPRQNATGGKERLGRITKMGDRYLRKLLVVGACATLSHRKGHDDALRLWADRLLARKAVKYKFKLTAVALANKVARIVFALLTRGGEYNERPAVG

SEQ ID NO: 483978 - protein, 385 aa, unidentified
MHQVESECSVLDGVVVFVAIELSKSAWLFAAQASPSGKTSSHRLESGDITGLLTLLRRLQARERQACGGGAVQVVVGYEAGYDGFWLQRRLAAEGITCWVMDPGSLQVNRRARRAKTDRLDAAMLLRALIAWCRGDRAACHMVQVPSVAREDARRTHRERQRLVVERVQHVNRIKGLLATQGINDYQPLRRDRSARLGEVRTKDGHALPPRLRREIERELQRLELVLEQLEAVEAERDTAVAAPAVDDADAAKVALLARLGGIGNELATVLVREGLYRSFTNRKEVAAYAGLTPMPFASGERHREQGISKAGNPLLRKAMLELAWLWLRYQPDSALARWFTDRVGSVRGRIRKITAVALARKLLVALWRYVTAGLMPEGARIKAA

SEQ ID NO: 483979 - protein, 397 aa, unidentified
MPQVWAGVDAGKTHHHCVVIDTEGQRLMSRRVLNDETELLRLIADVIALGTDNAVTWAVDLADGGAALLIGLLAAHDQWLLYIPGRAVNRAASGYRGEGKTDARDAAIIADQARMRRDLHPIRPGDEITTELKLLTGRRTDLVHDRTRTISRLRELLTSIFPGLERVLDVTNTGPLVLLTGYQTPAALRRTGQARLESWLGHRKVRGAAELAAKAIQAAQGQHTTLPAEALTAQLIATLAGEVMALNEQIRDTDKLIEGRFRRHRHAELITSLPGIGTLLGAEFLAATGGDLSAFTSADHLAGFAGLAPAPRDSGRVRGNLHRPQRYHRGLQRVFYTSALISIQFSPESRRFYDRKRAEGKHHTQAVLALARRRVNVLWALLRDGRYYQPVPVTATA

SEQ ID NO: 483980 - protein, 344 aa, unidentified
MNEITTVGLDLAKRVVSLCGEDAAGRVVVQRTLRREAVLGWFVQRSPCLVGMEACASAHWFARELMALGHTARIIAPEFVRPFRLSGKNDANDAAAICAAVRQPQLRFVTVKSAEQQARLVVHRLRQGWQEERTAGLNRLRGLLAEFGCLYANSAAAILSGARAALADETLPSALRQGIARQLEHLRELDAHLADCDREIAQQAREDPRAQRVARLAGVGVLTASAVAATVIDPQQFRCGRQFAAWIGLTPRQYSTGGKARLGRITRRGDSYVRCLLVQGARSALQAAMRAAPPRRTRLAAWIVATYQRIGYHKTLVAIANKHARLIWVLLSRDEPLRARAATD

SEQ ID NO: 483981 - protein, 352 aa, unidentified
MNTSKYIGMDVHMATTVIAVVNSVGGIVAEAVVETKASTILDFLKSQRGTVHVTFEEGTQAAWLYDLIRPHVAEVVVCNPREVPAQDNKADKSDAKRLAELLRTNGLKAVYHGEHGTQALKELSRSYGAILSDSTRVKNRLKGVFRGRGISCTGTNVYSKKGREQWLRKLDNSAVRSRISKLFKELDCLTELRNEAEKELLTEARKHPATKVLRSIPGIGPVRAAVILGFTITPHRFRTKSQFWKYCGLAVMSEITGEYAVIDGRVVRSRKKPLVRGLNINYNHALKEAFKGAATTAAMGVWRSHFDALVANGTRPSLVLLTLARRIASITLAVWKRGELYDTDKLKFMHAV

SEQ ID NO: 483982 - protein, 412 aa, unidentified
MAVFCGIDWAEEHHDVALVDGEGTLVAKRRISDDAAGFTALVQLLADAGDTEDQRIPVAIETNRGLLVACLRATGRQVFTINPMAVSRYRDRYSVSRKKSDAGDALVLANILRTDLAAHRPLPSDSPLAQAIAVLARAQQDAVWDRTTAHNKLRSVLREYYPAILDAFADKRGGLLRSEARTMLAAAPTPHAAAELSTAKLRALLTRAGLQRNIDPEAHRLREILQREYLHHPQLVEEAFGRQALALLHQLDAACASAEDLAAAAAEQFDRHPDAEIITSQPGLGSLTGARILAEIGDDRTRFTDARSLKAYAGSAPVTRASGKAITVLHRRVKNQRLAATGYIWAFAALTASPGARAHYDRRKATGDRHIAAQRNLFNRLIGILHHCLQTRQRYDETTAFAATAIPTAAVA

SEQ ID NO: 483983 - protein, 345 aa, unidentified
MQSMYYIGLDVHKKTISYCVKDGSGRIHAEGTTPATRLDLDRWMKTLPQPWTAAMEATLFTGWIYDYLLPHAAALKVAHPLMLRAIAAAKKKNDRIDAHKIADCLRCDFLPECYMASTEIRERRRTLRYRNLLVRQVVQMKNKIAVLLMEAGVSYNKQKLHKVGYFRELLATNQDIDDGLRSLLRLCRETLVRLRKTESALVRSLERDPLLRERIERLMTIPAVGPITALTWALEVGDVGRFSSIKKAISYCGLCGAEKRSADTIQRTPLSKQRNKHLQTILIEAAKMAPRNSPALAMIYDREKQKGNANRATLAVARKLVAYLVAVDRRQKDFLVVEKENRTAA

SEQ ID NO: 483984 - protein, 360 aa, unidentified
MSFNGTSVGLDVHALSVVAHAVDEETGRVERARLCPDHGEILDWLHRLRGPVRVAYEAGPTGFGLARALSDAQIECVVAAPSKLIRPAGDRVKTDARDAAHLTRLLRLGEIITVTVPEAEVEAVRDLVRAREDARADLMRVRHRLSKLLLRQGRVYSGGPAWNGVHETWLRRQRFDDSHTSAAFDHHFDAVLTATAARDRLDEQIVTIAASPRWADPVNRLGCLRGISALTGLALSVEIGDWTRFTGSSIGAYVGLVPCEYSSGASRVQGSITKAGNAHVRRLLIESAWHHRAAYRNPGPTMRARWAKVDPALKDRGHAGNRRLHQQWCRFNERKKPHVVANVAIARELAGWCWSLATLK

SEQ ID NO: 483985 - protein, 412 aa, unidentified
MKLFVGIDVSSKDLKVCMMNGEGDTLQSFTVDNNLEGASHLRDQIVAVADKLPSKEIHIGLEATSVYSWHPALFLHEDEALQKRKAKVFTINPKLIAKFKEAYVDLDKNDHIDAWLIADRLRFGRLPMTMVMQEQYIALQRLTRMRFHLVHNLTREKQYFLTNLFYKCSAFISEVDSSVFGHAITELLLEKYSLDEIVAMDVADLADYLKDHGKNRFPDPERVAKCIQKAARASYRLSKVVEDSIDLILGTSIQSIRSIQAQIKELDQAIERILSGIPNTLQTIPGIGPVYAAGILSEIGDITRFDDQAAVAKYAGLVWRKHQSGAFDAEDTKRIKSGNRFLRYYLVEAANSVKNRDPEFGDYYRKKYKEVPKHQHKRALVLTARKLVRLVDVLLRNDQIYTPRRKVNAAKD

SEQ ID NO: 483986 - protein, 418 aa, unidentified
MKPNKAEKVKIINEKTLIVALDIGKNVHYGYFRTPKNQDVKPFPFYNTGQSFKKFWKKLCRFKEEHMLDEAVIGFESTGPYAEPISNYLRKKPVNLVQVNPMHTKRIKELTGNSPNKTDKKDPRVIADVISLGHALTVVVPEGAAAQLRRLTHARERAIERRTAMNNQLQHLVFVIFPELVSIIKPSTKTGMYLIKNYPDPESIVSTGIGTLCNIVRKISRGRFGIDRGEELYNAAEQSVGITEGKESVIFETSHLVSNIESENRYIESLEEQMIEHLEQIPYSHSILSIKGIGHITAAGLIGEVGDFNKFNTIPEVMKLAGLDLFEVSSGKHRGRHHISKRGRALIRKLLFFAAINAVKSHGIMHAKYQKMLSNGTPKIKALVAVSRKLLRIIFALARDNAKYDENYNRKHDFKLAA

SEQ ID NO: 483987 - protein, 358 aa, unidentified
MPMLANVVDAVVGVDTHRDTHHVEIALPTGSPIAACSISNDTRGYAQLLAWIADHTPGPRLVVSIEGTRSYGLGVARALTAAGLAVIECEQPTRNNRRGRGKSDPIDAHLAVLTALRLDVERLPTPRADGDREALRILLSARHDLTVATTAQTNRLRALLREGDDGDRQLARGALTDTVLAGLARRRPPRDATRAQAVRQAEIRRLALAVRDTGRALKTNRAQLQAIVDELAPGLTDRRGIGAVSAAQVIISFSHPGRCRSEAAFAALAGASPLPASSGRTMRHRLNRGGDRALNRALHTIAMTRMNTCPTTQAYVARRTAQGKTPREIRRCLKRYIARELYRALTSTMTTTGASTGA

SEQ ID NO: 483988 - protein, 371 aa, unidentified
MKSILSVGMDVHKNSFSLCAYDGYTGEIVSESTFASDVKLVIKFIKTLKSRYENDVEIKCGYEAGCLGYSLYKSLTARGVDCVILAPTTMQVSAKNKMVKNDRMDALNIAKNLASGSYKSVYVPDEEDVEIKEYIRMIHDFKKELKRVKQEICAFVLRHGYQYDGKSKWTIRYMNWIRELEMSEIQRETLNEYIAEMENLNDKINRFMNRIDEMYQSERYHEKVSKLRCFKGIETFAAMTIQVETADFERFPSAKAYASYTGLTTGEHSSGDKNNRIGITKQGNTVIRKTLVECAQSLVKGNVYAKKSQGLKSRQKGMDVNIIAYADKATERLKKKYQKLIERNVPRNKAIVAVARELACFIWGMETGNIH

SEQ ID NO: 483989 - protein, 403 aa, unidentified
MNAVGIDVSKGKSMVAIIRPLGEIVAAPFEIKHSASDIKSLVNLIHSVEGESRIVMEHTGRYYEVLAHQLSKADLFVSAINPKLIKDFDNDSLRKVKSDKADAVKIARYALDKWQNLKQYSVMDELRNQLKTMNRQFNFYMKHKTAMKNNLIGILDQTYPGINTYFDSPARSDGSQKWVDFASTYWHVDCVRKMSLHAFIDHYQKWCKRKKYNFSLSKAEEIYGKAKELVPVLPKDGITKLIIKQAVDQLNSASVTVEELRSLMNETASKLPEYPIVMQMKGVGPSLGPQLIAEIGDVTRFTHKGALTAFAGVDPGVNGSGSYEQKSVPTSKRGSAALRKTLFQVMDVLIKTMPQDDPVYQFLDKKRAQGKAYYVYMTAGANKFLRIYYGRVKEYLSSLPESE

SEQ ID NO: 483990 - protein, 336 aa, unidentified
MTIIRIGLDTSKHVFQIHGVDENEQPVLRRQIRRGEVAKFFAKLAPTRIGIEACGASHHWARVLRGLGHEVMLIPPQYIKAYVQRGKNDAIDAEAICEALSRPTMRFVPVKTAEQQAALTMLGVRDLLVKQRTMLINAIRGHAAEFGVTVAKGPQQVVALLQRLATGEDVPTLAREMVGVLAAQLEVVNAKLKAIEVRLMAWHRQDQTSQCLATIPGVGPIGGVSFALKVPDAKAFRSGRHFAAWVGITPRENSTAGKHRPGKISREGDEDLRRLLVLGATAVIQQAKRGRASPWLLGLLARKPKKLAAVALANKMARIVWAMMVSGETYRHPKEA

SEQ ID NO: 483991 - protein, 314 aa, unidentified
MYHYIGIDVSKKVLNVFDGKKDLIFDNKENLSSLKKHLKKRYPDFSSLVILFEATGIYSYPLKAFCATHMIKAYIINPQTSHSFAKSLGTRSKTDTIDARTIWEYHKLIGDKDIGIPRVDREIMTLSSYLASYRLTLKQRLALTNHLEGIKDKTLYRLLKKEQERLRILEQELLIQMDTYIKQYPKLKEDYQRLLSISGVGKKTAISLLILFHTYPNTNRNQITALIGLDPIQRQSGTSVKGRSKISKHGNQMIRKSLYMPTLSSIKHNQKVSVFYERLVSKHKPKKVAVIAAMRKLLLIAHAVYKNKTVYVPG

SEQ ID NO: 483992 - protein, 340 aa, unidentified
MPLYGGIDLHANNSVVVLLNDQDQVIYQKRLPNHLPVILEPLSLYHREIEGVVVESTYNWYWLVDGLMEAGYHVHLANPAAMQQYNGLKYTDDRSDARWLAHLLRLGVLPEGYIYPKAERAVRDVLRKRAHLVRQHTANVLSVQNILARNTGGRFSLKRIHEFTKQELEALLPEADQMLAVTSSLAVLDCLSHQIKALEKSVHQRLRHTPAYEQLLTVKGIGPILAQTIALETGDIRRFPTVGHYASYCRCVDSTKLSNGKRKGQGNVKNGNPYLAWASMEAAQFALRFQPAAQRFYQRKLAKTNNNTILARKAVAHKLARACYYSMRDLVPFDAMKAFG

SEQ ID NO: 483993 - protein, 426 aa, unidentified
MAEKKMDPQPEFAAFVGIDWADRKHVWCLQAAESRKREAGELEHKVEAVEAWVAELCRRFGHRPIAVAVEQVKGALVFLLNKYECLHIFPVPSTMTAKMREALYPSGAKDDPRDADLLLDILGQHRDKLHRLSPDDEATRRVQNLVEERRKLTAERTAQSNRLTSYLKIYFPQMVEWFEKLDMPLVCDLLERWPTLEELQKVSPEELRKFFCQHHCHRGLRERRILAIGGAIPAGGDRAVIEAKRVAVKVIVQLIRSLLEGIAELDRKIEEAAAEHPDFFIFDSLPGAGAVMAPRLLAAFGSQRDRYSSAAELQTYSGIAPVTERSGKRKWVHFRWACPKFLRQSFHEWAGHSIAQSMWARAYYQQQRDRGSDHHAAVRALAFKWIRILFRCWKDRVAYDESKYLVALAKRGSPLGKLLVVGMASL

SEQ ID NO: 483994 - protein, 321 aa, unidentified
MKIKNLVGVDTHKDSLACFCNGKFKEFKTNKVGFKQAINWAKSSHWAIEGAYCFGQAFSNFLIKNGCEVYEINPLLTKSWRTALKVASPKNDFGDAKVISIFANMDNMNKVSFETIKLKEKLTTRKALIKQKTQITNHLKMLFYTRGEELPFKTLDTQKAINWMLEQDDVIVKTNGKILESIMAGIKSLEVEIEKEMPEPAKALTKMEGISTITACTIYAETKGKLTRKEQFASYCGVAPIDCSSGQTTRRRNNKGGNRVLNSIFYSLSIAQKRYNEKAKAYFEKKLSEGKSPRHARKCLARQLTNIVFKTLKDATEKRKP

SEQ ID NO: 483995 - protein, 347 aa, unidentified
MSNDTAIAVDVAKNVFQLGVSDRPGKVRRTERLQRSQFLPFLATQPPATVVMEACGSAQFWARRIEELGHRVVLLPAHLVRPYVRGNKTDRTDVKGILEAYRNEDIRPVPIKTPAHQALADLHRLRSAWVAERTARLNTIRGLLRELGIFIPVGAQKVIPEVWSHLEDADSQIPDCVRPFLAEACEEVRDMERRIAMVERQLEALADQTPAIQRLLTVPGIGLLTATALFAFVVNVHRFPSARHLASYLGLTPRERSSGNTRRLGVITKRGDVYLRTLLVHGARSVLARAKQKTDTARLDRLRDWAAKVEKARGHNKAAVALANKMARMAWAVWHHDRDYQPAPLAA

SEQ ID NO: 483996 - protein, 323 aa, unidentified
MSKDKKYFGIDISKDVFDVYDYLGRFHQFTNDFKGFKEFHKLLKKGSHCVMEATGYYHTKLAYYLVEKGVLVSVENPLKIKRFIQMGLSKIKTDKSDAKQIYNYALKIDLTLWYGESKTQQESLQIVRLLSIYTKQSTMLKNKLHGEDVLGFPSKLVVQSLKRQLKSVQKELKKLEIALEDNVKMEHQESLTLLKSIPGIGPKTAMMMLVFTDGFNRFDSSKELCSYAGITPVIRESGSSVRGRPRISKVGNVKLRNLLFLCSFNACKYNKSCKALFDRIVAKGKSKKLALIAVCNKLLKQAFSIVKNGIPYDDNFRSVLVKN

SEQ ID NO: 483997 - protein, 360 aa, unidentified
MKKKLNHLGIDVGKRICRVALKDDMGKILDEFFFGNSYQGILELIKRIQDHGTKKCNAVLESTGNMWMRIHDTLEDNGIDTILANPYKTKIIAQAKIKSDKLDARILSDLLRSGLISESYVPVKEFREKRSLVRHRIALSRTKTKLANKVHAILDKYEYRTELADIFGKSGINWLKSLSVSPIDKIILNTTLSSIESIDNQIEIVSKEIAKYAWKDSQDVKILLSMTGIDIFSAMLISTEIVDITRFSTPWKLVSYAGLAPSTRESSGKIKTGRITKQGSPLLRWILVQCSLSAIRHDHHMRTFYERIKQRKGHGKAIVATAKEMLVIIWYMLTRHQLYKYINKNRYEQKLESLKKIGSQ

SEQ ID NO: 483998 - protein, 341 aa, unidentified
MKNLFIGVDFSKEKVDVAIIFADGLTETAARVFNEFKTTVSGYKQLVKWVEQNSYGIDSSLWLFCGENTGDYSKGLCNFLYGKGYDMWLENAKSIKDASGLRRLKSDRADASMIAEYAMRNYDRAIMYEPLSESLAQLRELFLYRQMVIRHRCSFQVRRGEKKLTMEKSPVKTMISQSGRHIVSELNKEVEKIDKRIAELIKSDEELTEVFTIVTSVPGIGTQNAVCLMVYTDNFRRFNYDSRKIACYYGIAPFGKDSGTSVHSDPHVHYMANRQIKAMLTQAALAAVKFNPVMARYYMRLVERGKKKPVALNNVKNKLVHLVTAMVRNRQTFTPEYKISA

SEQ ID NO: 483999 - protein, 337 aa, unidentified
MEHQQRYVGIDLHRRRSVIVHRNGEGETLETVHIDNDPVALAAELAKAGEHPEVIVEATYGWYWAADVIAECGGRVHLAHPLGNNWGHRRVKNDERDATDLVDLFRMGRLAEAWVAPPAQRELRELVRYRAKLVHLRSNLKAQVHAVLAKEGVAVPMSDLFGIAGQHLLDEVPLAEAYRMRVESLRQLIEHINDEIKKVEGRLAPFFAGDLGFDAIQAIPGVGPVLASVFVAEIGDVSRFTSARHLCSWAGLTPTHHESDTKVRRGHITKQGSRLVRWAAVEAVVRQRGDTSIRRHHHRVGERRGAQVGRVAAARKLLTLVYYGLRDGEIRCLANAG

SEQ ID NO: 484000 - protein, 382 aa, unidentified
MQASTIDTPTAEHCGTIFVSVELSQKTWLVTLHSPDRDRISRHKLEGGDHVGLLGLLESIGTRAALKLGTVPKVVSCYEAGYDGFWLHRLLTAAGITNLVFDPASIAVEQRSRRAKTDRIDGELMLRTLMAHLRGEPRVVRIVRVPSVEQEDARRASRERDRLIKEQTAHTNRIKALLRLQGMAVGYPRRGNWLHWLAQQRDWQGQPLSPHVLAEVTREHARLMLVREQLAALEQAQATQATVVPAAMAERRDLLQRLKALGPAFAATLTNEVFYKDFRNRRQVGAYCGLTPSPWRSGGIDREQGISKAGNPRARLKAIELAWLWLRHQPESELSRWFRTRTANAGKRAKRIAIVALARKLIVALWRYLTTGLVPAGATMKA

SEQ ID NO: 484001 - protein, 420 aa, unidentified
MKVVYSTCCGVDVHKTFLVATIIKTTKGVQPSYQKKRFSTFNSDIRHFKQWLLDNSCFDVCMESTGKYWIPVFNLLEDKINVTIANPKWVKAVKGNKDDTKDSKWIGDLFRLGLVPGSFIPCKDIRILREYTRYRFKLTCCKRSEKNRFQNAFTVCNVALDAVVTDMFGKSASSITDYLITSDEFDPETCKSFLQKSLKKKADSIIESIEGYQMTSSQKERMLMVRSHLDFVQQSIDSLDSKLDELIAPYENAVSLLCTIPGVDRTSAITIISEIGTDMSQFNSSKCLCCWVSLTPGNNESAGKKKSTKITRAGVYLKPALVQCAHAAVKSSTSPYYKNKYERISKRRGKKRAIIAIARMILTAIYQMLSNGETWNPCDLYKIDMPQEMQDKQKTKAIKQTLKLLVSEGVISPESASVAI

SEQ ID NO: 484002 - protein, 365 aa, unidentified
MLIHVPPDVRVLAIDAHKNSLTVGVLEPGSDSPVVDRVSTDDESVRRLMSRFDDPRRVWACYEAGPTGYELARVLRGGGMHCEVIAPSLIPARPGDRVKTDKRDARRLALLLRAGQLSAVRVPTVAEEAVRDLCRARADMVLDRTRARHRLGKFLLRHGRVWRDGENWTLKHEAWIRQQRFEERALNETLAHYRSTLAAREAAVEAIEADLWPWCDREPFTDAVHRLAAYRGITELGGLTLATEVCDWRRFPTAEMFMGFTGLIPSEASSGDRTHRGGITHAGNTHLRTQLVEAAWAYKSQPNVGPTMKRRHDGLDPAVLARAWTAQLRLCGKFRRLDARKTNRKIVVTAIARELAGFVWAEMTT

SEQ ID NO: 484003 - protein, 358 aa, unidentified
MQRNKNSFKGQKIFIGIDVHKKNWDVAIAPEVGNVKRHTQKASAKELFDFLKKHYPDGDYLAVYESGFSGFSTYYALKDVGIECKVIHAADVPTTQYEEVMKTDRVDSIKLVRSLKAGLLKGIYIREKENIDDRSVVRIRKTIQKQLSGYKARVKHMLHCNGVSFPERFEKPGSHWSKAFLKWLKEDVTLLSSTRNSLDLLIRQVETIRLTLLEATKMMRSLSQTERYKHKCDLLMTVPGIGFIVSMCILTEIYDVKRFHNEKEFAAYLGLIPTSHSSGDKVVHGEMTFRGNKQLGPMIIETAWISICKDAGLGSLYLRYKERMKPQEAIVRIARKLSNIIFAVLKNETQYVSYNMCK

SEQ ID NO: 484004 - protein, 426 aa, unidentified
MKESTSIKLASNSVLIGLDWAKNKHDTCLLAEDGTLEYGSIEQDQIKLNHWLDYLCGRFKGRRIAICMEAGRDPLLWRLEGHEQVDLFVVNTTTAARYRKTFAPSGDKNDQRDSASLLDLICRHPEKVTPHRPASAEDRAMDQLTKARRQSVNQLTGVVCSLREVLELYYPVVSKLFEHLGTALVIDFLRKWPDPKQLLKAREATLVKFFHQHNSRSQKCIDKRLELIKQCVPVTEDPMLLEVAHLRIEEHLSEIESLNGSIKQYDDALERAFAIHEQRHLFEGLPGAAKALAPRLLAAFSINNPKDANEMQLICGIAPIRVQSGQSMCTFMRRQCPKFLRQSFHEFAGSSIQSSLWAKAFYDDQTKTKNSGSNAAKRALAYKWIRVLTACWLSNTPYNEMKYIAQLQKRNSPLVELIFQNKPCTD

SEQ ID NO: 484005 - protein, 470 aa, unidentified
MTVVMIGIDPHKASHTAVAISAAEEPLGELRVRACAAQAERLLAWGGAWPQRTWAVEGAGGLGHLLDWQLLAAGERVLDVPPKLGARVRLLAAGDVNKNDPNDARSVAIAALRSAGVREVRADDHAAVLKIWAKRYRDLGRTRTQVVCRLHAVLCELVPGGFSKAITAGQAAQVLGSIMPPDAVAAARRELAAAFIDDLRGIDARIRETRKKLAAAVQAAGTSLTGLFGVGPVIAAAVIGDVRDVSRFGGRDPFAAYNGTAPIEVSSGPRKVYRLSRRGNRRLNHAIHMVAVTQVRHRHSEGRAYYDKKLAEGKTPKEALRSLKRQISNAIFACLQADARRAAARAKDPGGQQGNDSVTSAAGLHPRHRLVGQATPGPGHHPTTAAGSPAPGPARARGRAGHSPVAATPPPATPQVQVERPQRSEDERPGGAARRRPHSAARKARGQGSLRKPQCPKGTSQAAKNTGGTP

SEQ ID NO: 484006 - protein, 336 aa, unidentified
MAKKTLFAGIDVSKVKLDLALHGSPERHQFDNDRKGHKALISFLKKRGGKVTVTLEATGVYGLDIALALHTVRRFEVCYLNPARSRAFARVDNLSRAKTDKVDCGQLAKMGAVLDLQRWTPPATDKLELRSVTRRVRALIDESTREKNRLNEVRCTGTSSNLVIIDLEEHITQLETRIAKLRKAAIAHARSHPDLDEALDIIVSVRGIAEPSGIEILGAYACLPNDLSTRQLTAQAGLDPKPKQSGMIDSPRHISKMGSRHLRAAMFMPAINTVKHCPEVRRFFEHLTENRQKKPLVAYTAVARKLLCTIHGMLRTKTTFDATRFYNPHEKMERAA

SEQ ID NO: 484007 - protein, 370 aa, unidentified
MACVVDRPTLVTWTAARWLGGATGRREPTVVLRPGEEIPVVDRVPSDEESVRRLIGRFADRRVLSACYEAGPGGYELHRLLTSMGVACDVVAPSLIPKGASEKVKTDKRDSVRLALTHRAGLLTPIRVPSPAEEAVRDLVRARGDLLDDRKRMQQRLNAMLLRHGRIWHGAKWTYAHRVWVDKQVFDEAALAEAFALYRGALDAREAELAAAEAQMAAWAGRDPLAGPVARLGAYRGIAQLTGLTLAAEVVDWRRFASAPAFMGFSGLTPTEYSSGSRTRRGHITKAGPEGVRTALVEAAWAYRYRPAIGVTLRRRQEGASPDTLARSWKAQQRLHAKYKKMTARGKPPGVAVVAVARELAGFVWAEMTS

SEQ ID NO: 484008 - protein, 329 aa, unidentified
MIVLGIDVSKLKLDAALWLPETRKWYALRADNTNAGAGKLLQWACAKSGAEATQCRVVLEATGVYHELAAEALHDAGAEVVLANPKRVRDFAKGHGILNKTDAVDARVLARYGAEAEVIAWQPPPPEVRTLRALLSRLAAVEEDLQRENNRQEKARATQTPDLVLESLERTIQALTAERKRLRQAIHDHYDQHPDLKQQYDLLRTIPAVGEKSANQLLCLLRTKSFDSARQAAACSGLVPVTYRSGTSVYQQPRLSKQGNPKLRAVLYMAAVSSLKHNYELRRIYDRFVLGGKSKMAALGILMRKLVHIAYGVLKHQQPYNRALVSKIG

SEQ ID NO: 484009 - protein, 366 aa, unidentified
MTSVPSTAELIHLGMDTSVSEIVVAVLRPGQEIPVVDRIPGDEESVRRLIGRFPDRGLLSACYEAGPGGYELHRLLTSMGVACDVIAPSLIPKGSSDRVKTDKRDSVRLALTHRAGLLTPVRVPSAAEEAVRDLVRARGDLLDDRKRMQQRLNAMLLRHGRVWRGGKKWSYAHRAWVDRQVFDEPALAEAFSLYRGGLEAREAELAAAGARLASWAGREPLAGPVARLGGYRGIAQLTGLTLAAEVVDWRRFASARAFMGFAGLIPTEYSSGSRTRRGHITKAGPEGVRTALIEAAWAYRYRPAIGATLRRRQAGLPPDTLARSWKAQQRLHAKYAKMTARGKPPGVAVVAVARELAGFVWAEMIS

SEQ ID NO: 484010 - protein, 332 aa, unidentified
MNLVSTLGIDLAKNTFSVHGVDAQGAVVVRRTVSRNKLAELVAQLPPCLIGMEACSGAHEWARRFSGFGHTVKLMSPKFVVPYRKSGKNDGNDAEAICEAVTRPNMRFVPVKSVQQQADLGVHRVRQGFVEERTGTLNRIRGLIAEFGYVLPNGPEHIRRAVPAIIDALPARVARCVRDLLEHAERLAAKVLEYEHEIRLGVRDNELARRAQTRQGIGPITASALVATVGNGRDFKNGRQFAAWLGLTPCQYSTGGKTRLGHITKRGDAYLRTLFVMGARSVLQRAARETDPLSRWAFAVQARRGYHRACVAIAAKNARVAWALLAKEVAAA

SEQ ID NO: 484011 - protein, 416 aa, unidentified
MNAAGIDVSSRKSTVAILRPFGEVVKLPFDVRHNTEDLAALAAQLKSIDGETRVVMEHTGRYYESIAKVLHEAGLYVSAVNPLLIKAYGNNSLRKVKTDKADAMKIAKYALDNWGELRDYTPMDTIRYNLKTLNRQFQLASKQKTATANNLIALQEQSFPGIRKLFDSPVRSDGTQKWVDFTHDFWHVDCVSNGSQNAFTERYRKWCKRNRYQFSMEKAAEVYALAKSAVVLGPKTSVTKTLIQEAANQLTAISRSVETYRSEMNKLASQLPEYPVVMEMYGVGESLGPQLMAEIGDVRRFDRKQSLVAFAGIDPAPSESGDYCSRSNRTTKRGSPYLRRTLFNIMTVHLQRAPADEPVFQFMDKKRSEGKPYYVYMTAAGNKFLRCYYGKVMAYFSTLEGLSPVDMDSTGLHHAE

SEQ ID NO: 484012 - protein, 348 aa, unidentified
MRFYTKKHRYHCGIDLHARSMYICILGDEEKPLVHRNCKASPDAFLKAIELYRDDVVVGVECMFVWYWLADVCAKEKIPFVLGHALYMKAIHGGKSKNDRIDSHKIATLLRGGTFPLAYVYPRKMRSTRDLLRRRNHLMRKRSELLAHIQNTNSQYNLPELEKKIAYKANREGVTDHFPDASVRKSIEVDLQLLDFYDQLLTNLELYIVKKVKAHDVRSWYLLRSIPGVGKILSLVVLYEIHDIRRFPRVQDFASYCRLVKCPRESGGKKFGAKNSKIGNVHLKWAFSEAACLFLRGNEQAQHYHSRLVSKHGKGKALSILAHKIGRAVYFMLKRKEPFNMETFFARA

SEQ ID NO: 484013 - protein, 355 aa, unidentified
MDSVKYIGMDVHKEAISIAVLSSSGKLVMECTIETKASTILQFFQGLSGSLHITFEEGTWAAWLYDLLKPQVTKLVVCNPRRNALLKEGSKSDCIDARKLAELLRSNLLRPVYHGEHGVRTLKEMARSYLTISKDVERVMSRLKAIYRSWGIPCTGKQVYAPRYRSEWLGKIAEAGVRRRAEFYYQQFDALRSLRQEVRHDLLVEANKHSATKLLREIPFIGPIRAALILAILQTPHRFRSKRQLWTYSGFGIETHGSAEHRYVEGELQRSKKPVSIRGLNRNHNHDLKNLFKSAATVAAAKPGPFQEFYDALVAKGIKPEMARLTLARKIAAITLTVWKKGVRFDAKYLKPQTA

SEQ ID NO: 484014 - protein, 415 aa, unidentified
MEKVYDIRCGIDVHKKLTVACLRKGRRQEIRQTGATTRELLELADWLKSEGCQMVAMESTGSYWKPLYNVLEMSDLPVMVVNAAHMKAVPGRKTDVSDAEWIADLTAHGLLRASYIPDKAQRELRELVRYRKSLVEDKTRELNRLQKMLEGANIKLSGTVQDINGMSARNMLNHIVAGKKFDEAAFDEMRQQGKISSCLKAPKSQILDDLNGVLSPLQRRVMQELLSHLDELNEHIRNLNDEIDRFMKPEERDAAEKIQDVPGIGQTSSQVIIAVIGTDMSRFPTDKHISSWAGLCPGNNESAGKRRSGKTRKGNAMLRSTLLVCAHSAVKVKSSYFYAQFTRICAHRGKKRAYLAVAHSILIAIYHILKDGVPFHDLGADYYNQFNKESKIRACLKKLHSLGWSEPTGTVVAPV

SEQ ID NO: 484015 - protein, 416 aa, unidentified
MRVSGWAGRAIGLDVHRDFCVVAICEEGVVRSAGRVASTLEGIGTLAASLLSTDRVALEVTGSAWEVTRLLEPHVDRVIVVSPDDTGIVQARAKTDRLDARTLATLLSRGELEAVWMPDERCRVMRRRLARREQLVRARTRSKNEVYAVLQRRLQGRPPCSDLFGVKGRCWLAGLELPEEERESVDASVRHIDFLEVEITAVERLIAQQALVWPEIRRLMTIPGVNLVCAASLMAAIGSADRFLTSRRLVAYLGLDPKVRQSGEAPARSGRISKRGSASARWALVEAAWSVVLQPGPLHAFYERTRARRGHGKAIVATARKLATLCWCMLTRGEDYAHQQPSLTRQKLRRLELTAGAPKNTADAAGRWSTNPRIREAERELARQAETSYQRMVRDWQATAHKKKAGASVTPERAQV

SEQ ID NO: 484016 - protein, 427 aa, unidentified
MNCNEVTRHREFCQFKAEVRLSRDYLIIGIDVGKDRHHAFLGTTTGRTLLRRLLFDNNKAGFERLVAKASQLQVEHGLSRAVYGLEPTGNYHKPLSSWLLKQDRLLVLVSSKAIADNRQTLDGRWDKNDTKDSANVADLVAQGKCQFFEVPDRQLVQVRNLLSLRRRLRKDEHSVRMQIRNGLVTKYFPELDRYWGNCLTENLAIVRWCLDPRKIRSMEFEDFLRQVTRRERGIRQHKRLMRIYETAAVSIGCPMDDIAEFEANLLVDRLEKIREKIGQTETEIKDLCDSFPAYRRLLTIPGYGPYVSSIVLARIGDPHRFNSRKQLIRLAGLDLNAKRSGKRSNAAVPVISKRGNSELRYALYQAALIATYHNDRFRALFARYLQGREQERGIKTKMRVKLAAKMIVIAWTLMKTNTNFYPLLIGV

SEQ ID NO: 484017 - protein, 338 aa, unidentified
MTLYAAIDLHSTNGVLAVIDEHDSVVFERRLPNDLPQVLQALTPFRESLGALAVESTYNWYWLVDGLMSEGIDVRLVNTTAVPQYAGLKHGNDHTDARHLAHLLRLGILPEGYIYPREQRGVRDLLRRRFLLVRQSVTVTNSLQAAWSRRTGHGLCGNDFRTLTPAMVEATFSDPHDRLGVVGQLQLARFLHTQIEQIEGWVLQDIGRMPAMAALRSTPGIGVILGSTILLETGPIDRFASVGDYASYCRMVESTRLSNGKKKGAGNAKCGNRYLCWAYIEAANFAIRHSAEIRRWYERKSAKKPRVVAIKATAHKLARAGYHLIKHGGHFDVKRAFG

SEQ ID NO: 484018 - protein, 387 aa, unidentified
MTAVVIGVDPAKRSNTIEVIDSSETVLVTARFENTNQDYRKMRTLVKRWPDRVWAVEGATGVGLHLAQRLISDGERVLDVPSKLSTRVRAIDSGHGRKNDPTDAHAVAVVGLRTKGLREVVADDQTVAMRLLSERRRDLVRSRTQAVNRLHQVLMELIPAGAQRHLTAAKAKDLLATVRPRDVAGRARRQLAVDLIDDVAVFDRKIKAVDVRIEEAVEASGTHLTDIVGVGPVTAATILGEVGDIARFATADNFASYTGTAPIEASSGDVIRHRLSRAGNRRLNSALHIVALSNKRYDPRGKAYYERKLAAGKGSKGSLRCLKRRLSDVVFRVLIEDRAAANPGGQMGATLTASAVDQIPKVNTSDKPQPGSSSEATPIKRLAEAAS

SEQ ID NO: 484019 - protein, 343 aa, unidentified
MTKALYAGLDVSLEMTSICVVDAEGGMILEAKAVSDPADIGEVLTGIDGVFERVGFEAGPLSQWLYNGLTSAGLPAVCIEARHAKAAMVAMNRNKNDRNDARSLAQLIRSGWFKSVHVKSTESQEMRTLLMSREFFVNKLRDHENEIRGLLRPFGLKVGRVAVRDFEARVRELVEEHPNLELCMSALLRGRAEMQAQRAELHRALLRLTANDELCRRFMTIPGVGPVTALAFKSTIDDPGRFRRSSDVGAHLGLTPRQYQSGETDVRGRISRSGDAFTRAALFTAAHVMLTRSRQWTSIRAWGLRIAKRSSLKKAKIAVARKLAVVMHRMWRDDAPFHWGAAA

SEQ ID NO: 484020 - protein, 369 aa, unidentified
MADRITYVGLDVHKESIVVAVAAGGLRGEVREYGRIANTPTALDRLLRKLGGDGMTLRFCYEAGPCGYDIHRRLSARGHECVVVAPSLIPKRAGDRVKTDRRDAASLAKLHRAGELTAVWVPDVGHEAMRDLVRARLDAVHSLRRARQQLSGFLLRQGCHYGRPAWTKLHRRWLAGLNFGQAVHHIVLEDYIAAVEVAEARRDRLTAQIEAMLPDWALAPVVAALQTMRGMALVNAATLTAELGDLSRFANPRQLMAYLGLVPSEHSSGASVKRGGITKAGNAAARRLLIEAAWSYRFPARLSRELLLRQESQPKLIRDIAWKGQLRLCARYRRLTRTGKPANIVTTAIARELSGFVWAIARQVTMTTG

SEQ ID NO: 484021 - protein, 313 aa, unidentified
MPTPLNFGIDVAKDTLQIAWAESPAELCLANRRRAIADWLAKLAPGSRIAMEATGRYHLLLAELAHAAGMIVYVLNPCDLLHYARAVGLRGKTDRVDARLIGRYIVREHAELHPYVPPTPVQREIDQLLRRRATVVETKTRLRLSLHGMVGLAADLRIALKRLDGLITKLDQRLRQLATHQAESLRRVESVLGVGPLLGVALTNTFERVPLRNGDAAVAFVGFDPRAKDSGQCIGRRRLSKRGPAELRRLLFNGARSASKTKLWRPLYERYRARGLSTIEATVVLARKLVRVAFSIYRHGTTFDPARFARGLT

SEQ ID NO: 484022 - protein, 395 aa, unidentified
MIHVGIDIGKLKHCFCIIDYSTGEELVTPTFFENNQSGFRVLSRALADFPKDSLLIGMEDTGHYHFALLRSLIAQGFNVALMNPTTTDFERKRQGSATKNDKLDTITICDVLACAPHKKKLYRLVTPANFSMYEMKQLTRQHHNLKEQLNTYSNRLQRSIDLTFPEFNSLFKSKYGEVFMNILKNYGSAEKIAQADIRSLRKCFSIKGKGKRIALTAEQLKETAKVSVGYGSLAEEMNIRHLVDQIELLHAQIAEIDKKIEEFSLESNSPILTIPGISHFSGTSILAELGDIRNYDKVSKVIKMAGVAPREYESSQFRAEHTAITKKGSKYLRKTLYQIIVPVIRFNPVFKAFYDLKISQGKGHRCAQGHCVRKLLRIIYHLLTTGQQFDPVLLK

SEQ ID NO: 484023 - protein, 413 aa, unidentified
MSIDPNTAAARVTAGVDWAKDDHVVCVTGCEGEVLDRFTVGHNAAGLKRMAARLLRAGAGQVGIERGDGPVVDTLLQAGLTVFVIPPAQIKHLRSRYGSAGNKDDRFDAYVLADVVRTDIRRLRSMVSDSEQATALRSSVRARRDLVGHRVAAANQLRAHLQNVFPGAAALFADIDSPITLTFLSRFTSQEQADWLSPRRMTAWLASVAYSGGTDPAVLHARLLAAPRGVTGQHAGVHAATTLAWVAVLRTLNAQIQALAASIGTQLASHPDAAIFTSLPRSGTVRAARLLAEIGDARGRFPTRDSLTCLAGVAPSTRQSGKVKSVTYRWAADKQLRDALCDFAGDSRRASPWAADLYNKAIARGCDHPHAVRILARAWAHIIWRCWQDKLPYDPAAHNSLQALLSQHPPLAA

SEQ ID NO: 484024 - protein, 343 aa, unidentified
MTRFVGLDVSQKLTAICVVDDSGRRLWRGQCASDPDQIERTIRRHGGEDARIGIETGPMTPWLVHELRGRGLAVTCLDARHARAVLKMQINKTDQNDAEGLAQIMRTGWYRSVHVKSFDSHRARALLGARAQLVGMTTRLSNHIRGVLKTFGMLPGAGRNLAFDRRVETLLADRAEVAPIVQPMLAAWRQLRQQTATFDKAVRVLVKSSPTCRHLMGVPGIGVLSVLAYVSMVEDPARFGRSRSVGAHLGLTPKQYQSGEIDRSGRISKCGDALARTLMYEAAVVLMTRVKRAHGLKDWAQAIARRSGAGKARIALARKLAVILHSMWRSGEPFRWSEQPAAV

SEQ ID NO: 484025 - protein, 370 aa, unidentified
MQFIGIDLHTNKFTCCYRDEKPSDIGKDSKRIETFDLSTTGLAQFYKTLTEDTYVLLEATITTFCFVRLIQSKVKEVIVGNTYELKQVSLGRNKTDKIDSDKLCRIMKMQVLSGEKAISPVTVPPVAIQDLRGLFSTYRLLKKQSTQFKNRIHSLLKEKLYGFTQEQIFGKGSRKMIREMDGDPVLMFQLNHLFDLLENLEAGIEELEEKIKEEAEPFMSEIEILTSMKGISVLIAISIIADIIKVDRFKDSKSFTSYLRSAPRVESSNTTKGNKGTNKMGRKLSATLITQVLNHVLASSPKLDKWYSRLTAYKKAGSVRTGLRRRVFAEIYQMLKKGEYHYGRDIKKHKEKLSQYKRFLENRKNLLKSA

SEQ ID NO: 484026 - protein, 347 aa, unidentified
MLHAGLDLSRKRLDYCLLDEHGDHVEVGAAPPDADGLAGFARRVEERHRQPVHAAVESMNGARFVHDTLERCGWEVEVADAQKVKGLAPLACKTDRIDAWVLAELSRRELVPAIWLPGFEARAERERARWRLFLVHKRSALKHRVHAQLLAFGHSCPVSDLFGRRGRELLGRLDFPEPWHGGVLAAVAMIDELDREIAGIDRELRALGAEHRYVPLLMSVPGIAWVLGYTIAAEIGDIERFASPKKLCGYTGLCPRVYQSGGTDRRGPLTHAGPKYLRWALMEAAIHACRHELYRERYQRNKRRLGKQRGAKVAQVDIARRLAEAIWHMLTRNQPFAPAGATQALAA

SEQ ID NO: 484027 - protein, 357 aa, unidentified
MRRLTCGMDLHSDNLVVGLQDQDGKRIAHRRLECDLQKVLEFLKPFKKEVEAIAVESTFNWYWLVDGLKAAAYPVVLANPAKIQQYSGIKHADDTSDAFFLAELLRLKILPTGYIYDPVLRPVRDLLRRRMSLVHQRTSLMLSFKALFARTTGQSMKLGALKTMSVAEAQRLYEHPANQLIAGLQKKHIEDLDQSIGKIEKTVLKVAAHLPYYPKLKTLPGVGIILGLTITMEVGQIERFASAEDFASYCRTVDSKHLSNGKKKAENNQKCGNKYLAWAFVEGAQFAKRYDEQCRRWYDRKAAKTSTVIATKALACKLSKAAWYLMAQNTNYDPARVFPELAAAKAEKPKKMKIKEP

SEQ ID NO: 484028 - protein, 362 aa, unidentified
MPTIADTCRLVTGGVDTHAEVHVAGVADQTGRVLGTQEFPATAAGYTAALAWMRGHGDLVKVGVEGTGSYGAGLARYLAAQGVEVAEVMRPSRQARRRRGKSDAAGAIAAALAALNGEASGKPKSGDGTVESIRALQVARRGAVKARTQAGNQLRDLVITAPQMLREKLAGLPAPERVRLAARFRPGPLASPAEAVKAAMATVARRHQALTAEIAQLDTALEALLENAAPAGFRARKGVGARVTAALLITAGDNPARLRSEASFAALCGASPVDASSGKQRRHRLNRGGDRQANSALWRIVFTRMATDPRTQTYVARRTAEGKTTREIIRCLKRYVAREVYKALTGPRPGRPGQHQPHHSYS

SEQ ID NO: 484029 - protein, 359 aa, unidentified
MGELSKVGMKTVGLDLGDRWSHFVVLDGKGQLVEEGRVATGEPALRKRFSGCERMRIALETGTHSPWVSRLLKDCGHEVIVANSRKLRLIYENRRKNDRVDAMYLARLARLDPQLLWPIEHRGPEAQKDLALLRSRDALVEARTQLINHARGLVKSVGQRLPRCSSEAFPRKVLGAIPGSLQPGLLPVLEMITSLTAQIKALDRRMDALADEVYPETKLLRQITGVGPITSLGYVLILEDHRRFPKSRAVGSFLGLTPGSKKSGDSDPQMRITKEGDALLRRLLVGAAQYILGPFGPDTDLRRFGSRIAQRGGKNAKKRAVVAVARKLAVLLHHLWRCGEVYEPLYQETRKTVRRGKAA

SEQ ID NO: 484030 - protein, 391 aa, unidentified
MIYVGIDVAKDKHDCFITNSDGEVLFKVFTITNNLDGFNDLYQRIESVMDDVTKVKVGLEATGHYSYNLLGYLIDKGLPAYVINPLHTNLYRKSLSLRQTKTDKVDARTIASMLMSDVNLKSYSDTSYHNEELKSLTRYRFDKVKERAKLKSSISRLVCILFPELEKLVPTLHMASVYAMLSEFPGAKHVANAHLTRLTNLLSESSKGRYGKETAITFRDAARSSIGSNIPAKSLELKHTIKLIQEISSEIDEIENEIKIIMDEINSPILSIPGINYRMGAMIIAEIGDFNRFDSPDKILAYAGFSPSTYQSGQLDGAYSHMEKRGSRYLRYALYNAAKYVCHWDPTFAEYLDKKRSEGKHYNVALSHAAKKLVRVIYHLEKTNQQYIKAS

SEQ ID NO: 484031 - protein, 344 aa, unidentified
MKITTIGLDLAKNVFQVHGIDAAGEVVVRRALRRGQVFAFFSKLEPCLVGMEACGTSHYWARELGSLGHDVKLMPPAYVKPYVKRGKTDAGDAEAICEAVTRPTMRFVAVKSADQQSVVMLHRTRELLVRQRTQLVNIIRGQLAEFGVTLAKGIQHALKFVRQLLDGQVLDIPDLGVKVVMVLAEQLRQLQIRIGELEKELKRWFRADRVAQDLATIPGIGFITASALSSTVTDPNQFTSGRQFAAWLGLTPRANSSGGKERQGRISKMGDQHIRHLLVSGMTSQLRWARRHPDAHPWVASLLARKPAKLVAVAMANKAARIAWVVMTRGEVYRARQPSTQLTA

SEQ ID NO: 484032 - protein, 449 aa, unidentified
MGQRTVGIDLAIRGDHVARILDDGRPQGRPIRFRLTPDSLDRLLAGVRDGLPPGGTVTAVMEPTGMAWFPVARWLEQAGIKVIRVKGQRVRALRRYLSEHAKTDAADAYVLGAIPFFGGVPADPVYVPDAERHALQRLTRQRERLEDEVTAIKRRLLDLVRWACPALEAVLPDFRTKLALAVLHDLLDPASVAKARRAVLLRFVAKHASGNHPHRGPFAEALVDGLKAAAAETRRLHGTAVDFARLQLEVALEIDRLRLTEGQLTRLGREIEALYRKLHPSDALRTIPGIGDALAPLVLGVLHEARRFAGLHQLRGFCGLFPRTSSSGGADKPGQAITQSGNNRIKRALYLAADAARRIDPGLAAVYWRLMVRKGHHHKQALCAVATRLANRIGKVLRTGKVYELRDIDGTPISVAEGKAIVAERFGVPAEIRSARRRCRPAVTLAATA

SEQ ID NO: 484033 - protein, 341 aa, unidentified
MDKELYFGVDVSKKTLDLAYYDGETIDWKNAHIKVSNDDAGFKKIGSWVAKVGKDFDTFLFCMEYTGLYNQNFRLWLESKEYIYGMVEPRKMHRFEPDLDDDQRSLDRIKTDELDAFRIAIYCEQNHKKILRNPSKLPSPVYFKLKRLLAERKQNTKQSTLYKQQLHDICAYDTDLSVERKKLLLKSMKENQKAIDREIDSYINEDASISKNYDLLTSIPGIGRIIALETIVLTENFTAISNPRKYACYIGIAPFKKESGTSVRKRTTVSKKGFSEAKADLSIAVLSAIKNNPSIRDYWIHKRKDKCGGIVLNAIKFKLVLRMFAVIKRGTPYVETDAYKN

SEQ ID NO: 484034 - protein, 341 aa, unidentified
MGQAHTIGLDIAKRVFQAHGADASGRVVFRKRLVRAKVLAFFAAQPPCTVAMEACAGAHHWARELGKLGHIVRLIPPAYVKPYVKRQKNDRADAEAICEAAQRPSMRFVPVKTEEQQANGVVFRARDLLVRQRTQCINALRGHLSEYGYIFPQGITHADAVIAHVEDPDSAVPESARAVLTVLIGTFQALEAQIQALDAEITQRAKADPVARRLMTIPGIGPIAATAITALVPAPEGFRAGRDFAAWLGLTPLQTSTGGKQKLGAISKMGERTIRRLLILGASAVVRWAGQRGTPAGSWLARMLARKPKMLVTVALANKTARIVWALLVKGGVYRAPAPAA

SEQ ID NO: 484035 - protein, 364 aa, unidentified
MQKISMQTSGKNIFEGQLTIGLDLGDRSSAYCVLNAAGEIVLEHRLATTPEAMKQVFGSLPRCRIAMETGTHSPWVSRLLMALGHEVIVGHAQKVRLITKSRRKDDRLDARTLARLARIDPELLSPVKHRSAQAQLHLTEIRARAALVSTRTALVNAARGLVKSYGERLRKCHTQQVGREMTRELSMGLREALKPLLQEVESLNERIKEYDRRIEKMAKEMYPETALLKQVKGVGDLIATAYVLTIEDPHRFRKSRDAGCFLGLQPGRRNSGESEPQMRISKEGDEYLRTLLVQGAHYILGPFGEDSDLRRWGQKLSARGGKNAKKRAVVAVARKLAVLLHRLWVSGEVYEPLRNSQKPMSTAA

SEQ ID NO: 484036 - protein, 416 aa, unidentified
MNAAGIDVSSRKSTVAVLRPFGEVVKLPFDVRHSAEDLAALAAQLKSIDGETRVVMEHTGRYYESIAKVLHEAGLYVSAVNPLLIKEYGNNSLRKVKTDKADAMKIAKYALDNWTELRDYTPMDTIRYELKTLNRQFQLASKQKTATANNLIALQEQSFPGIRKLFDSPVRSDGTQKWVDFTHDFWHVDCVRSGNQNAFAERYRKWCKRNRYQFSREKATEVYALAKSSVVLVQKTSVTKTLVQEAANQLTAISRSVETYRSEMNKLASQLPEYPVVMEMYGVGESLGPQLMAEIGDVRRFERKQSLVAFAGIDPAPSESGDYCSRSNRTTKRGSPYLRKTLFNIMKVHLQRAPADEPVFQFLDKKRAEGKPYYVYMTAAGNKFLRRYYGKVMAYFSTLEGLPPVDMDSTGLHHAE

SEQ ID NO: 484037 - protein, 320 aa, unidentified
MNQALVFVGVDVSKASVDVALRPGDERWRLARDDEGARDLVARLLALRPTLIVVEASGGLELPLVAALAAEALPVVVVNPRQVRDFARATGKLAKTDALDAAVLAHFADAVRPALRPLRDAETQALTDLMARRHQLIAMLVSEKNRRGVASAAVLPRLEAHISWLEDELRALDVELRQTLQRSPHWRERDELLRSVPGVGEQLSLTLLAHLPELGNLDRRQIAALVGVAPFNRDSGALRGRRTIWGGRARVRGALSMSTLVATRFNPVIRDFYQRLLAAGKPKKLALTACMRKLLVILNAIVKHQSPWRDLSDQVATPSS

SEQ ID NO: 484038 - protein, 317 aa, unidentified
MEMTGRIVGIDVSKDRLDVAILPEGSTLVARRDGKGLAELCEQLRVLEPMLVAIEATGGFESVAAAALASAGLPVVVVNPAQVRHFAKAIGQRAKTDPIDAAVIARFAQATKPQVRALPDEATRLLADLVARRRQIVDMMAAERQRRGRTTRRRLLRSIDRLLTALQKELSEIDAEIDASVRGSPMWRESEDLLASVPGVGPVTARTLIAEMPELGTLGRRQIAALAGLAPFVRQSGQWKGKSMVAGGRKSVRTALFMAALVAGRHNPVLKAFRRRLIAAGKPKIVAVIAVARKLLTILNAILRHRRPWNATLVEAS

SEQ ID NO: 484039 - protein, 361 aa, unidentified
MAKKAKKLRVAGGVDTHHDTHHAAVVLMNARRLADAEFPATAAGYADLLAWMRGFGRLCAVGVEGTGSYGAGLARHLRGQDVRVIEVSRPDRRQRRAKGKSDPLDAYAAAEAVLAGRATTVPKAGDGIVESIRALHMVRAGAVKARTACTNEMRALLVTAPAELREQLPARSAVRLVDACVRLRPAGDLADPTHGVSAALRRLALRYQALTAEIADSDTELAALVKQARPDLLAVHGVGVEAAAQLLSTCGDNPDRLNSEAAFASLCGVSPVPASSGRTIRHRLNRGGDRQANRALYMIVITRMGHDANTRAYVARRTTEGLSTKEIIRCAKRYVARELYKILTRPASARGAPTVVPAPGP

SEQ ID NO: 484040 - protein, 433 aa, unidentified
MNDHPLPVGIDFSQKQAAIALLLPDGQPLEGHRTFANSTSGYVQAKRYLLDALHAQGLAGLDISGEATNYYWLPFFVRLADDPDLAAQEVQLFLLNPRWVRGFKKCFAPDDKTDAKDPFYIAERTRTRRPPVPWQPQTEWWPLRFYTRLRFHLAQALTREKNFAHVYLFLRCSAYHRTRPFSDTFGATSRRVLTALPALPALTAQPLAERANLLDGWSGHHLPDPLDNARKLQQAAAESFPLEAALAEPVQRVLDLTLQHIADLEALIAQVEQWIADEVQAHHPEVLNLAGILGIGPVLASGIAAEIGDLSRFFHGQKWDKKRQRFRAKNLRDVEDAVAKLAGLWWPPADSGDFVAQERRMAKTGHRYLRYYLIEGADGRRRYLPEYAAFYARKYREVTKHQHKRALVLTARKSVGLIVGLLHRNEAYRAQEG

SEQ ID NO: 484041 - protein, 387 aa, unidentified
MYFVGIDISKYKHDCFVTTETNCVIKENFSFDNNSKGFQQLLDLLKSFDNNQEIRIGFEATGHYHMNLMLFLEKNNYSFMELNPALVKRSIVATTLRKTKTDKLDAIAIANYLKSVDYKPHPKQFYHKYALKSLSRRRTAIVNQRSFYMVQMTNVLDITFPEFKPFFSNKFSATSLYILNKYKTSEKIANMKDYDSLRKVSRGKFSYPRFLKLKELAKDSVGTDNELFALQLQTFLSLYFHINQQINLLEDKINDIIKELNPQFLSIKGIGSVTCAAIISEFGHIPRFKSPDAMVAFAGLDCSIIQSGTAEHYGKMVKRGSSHLRYHLMKAAEYIFMYEPLFTVYYYKKRDEGKSHRVALNHIAKKLIRIIYKLETENISFDRSKLR

SEQ ID NO: 484042 - protein, 314 aa, unidentified
MSQPVFVGIDVAKDSVEVCCSDTSTHAFENTEAGHAKLLRWLRRKTVTLVILEATGGYERACAVALAGAGLPVSVINPRQARDFARAMGRLAKTDRLDARALAEFAVVLHAQGHQPRALASQEQRELVALVARRRQLVAMLVSERQRLAVAHERARASIEAMIEALLAQLAGIDNDIQRVLQERYADLSALLQSVKGVGPTTASTLIAELPELGHLTRKQITSLAGLAPINRDSGTLRGQRHIFGGRASVRRVLYVAALVATRFNPLIRACYLRLVAAGKPKKVALVACMRKLLITLNAIARTGERWQPDFNCA

SEQ ID NO: 484043 - protein, 343 aa, unidentified
MDYFAGLDVSVKDTSVCIVDGTGKIAREVKVASEPAALLAVLTGSSYRFKRIGLEAGPLSQWLFSALAEAGLPVICVETRHMRAVLKAQINKTDRNDARGIAQMMRVGLYRPVHVKTLRSQKLRMLLTHRKLLQAKVIAVENDLRATLRNFGLKVGVVGTVKFEARIKELVESFPDLVALVEPLLVVCRVLREQIAILHRRVLATVRDDKVCRRLMTVPGVGPVVALTYRATVDVPARFRKSKSVGAVFGLTPARDQSGERDRPGAISRCGDEMMRTTLYEAAQVMLLGSAKWSWLKAWAMKIARHRGMKKAIVALARRLAVIMHRIWTDGTEFRWTREAAAA

SEQ ID NO: 484044 - protein, 368 aa, unidentified
MISSTKYIGMDVHTQSISIAVRNSVGKVLMDCVIETKASTILQFIDGLRGDVRVTFEEGTWAAWLYDLLKPHVTQVVVCNPRKNALLKEGSKSDKNDARKLAELLRLNHLQPVYHGENGIRTLKELSRSYLTINKDLTRVMNRLKALYRGWGIACPGNDVYAPRHRAEWLDKIREAGVRRRAEHYYQQLDVLRLLRQEVRRDLLVESKKHRGWKLLRQISGIGPIRAALLIALMQTPHRFRTKRQLWNYSGLGLETHDSAQYRVVKGQLERSNKPVTLRGLNKDYNHDLKGIFKGAALRASIAAGPLHGFYEALLAKGRKPTMARLTLARKIAAITLIIWKSMPTPRLCLLLRGNSGWEELGLCPESA

SEQ ID NO: 484045 - protein, 352 aa, unidentified
MSQYIALDVHCAFTEMVVVDSRGRIVKRERVATRIPHLEMVLNEVGKPRWLTFEEGPMSGWLYRHLQGLVDKLVVCDPRRNRLVSKDSDKDDPIDAEKLAQLLRGGYLKEVHQAESLERAVFKQHVGLYHDSVRGRVRMANMILAQFRRFGIFSSEREMVDGEIRSTLLRQLPAKGPLREDIQTLWRTYDAHLEQEEQMRRRLVSQGRREATIRHFVQVPGILWVRAATFFAYVDTPWRFRSKQALWKYAGIGLERSHSGCGPTQLRVAQYANRRLRGVLLGAAKTVIGNRTHPFYDQYQHWTQEQGISARNARRNVARSLASTLWGMWKNGSEYRPQFVGQGGKTADTLAS

SEQ ID NO: 484046 - protein, 335 aa, unidentified
MSNVTTVGIDLAKNSFSVHGVDVAGAVVLRKTVARARLVELIAMQPPCVIGLEACSGAHEWARRFRAFGHTVKLIAPRFVAPYRKGGKNDGNDAEAICEAVSRPHMRFIPIKTPEQQAVLCLHRVRQGFIQERTATINRLRGLLAEFGFVLPQSAAAVRRGVAALLEQLPAHAARALGDLREHLRSLDTRVREYEHAIEAHARESQPAQLAQQRQGIGPLTASAIVASVGDAREFKNGRQFSAWLGFAPRQHSTGGKQRLGHITGRGDPYLRTLLVMGARSVLQRAPGQNDPLSRWALALRAQRGYHRACIAVAAKNARVVWAMLNRQTRCGVEA

SEQ ID NO: 484047 - protein, 315 aa, unidentified
MTKQLPAVNVGADVGKSQLDLYLLERDRALTVPNEEQAIASLIRSLRRYRIERIVIEATGRLEQPFVRAALAQGLPVIVVSPLKIRRFAEAIGQLAKTDAIDARLIAQFAATVKPVARPPSDANAQAIKDLVVRRRQLITLRTMEKNRRQVMPQDLKSSIDRIIKTLDRELKRLEQLIDHAVDQHAPSRHKRELLTSMPSIGNSVATTLIGDLPELGSLNRREIASLTGVAPFNRDSGKLRGKRRIRGGRAHSRTALYLSAMVAIRFNPDIKRFYERLLAAGKHKKVALIACIRKIVTVLNAMIRDNSPWQPAMT

SEQ ID NO: 484048 - protein, 427 aa, unidentified
MTEQVDDSAELVERVAALDIGKATVMACTRIPHEDGRRRLQEVREYGTTTGALLALAGQLHELGVTLVVMEATSDYWKPVFYLLEAEGFTCWLLNARHVKNVPGRPKTDKLDAVWLAKVAERGMCRPSLVHPRPIRELRDLTRYRRSLIRERTAEKQRVEKLLEDAQIKLSSVASNIFGVSGRQMLAAMLDGEGDPTVLARMAHSRMRAKIPQLREALAGNFTSHHAFLLRMMLDRIDGLTARVEEVTARIEEQAAPYARAVEQLDEIAGVGITSAQELIAEIGVDMSRFPTAGHLVSWAKFAPIDRSSAGKPKGSSTGKGNPWLAATLGEVIAAAARTDTFLGERYHRLARRRGKRRAIVAVGNSILTIIWHLLSDPEASYRDLGHGYYQQRSDNRHRERDLIRRLERLTGQTVTLQPAPGQEPAA

SEQ ID NO: 484049 - protein, 410 aa, unidentified
MKQQCDRVAGLDVHRDSVVACVRLGRGDEPQVHRRSFKTTTAGVDGLARWLADFEVTRVVMESTGVYWKPVYYPLEGLFAELWLVNAAHVKNVPGRKTDMADAEWLADVAAHGMVRPSFVPDPPVRELREITRYRKSQVTIRAQEVQRLEKVLQDAGIKISSVASTVLSMSSRAMIEALIAGERDAAVLAGMALRRMRPKIPALAEALVGRFDAHHGAVARVILDHIDFLDAAIARLDEEVAARLGPFRAAVELLQTMPGVGRTVAEVIVAETGADMARFPTAGHLAAWAGVAPANNESAGKRRHGGTRHGANWLRRALIEGANSAGRSKGTYLGAQYRQIAARRGPNKAAVAVAHSMLVIAWHMLTTGSTYEDLGGDYFASRRSPEAEARRLVKRLEALGLTVTVTQAA

SEQ ID NO: 484050 - protein, 342 aa, unidentified
MEKITTIGLDLAKSVFQVHAITEDGHVAVRRALRRSQLLEFFRNVEPCLVGLEACGSAHYWANAIGEFGHTVRLMPPAYVKPYVKRNKTDAADAEAICEAVTRPTMRFVPVKTPDEQAAGMVLKTRELFVRQRSQTANAMRGHMAELGIIAATGMTSIAKLIAILRDDGDGRLPHSARAALLEMADQIERLTERVEVLDSKIIAAVKADDAARRLTTIPGVGPIIAATVRAAVQDPAAFRTGRDLAAWIGITPRANSSGGKERLGKISKRGNKQLRTLLIVGATSILKQARRGSRLPSWVVSIMARRPYKVAAVALANKMARTIWALLVKGGTYQAPMMAKA

SEQ ID NO: 484051 - protein, 387 aa, unidentified
MPQLNDLSRSLVALDQDSTIIAVVELSQSSWLVAGVLPGIERQPQKKLEPSAERLLGLLHRWRDEAVRAGKKITRIALAFEAGRDGFWLARWLNARGVEAHVIHPSSVAVSREHRRAKTDRLDTEMLKRGFLGWLRGERGHCTMARVPTIAEEDAKRPNRERECLVGERTRIVNRIKSTLARLGIRNFKPTLRKAAERLATVHTPEGMPLPPNTLAELQRDMARLGFVVSHIREIEQARQKRLEQETETGPHAKVRQVARVIGIGIETADMLVHEVLSRPMRDRKAVARYAGLTGSPDESGARRREQGLARTGNARVRRGMIQLAWRFLRFQKQSALAQWYRARTADSRLGMRKTMIVALARKLLIALWRFVTTGEILEGVILRPAG

SEQ ID NO: 484052 - protein, 341 aa, unidentified
MNIKRIGIDLAKEVFQLHGVDSQEKVAVRKQLRRSQMLAYFGKIPPCLIGMEACGSAHYWARELQKQGHTVKLMAPQFVKPYVKSNKNDANDAEAICEAVARPTMRFVAIKTIAQQDIQAIHRIRSELVRHRTAKVNQIRGLLAEYGLAVGRRVEVLRTALPLLLEDAENGLTLDFRVLLEDLRQDLIYLDQRVDDMDTKIKLLANTHSEAKRLLAIPGIGPITATALVCAIGDGGQFKRGRDFAAWLGLTPRQHSSGGKDRLLGISKRGDSYLRTLLIHGARSVLRVAGNKDDPRSRWIQNLCNRRNKNIAAVALANKNARIVWALIARQTDYLPEGKPA

SEQ ID NO: 484053 - protein, 460 aa, unidentified
MKQCRRKSPPQKKSGCSSFSMINKDAAGIDIGSGEHWVAVPEDRDEEPVRCFGCFTADLQAMARWLKECGVTTVAMESTGVYWIPCYQILEEHGFEVKLVNARHVKNVPGRKSDVSDCQWLQRLHTYGLLSGSFRPDDQICVLRSYWRHRANLVRYASDHIQHMQKALTQMNLHLHKVLSNVTGVTGMNIIRAIISGERDPEKLALMRERGVKNTPEAIAKALEGDYRQEHLFALKQAVELYDFYHRQIEACDREIERYLHTFEAKVDPVQNPLPRQKRKKEMRYQSFVDLRTELYRVSGIDFTQIPGLDVVTVQTVLSEIGLDPGKFPTEKRFVSWLGLCPNNRITGGQVKSTKTRKTANRAANAFRMAAQSVANSNTDLGGFYRRIRARLGAPKAITATAHKLARIFYRMWTTGQSYTDLGSDYYENRYKERVLRNITRRARELGYDALLQPIEQRVA

SEQ ID NO: 484054 - protein, 353 aa, unidentified
MELLHERCDGLDIGKKDLTACVRSPSPSGKRSRRQEIRTFATTTNALVELREWLVAEKVTLVVLEATGDYWRGAFYLLEDCLNVILVNAAHAKGLPGRKTDVCDAAWLCQMGECGVLRASFVPPEPIRGLRDLTRYRATLAAERTREASRWEKELEDAGITLCSVATDILGVSGRAMLSALIEGERDVHVLAEMAKARMRSQIPQLVEALTGHLGEHHAFLCRLHLQRIDQLSAAILQLSQRIEEAMAPCARQLEQLQTIPGVGQTTAEVLIAETGADMTRFRTAGHLASWAGVCPGHHESAGKRKSGKTRHGNRWLGGALGTAAMAAALTASTPPTATIASLITRDIHTLLR

SEQ ID NO: 484055 - protein, 354 aa, unidentified
MRTTEQAVRKVISAKEVYVGIDVHKESWHVTVRSDGEERFNGRIPGRYQSLKMVLERYRDLRIKVAYEAGPFGFWLLDRLVLDGIEAIVVPPSLIPIESGNKVKTDKRDSRKLATLLEKNMLKRVYVLTREEREHRDLLRTRRQIVDHRNNVARQIKSKLMFYGISSPFTSTTRWSVQYVEWLKTITFETTYLKEAFDLLVELYENLTRQIAKINRNVVALCRDKKYRQKIKLLCTAPGIGKLTAIELLVELQDITRFKSAEEIASYIGLTPAEYSTGERTRQGRITRCGNKRVRTYLVESTWVLITKDPYLRAKYLRLKNLRGGKRAVIAIARKFLIRLRRMLLDNVPYRMAA

SEQ ID NO: 484056 - protein, 357 aa, unidentified
MEASPRPPGARKPETELGAVSTIAVPHPDSRSGPSPHLQGRVMDEQRTVFVGIDVSKDRLDVHLRPSGEAFFVSREGKGMDDLVIRLQGLSVALVVLEATGGFEATVAAALAGVGLPLCVVNPRQIRDFARAMGRLAKTDTLDADVIALFAERVRPQARPLREPERVHLAELVGRRRQIIEMIGMETNRGRQAIDKPLARRLARHVAYLQKELDAIDHDIGDAIKHSPAWREAEALLKSVPCIGDVTARTLLAELPELGTVSRHQVAALVGVAPINRDSGLMRGRRAIAGGRTSVRAVLYMAALTAIRRRSPFRAFYDQITARGRPKKVALVAVMRKLLTILNAILRDHTPWRPLNA

SEQ ID NO: 484057 - protein, 385 aa, unidentified
MGIETFIPRDYDVFAGLDVDKKSISVTFTDHQGLLKSMRMPYSVDHLVNHVRKHYGDKKVAFAYEAGPTGYGLYDGLVAQQYPCLIASPSMIPKAPGQRVKTNRLDSRGIAENLRGGQLKSIHIPTTLYRELRHLTQLRDALVSEMVAMKQRIKSLLLMEGLEFPPAPPGSQWSFLVKAKLRKLPCSSVVRFKLDQLLDNLEFVEKQILKTTREIRRFCHNDPELSQCIDYLKSLPGIGWIVASQMMARIGDWRQIKNIREVPAFLGLVPTESSTGERTTRGSITHSGDPRLRSKLIQASWSAIRQDGELLKFFRTVAKKHPRHLGPRVAIVAVAHKLCVRAAVVLMKQRPYEMREKVQSAPLTQEETVPQGTTRRRRVPGEKIS

SEQ ID NO: 484058 - protein, 353 aa, unidentified
MNSLSEIVEVVIGVDTHVETHTAAVLDARTGAVLDELTVPTTSRGYQDLVDLADTHGALRVWAVEGTGGHGAGLARHLARGEEFVLELDRPERAKRRHGAKSDPLDAVRAAREAMSRPKLGTPRSGGDRQALSVLLAARRSAVDACAVAQRQLFSLVIAAPEHLRAKLRGRKLPEMLTVAARLRVQPGWDTESATTAATLRLLARRAQALTAEAAEIEKQILVIVRAWRPDLLNEFGVGPIVAATVLCAWSHPGRVRSEAAFAMLAGVAPIAANSGQVTTRYRLNRYGDRQLNRALHVVVLSRQRFHEPTKAYTDRRTTNGKTPRDIRRCLKRYIARDLYRLLEHGPHRLDEP

SEQ ID NO: 484059 - protein, 317 aa, unidentified
MSQRFIGIDVSKDSLDLDVAVEATDKPQPQRFDNDASGIARLTHLVQGLAPRLIVLEATGGYEVAVASALSVAGLPVAVVNPRQVRDFAKARGRLAKNDRIDAGVLAHFGRALQPAPRPLAKEQEQHLRALLERRHQIVEMITMETNRLSSAPVCVHASLTEHIGWLKSRLQDTDRDLHQRIQETPIWREKEELLRSVPGVGPVLSCTLLAALPELGQLNRQRIAALAGVAPFDCDSGKYKGKRLIWGGRAGVRSVLYMGTLVATRHNPVLRAYYQHLLSVGKAKKVALVACMRKLLVILNAMLKNKAKWQPVTQTS

SEQ ID NO: 484060 - protein, 355 aa, unidentified
MKPRKRRITGGVDTHKDTHHAAVILMNGRRLADAEFPATAAGHADLLEWMRSFGRLHAVGVEGTGSYGAGLARHLRSAEVRIVEVNRPDRRQRRAKGKSDPLDAYAAADAVLSGRAMAVPKAGDGIVESIRALHLARNGAIKARTACSNEMKALVVTAPAELREQLPARSATKLAQVCARLRPLADLADPAQGVKAALRTLARRYNALTAEIADSDAQLAVLVKQARPDLLAIRGVGVETAAQLLATCGDNPDRLQSEAAFASLCGVSPVPASSGKTRRYRLNRGGDRQANRALYMIAITRMGHDADTRTYVQRRTADGLSKKEIIRCLKRYIAREIYKVLTTRNTRDQDLTLAA

SEQ ID NO: 484061 - protein, 386 aa, unidentified
MQRNDLSRSLVAFDQNSTLVSVIELSLKTWLVAGLVPGLARQPLKKRGADPDALLALLHRWRAEAIKAGRKIDRIVVAFEAGRDGLWLARWLRARQIEAYVIHPTSIPVSREHRRAKSDRLDTELLMRAVLGWLRGEAKHCSMVAISTLAEEDARRPNREHQTLVKESSRIVNRMKATMARLGVKGFNVKLGKAVEKLAGLRTPEGVPLPANTRDELRRDMERLRLIRQQTQEIEKARLARLKKAPQSGAHSMLLMLAKVLGIGVETADMLVHEVLSRELRDDKAVGRYGGMTGAPDESGSKRREKGLSRAGNARVRRGMIQLAWRWLMFQKESPLTQWYRARTAGAGQAVRKTMIVALARKLLIALWRYVRTGAVPAGARLRAAI

SEQ ID NO: 484062 - protein, 368 aa, unidentified
MKDLLEISCGLDVHKEKIVACILTGPLGKPTRSEIREFSTLIPDMIALRNWIVSKNCHHVAMESTGIYWMPIYEILEDAFSGDITLLVVNARHMKNVPGKKTDMRDSEWISTLLRAGLLNGSFIPEKRIREFRDLNRYRKSVIRDITSQKNRIEKFLQSSGFRLSSFISDIFGASGRNIILHLIEHGQIDKTALDSCLKTKTRNRIDEILMSVNGTLSEHQKAFLRILMTHYDSLKKHLAEIETSLEEDMAPFALQVEQLNSIYGISTTASCAIIAEIGIDMKPFKTAEHICSWAGLCPGNNESAGKRKSTSVTKGNPYIKSMLCEIAWVIAGKRNGFFLSPSGVGTYTILNSIFYFSTLITLCAHSR

SEQ ID NO: 484063 - protein, 365 aa, unidentified
MLHVGLDLSSARVALCIMDTEGNVVRQATVASDPAAIAERLEPYMAEIASVGFEAGPTSAWLARGLRERGVPVIVIDAAHVAAALRSGFRNKTDRNDARGIAGMMRVNTYRAVWVKSPEAQRDRTLLAVREQLRRQSLDLRNNIWSILQAEGLKPPKLANTKFQTLLDVALADAALGPVLRPLKAVVDKLDEEIAALDRRIKARAKASEPCRLLMTAPGVGPLVALTYVVGMDDPARFAKSQNVGAHFGLTPRRYQSGNMDWSGGISRAGDAGVRRALYQAANVLITSQPGLVRAEVMGCPPCSPPWTGQGQSGPRTQARRRAAQDVDHGRTLSLREAGLTSPRHRSAAAVPAPLTWVLSGTRSR

SEQ ID NO: 484064 - protein, 332 aa, unidentified
MVEGTEGSHHKEGSTKMRKHNTICAGIDTGKRKLDVARADGGRLQIENNSDGHRVLSAWLRKHRVKRVGIEASGGYEQAVVAKLRRDGFLVIVFQPAQVRAYAKFHLQRAKNDKIDAALIADCTAATQKIHAPPDPRLAPFAEHLTLVEQITEDVAHVKTRRESCRDHRIRCHWDNEIARLKTQLRTELKALIAAIRQHRDLSARLDLIASVGGIGLKTAVAILVRMPEIGRVSREQASALAGLAPYDDDSADQVGVRHIEGGRERLRKSLYTAALAAAFHWNPQLKIVYRRLIASGKPHKVALVACARKLLIYANTVVARGTPWTERPAAI

SEQ ID NO: 484065 - protein, 338 aa, unidentified
MELYAGIDLHSNNSVVTVLDAADRTLYAKRLPNDLGMIVAALRSCRGAMRGVAVESTYNWYWLVDGLQDAGFTVHLVNTTAVKQYDGLKHSGDFSDARHLAHLLRLGILPEGHIYPRAQRAVRDLLRKRSQLVRYRSAQILSVQNLQARNLGARASSNEIKSWRAASIDALELLEEQKQSLKATLAVMRCIDTQISAVERSVLAKVKTRADYKALKTVSGIGEVLALTIALETGDIGRFAGAGNFASYARMVNSAHESNGKKKGQGNTKCGNKYLAWAFVEAAHFAVRYDATIKRWYQKKCASSLAVVAIKAVAHKLARACYYVMKDGRAFDAARAFG

SEQ ID NO: 484066 - protein, 443 aa, unidentified
MGVVPEEIIDAEHERILDRVAAVDVAKDSGMVCTRLPSTGPSGRRVSRVWQVSATTNTVVDLAAVLVGAGIEKVTVESTSDYWRIWYYLLEAAGLDVQLVNARDVKNVPGRPKTDKLDAVWLAKLTEKGLLRPSFVPPVPIRVLRDYTRMRVDLTRDRTRNWQRLEKLLEDALIKVSSVASTLKTVSTRDMIEALIAGQRDPRTLAGLARGQMRSKHAALIEALTGRFDDHHGELARILLDQIDRLDDQIRQLTTRIEELIATTSHQVTPANHDHDARPAVDAMQRLSQIPGLSRETAQLIIGEIGLDMTRFPTAGHLVSWAKLCPRTIQSGASTSSGKTGKGNPYLKGVLGLAAATASRSHNTFLAERYRRIVKRRGKLKALVAVARSVLVIIWHLLADPNTHYHDLGPDYYHQKINTGRRTNTLVRQLEALGHTVTLQPAT

SEQ ID NO: 484067 - protein, 363 aa, unidentified
MTQTTAKTSPVTIGLDVGDRNTHACVLDASRAVVARFSFATTGSQLTHALRGFPSARLVIEAGSQSPWMSRHLREQGFAVHVADPRRVQLLAQDPRKTDRRDAETLARMEAGMPELLGAVHHRGLQAQADLAIVRARDLVVRMRTKAIQCIRGMSKAFGVRLPNASSKVFTKRAIEELPVELKPAIEPLLAQIDQLSETIRNYERRMDDVVHERYAAEVALLRQVSGVGRITATAFVLTLETPDRFETSRQVGSWLGLCPRSQASGDADPRLPISKAGDGALRRLLVQCAQYILGPFGGRQESDLRNFGLALVARGGRAAKRKAVTAVARKLAVLLHSLWKHKSTYEPLRQTACRPRRVALKA

SEQ ID NO: 484068 - protein, 479 aa, unidentified
MTPSKDAFPEPCPPLPTIPEPLVLRPSSSLPLHNPHAAGIDIGEAEHWVAVPPERASQPVRRFGTFTADLDTLADWLLDCGITTVAMESTGVYWIPLFELLEARGLQVFLIDPRQAKRAPGRPKTDRLDCQWLQRLHAYGLLAAAFRPDNQVCVLRSYLRHRQMLLTYGAHHIQHMHKALQQMNLTLSQVVSDLTGATGMAILTAIIAGERDPLTLAKLRNPHCQHSEDEIAKALQGTWRAEHLFALQQAVELYQFYHQQLTVCDQQIQTHLGTFADKSAGQPLPPKPRRHKKANEPRFDARTPLYRLAGVDLTIVEGIEEGTALVILAEIGTDMSRWPSVKHFCRWLGLSPQHKISGGKVLSRRVRPGAHRVAVALRLAARTVQQARTALGAFYRRMRSRLGAPKAITATAHKLARLVYSLLKHGSAYVKQGIEAYENQYRERQITAMARQAKAFGYTLVELAVPAPSQHDAIAPSTS

SEQ ID NO: 484069 - protein, 371 aa, unidentified
MKEAITSYVGLDIHKDSVAIAIAEAGRAAPRFIGTINPVPSELCKALRRQRCRPENTLLVYEAGPSGYGWVRYLRRQHWSCEVIAPSRITRSPSEQRVKTDRRDALMLARQSRAGDLTPIVVPDERDEAMRDLVRAREDACAARLRVGQQMKAMLLRHGRDYARHNCWSQAHERHLSTIRFEHPAQEIAFNEYRQACKETCERVDRITQALREQCEHWRMNPVVKALMCLKGFEFVAAVSLVAELGDLTRFAHPRALMSYLGLVPSEFSSGNTRRQGAITRCGNKHARRVLVEAAWNNRFKAQVTRVLQVRQQGQPKIIREISWKAQLRLSKRWRTLSMGRKLNQNKICVAIARELAGFIWDVARHVRLAT

SEQ ID NO: 484070 - protein, 375 aa, unidentified
MKRYCGLDVHKDSVFMCIIDEFGFKKEHKFSTLTSDLVLLREALLDSDVGYVAMESTSIYWIFIWRLLVDHFDVKLVNPLFIKQLPGRKTDVKDAHWIATVLMKGLICGSYVPDQPIQCLRQYERCYSRLNKKIVSCEQFIDMQLQRCNIRFSNYISDIGSQAMRKVLKSIILGKTTPIELLECAHTRTKNKHGVSVIRESLNGVFEQVDIDMIKLLVEELELHEQHQQECLMNMVRICNDSYADPISLLTTIPGIKQQSAMTILAELGNELSSFKTSSSLVGWAGLRPRNEESAGKIKSRKTMHGNKFLRVILVQCAWGASKSKSSKLGIKFQELKKRMSPQKALVAIARKLLVIIWNVLTKRETYRASATPNC

SEQ ID NO: 484071 - protein, 343 aa, unidentified
MRKDMMIGVDLAKSVFQIHGATMDGTVKFRKKLSRPQFLQFMSKQAPSVVAMEACGSSSFWARELTRLGHDVKLISPRYVKPFVKRQKNDAADAEAIVEAAQRPELRFVDPKTEDQQARAMLYRVREKLVCQRTELVNALRSYLYEFGHAFPQGIAHLKRIETLVDDPDSKLPELVCNECRDLLIQISEISERIDIKTRRIKDLAAETDTARRLQTMPGVGPITALAVEAFAPCMTSFKRGRDFAAWLGLVPLQHSSGGKERLGRVSKAGQADIRKLLIMGAMSRLNWLGRKSIPDGVWLAKLMERKPKMLVAIALANKMARAIWAMLTRNEDYRELAGAVAV

SEQ ID NO: 484072 - protein, 459 aa, unidentified
MRILGIDLAVTARHRAILADERGQFISRLMKFRTCKADLDRVYATACKGMAPDESLVVVLEATDIVWYPPAVYFLQRGATVYVVNPRMAADLARFYKRHAKSDRLSAKVLARLPVVSPDSLYPYVLPGPDYMALQRGCKELERLTTAASAIRNRLQSIDHLGWPDLKRRVFADPFSPAARWFRDHVYDPRQVVEAGPSGLRQAWRAVEELYNGDEDWIEPLVTLAAEMLTLYGPQGDYLDYTALAAEVQREQRRLAALEAEAHFVRLKVTRPLYRRLHPSRNLETLYGVGQDGAAVYTAFIHHPDRFPNNRAYRGWHGMVPRSNQSGERESKGLSISQAGPDPIKKYAFLGSETARQWDPQIADIYHDQMVNKGKHHTQAVCACATHLLDRIRVILLEDRPYELRDVDGTPVTHQQARAIIAERYTVPDEVRQRNNNRARRERAKRRAERKEERRSRSR

SEQ ID NO: 484073 - protein, 373 aa, unidentified
MEQFIGCDAHKKYSVFVAVNERGEASQAVRVGHDRDQYRQFLERLPAGSQIALESSGHYYWIVDEMEAAGHHPRLAHPLEAKKRMGKTGKKTDKVDANGLGILLRNGTLPEVWIPPAELRDQRELLRLRMFLVQQRTRLKNRIQGALARYNIQIEVQDVFGVEGRRRLGMRLGELPEHTRQSVGLELVTLDFVGIQIEEVEKRLEAIMQVTAEADLLKTLPYVGRILSMVMTLEIGRVERFPSAAHLASYAGLVPRVHSSGGHTRLGQICGDVNHYLKWAFVEAGNLVVIHQKRLAGQHVVRLYQRVKRKRNHQKAVVAVARHLAEAAYWILKKQQVYREPKLKLKVPAEAQAVKHSFVDARVSAEPAIALVG

SEQ ID NO: 484074 - protein, 394 aa, unidentified
MKLVGIDVGKNNHHFCVMDKETGEFNVTPSSFSNNKEGFDFLINSLKPYSKKSILLGMEDTGHYHVALLKFLLSNGYTVALINPKTTDLTRKMEGGITKNDKLDTITICDVLDTPERKKQYRITKVDRFDLYEQRQLTRHHHNLKEELNIYCNRLQKSIDLVFPEFNTLFGSKYGVVYMNLLKTFGSAEAIASTDIRTIRKCFEIKGSGNRISLTPEKLKECAKNSIGISSEVETIQIKHLVSQIMLIKEQIAEIDKKIEEFSIKNNSPILSIPGISHFSGTSILAELGDIGNYSKPSRIIKFAGVAPYHYESSQYNAQHTAITKKGSKYLRKTLYQVILPVINNNPVFKKYYRLKISQGKGHRCAQGHCIRKLLRVIYHLLETGQSFDPALLR

SEQ ID NO: 484075 - protein, 356 aa, unidentified
MTIVAHAHPFVIGVDTHARTHTLAVLVAATGEPVATEQFPATAAGMDRAVAWAARHTDGEMATLWVIEGVATYGAHLASAAKRAGFEVVEAAAMNARAHRGTGKSDPFDARRIAASVLSLEPEQLRRPRSDDGIRAALRVLVTARAHMTTERTATINALTALLRTAALGIDARKPLTARQIGAVVRWRTRAEDLATSTARAEAVRMAKRVVDLNEQLAANQAQMIDLIRASKAAALLDKTGIGPVTAAVVYTAWSHAGRVRSEAAFAALAGVNPIPASSGNIIRHRLNRGGDRRLNRALHMAVITRMTHDADTRAYVERRRAEGRTSKEIRRCLKRYLARQLYRTLESLHTEPNAS

SEQ ID NO: 484076 - protein, 401 aa, unidentified
MLSVGIDTHERIHYAEIQDEKENKLWHGKIRNIKEDFESLIDKIKKIENSNNDKVEFIFMNPTGNYHIPLKYFLENNNFTVYMVDARKTLNLRKMINLNTIKSDSEDAHILAATPWHDPKYREYTGHNRSSLSSISRERSIVVKSITAIKNYIHSDLAAVFPEFTDLYSINSAAGMAILYEYATPYSILNAGIDNIIKSIKKASKGHYRIEDINRLMETAENSIGIPDKDDAYKFKIRMNISRLRDEMNNLKNIEKEIISRSSNNGDVNNLTNLRGLGIINSAIIVSEIGNIEQFESALKLQSYAGKCPDIEGSGGKTHSKGITHVRNKFLSNAVYESAISLVMNKNKEFYDIFNREIGKKKSNVQAYIAVSKRLLFHIYSIMKNHKPYKEKMVGNYKRYA

SEQ ID NO: 484077 - protein, 301 aa, unidentified
MDKITAVGLDLAKQIIQVHGIDAGGRVVLRKAVRRERLLALLAQLPRCVVGMEACSGTHHWARELRQLGHEPRIMAAEFVRPFRKSLAVKNDANDAEAICTAVVQPNMRFVSLKSVEQQALLSLHRIRQGLIEERTATINRLRGVLAEFGVVFPQSAVRLQRALPAVLADEQGLPALVQRSVQMLREHLHDLDARLAEFDRDIAQHAKSSAPAQRLVALSGVGPLTASAVVATVGNAQDYRNGRQFAAWLGLVPRQYSSGGKRKLGRITRRGDAYLRALDPRRALNATIGIAPSAGTTRSA

SEQ ID NO: 484078 - protein, 403 aa, unidentified
MNAVGIDVSKGKSMVTILRPFGEIVSSPFEIKHTSSDIHSLIKLIHSIEGESRVVMEHTGRYYEALAHQLSAADLFVSAVNPKLVKDFNNDSLRKIKSDKADSVKIARYALDKWQSLEPYSITDELRAQLKVMNRQFHFYVKQKTAMKNNLIGLIDQTYPNANTYFNSPTRSDGSQKWVDFVSTYWHVDCIRKMSLNAFVEHYQNWCKRKKYAFNKSKAEEIYTKTKELVPVFPKNKITKHIIRQAIDQLNSTSVTVETIRTLMNETASKLPEYSIVMQFKGIGPSLGPQLMAEIGDVTRFTHKGALTAFAGVDPGVNESGSYAQKSVPTSKRGSSNLRKTLFQVMDVLIKTMPQDDPVYQFMDRKRTQGKPYYVYMTAGANKFLRIYYGRVKEYLSVLPDPS

SEQ ID NO: 484079 - protein, 345 aa, unidentified
MHIASIGIDLGKTTFHLVALGERNKILFRRKFSRSQLLAYTANLPASLIGLEACAGAHFLGTVLREQGHQVRLIPAQFVKPYRKTNKNDFIDAEAIAEAVAKQNMRFVQIKTQEQLDWQAMHRVRDRLVQRRTALINEMRGFLLERGLVFAAGPTQLRKNLPSVIEDAEQNLSPRLRWLLDRLWQEWKQTEIDIKTITDELERISNEDARCRRLRQIPGFGPLVSTATVAAIGNGAAFRRGRDFAAWVGVVPRQYSTGGKQKLFGISKRGNLYLRRMLIHGARAVLFRVKYDTAGFGQWVHRLAQRAPRNKVVVAIANKLARIAWAVLSSGQDYRHQPLQQRAAA

SEQ ID NO: 484080 - protein, 372 aa, unidentified
MNQTVIHVGLDVDDTQYHGSALDKRSGEVIDFKCRPTLKGLLGQLEKLGQHFPDCPLKLCYEASYIGFTLQRDLTANGYVCEVVAPTNIPIPRGKQIKTDRIDASQLAQYYANGLLTVVSVPECEQEQDRDLLRTRQKLMDQRTELRRHLQALLRRHGLHYKAEAQSKTHWTKQHYNWLERATEGTSGSFQANLALLLQQLKNLNAILAKYDKQIEALAASPRYQAPVQALTCYKGIKHHFALTMITEIGDIKRFPHPRQLVSWIGMDIREYSSGGKHNRFGITKHGNRYLRTAFIEANQRSYRSTRIGKDLKARRAQSAPEWIAIADRCLQRLSKKGNRLLLSGKHPNKVKVACAREMVGFVWESLNKVAA

SEQ ID NO: 484081 - protein, 319 aa, unidentified
MLIGIDIAKAELVVAARPSGERWTVANDERGVRTLVERLRVEAPELIVLEATGGYELLCVAALVAAALPVVVVNPRQVRDFAKATGQLAKTDRIDADILALFAERVRPVVREIPDADAQELDALLARRRQLLEMLGAERNRLGQVFGRGKRQVKKSLKGHIAFLERELRIADTDLGDTVRRSSAWREKDDLLQSVPGVGRVVSLTLLADLPELGRLSRRQIAKLVGVAPLNRDSGTLRGRRFVQGGRASVRAVLYMAALVASKRNAVIRAFYQRLLTAGKPKKLALVACMRKLLTILNTMIRTRQRWSADHNSQVLLPA

SEQ ID NO: 484082 - protein, 425 aa, unidentified
MKYSQNEKIRQVSADTLVVGVDIASEVHYARAFDWRGMELGKVLRFDNELDGFASLSTWIQELQRAAGKNAVLVGAEPTGHYWFCLAHHLRWKNMKLVLVNPFHVKRSKELDDNHPSKTDLKDPKTIAKLVIEGRYIEPYIPQGLYGELRVLMECRQRIMDALTVTKNQIHRWLAIYFPEHRKVWNSFEAESSLMVLRVAPLVADILALGIEGINRIWRDAKLRAVGIKRATSLYAAASHSVGCPGGEAARMELTLLLADYDVKKAQYDEVMAAVERLCEQLPEVAVMLTVKGVGLVTVASFVAEAGDIRRFDSPKQIQKLAGLAIRQISSGKSKGSSGISRRGRARLRTALFRAALSLARTNPEFAALHKYYTTRQNNPLKKKQSIVALSCKLIRVFFALASKQTEYDPQRLMGDIHRPLPLAA

SEQ ID NO: 484083 - protein, 355 aa, unidentified
MNSEKYIGLDVHQATIVVAVTDSSGKLIMESILETEAATILQFFAGLRGTLAVTFEEGTWSAWLYDLLNPHVDKLVVCNPRKNALLKDGNKSDRIDARKLAELLRGNQLKPVYHGETGVRMLRELSRSYLTIVKDLSRVMNRLKAVYRSWAIPCAGRDVYYRRHRAQWLDKIREAGVRRRAERLYEQLDMLQKLRQQARRELLAEARKHAITAKLRQVPYLGPIRSALAVALIQTPHRFRTKRQLWAYSGLALETRISAEYRMVEGQVRRSKKLLCIRGLNKDHNHDLKGLFKGAATMASVRPGPFQDFYQAALAKGIKPTMARLTLARKIAAITLTLWKKGESFDAEKLKSQAA

SEQ ID NO: 484084 - protein, 319 aa, unidentified
MSSEWVYVGLDVAKATLDVALRPSGECWQAANDDAGVADLVARLQAVAPTLIVCEATGGFERPAVAACAAVGLPIVVANPRQVRDFARGTGQLAKTDTLDAGILALFAERVRPTPRPLPSDAAQLLDALLTRRRQLLEMLVAEKNRLGFAPRPLHRGIRRHIRWLERQLDDVTTEIAALIEASPVWQAKSNLLQSVPGIGPIVSAVLLGELPELGALSHKQIATLAGVAPLARDSGTLRGKRMVWGGRGGVRTALYLAALCGRRWNPQLRVFYERLRAAGKPKKVALIACARKLLTIVNAMVRDHARWASPTLRVQHSC

SEQ ID NO: 484085 - protein, 402 aa, unidentified
MRDSPTRFFGLDIHKEYFVAVAVNQERETVFGPQRVSNYQLEEWARRVLTSQDAIVLEMTTNTYLFYDTLLPLVHSVIAVHPPNVPLVTNVHVKTDKKAAETLAQLHAVGMLKGVWIPPHEVRDLRALIAHREKLVHLSTMAKNRLHAMEHRKHLVLPDNPFSPDQRTWWENLEFSTTEKLLVRSDLDTLEFAQKQVEQVEECLKQKSAQDERIPLLIQLPGVALLTATTILAAIGNIARFPNAKKLVGYAGLGTRVHDSGMTHSSGRIIKAGRKDLRRAMVNAANHAVQDHPHWKAEMERLEPHLGRSKAIVAIARKLLVAVWHVLTKQVADRFADPQNVARSFLNHAYRVRIKNLPKGQSAPAFIREQLDRLGIGKDLQKISSGSTLIKLPPSKLLPQKE

SEQ ID NO: 484086 - protein, 369 aa, unidentified
MDKYIGFDIDSNKTSVCIVQKSKADRYATIGPDAGSMRKFLVNEKKDCPRVHLTFEISGQAGFLYDSLIDCVDSIKVANPDKMTWIYRTAKKNDRIDARKMAVLLSIGEIPAVHMPTKEVRQWRMVICHRKKLLAGSVTAKNRIRALLKSQGINKPIHRGSWWRVVNRVWLRGLCVGGFDVNNLWKLQLGNLLDELEMIEKQIASVTEYLDGYLDKQAGGGLLMSIPGVGPRTAEAVLAYTDDVERFAGGKEYCGYFGVTPKLDESGNCRRLGHISKKGPSVVRWVLCESSWKVVRYSKSMKSFYERVMAGQKSRKKIAIVAVARKLLSIMRAMLLTGATFSEEYVSSLDYGRIEKLRNLSAVGVAESA

SEQ ID NO: 484087 - protein, 377 aa, unidentified
MSKVRFIGLDVHAETIAVAVAESAGEVRSLGVIPNRAESVRKMIGKLGPMEHLRCCYEAGPTGYFLYWQLTRMGVACEVIAPSLVPLKQGDRVKTDRRDAEKLARCYRAGELTPVWVPDAAHEGLRDLVRAREAAKKDQLRHRHRLGKFLLRHGIRPMNAGPAWTQKYLNWIRIHARFDQPALQATVDDYLAEVNHASERIVKLEKAIDGAVAGAPAEIRAVIEALQALRGVAQTTAATVVCELGSLARFESPRQLMAYSGLVPREYSSGSRTQRGAITKSGNAHLRRVLVEAVWSYRHRPNVQGRVLRRQKALALSDEAKQTAWKAQQRLHKRFVVLTARGKTSGQAMTALARELLGFLWAIAVSVEKRFPPAQAA

SEQ ID NO: 484088 - protein, 359 aa, unidentified
MDIQGTSVGLVVHALSVVAHAVDEETGKVSKARLCPDHGEVLGWLHQLRAPVRMTYEAGPTGFGLARAINEAGMECVVAAPSTLQRPAGDRVKTDARDAAHLARLLRLGEITAVTVPEREIEAVRDLVRAREDARVDLMRVRHRLSNCFCGRGSSIFGGTPWTCAHEEWLRRQRFDDAHLKAAFDHGFDAVLAATAARDRLDEQITEVAASPRFADPVNRLGCLRGISALTGLALTVEIGDWSRFTGSSIGAYVGLVPCEYSTGTSRVQGSITKAGNTHVRRLLIEAAWHHRKSYSTSGPTLRARWAVVEPALRARGHAGNRRLYKRWRHFTERGKNPLVANLAIARELAGWCWSLATM

SEQ ID NO: 484089 - protein, 379 aa, unidentified
MNQYNTLFIGLDVHKDSIAVAYAPEEIGVEPTYLGPIGTRACDIDKMIRQLYSKAPRLRFVYEAGPCGYWLHRDLQRRGEECMVVAPSLIPRKSGDRVKTDRRDAMLLARLLRSGDLRPVYVPSPQDESIRDLCRLRQALVGDLNAAKRRLKSFMLSHDLRYYEGKVGWTAAHLRTLATNAPHDPAQKIVYQEHVAAVSHLMERQTLIEGELRQHASTWRLAPLVEAYQAMRGVQFHVAVTVAAELGDLTRFDKPRQLMAYVGLHPSEYSSGATRRQGGIAKTGNAYARRVLVEGAWSYRHPARVSRQIQMRQELLPEEIREIAWKAQMRLCKRFRRLVARGKHRNLVVTAIARELVAYLWAIAKKVPCAQVEGEAKAS

SEQ ID NO: 484090 - protein, 356 aa, unidentified
MNEGSWVGLDVHARSVVAGVVDQGSGEVRSLRLPPGGEPTVAWLQTLPAPVRVVYEAGPTGYGLARACAGAGISCVVAAPSRVRAAADRVKTDRRDAERLARLLRLGEITPVRIPAPEEEAARDLVRAREDARGDLMRARHRLSKLLLRHGLVYEATAWTRTHDAWLRRQRFQGGPLAIVFDECYGRMLDAKSRRDALDKAIAELATTPTYLDVVSRLVCLRGVSTLTAFALTVELGDWNRFRPESLGPFLGLTPSEHSSGERRRQGGITKTGNSHVRRLLIEAAWHQRRPPRTSVTLERRRDGKPLALQAQAERSARRLHGRWHALEMRGKPRSIVVVAVARELAGHCWALATME

SEQ ID NO: 484091 - protein, 385 aa, unidentified
MATTIIGIDPHKESWTAVAVDPRGQKLAALRAPVTVAGYRQLRRFADQYQEPVWAIEGAYGLGAPLSALLAGDGVTAWDVPAKLAARVRVLSTGHGRKSDEDDALSVAVAATTSTKLRPVHTDPAATELKVITEHRDDLVRTRTQTVNRLHAIMVLLVVGGAPRNLTADTAAALLRRVRPSESLAVTRRLIATDLVAEIRGLDKRITTATGHITTRVDNAQSTLTSIPGIGPLTAGKILARTGMVTRFTTEAHFAAYAGVAPREVSSGDVIRHRLSRGGDRQLNYALHVIALTQISMRTSPGRIFYDRKRSEGKSSKEALRALKRRLATVVFRILTADYTRLAVGPAGQPGTALISSVTGSHPCTGSSDKSLTRPTTTKPTHDAT

SEQ ID NO: 484092 - protein, 349 aa, unidentified
MRYIGVDLHKTNFVVCFLNHDESCRLETFPLSKAGISRFTSELSKDDAVAVEVTQNIYYFYDQIKTYVGRIVLVDTYRFAIIAASKKKTDKADAQALARFLKLDHLPTVPIASEKVRQLRHLLQARETIVGLRTKLKNMGHAALTRNGIALLRSAFASGVARERLRTRDDLSSADRVILHSALRQIAELDKEVEQLEAEIVRLGKTLAGVKRLLQLHGLNLLSAISLLAEIGDIHLFETSKQLVAYSGLATSVRQSNQTTRQGHITKQGRKRLRTVAIRAVLSMVNRTNTPLMDFYARKKREKGSGKAICAAARKLLTIIFVMLKKELDYWYLEDRLYNRKLRQLNAVT

SEQ ID NO: 484093 - protein, 349 aa, unidentified
MTVYVAVDFHAREQTISYCDTADGEIHRGKLRHQHDDVRKFYEQFTGEVIVAFEASGYSAWFEQMLAELGHTVWLGNAAEIRRKAPRRQKNDRRDADLMLDLLLKGDFPRVHTFSEESRTVLRQLRYRHKLVKVRTIAKNSVHAIGINAGLPLRGRLLTAAGIEQLEALSLSPVLSQQRDEWLALIKLMHKQISTVEESLAQRAKGDAAVELLRSHPGIGLLTALALRYTLEPVSRFSTTRRVTAYVGLDCVEDQSSERRRMGSISKQGSRLLRFLLNEAGQTAARRDPQLKQFYKRLLQRRDKPKAKVAVARKLLVRSFIMLRDQVDYAEFVRRGVAARVARETHSPK

SEQ ID NO: 484094 - protein, 365 aa, unidentified
MTTRERSTSSSTDPPSRGEVVLGVDTHGEVHVAAVISLLGKVLGTESFPATAAGYRQLLVWARKRGTVRRAGVEGTGTFGAGLSRYLLAQQVEVFEVNRPDRTARRLLGKSDPLDAQAAARAVLSGRARARAKSGDGPVHAARIYKLAKDSAVKARTQAINQLKAVLVIADPALRERMSSLGNTELFRTCARLGPHDGGADEDAVTQATHMTLRMLAERIEQLAGQINELNQRLTRLVEHHAPQLLEPVGIGPDSAVTLLITMGDNPERLNTEASFAALCGVSPIEYSSGRRRTRRLNHGGDRQANAALHRIVFTRLRHDPRTQAYYERRTQEGKTRREIIRCLKRYAAREVFNLVRPASRAPAL

SEQ ID NO: 484095 - protein, 403 aa, unidentified
MNTKMIDHEGATALAAAGHQDKIQPAAIKLGVDIHQERYVVVMQEGHETPKPARRLRPEEFVPWVESLLAKGHPVFVVYEACGFGFGLCRRLAALGATCYVIAPRKLDEARKGVKTDPLDAGVLCQRLSRYVEGNKKELALIRVPTEEEEQLRHVHRQREALVRARTKLQAQGRCLLVNHGQPAPPRWWRRQGWSALEKILPHWLLLRLEVFRPVLEVLDGQIAALSAELEKAAPETLPSGLGKLTSVVINREVCDWKRFKNRGQVSSYTGLCPGEYSSGAKRIPGAVTKHGNPRLRAVLVELAWRARPPADLPSPFRLLAGALPAAVSCGEKTSRGAGHRRKGHRSRAQESHRRRGPATRRGPLAAAHRPVLRRATRTATLTDHKSWPSTLKDSHLIPALSP

SEQ ID NO: 484096 - protein, 374 aa, unidentified
MKHYAGLDISNEETSICIVDEESNIVKEAKVDSDPEAIYRYLQKTKIQLEKIGIEAGGLSHWLVTGLRARDLQGVICIDSHMMASILAVNINKTDRNDARAIAHAMRCKNYKEVHIKSIESVKTNCLLTSRKALVKHKGQLEGTLRGVLKTFGIKLPKGKESIREAVKESLAFDESSTDEHKLSVHIDWSVLEPLLICCDTTDQQLKILHKKLELLAKNDQIAKRLMTHPGVGPVTAMTFKAEIDDPTRFKKSRSVGAYFGMTPRQYSSGESVKQGRVSKNGSDEMRSLLHEAGLVLITRTGKHSKLKSWGLKKKRKLKTQKAAMAVGRKIAINLHRMWLDGTDFDPQLDAEEFYPDEPKKAGTVKRKKTTRRV

SEQ ID NO: 484097 - protein, 399 aa, unidentified
MVSVGIDVSKGKSTVCLMRPFGEIVAGPMEISHVNSELKALVKLMKSMNDEVKVVMEATGVYHLPVLTYLKDNDIFAAVINPYQMKQYRVQGLRRVKTDKADSMVIAKYGLDNWDDLKDFVSSEDRYRELSLLSRQYRHYMRIHVASLLELTHILDYTMPGIKKEFNSWVPESGRDKLADFVEKYWHYDNIRKKSERQFVESYLNWAKKKGYHRNQNKAAKIYSMAKEGIPTLPADQTTKMLVIQSIEVLRRVDETLNTILARMQEIAKALPEYPVVRSMGGVGDVLAPKLIADIGDVRRFHNSKALIAYAGIDAPPYQSGQFTGTNRNISKRGSSAIRKTGYEVMRVLKSHPEPEDGAVYQFILKKESEGKPKKVAKMAGLNKFLRIYYARVMEVYNC

SEQ ID NO: 484098 - protein, 323 aa, unidentified
MSSKTTKKRRSFIGIDVSKQLLEVGVHQSDFHFRCPNDPKQFPTLITELISLRPARIVLEATGGLERPLLQALQPVGLPVVVINPRQVRDFAKALGLLAKTDRLDARVLAHFAAAVQPPVSPIKTQQDTELDALVGRRNQLTEMLAAEKNRRGSAATQTTRDDIEEHIEWLEDRLKELDEKLKQQLQCSSVWQQKDKVLQSVKGIGFVTSMSLLAECPELGQLNRHQIAKLAGVAPLNRDSGQQRGSRHIWGGRAQVRRKLYMATLAAIRSNPVIKAFYQRLLDRNKLKKVAIVACMRKLLTIINVMVRENKVWNVKDQPVSA

SEQ ID NO: 484099 - protein, 407 aa, unidentified
MSTYTDVFAGLDWAVHTHAVCIIDASGAVRDRFEIPHDRQGLAELMRRLARFGPSVRIAIERPSGLIVDALVEAGHQVFPIHPNAVKASRPRYRSHGAKSDASDAYLLADLLRTDGHRWAALSPQSDSIRALRALVRSRDDLVTTRVALGNQLHSTLEAFWPGAACIFADITSPIGLAFLRRYPSPASAVRMSEAQLLRFCRAQHYSGRRSPAELLARLRAAAQALPGKLTTESMAQVVRSLVSVLNPLIAQISDLTRRIERFVESLPDGQIIMSFPRAGRVCAAQILAELGDVRERFPTLDRLAAEAGTVPVTYQSGKTRSVTFRWACNHRLRQAITCLADNSRHASEWARGIYVAARARGCDHPHAIRILARAWLRIIWRAWTDRKPYDPTLHLGALKLASGAAG

SEQ ID NO: 484100 - protein, 376 aa, unidentified
MKKIRFVGLDVHAETITVAVAEPDGEVRSLGTIPNREESVRKLVNKLGPPQQLRMCYEAGPTGYVLYWLLTSLGVQCEVVAPTLVPVKAGDRVKTDRRDALKLARNHRAHELTAVWVPDEAHEALRDLVRARESAKQDQLRARHRLSKFLLRHGRRFAEGGKAWTLKYMAWVKQVRFTQPAQEYAMLDYLHEVEHMNERVLRLEQAIEEAVKLSPAWMQEVVQALQSLRGVAKISAATLVSELGELSRFENPRKLMAYSGAVPGEDSSGERVRRGAITKTGNAHLRRVVIEAAWSYRLRPGVGPGLRQRQKGVSEEVKEIAWKAQLRLHKKYQRLMAAGKDQRKIVTAVGRELLGFIWAIGRAMESRCRPRSAMTA

SEQ ID NO: 484101 - protein, 374 aa, unidentified
MEAEPEVGMSFAHAAGGGPTETEVRALMKVLIGVDPHKASVAVAVVDEAGGELVERASFPQSRAGLRALERWAKRFPERRWAMENAGGLGRHLVGRLAAAGESVVDVPPKLSARVRVLSTGNARKNDGLDALATALAASRNERLAVVDPEVGSEVLRLLSERREDRVAERTRALNRLHGLLRDLVPGGVAGTLSATRAARIVRGIRAQGASARLRRRLASEVLRDVRTLDRKIADLNGRIEAEVEASGTTLTEIYGIGPILAARIIGTVGNVARFPTKAHFASYCGTAPVEVSSGDVVRHRLSLAGNRKLNYALHMVATCQARSDVRGGAYYRKKIAEGKSRKEALRCLKRRVCDAVFKSLVADSQAAPREGAA

SEQ ID NO: 484102 - protein, 345 aa, unidentified
MDKIIRIGMDTSKHVFQLHGVNAAEKPVVRKKMRRKEMIDFFTTCPPTLIAIEACGGSHHWARLLASFGHEVKMIAPQLAKPYVKRNKNDAADAEGLCEAMSRPTMRFVPVKTADEQAALMLISVRTRLIANRTQLANAIRGYANEFGVSAAKGLAHIPLLLERIQADGTVPELAQELFMSQAEEYAQLEKKIADVEAKVKAWQRNDERSIRLNTIPGIGPIGSALLIMKTPAPELFKSARQFAAWIGLTPKDHSTGGKLRLGGITRAGDEALRAVLVNGATAVIHHARRSGKASRWLAELLKRKPPKLAAVALANKMARMAWKLMISGQTYSAQLGGALTGCAA

SEQ ID NO: 484103 - protein, 405 aa, unidentified
MTTEFFVGLDWAVHTHAVCVIDAAGAVRDRFEIAHDREGLAELMRRLARFGASVRIAIERPSGLIVDALVEAGHQVFPIHPNAVKASRPRYRSHGGKCDASDAYLLADLLRTDGHRWTALSPQSDSIRALRALVRSRDDLVATRVALGNQLHSTLQAFWPGAACIFADITSPIGLAFLKRYPSPASAARLSQARLLRFCHAQHYSGRRSPAELLARLHAAAQGLVAPLTAESMAQVVRSLVAVLNPLVTQISALTRRIERFVASLPDGQIIMSFPRAGRVCAAQILAELGDVRERFPTLDRLVAEAGAAPVTYQSGKTRSVSFRWACNHRLRQAITCLADNSRHANAWARSIYAAARARGCDHPHATRILARAWLGVIWRAWSDRKPYDPKLHNAALKLASGGGG

SEQ ID NO: 484104 - protein, 369 aa, unidentified
MEKSTTYVAMDDSKRKIVVGILRPTADDPELREIANDPRQIRRLFERLKPEGRLAACYEAGVSGYNLHRQIMALGVPCSVIAPALTPRRPGQRVKTDRRDAAKLVRLFRAGELTAIHILDEREEALRDLVRCRDDLRRDVLRWRHRVLKLLARHGCTYLAGRNWSRAHWRWIREQHFDLPPLQRAFEATLFALEQALARQAELDTELATVATTAPYREPVAALRCFRGIDTLSAIILLAEIVDFQRFPRPRQLMAYLGLVPSEYSSGETQRRGALTKTGNNHARRVLIEAAWHYRHRPAIGPALATRSHGQPDEILGHAWRAQQRLHRRYRHLVGHGKRSPVAVAAVARELVGFLWAAMTRADHRSAVA

SEQ ID NO: 484105 - protein, 346 aa, unidentified
MKKAKSILKISYGIDISSDDFAASYGVFYSDLEREVTNIKKFKNTKRGFDKFLAFTKKHQNKINPDGSIQTWYVMEASGVYYENLAYYLNGKGLNVHVALANKVKSFIKTLENKSKNDELDSVAIAQYGLEKQLLKWMPPSPEMKELKELSRELSALKDMRTVAKNQSHAKNKAHEINNSSIKRIKELIRYLNKQIKKVEKELVTAVKGNPELKAFIEDVTILKGVGFQTVVLVIAETNGFEGILNRRQIASYVGLDVKENQSGKKAGKSSISKHGNKYIRKGLYMPALSCKKHDKKMKDLYERVLERHGGKNKKIAIVAVMRKILHIIYALWKNRTKYDPNYGIA

SEQ ID NO: 484106 - protein, 411 aa, unidentified
MLFLGDDWAEDHHDVELIDGNGGKLVRKRLPEGLEGVTRLHALIAEHMPADWADLDPADAAAQVRIGIETDRGPWVQALLAAGYQVYAINPMSVARYRERHSTSGAKSDAGDAHVLAEIVRLDHAHHRPVAGDSAEAEAMKLVARTHQTLIWDRSRQMLRLRSALREFFPAALDAFDDLTAPDVLELLGRAPDPARAARLSRSQIAAALRRANRRGIDTKAADLQQRLRAGQLRQPDAVQAAYAAIVTAQVRLIAALNAEVEQLGQVVADHFGRHRDAEHYLSQPGIGVVLGARILGEFGDDPHRFTDAKARKNYAGTSPITRASGTRKVVLARYARNRRLGDAVHQWAFCSLKGSPGARAYYDTLRARGTGHQAALRQLGNRLVGILHGCLKTGAAYDETTAWAHLHPSS

SEQ ID NO: 484107 - protein, 347 aa, unidentified
MYVGVDVSKRKCRAAVVDGDGVLVDEFSFSNDFEGIKRFVSRLSMGDAVVMESTGNLWVNLYEAVEANDVKAVLANPLKMKAIASAKIKNDKVDARVLASLLRGGLVAECYVPPRDVRELRALVRHRVQLVKSAGMVKNRVHSLLDRYGFRRDFSDLFGKAGLEWLKRLELKPLDRLLLNGFIEQIECLERLTRNVDVEIGRRASVDEDVRLLLSLTGVGVYSALLIKSEIGDVRRFPNYKKLVSWAGLAPSLHQSGNVERHGHITKQGSKLLRWVIVECARIAVQYDARLCEFYERVKRRRGEQKALVAVACKMLKIIWFMLTRREPYQSRNARLYGDKLYRLSGY

SEQ ID NO: 484108 - protein, 352 aa, unidentified
MRRPKDQVTGEEDLFVGIDLHKNRWHVTIRTVDLELFSASIPGTWEALQRVLARYAGYQLQAVYEAGYFGFRLHDRLVEHGIPCLVTPPSLVPQEYGNRVKTDRRDSRKLAHLLAKGMLKRVWVPSEEERYHRQVVRRRRQLVRDRVRTQSRIKAELRFYGIHLAEPRGRWTQMYFESLRSISFGNRWMQESFNRLLEQYEFLSAQIDKQTQLLRELSETARYRERVEILQNIPGIGVISAMELLLELQDVSRFRRAEQLAAYVGLTPSQYSSADKVRMGRITGIGKNTLRAILVEASWKLITKDQVMREKYERIKIRSGGKRAIVAIARTLLLRMRRMLLDERAYALPLAA

SEQ ID NO: 484109 - protein, 313 aa, unidentified
MYYIGIDVSKKDLSVFNGKKDLKFINQEGLRPFKKYLKKNYKNFSDLVIIFEPTGIYSFNLKEFCAENSIKAYIVNPKRSHSFARSLGIRPKDDKIDARILYQFHKLINSKDIKVPKIDQQAKVLSSYLTSYEFAVKQRVAISNHLESLRDKKLVSLLKKELKRAQKLEDEIFNDIKGYIRQNQNLREDYQRLLTISGVGEKMAIALLTLFKTYQSTNRAQITALVGLDSTKRESGSSVRGRAKISKNGKAIYRKVSYLPAICATVHNQKIKIFYQRLLANHKPKKLAIIASMRKILLIAHAMYRDKTEYVTV

SEQ ID NO: 484110 - protein, 325 aa, unidentified
MEHELHYIGIDTAKEKLDVDVLRPDGRHRTKKFANTTKGHDELVSWLKGHKIDHAHICIEATGTYMEPVAECLYDAGYIVSVINPALGKAFAQSEGLRNKTDTVDARMLAEFCRQKRPAAWEAPHPLERALRAGSPPPALTDMHTQELNRTETAREVQRPSIDAHLLWLEAELKRLEKQIKDLTDDDPDMKHRRKLLESIPGIGEKTSAVLLAYIGLKDRFAHARQFAAFAGLTPRRYESGSSVRGASRMSKAGHVSLRRALYMPAMVATSKTEWGRAFRDRLAANGKKGKVILGAMMRKLAQVAYGVLKSGVPFDASRHNPVAA

SEQ ID NO: 484111 - protein, 453 aa, unidentified
MAQRNRSISRKPGRSRAALTITHPNAAGIDIGSASHFVAVPADRDDEPVREFPSFTVDLKAIADWLAACGVDTVAMESTGVYWIPLFELLESRGFTVLLVNARHVKNVSGRKSDVLDCQWLQQLMTYGLLSGAFRPAEQVCVLRSLWRQRGMLLKNQARDVQHMQKALTQMNIQLTNVISDVVGETGQKILRAIVAGERDGQVLGAMKNTRIQASVEEIAKSLHGNWRAEHLFALKQALGAFDFIGTQLTECDQEIEAQLQRLQTHDGEPAKGKKRGRARNAPKFDLRTQLFKMCGVDLTRIDGIDVTTALAVISETGADMSRFPTVGHFASWMGLCPGTKITGGKVMSGKTKRCANRAAQALRLAAAALRTSRSALGAYFRRMCSRMDKPKAVTAAAHKLARLIYTMLTKGEEYTDQGQEYYEERYRERVLRQLSQRAQKLGMKLVATEQPA

SEQ ID NO: 484112 - protein, 357 aa, unidentified
MKTQKQSIGIDISKDTFTACFCLLYQDGRLQFSDVKKFKNDKTGFNQLLRWSRKVKDSSIEISFLMEATGVYYENLAYHLYDVKQQVHVVLPNTSKHYFASLNIKTKTDELDAKILSQFGVERMHKKWIKPNQTYLHLRNLCRYYVQLQEQKTALGNIKHSKENSHEVQKLILKSNNKLIKEIDKQIALLKKEIENLIKQDVDLSAKVDKLLTIKGVGVLTIATVISETLGFQFVKNIKQLASYAGYDVVQRESGTSIKGKTRISKKGNSYIRKALYFPAMVACRYNDNMKESYLRIIQKKPSKMIGQVAIQRKLLILMYTLWKNNTVYDSEYAKKKIAPPINSEAKQDRVIETTLP

SEQ ID NO: 484113 - protein, 393 aa, unidentified
MDQAGKVLAKKRLPEGVAGMAQLHELTGRFLPGDAADAEVVIGIETDRGPWVAALIAAGYVVFPVNPLQASRYRQRHGVSGAKSDGGDSHMLADMVRTDSHQLRPAAGDSAEAEAIKVVARTHKTLIWDRTRAVQRLRHQLREYFPAALAAFEDLDARDTLELLGKAPDPARAARLTRAQVAAALQRARRRNIAGKTDAILAALRGEHLAQPAALTAAYAATARSLIAVITTLNEQVKALEEQVREHFGRHPDAEIYQSQPGLAAILGARVLGEFGDGPHRYTDGKARKNYAATSPITRASGKKKVVAARFIHNDRLIDALMAQAFAALNASPGARAFYDQQRAKGLEHNDALRRLANRLVGILHGCLKTRSLYNEATAWGHRENLPQSSVAA

SEQ ID NO: 484114 - protein, 398 aa, unidentified
MLYLAIDQHRKQLTVNLRNEAGDVILKRQVSTEWARVREFLADVRGIGCPEGGVVVILEVCGLNEWLLKLLAEYGYPSVVLVQPEKRDRHKTDRRDANALGELLWTNRQRLATGKKVQNVRQIVPPSPRDGEDRQLTTLRHRLCQLRTRTINRVQHLLLKHNLQRDCPTKGVKTQAARQWLTGLRLGAIDRLELDHLLAQWELLDKQLEELEVKLTERQAENAAAVLISTIPGAGAYGSLALACRIGSIERFPHADSLAKYWGLTPRSNNSGDAKQRLGSITKEGSALARFILGQMVLHVLRRDSAMREWYRRIKKRRRSKIARVTVMRRLATIIWHMLQRKQRYHLCQSSDPAAACATVPLDVNAFLKVSQGRSKEEKKKAAATGKAPAAKASLTRP

SEQ ID NO: 484115 - protein, 417 aa, unidentified
MGNKYQKIGTINEKTLVVTLDIGKEIHYGYLRAPNGNDINPFRVENFRKSFEQFWIKVAGFKKQQCLENVVIGFESTGPYAEPLFHYLKDKPVTLVQVNPMHTKRVKELTGNSPGKTDKKDPRVIADVICLGHALTVVIPEGSAAQLRRLTQARERAMTTRTAMVNQLQQLVFVVFPEFFNIMGSLTKTATYLVKNYTTPETIYAMGVESLTGILKKVSRGKLGQERAKELFEAARDSIGIYEGRESILEEISHLVFQIEGQNCFIDKLETQMAEFLGQIPYGGSILSIKGIGVTTAAGLIGEVGDFRKFKTISEVMKLAGLDLYEVSSGRHKGQRHISKRGRSLMRKLLYFAAINAVKSNGIMHQPYQHMLDRGMPKVKALIAISRKLLRIIFALARDNAQYVEDDDQRHQYKLAA

SEQ ID NO: 484116 - protein, 337 aa, unidentified
MKYCGIDLHSNNCVVIISDEKDRIVFSKRLPNDMGQIRRALEPHREELTGLVIESTYNWYWLVDGLMDAGYRVHLAHPSAIKKYEGLKHSGDFADAAYLAQLLRLGLLAEGYIYPREQRGVRDLARKRMQLVRYRTAQILSIENIVTRQTGARLKGEAVKRLTAEQVDEFAFAPDVALAVEANRAVSQALGQQIEALERRLKERVSLRPEYRLLKTVPGIGETLATTIMLETGCIGRFAQVGNFGSYCRCVDSLRESNGKKKGEGNSKNGNKYLAWAFVEAANFALRYCPQARRFYDRKKSQTNRVLAIKALAHKLARACYHMLRDQKPFDVSRCFG

SEQ ID NO: 484117 - protein, 343 aa, unidentified
MEHHAGIDVSLERSSVCVVDATGRIVREAKVASEPEALARLFAQLGLPLTRIGLEAGPLSQWLHAGLTEAGFEVVLLETRHVKAALSAMIVKTDRKDARGIAQLLRMGWHRPVHRKSPPAQEVRALLVGRKLLQGKLLDVELSIRGLLRGFGLKLGETSKGRFAARVHELIAGQPMLERVVEPMLRARDALRAEFQVLHRAVLAIVREDAVCRRLMSVPGVGALVAVTFASAVDDPSRFRRSRDVGAHFGLTPKKYQSGETDVAGGISKVGDAMVRTALYEAANVMLTRAGKFSPLKRWALGVAQRRGMRRAKVALARKLATVLHRLWADGSEFRFGKEAAAA

SEQ ID NO: 484118 - protein, 311 aa, unidentified
MSSKSYVGIDVSKDQLEVFVLSTGGNQTVNNTEEGIASLIPLLQSTDPKLIVLEATGGLERPTAEALTAAGFPVAVVNPRQVRDFAKAKGILAKSDRIDARVLADFGEAIRPEARPPKAPEVQELEALTTRRRQIVDMITVEKNRLGSAPKRTRLQIQDHLRYLGKALKDINQELDKTLKKHPQFQERNRIIRSVPGAGPVLAVTLLSDLPELGSIDRKAVAVLVGVAPLNRDSGRFRGRRCVWGGRARIRAVLYMATLAATRCNPVIGAFYNRLLKAGKEHKVALTACMHKMIGILNAMIKNQTTWRLAS

SEQ ID NO: 484119 - protein, 408 aa, unidentified
MQDGMDMPVAPTGGIDWATDTNEVCIVDPTGEVLHRSNTTMDAAGIRKLVGQLERHSVDRVAIERPDGPVVDALLTAQIEVVVITPRQVKNLRSRYGSAGNKDDRFDAFVLADTLRTDAGRLVALQPDTPQTLTLRAAVRARTDLVETRIALCNQLRAHLRIVFPGAVGLFRDLDSPISLAFLTRFPSADKAGWLSVKRLGAWLSANRYSGRTKTATLMDRLTMAPAGHTGDTGDAAGRTTLAYVSALQAICEQIRTLEADISEQLAGHPDTHIFRSLPRSGKIRAAKLLVEIGDARGRFPTNASLAALAGACPSTRQSGRHEIVTFRWACDKKLRDAVMDFAGDSRHASPWAAAIYDRHIAKGKTHQHAVRILARAWLRVIWRCWQDRVAYDPTLHRGARAHLTTAA

SEQ ID NO: 484120 - protein, 365 aa, unidentified
MNSIVYVGMDVHKEQYTLCCYSYDTDKVEYKQTIPSDYKLVLKYMEQIRSRFVCGYEAGCLGYSLYHQLKDHAVDCKILAPSTMAITNTHHVKTDKRDAANIARCLAFHTYSEVYVPNNDDNDVKEYIRMRDDQKLYLKKVKQQILAFVLRQGKRFEGGKTYWTIAHLKWLKTLELSDLQREALDEYLLTYEYLTEKISRFDERIEELASVERYEEKVKHMSCLLGIKTHTALSMIVEVGDFERFEKAPKFASFLGLVPSEDSSDTRVNRYSITKAGNSHLRRLLVEAAQSYTRGNVGHKSVALKQRQKGNPPEVIAYADKANERLRRRFYKMTLNKGVNRNVAATAIARELACFIWGMMTEHVS

SEQ ID NO: 484121 - protein, 360 aa, unidentified
MNATTVGVDLAKNVFVACVADAVGRVIETREFNRAGFLAWLSTLTQGTVVGMEACGGAHCWGRTMQALGLEPRLMAAEFVRAYRKRQAVKNDRADAAATVAALRAPGMRFIPIKTEAQQQRLAWHSLRLGWIGERTALLNRIRGVLAEFGMVVEAGAARLRRWLAEHEFDTAQPAPIRLLIQNVRDQLDALDLRVAECDRQIAVQQAEDPAARRVRDLPGVGVLTADAVTASVGNAQLFHNGRQFAAWLGLTPSQYSSGGKPKLGRITRRGDDYLRTLLVQGARSVLAATLRKARSAPDALTRLQQWIVSLNGRVGYHKTLVAIANKHARQLWAVLAKGEDYNPEAWRQWGEVAAPKPSV

SEQ ID NO: 484122 - protein, 344 aa, unidentified
MYYIGIDVHSKWSTFVALDPTTGEVVTFDRVPNTAQDIADRLGSLSGSLHGMLESGTNAWAMYRTLAPFFEELVVVSPAELWDRRKDTPKTDKRDCLGMATRLWRGDYTPLYIPDEATQYLRNLVRAKIQASRHVTKLVNEMGSLVRSWGYTLPGSLLGKAGQAWLKTLELPSHSARILQLWQEELQRFTAMEAELEQAIREAAQQDAVCQQLMTIPNVGAFTALAIRAELGDIRRFASVEALIRYCGLAPRVFQSGEKCTYGRLGKQHNHWLRYVVLLFAQRCSASRQDTPFRRTYWRVSLRHCHRNAAKVAVARQFVRVFFSIWRHGTVWDATRTKPVPTAA

SEQ ID NO: 484123 - protein, 422 aa, unidentified
MLQETYDTEELIQRVAALDIGKAELTCCVRVPSSTAPGKRSQEVTTYKTMTRSLLVLADRLAELGVTRVVMEATSDYWKSPFYLLEAHGFEVWLVNAKDVKHLPGRPKTDRLDAVWLCKVAERQMLRPSFVPPQEIRQLRDLTRYRVDLIGVRTAEKNRVEKLLEDAQIKLSVVASDIFGVSGRAMLAALVAGERDPKVLAQLARQRLRAKLSLLEEAFYGRFSDHHAFLLQTMLDRIDQTSAAIATLEAKIEQQIVPFQAAVDRLDEICGVGRAAAQVLIAEIGVDMGRFPTPGHLVSWARFAPGVKESAGKKKGKASTGRGNPYLARVLGEAAVAAGRTNTFLGERYRRIARRRGAKRAVVAVGRSILIIVWHLLSDPDARFHDLGPGFYDTRIDTDRKRRNHVRQLEALGYKVTLEPAA

SEQ ID NO: 484124 - protein, 385 aa, unidentified
MSQFSGSRQAALDYNSTIIGAVELSEKKWVVAVQLPGVGRHSRHVLEACGDGLASFVERLKARCAAAGHRITRVVLTHEAGRDGFWLARFLARRGIEVHVIQPSSLPVDRRARRAKTDIIDVEMLLRTLMAWLRGEPRVCSMVPIPSEADEEARRAYREREDLTGERRSIVNKIDGILATLGVKGYKALRRDRREQLTALRQPDGDPIPQKARARIERLLDRLDLVLKLIEHVESARDAVLKKDAPADEAERMIRSLTDLRSIGPDFATLLVREAFVREFRNRRALGGYVGLGGTPFSSGGSEREQGIGKDGNRRLRAAMVELAWMWLRWQPDSALSTWFRARVGAMGGRIRKIMIVALARKLLVALWRYVKDGVIPDGAKMKAA

SEQ ID NO: 484125 - protein, 410 aa, unidentified
MQTLVERGCGMDVHQATVVACLLIVLKNGKVQKQIRTFGTTTRELLSLREWLLSEGCTHVAMESTGVYWKPIYAILEGAFEIVVANAQHVKKVPGRKTDVKDAEWIADLLCHGLLRSSFVPPQPIRELRELTRYRRKLVESRSAERNRLLKLLETANIKLASVATDVFGVSGRLMLQALVQATATTQQMADLARGVLRKKLPELKLALEGKFEEHHRFVLGVQLRRLQAVEEDLRFLEQRIQEKLRPYATQLGLLQQIPGVDWTLAAVIISELGVDMTVFGNTSQLASWAGICPGNNESAGKRKSSRIPQGNVYLKTALVEAASAAARAKGTYLRDKFYRLKARRGYKRAAVAVAHKILVAIYHMLSHQIGYQELGDLYLDNLNKHHLTRNLVRRLERLGFSVTLEQKAA

SEQ ID NO: 484126 - protein, 341 aa, unidentified
MDKELYFGVDVSKKTLDLAYYDGETIDWKNAHIKVSNDDAGFRKIGSWVAKVGKDFDTFLFCMEYTGLYSQNFRLWLESKEYIYGMVEPRKMHRFEPDLDDDQRSLDRIKTDELDAFRIAIYCEQNHKKILRNPSKLPSPVYFKLKRLLAERKQNTKQSVLYKQQLHDICAYDSDLSVERKKLLLKNMKENQKAIDKEIDCYMNEDVSISKNYDLLTSIPGIGHIIALEAIVLTENFTAISNPRKYACYIGIAPFKKESGTSVRKKTGVSKKGFSEAKADLSIAVLSAIRNNPSIRDYSIRKRKEKCGGIVLNAIKFKLVLRMFAVIKRGTPYVETDAYKN

SEQ ID NO: 484127 - protein, 407 aa, unidentified
MDLLKTVFGIDVSSRKSNVCIMVNGQKVNDYAISNDMVGFNQLLGDLKQVTNPQIIFEATGVYSRRLQAFLDMHELRYVMMNPLEAKRKTKDDLHQNKTDKLDALYLAKLQSEHPQRLAYVQSEEYQELMANNRIYEQASHDLITNRNRLHKAIQLTFPEIEHLMVNPRGKNYWSIVLRFPHPDIVLETKEADIIDFLKGLTGIGKKRANDIAQSLIRLAKVACPAVKKNSAHIRGLKMAINNILNAEEECQTALQEMAKLAPKRDLEIHTSIPGIGENTALRIISELGDIRRFNNPSQLNAFVGVDPQVYESGNLTAHLSISKRGTAIGRKVLYLAINQIQSAKKVGNPCHIADYYEKRKRSSETASHKKAAIASIHKLLRTIFALIKNDQLYSYDVAKHNQRLLS

SEQ ID NO: 484128 - protein, 349 aa, unidentified
MTTTVLGIDLGKRWFHVVGRDRGGHITTRVKLNRLQLIQFVANHPVCLIGMETCCGSQHFARKFMAMGHDVKLLPAQYVKPFVKSQKNDFNDALAISEAVTMPTMRFVPVRSEEQMDVQALHRARDRMLQQRLALSNQLRGLLLDRGVEIAQGYYALRTIVPQLLANEAGNLTPMMRDVGQVLMQMWNATEAAIEDLNARILKLARASDVCKRLQTIPGVGPLLSTALVAGVGNASAFKHSRDLSAWLGIVPRQHSTGGTARLIGISKRGNSYLRRLFIQGARAVWVWKDKHPDDPLQRWLSAVGERRHAHVAVCALANKLARIAWAVMTRGIDFQVNYRQRQEVLAAP

SEQ ID NO: 484129 - protein, 372 aa, unidentified
MPDVISLQPADARTFVALDVHKLSIVAATLPPAGGRPEIHRIETTEKAIRRFIAKLGGPDELAVCYEAGAGGFALWRLLTSMGVGCDVIAPSLIPVRAGDRVKTDRRDAEKLVTLYRGGLLRFVAPPTPETEGLRDLLRCRDDIRCARTAARHRVAKQLLRHGHVYREGKIAWTAKHQAWVHRQQLADPLAQEALRQMLIHLDGIDRQLAALDAQLEQIADGERWGWQVAKLRPFRGIGTLTALGLIAEIGDFARFSHPRELASWLGITPSEYSSGEQRHRGHITRSGNRHARRLLVEAAWHYRHAPRRPSSGPQPSDRAWQAQIRLFHRHRHLTGQGKRSTVVTVAIARELSAFLWAEMTDQPPREEQLAA

SEQ ID NO: 484130 - protein, 391 aa, unidentified
MVCVGIDVAKDKHDCCILDSDGMVRADCFTIPNNMDGFKQLLQTIRNCTKKSDKIKVGLEATGHYSYNILGFLLDNGLPTYVINPLHTNLYRKSLSLRKTKTDRVDARTIATMLLSDVDLKSYTDTAYHNEELKSLTRYRFDKVRERAKLKQSVSRLVTILFPELEKLVPSLHIASVYALLSEYPGAKQISEIHLTKLTNLLATASKGRYGKDKAIQIRDAARTSIGSVMPAKSLELKHTIKLIRELTSEIDEIEVSIQKIMDELNPPILSIPGVGIQSAAMILAEIGDFSNFESPDKVLAYAGCSPSTYQSGKLTNCYAHMEKRGSRYLRYALYNATKYVCYWNPVFAEYLAKKRAEGKHYNVALSHATKKLVRLIYALQKSGKAYLTAA

SEQ ID NO: 484131 - protein, 343 aa, unidentified
MQIRSVGIDLGKTTFHLVALGDNGKVLLKKKFTQRQLITFTANLQSSLIGLEACSGAHFLGRALREQGHDVKLIPAQFVKPFVKSNKNDFLDAEAIAEAVDRQNMRFVPIKTDDQLDLQALHRVRDRLITRRTSVINQLRAFLLERGLVFAKSPAKLRERMPEICLIAEEDLTPRMRNLLALLWNEWKDIEQQVVDLNLEVELIASSDAACLRLRQIPGIGPLVATAIVASIGNGAAFHKGREFAAWMGLVPKQYSTGGKAKLSGISKRGNRYLRKILIHGARAVVLRCKRERVSMGAWMTALEMRAPRNVLIVATANKLARIAWAVLSSGQDYRAGQDPVPA

SEQ ID NO: 484132 - protein, 348 aa, unidentified
MQVTTLGIDLAKNVFRVHGSDANGKAVVRKQLSRRQLLSFVANLPPCLVAMEACAGAHYWAREIEKLGHQVRLIAPRFVRPYVKANKNDASDAEAICEAASRRSMRFVAIKSAAQQEVQAVHRVRQQLVKARTSLANQVRGLLAEHGIVIGRGFAQLRRALPVIIEDRDNRLSAVMRDLLGEIGERLRFIDGRLRKYDLTVQRLFRQDERCQRVAAVEGVGPVTATALVAAVGNATDFRSGRELAAYLGLVPSHRASGGRTVLLGISKRGDRYLRTLLIHGARAALHRIERHRGARASWAARLKLRRGVNVAAVALANKNARVLWALLSRGQSYRPAPLFARVPQAGG

SEQ ID NO: 484133 - protein, 395 aa, unidentified
MFNLLVGVDVSKDFFSASGLSGEGKERFSGTYEMKADGFSEFLKVLCSHDERLDQMLVAMESTGCYHINLFSFLSSQGIRTVVVNPLLISNFAKLSLRKTRTDKKDALTIARFLLDHHDEISQLSISQDHQDLRDLSRERESLCHLISATKVEIKRVLRTTFPELESIGSLYSRVMLRFLQQYPSARLVKGEKRKVIVKALRGPRVGDKLTFSAEDIIKAAQSSIAVVSPAKEIIIQGKIATLLHLQERLEELTKLLSDLCKATRLEDLEILRSIKGVGPNTAVPFLAEVGEVKNFASSKKLIAFAGLDPSIHQSGKFLGTSKLSKRGNRHLRRAIYLMAASVVSQNGFFKAYFLRKKKEGLPPQKALFAVAHKLIRVIFAMLSQRTYFNVKEAI

SEQ ID NO: 484134 - protein, 399 aa, unidentified
MSTNQSRIYLGLDVGKTDHWACALTESGQVLWNKTLPNSEAKIIDIYTKLSAQGRVLVVVDQPATIGALAIAVAGHMGIEVAYLPGLTMRRIADLYPGDAKTDQKDAFIIADAARNLPHTLRALTKTDQDEAGLAMLTGFDLDLSRQVNQVSNRIRGLFTQIHPELEKVLGIRLEHDAILHVLATWPTPQALKKAGRARIDAKLKKHGARRHTAWTTELLEALSQQSVTVTGTEAAGLVIPHLARQLLSLHAQRADVAIQVEKIVANHPLYPVLRSMPGNGLRTAAVIIAELSGKTFTSSAALASYAGLAPTTRQSGSSIRSERVSHFGNKRLKRALFLSAFAVIRTDPVSRAYYDRKRAQGKRHNQAIIALAHRRLTVLYAMLRDGTLYNIPETTLAA

SEQ ID NO: 484135 - protein, 393 aa, unidentified
MFSESQSDENTHAVVVAAERSEADTTTAADDRSIDLRSGVSEIVGELDRPRSFQTSPNSRQSRQTKVMPSSYLQGRDTSKMDIESVIGIDVSKDTLDLADWPESLEDQTANDEAGHRKLISRLPAPETCFVVLEATGGYEKRIVLALVDAGYFVSVVNPRQVRDFAKGLGILAKTDRIDARVIARFGFLVRPRTLAETHEKQDELNQLVTRRRQLITLRTAEKNRTDKATSKVVKKSLKKIVEYLVEEIETIDQEIARLVESDDQWKGKSELLQSTPGVGVTTAATLIAELPELGQLNRQKISALVGVAPFNRDSGQFRGKRTIFGGRRAVRSVLYMAALTARRHNPVIRKFADRLKAQGKLPKVILVACMRKLLVILNSMVRTNTQWDPQTT

SEQ ID NO: 484136 - protein, 420 aa, unidentified
MVDVLIERCAGIDIGKDEVVACVRTPAPSGRGRRKQTRTFSSFTGSLEAMADWFTAEGVTDIAMEATGSYWKPVWYVLEERSFALKLVNAHHVKILPGRKSDVLDAEWLAELLEHGLLRGSFVPPPAVRELRDLTRYRKRLIQAHTSECQRIQKALEDAGIKLDSVASDVLGVSGRAMLAALVAGERDPKVLAELAKGVLRRKIPALRQALRGRFTDHHALLIGLSLDHTAHLEAAIARLDERIDTVFTTHTSEASIPFARARDRLDTITGVGKRAAETIIAEIGVDMSRFPTAAHLASWAGVAPGNNITGGKRGSGKTTKGDVWLLDILVQCAWAAARTRDTYLSAQFWKLARRIGKKKAAVAVAHSILVICWHLLTHDCDYDDLGGDYFTRRNTDRQRDRLIQQLHGLGYRVTLDKTA

SEQ ID NO: 484137 - protein, 425 aa, unidentified
MNTHWTEQPYFAALDWAKEHHDVIVVDRVGTIVADFQFEHTFEGWERFDQQMQPFGKCPLAIETSCGMVVDQLLQRHYPLYPVNPMAAKRYRERKVPSGTKTDRHDAWGLADALRSDGHAWPPLHAQDEPTTALRLLCRDEIVLIEQRTALVNQLQAALREYYPIALESFDDWTKPFTWAFVRAFPTAAVLKQAGKRHWEKFLHVHKLWRSDTLTHRLGLWVHGQQLNASPAVVTAKSLLAVSLAAVLESLQRQIDEYRRQINEAFAKHPDHDIFGSLPGAREKLAPRLLSEIGTAREVFPDAQSLLCLAGVSPVSYQSGQIRKAYIRWACNRVLRCTVHLWVDESRKTCQWAQAYYRAKRDAGHSHASALRCLGKRWLKVLWRLWQERTPYEESKHLQSLQEHGSFVWQMLQSAPVTSPPSPCE

SEQ ID NO: 484138 - protein, 392 aa, unidentified
MYIVGIDIGKNHHEASIVSPKGKQIGRSLRFATTHKGADSLMSFIFKNIGNSPCVFGMEATGHYWYPIYSFLKAKGYTIYVINPIQSDSLRKMYIRQTKNDSIDSFLIAEVIRFGQFGTTSMADENILAMRQLCRYRDSVISSRTEIKLRIGTIMEQIFPEYEKQFSSLWVSTSMGILEKYLTPENIENAPIDELFEIIKDKSHNRLTKAKAISIKEAAADTFGIKIAQDAFSFQLKQLIDRMNFLDKQIEALDCQILEYYEKFDCYLHTIPGIGMIAAATILAEIGDINRFKSSSALVAFAGIDPTVRQSGEFSSTHNHMSKRGSPYLRHAIFLAATTCSFHNSPLNAYYKKKRDQGKHHLTATGAVARKLTSVIYAVLRDSKPYEPKSFC

SEQ ID NO: 484139 - protein, 354 aa, unidentified
MQSQIIATPKLFIGMDIHKKSWSAHLRTDLFDHKGFSMPPEPEKLADYVANHFADHEVSLSYEAGCCGFSAARYFLNLGWAVKVVNPNDIPHSDKQLYQKTDKIDCRNLCKQLQRDQLHGIYIPTESEEQLKSLLRQRNQVVKQLRKAKSHIKGLLLFHGIAIPDRFDNPNWSHDFVGWLKTIQWAHITGTACINSKLRILEMLKNEYLQTSNELRAYCRKYHNKDYYLLKSIPGIGGLLAAAILAELGDIRRFNNQKEFSSCIGLVPGIHQSSETDLKMGLTPRCKSLLRSYLIESSWVAIRTDPEIQAYYRKHVGKNPKNVVVKVAHKMCCRILSVIKNETPYQVNYKGMKK

SEQ ID NO: 484140 - protein, 316 aa, unidentified
MKKARAELFVGIDVSKSWLDVAVHEQAEAAIRVGNNETGIASLVKRLKKLKPTLLVLEPTGGFEMLVVAELSHAGLPVVAINAKRIRDFARATGRLAKTDKLDAKVLAHFAAAVRPPLRSLRSEEEEQLTALLTRRKQVLDMITIEKNRLVTVRAKMRSDIQAHLQWLSKSLKALDKEIEEFVENSPIWKEKDALLQSVPGVGPVTSATLLGMLPELGKLNRQEIAALVGVAPMNKDSGKKQGKRRVFGGRADVRSVLYMAALAAKKFNPVIKRFYERLLKHGKEKKVALTACMRKLLVILNSMSHTNQPWRTQTA

SEQ ID NO: 484141 - protein, 317 aa, unidentified
MDVLGIDISKGDFHAHLLQTQGAGKKSFPNTPTGYRQLRAWLKNHRCTDVHVCMEATGAYWLGLASAVHQWGVAVSVVNPNRTAQFARSQLRRTKTDRSDAEMIAQFCQTQRLQLWIPPSPQTLELRGLLTYRDHLVGEGIRLRQVVQQVYVGKELKRLHAKQIKSLDQSLESIEKQLRKMVAQNAPLGAQVVALTAIEGIGFITAVAIIAKLPMEQLRNGKAAAAYVGLTPSDRQSGTSVNGKPRICKTGNAGLRKDLYMPALVAQRHNPILRAFAERLGAKGKPKKVVVVAVMRKLIVLAFSVLNAVSASQPVLA

SEQ ID NO: 484142 - protein, 320 aa, unidentified
MSKKKSKAYIGIDVSKNLLEVAAHESDYQFRCANKAKAFGELIVELIALRPALIVLEATGGLEIPVVAALHAAGLPVVVVNPRQVRDFAKALGQLAKTDRLDARVLAHFAAAIKPPLRPIKSADELELDALVGRRRQLVEMLTAEKNRRGSAATETVRDEIKEHIDWLEERIAELDEQLKGQLKNSTLWQGKDDILQSVPGIGPVVSFSMIANLPELGTLNRQQISKLVGVAPLNNDSGQQRGTRRIYGGRARVRSLLYMAALTATRFNPVIKEFYERLLANKKLFKVAITACMRKLLAIINVMVRDSTLWKTKNDPVSA

SEQ ID NO: 484143 - protein, 405 aa, unidentified
MNAVGIDVSKGKSTVTIRRPGDMVLMPPCDIPHTQSAINALIEQIKSLDGETKVCMEHTGRYYEPVANWLSDAGIFVSAVNPILIRDFGDDSLRTPKTDKADSKKIARYALDRWAKLKQYGSMDKTRNQLKTMNRQFGFYMDQKTAMKNNLISLLDQTYPGANDFFDSPARSDGSQKWVDFVYTYWHVDCVRSKSLQAFTEHYRKWCKRNGYNFSASKAEKIYQSSSDLIAVFPKDDSTKTLIRQAVTMLNTASQTVEALRLKMDQTAATLPEYPVVMAINGVGPSLGPQLMAEIGDVTRFTHREALTAFAGVDPGKNDSGKHNQKSVRTSKKGSPSLRKTLFQIMDGLIKRSPMDDPVYAFMDKKRSEGKPYYVYMTAGANKFLRIYYGRVREYLASLEESKES

SEQ ID NO: 484144 - protein, 336 aa, unidentified
MNAVGIDVSKGKSMVAIMRPFGEIVSAPFEIKHTASDINSLVELINSVEGESRIVMEHTGRYYEVLAHQLSKANLFVSAINPKLIKDFDNDSLRKVKSDKADAVKIARYALDKWQNLKQYNVMNELRNQLKTMNRQFGFYMKHKTAMKNNLIGILDQTYPGVNTYFDSPARSDGSQKWVDFASTYWHVDCVRKMSLNAFIDHYQNWCKRKKYNFSQSKAEEIYGKAKELVPVLPKDDITKLIIKQAVNQLNSASTTVESLRTLMNETASKLPEYPIVMAMKGVGASLGPQLMAEIGDVSRFTHKGAITAFAGVDPGVNESGSYEQKKCSNFKTRLI

SEQ ID NO: 484145 - protein, 377 aa, unidentified
MPDTKTLVKNADKLFIGMDLHKNTSTFVVKDKEGKLINSAKVLTDKNDVTRYIDSIKRNSGGRDLSLAVEPVSQWYYYADLIENLGVDVHLAHPMEVKAIAHARIKTDKIDAAVLADLLRTNFLPEAYFSPAEVRSWKEQCRFRASLINLRTQVKNKVHAILFKHSLKHTFSNLFGKGGRRWLAGLELKDPFKGNLDKYLLLVDYLTEQIVLAEEIITNTVINCPQAKLLISIPGISCCSALTIMAEIGNIERFISVKHLQSYAGLIPSTYNSGDKQIHGRITKRGSKWLRWIMIESAYHQMNCKRIPGFGAYYNGIKIRKGSKTAAVATARKLLAVVWRLLKDNRPYEVADPRCWKSRPIASKISSVSTVINTTED

SEQ ID NO: 484146 - protein, 314 aa, unidentified
MDKPAVWVGVDVSKDQLTVALRPSGEQFSLANDGRGLRALIKRLAPLRCARIVVEATGGYETLLVAGLQAAELPVVLVNPRWVRWFARSLGQLAKTDRIDARVLALYAERAELKVRELPDEQTRELRALCARRDDLLEMIVAEQNRLEHAPKRLRREIRAHIGYLRRRLKHLDRDIDSAVRGSELWRQKNELLNSVPGVGPVLRASLLAWLPELGTLNREEAAALVGVAPFNRDSGLMHGRRTISGGRAPLRRVLYCATSAAIIWNPLLRAYYEHLIGNGKLHKVALVATMRRLLLILNAIIKTRTAWRSPCLA

SEQ ID NO: 484147 - protein, 369 aa, unidentified
MKRTVYVGMDVHAETIAVAVADEGRDGEIRFYGTIRNTGDAILRLTKRLSGAGSAPIFCYEAGPCGYGIYRLLRKLGFDCAVVAPAMIPRKAGDRVKTDRPDAEMLARLWRSGELTPIWTPDEEHEAMRDLIRTRKQAVDALKVAKQQLLSFLLRHGLRFDRPTRWTKIHWRWINELRKFRFPHQQLAFEELKRAIHQIEERIASLDQVIIETIPTWHLGPVVDALRALRGVNTTIAVTLVAEIGDINRFSNPRQLMAWLGLVPSEHSSGNNIRRGRITRTGNALARTMMVEASWSYRHPAREQHPFLKRSQHLPQGIRDIGWKAQVRLCKRYRDLSKKGKPQPRVTTAIARELAGFIWDIARKVPITA

SEQ ID NO: 484148 - protein, 346 aa, unidentified
MKILALDLSKFKSVGCVYEAESGEHSYRRVNTTPQALHDLLVEVEPDRVVIEVSSVSGWVSDLVRALGIELQVVNTNGEAWRWRNVKQKHDQGDALKLARLSAMNQLELVHVPAPEMRQWRAVIKYRQHLVGRRTDIKNHVRELLVREGVVLPRGRKCWSQEGCAALEEMSRSWEEVGISELWRGELASELQHLQVIQERIREVEAKLEELAKADDRVGLLRTIPGVGPRLAEAMVALIDDPHRFRRARDVGAYLGLVPRQYQSGEMNRLCRITKRGSKLLRSLLVEVSWVSLRYNPWLRSLYERMNRGSKTRKKIAIVAVARHLAIYCWAMLRDGTTWRQPCTTQ

SEQ ID NO: 484149 - protein, 391 aa, unidentified
MGKDEFALSVTDAARNVLMKPRLGCPMTAPSVRLVIAQVQSLLPAGASVKVGIEAAGHYHRPLLSPRVWPAGWELLALNPGHVAEQRRVLGKRTIKTDAGDLEAMTEMLLAGRGLPVGETVGVLSELTAWSAHRTSRVLTRTATKNQLLGQLDRTFPGLTLALRDVLGTKVGRLVVAEFPDPVRLAALGSSRLIRFGAARGLQIRKPMADRLTRAAKDALPMPDAAIARAVLAADLALLHDLDSQIGAATSELARLVPLTPFRTLTSVSGWGAVRVGNYAGALGDPSRFSNAKQVYRSAGLNPIQYESAGRRRDSGISREGSVELRRALIDLGLGLWLTDPAAKQYASALRARGKKGGVIACAMAHRANRIAFALVRDQAEYIPAKWIREV

SEQ ID NO: 484150 - protein, 353 aa, unidentified
MKRGKYMGMDVHAAMTVVAVMDVDGRVILETMVPTEAGAITRLVESISGPLHVAFEETTQAEWLYDLLRCVVADVVVCDPRHNKLLSEGSKGDKIDARKLADLLRTGMLKRVYHGNEGSRKLKQLMRGYETLSGDTKRTMVRIKAIFRARGVPTPGRQVYQLQQREQWLGLLTEPGLRERVRWLYQELDHLKPLRREAKNAMLAESRKHQAVKLLQTIPQLGPIRAALIVATVDTPHRFGTRHQLWSYSGLAVVTHMSSEYEMKDGRVVRSRKPIATRGLNRNCNRRMKEVFIGAASAGNRTELYRSYLQSLEQKGIRREMARLTLSRKIAAIALTIWKKGETFDPKKLNWTT

SEQ ID NO: 484151 - protein, 355 aa, unidentified
MNSIKYIGMDLHSATISTAVVNEAGKLNMEATIATEAAAVLDFIAGVQGTLHVTFEEGIPAAWLYELLLPHVAEVVVCDPRQLPRHRGENKNDKIDAQQLAQWLRLGVLKPVYHRPTGLRTLRELVRSYRTLVSDATRVMNRLKAIYRARAIAAKGARVYSPRYREGWLKQLREPGVHHRAELLYRELDLLLSLRQEAKKAMLAESRKHAAQKILLSIPTLGAVRVAVLMAVIQTPHRFRRNRKLWTYTGLGLVTRSSANYRLVEGQLTRARKPALILGLNLNHNHVLKEIFKDAAATAVSRQGPFREFYARQLATGKDPEIARVIVARKLATIVLTLWKKGERFNAEHLKPQAA

SEQ ID NO: 484152 - protein, 424 aa, unidentified
MNNTQNKKIAQVSDGTLVIGVDVGSNTHYARAIMARGYEVSKKPFDFKNTRDGFDRFVSWANHLAVVYQLKKIFVAIEPTGHYWFNLADYLKAYDVTLVMVAPQHVKHSKEMDDNTQMKNDQKDPLVIARLVAEGRYMIPYIPEDVYAELRSAFNRRCDLVEALTRNTNRMIRWFDMYFPEYRTVYGKADAISGLLILKRAPLPSDILKLGVDGICRIWREAKLRGVGINRARKLVAAAESSIGLKGGEAIRQELWQHMEAHELFKKQLGDIMQMIDGLIAKIPGADRLLKVPGAGIVTVAGFLSEVGDISRFTDPKQIQKLAGLAVVENSSGKRKGKPGISRRGRSRLRRVLFQLAMTTVKSNNEMKAYHQYYTTRKENPLKKMQSLMAIAGKMTRIFYGILKNGTEYNPAIVMKDFKKEVAV

SEQ ID NO: 484153 - protein, 347 aa, unidentified
MLHAGLDLSRKKLDVCLLSDEGEHLDQLAVAPDVDSLRRLARRIDEVHAEPVSAVVESMTGARIVHDTLEAEGWSVAIADAQKVKGLAPLACKTDRIDSLVLATLSRRDLVPAIWLPDPEIREERELARFRLHLVKHKTALKNRVHSTLMSFGRACPVTDLFGAEGRRLLERLEVPEPWRSNVTASVWLIDELERQIDEINRRLREGHADHPYVPLLLSVPGIGWVLAFTIAAEIGEIERFSSPERFVGYTGLCPTVKQSGDSDRRGPLSKHGPRYLRWALIEATSHALRHPAYAERYQRNKKRLGKQRGAKVAQIDIARRLAHAIWHMLTRNQSFAPRGAALRLAA

SEQ ID NO: 484154 - protein, 341 aa, unidentified
MQITTIGLDIAKNVFQVHGIDAAEKVVVRKQLRRGQVLKFFAALPPCLIGMEACATAHYWARELTKLGHEVRLMPAKDVKAYVKRNKNDAADAEAICEAVRRPTMRFVGAKSAEQQGRLIQHRTRDLLMRQRTQVINALRAHLAELGIVAAQGREGLKQLLTIIADEKDARLPIDARASLIVLAAQLQALQTMIGSVEKRLTMQHRANEASKRLESVPGIGTIGASAITATVTDPNAFRSGRDFAAWIGLVPRQDSTGGKQKLGPISKQGDRYLRRILVVGAHSVLRRARQNPEKYPWLTQLLARRPFKVVAIALANKMARVAWALLARGGTYRVPALAAA

SEQ ID NO: 484155 - protein, 356 aa, unidentified
MGEGSWVGLDVHARSVVAGVIDRESGEVRSLRVPPGNDGTVAWLKTLPTPVQVVYEAGPTGYGLARACAGAGINCVVAAPSRIRPAADRVKTDRRDAERLARLLRLGEITPVRVPAPEEEAARDLVRAREDARGDLMRARHRLSKLLLRHGMVYDATAWTRTHDAWLRRQRFQSGPLAVVFDECYGRMLDAKTRRDALDRAITELAGAPPYVDVVERLVCLRGVSTLTAFALTVELGDWNRFRPTSLGAFLGLTPSENSSGERRRQGAITKAGNSHARRLLVEAAWHQRRPPRLSVTLERRRTGKSLAVRAQADRSARRLHGRWHALEGRGKPRTIVVVAVARELAGHCWALATME

SEQ ID NO: 484156 - protein, 349 aa, unidentified
MKKSSKMQQRMGETIGIDLGDKVSRYCIVSAEGEVVEEGSFRNQASSIAKHFGGERRRIALEAGAQSAWISRELKGLGQEVIVANARQLKWITASDSKNDPVDARKLALLARADVGLLAPVEHRSAEQQAELAVIRGRDAILRARTLLINTARGIAKGFGVRLPKSITRTFGKRAVLDLPAMLRTALAGLLEQIDALSQHISDYDQQVGALAAAHPAVERLTSIPGVGQLTALTFALTLGRPERFAHSRDVAGFLGLRPRQRQSGGRDPQLGISKSGDPYLRKLLVQCAHHILGHFGKDSALRRWGLAKSEGGKQATLRAIVAVARKLSVLLHHLWVTGEFFKPFPQMA

SEQ ID NO: 484157 - protein, 397 aa, unidentified
MNRKLCSGAAGGRRRPAAPSGDVAGDSLSVMRAKPVRPQSLELVGEQMVNAQRTSSSNRVTRTVANVMNVHPQGREAVAAPRANAGIDVSKDWLDVAWTDRSERFANDAAGMESLTVLLRQQEVDLIVLEASGGYEKAAAAALQAAGLAVAVVNPRQARDFAKAMGVLAKTDKVDAKVLRSFADVLARHEKRSQFLHQVPDEKRAELAALVTRRRQLMEMRTMEVQRMAMTHAKRARKSLNKVILFLDQQLAEIDRELDQFTKDHFQDLRKLLSSAKGVGPVTTSTILAALPEIGHLDRRAIGCLVGVVPLARDSGKKHGKRSCWGGRSQVRHVLYMATVSAITHNPVIRSFHQRLLAKGKPPKVALVACLRKLLTILNAMVRDGTAWNPALHVKTA

SEQ ID NO: 484158 - protein, 351 aa, unidentified
MNTQITATPKLYIGIDIHKRSWKVHCATDLFAGKSFSMSPDPQQLRTYVSKHFPDYEVTTAYEAGCCGYYAHRCFENYGWRSLVVHPADIYRKGKERHTKTDKIDAQLIARELKDGRLASILIPDKKREELRSLFRRRNDLVKDFRRVKSYIKMQLLYFGIKEPEEFDNDHWSHKYRNWLDDMIFEYPTAKATLESRMRFFRFVDQELRDVSTQLRRYCKVHYKKDYLLLRSIPGIGGIVACGILCELGDLRRFNTIKHLAGYVGLAPSVHQSGDHQRTMGMTPRANRLVRSYFVEASWQAIRADPVMQAYYRKHQGKNVKRIIIKVARKLLSRTLAVIKTEVPYTIGVVE

SEQ ID NO: 484159 - protein, 341 aa, unidentified
MKNKSFIGIDISKNVIDVSIFCEETPIKDFSHDVFNNSRKGFGEMCTWLKKNHVVLSNSLFGMEFTGSYSMELEKFLNARNYQFCMLSTHVVKHYPMGPKDKSDKIDSAKIADFLYRYNGTECVKPYNMPDKTMQRLKALMNERKFLVEQRTCFMNRRQLCITKEDAQLYDGYIKKFSRDIENIELEEQKLLATDDSLLSTYKNLLTIPGIGFVNAINVIVITRNFTAFETARQYASYVGVAPHFRTSGTSVKWRPRPSARCDGQAKADLSMAATVVVQYDAELQSFYNRKLGGKQDSDTKRKALNAVKFKLVLRMFAIGKQNRKWEPLDSKSSNEKLAIS

SEQ ID NO: 484160 - protein, 341 aa, unidentified
MKVSTLGIDLAKNVFQLHGVDHEGHTILRKKLTRAKFVQFVIQLEPCLIGMEACSSSHYFARLFTRYGHEVKLIPPQYVKPYVKTNKTDATDAEAICEAVTRPNMRFVQIKTEEQQAVLALHTERGILIRERIACANSLRATLAEFGITIAAGQNHLTRELPAILEDGENGLSPFVRTSIYRQSKHIRELEEQVKQVEEALASWYRTQEACQRMAKIPGVGMLTATYVVAAVGNARQFSTAKQFASWLGLTPKEHSSGGKQQLGGISKRGDGYFRYLLVHGARALTARVNRNGAVEENSWLQGLLERKHYNVAVVAMAAKTARIMWSMLSHNTEYQPRQLA

SEQ ID NO: 484161 - protein, 340 aa, unidentified
MRLIGCDLHASQQSIAMLDRDTGEIVEKTLTHEGEAVRAFYASIPPPVVVGIEATGSMGWFLRLMEELAIECRVGHPTAIRKAETRRQKHDRRDAALLLQLLAEDRFPAIWMPSTEYRDLRSLLLHRHQWVRMRTRVQNALHAIAMAHGVRRGHTLWNRDGQALLASLSLPLHTADRRSELQALYQHLEAQIDRLDDRVQHVANERPRATLLMTHPGVGPVTALATEVFVGDPTRFLDGKALASYVGIIPREYSSGKRQRLGALSKQGNPFLRFLWCEAAAHAVRRDPDLQRFYRRKVVQKGFAKARVAAARKLGIRLWMMLRDQIDYTEFCRRGLARQS

SEQ ID NO: 484162 - protein, 363 aa, unidentified
MNTTTVGVDLAKLTFSVCVMDGSGRVQHRQDFRRDAFAPWLMQLPVGTIVAMEACSGAHYWARYCTERGLQPRLMAAQFVTPFRKSRTAKNDRNDAEAIATAARQGNMRFVAIKSVEQQARLAWHRVREGYKVENLSVMNRLRGLLAEFGIVIAQTAVALRKALTDIVERNDLPTEFIELIRELREHWKAIAARMHECDTRIEAHATSDERCVRLRAITGVGPLTADATVATVNDGHDFKNGRQMAAWLGLVPRQHSSGGHEILGSISRSGDSYLRTLLVQGARSSLLQARRTPLDQATPEQHWILQLSVRMPFGKLMVAIANKHARQLWAMLARGESYDPHAGVKHPMAQRQRSAVSSIMAA

SEQ ID NO: 484163 - protein, 345 aa, unidentified
MEQYVGLDVSQKETVICVIDGNGKQVWEGVCSSTPEAMAAVLHRKAPLAVKIGMETGPLAVWHWHELRRAGLPIVCLHARHAKAALSVQLNKTDANDAFGLAQIVRTGWYREVEVKSLESHALRLLLAGRARLVSMRTTLYSQIRGLLKTFGVVLQAGKGGTFERLVIKGVPADRHVKLVIESLMATWRHLTLELRKFDREISKISSTNPTCRRLMTLPGVGPITALAYLTTVDEPRRFARSKDVGAYLGLTPRRYQSGEVDHSGRISKCGDRMTRSLLVEAAGVLLCRNKRASVLKSWGLKLRRRVGFSKARVAVARKLAVLMHRMWMREMVFQSYPATSGTAV

SEQ ID NO: 484164 - protein, 347 aa, unidentified
MKYYAGIDVSLNSSNVCVVDASGKIVREGKVASEPVTLITWLGSLGVNLERIGLEAGPLSQWLYGALREAGLAVELLETRHVKTALSTMPVKTDRNDARGIAQLMRLGWFRPVHCKSMAAQEVRALLTARKLVQSKLYDIEMSLRGILRGFGLKVGPTTSPSFAARINHLVDGQTSLEVVAAALLSLHAVALREFKSLEKSVRQISRADARVRLLMSTPGVGPLVALTYVAAIDDPARFTSSKSVGAHFGLTPKKYQSGETDVSGRISKMGDGSVRTALYEAAHVILTRPIKGGALKSWAMKLARRAGMMKAKVALARKLAVVLHRMWVDAIKFDADKASGCVRVAA

SEQ ID NO: 484165 - protein, 455 aa, unidentified
MMTLPNPVQSRRQPPLSAVHSHAAGIDVGAECHVVAVPPACDPEPVRSFHAFTGDLHRLADWLVACGIETVAMESTGVYWIPLYEILEARGLQVLLANARTVKHVPGRKTDVNDAQWLQQLHTYGLLRGSFHPPAEIAALRAYLRQRERLLDYAAQHVQHMQKALTQMNLKLQHVVSDITGQTGMQIIRAILAGTHDPQVLANFRDRRCKRSAADIAQALEGHYRPEHLFALQQAVALYDTYQTQITACDQQIEAALAPLTAPEPPAEPLPPPRSKTRQKNTLAFDVRAALYGIVGVDLTQIHGLGSALALKLVAECGTDLSAWPTAKHFVSWLCLSPGNKVSGGKLLSARTRRTSNRATSLLRLAAVTVGKTDSALGAFYRRLAMRVGKAKAITATARKLATLFYNTLRHGRDYREPGASAYENRQRERVLHHLERRAKQFGYVLEPAPVGEVA

SEQ ID NO: 484166 - protein, 349 aa, unidentified
MRFYQQQHRFYCGVDLHARCMYLCVLDQAGQTLLHRNFPANATAFLEAVAPYRDGLAVAVECMFAWYWLADLCAEHNISFVLGHALYMKAIHQGKSKNDRLDAAKIAALLKGGLLPQAYVYPKAMRATRDLLRRRSFLVRRRADLLAHLVNTNSQYNLPALNKKLVYPANRGELNLAERFTEPSAKKLVECDLALIDALDAQIHELERHLIKTAKVDDAQAYARLQSIPGIGKILGLVLLYEIHDICRFPAAGNFLSYARLVRPGHESAGKAAGWGNKKIGNAHLRWALGEAACLYLRSSERAKRWQVRMHKKHNPGKTLGILAAKLGRTVYHLLRTKQVFEEGRFFAS

SEQ ID NO: 484167 - protein, 372 aa, unidentified
MPHAHTSFQSFVGVDLHKCTVSLAAVDAAGTVIARLKTSTKCVEKIDAFLAELPGAPGAVHLAVEACPFIEWFIDRYRDRVGRIDIADATELANLRGKRRKTDRNDAADIATRLARGECPLGWIADPEVMQLRKLGRHWRSLSRTLARSKHAVRSMLDAANIKGPALDGAAMHKWLLAHGHLLKDAQRLAFEDLMDVILLLERKRERLKLAITTANRSDRFEALTTLLRTVPGIDQINACIIAAEVGDFKRFPNADALEFWSGLTPDNLESAGRVQSGSITKAGSATLRWSLGQAAMCLCRSDAKLEARRQRLIRTRGKARANVAMARHLLTILYAMTRDGTVYERGEQTDHTAKANRARMRKRTQRSKQAA

SEQ ID NO: 484168 - protein, 344 aa, unidentified
MGSLKGGGRSGHVMSALVCGLDVHKDSTYATILDSRGKIVDQARMNNERVLSYLSHFSVGKVAMESSNQVAALYRRLQSKGYNVMVSHPKKTRYIAEAKIKSDRVDSKAIAELARLDALPLSYMPDKEISVLREQVRRRAFLVRQRVKLRVKIKAVLTYEGIRWPSDSGLFTRKGVEWLHGLSIEPVESYLRIMRVFDDEIRVLNRQLRGLAQDDEDVKLLMTVPGIGYYSALLVKSEIGDINRFPFGDRLCSYAGLVPSTHASGNTVRHGGITKEGSRWLRWVMVEAAQTHVHKYDTAITRVYHRVAERRGRKVAAVAAAHKLLMCCWAVLKYRESYHDQALT

SEQ ID NO: 484169 - protein, 464 aa, unidentified
MKKNKQTESEIQTQNQIQTSQKEVSKKKFSHGLPVFNPFAAGVDVGDTFFDVAISDGVEGHEVRRYESFTEDTINLVDWLVSEGITTVAMESTGIYWINLYLMLEEAGIEPYLVNAKHVKNVTGRKKDDTDAIWIQKLHCCGLLQKSFQPEGEIRILRTYVRQRKNLVTMCSDSVRRMQKALELMNIKVHTVLSDILGKTGLQMVLAIIEGERNVDELMKLKDPRIKAKEENIRKSLVGIWKDENLFLLKQAYDEYMFYQSQINACEEKIQTQLLKQVAIVMDGDISDIQFEKKKPKKNQFSCDVRSMLKIIVGVDLCKLEGISEISSLELISEIGTDMTKWKNSNHFNGWLNLAPNTKITGGKIISSKMQKKKNYAGQTLRMSASNVSSSKTPMGDYSRKMKARLGKKGGVVATAHKMATIIYTMIKEKREYNPEIIANNQQKWKEKRIKNLKKQLMQLEMAS

SEQ ID NO: 484170 - protein, 311 aa, unidentified
MSNQYVAVDVSKAALDIALPGANGVWRRTNSVAGIAALRRRLATLEHPHIVCEATGRYGRLLARQMGAAGIAMSIVNPRQVRDFARASGQLAKTDALDAGIILRFADAMQPARTPPTPENQARLAEQVRRRRQLVGMLATEKQRLSGLDDAETLASIREHIAFLQGQIGQCDARITAEIEADATLARKAMLLESIPGIGATTAAVLIAELPELGIADKKQIAALAGIAPMNRDSGQWRGQAHITGGRLSVRCALYMATLPAIRFNPTIRDFYQHLRAGGKAPKVAITAAMRKLLIIANAIVQQDKPWANLA

SEQ ID NO: 484171 - protein, 329 aa, unidentified
MKVQHIIGADISKETIDFVRYHDKVHFKIKNDCTGFRQLLKWMQHLRSLPDQSLVVMEHTGFYSHRFENFLHQHHIAFSKVPALAIKRSLGLTRGKTDKLDAARIATYGYEKMATLSACVAVGKNLKCLQMLYATRSRLVKQRAALRCAIEEYMQMGLSKKDPVIAVQLSVIKTLDKQIKTVLSEMEALVREDLALQENFRLLVSIKGVGKVVAVAVLIKTQNFTRFANARKFACYCGIAPFEHSSGKSLRRKTRVSHLADKEMKCLLNISAQVAAIHDQELRRFYVKRTENGKSKMSTINIVRNKIVYRMFAVIKRRTPFVDNYLQAA

SEQ ID NO: 484172 - protein, 416 aa, unidentified
MQPTATHTTEYTEPQPVLYLAFELGERTWKLGFTTGHGQKPRERNIPARDLERLAHEIAQAKQRFRLAPTTSVVSCYEAGRDGFWLHRFLQAQGIANCIVDSSAIEVNRRQRRAKSDALDVRKLVTMLIRYQQGERKLWSVVRVPSVAEEDQRQLHREIHTLKQERTRTSNRIKGLLSAQGLRVPQLKYLPVQLATLRLWDGSPVPAGLWRRLERDYAHYLFLVQQLREVEAERRALVRTSSASSIAKVRQLMQLRGIGINGAWVCVMEFFGWRQFANRREVAASAGLTPTPFQSGGRAREQGISKAGNRHVRWLMIELAWCWVRYQPESALTRWYLERFYDGGSRARRIGLVAVARKLLIALWRFLETGELPEGAMLKSVCPGCPSESLGEPALGAGESRELPSDAEVPSGSPAP

SEQ ID NO: 484173 - protein, 411 aa, unidentified
MHNRQNYLYVGVDLHKEHHTAVIINCWQEKLGEIQFDNKPSAFSKFLLEVETYVSAGITVVFGLEDVGGYGRALAKYLVDHEQVVKEVNPALSFLERKSHVTTQKSDSWDAKCVARILINKLNQLPDAKPNDLFWSIQQLVSRRNALVKAQSALKNQLHIQLNHHYPSYKKFFSELDGKTALAFWQQYPSPFCLEGANIKQLTAFLLDVSNNTCSVKKASDILKLVKEDGQTMKEYQETRDFLVRSIVRDIEFKKKEMKYIERELKRLVNLLDYQLETMPGIELVTASALIAEIGDVRRFPNANKLARFAGIAPVYFGSGGKGKTHKSKQGNRALHALFYNLAVQQVQVAKGSKLPRNPVFHAYYQKKLKEGKTKGQALVCIMRRLVNIVYGMMKYKTAYELPVVEEKEVV

SEQ ID NO: 484174 - protein, 380 aa, unidentified
MRKDTRFVGLDVHAETIAVAVVEPEGELRFLGTIPNRPEAIRRLMKRLGPVQRLRVCYEAGPTGYVLYWQLTELGVHCDVVAPSLMPVKAGDRVKTDRRDAEKLARSYRSGDLTPVWVPDAAHEALRDLLRAREAAKSDQLRARHRLGKFLLRHGRRPDPGIRPWTCKHMEWIKRQVHFEVAAQDATLTDYITEVEHAGLRIERLERAIDEAVSTVPHRMRAVIDALQALRGIRLISAATIVAEVGELSRFARPRQLMGYSGAVPREHSSGERTRRGGITKTGNAHLRRIVGEASWAYRHRPNLSRALRQRQEGLSEQVKEIAWKAQHRLHQRFRQLTARGKAKQQVVTAVGRELLGFIWAIGTTVERGLTEPADRRRVA

SEQ ID NO: 484175 - protein, 427 aa, unidentified
MNNVTYQPTLCVGADVHLDEIVLRAVDKALGHEIVDRFRVTNNLPGAQLAAATIAAAATELGYTRIEIACEATGMLWIPFHRYLSTAPPLQPFELELVCFNPKLVAKFKDGLVLRSPKDDDRDAFDIAARLRFGELPISYVPSDFWQGLRRLTRYRYRLSKAMSREKMRFQSHAFLKCSDWKRVKAFSDIFGATSVALLTEFTVAELQEMTHDQLVDLITHRGHGRFADPTATARAVREALRTSYPIDPRMDEMVTATLAAGWEHIRYLKRSMKRLDQLIARYIDLVPNPIITVKGLGAVITAGILAEIVDVLRFPQEKQLAQYMGLTWRKSSSGGFVSQNTRLTKVGNVYLRYYFILGANLLRQNNLEYKAYYWRKYQEVSKYQHKRALVLTARKLVRLVHALLTKNEPYVRPRTTRQEQEDDRLQ

SEQ ID NO: 484176 - protein, 359 aa, unidentified
MFYGVDLHSDNVKVAILPEDNATPEVKRFPLNSEPFYEFLHSLSTRDYVAVEASTNTFWFHDQVSPKVKQCFVLDPYKFSIISKSIIKTDKRDAIQMAKLLKYAVMTQEELPTVYVPTPQVRELRSLFSTYNCFKEQIITTKNNLHAILRSHGHKIGREGFSKKNALKEILSLDLPASAKLQITCLYESLLSLEKNAEEIKDEILRKGHIFSREIEILTSIKGISVFIAIAIMTDIGDIRRFPDSKELCSYLGCVPRVDSSNQTTRIGRINKHSRRLTRNLLLQSVRHFRTIKKYGEFYDRKINGKCAGKVRMALVHKVVRAIYNMLTRDTLFYYVEPKNHQSKLNSYKKFLAKTPAVA

SEQ ID NO: 484177 - protein, 366 aa, unidentified
MEKIGGSDGRRQERVPVPKRPADGTQVWMAMDISRSKAVYCLRWEGSEQRRLSTPLGIEHVRPLLEQYRGCQVQVAYEACGFGYELAWWLEEHGVGARVIAPSRVERMPGLQVKTDRVDVGKLARKLEKGDLKAIYIPSRPVHEQRQIGRTYAQSVKERKRAQVRIRSLLQEQGRLGPLPAAGWPVYRAWLSEQRLPEPIRLCVQAHEQLRAVADQQAQRMKAELYTLARRDEYRPLVKALSAQAGVGWQSAIRLILELGDIDRFRTTAALPHYLGLTPSQYSSGELDHRGHTLKCGPGVLRALLLQCAWSAVRHGRDPELTDCFNRLAPRIGRKRAIVAVTRKLAIKVRRRWRTHRMSSQPAPAV

SEQ ID NO: 484178 - protein, 349 aa, unidentified
MEAYDGPQIVGMDLHRRRSVLVRMTPDGRKLATARIGSEPASLVAEVAKAGPAPKVVLEAAYGWYWAADVLEAAGAEIHLAHPLGVKGFSYRRVKNDEKDAADLGDLLRMGRLPEAWIAPPEIRELRELTRCRVKLVHLRTSCKDQVHAVLAKLGVPVTCTGIFGVWGSSWLGELRLPQPYAGKLDSLRGIAAYLSTEITLLDTVIADLLEHHDAYHALQQLPGIGKVLAAVIVAEIGDITRFRHPGRLCSWAGLTPRHRESDIKVTRGHITRQGSRLLRWAMAGAIQRQPAGSPIRQRKDAIITRRGKEARNIARVAAARQLLTCVFYTMRDGQARSLATRTAAQDAA

SEQ ID NO: 484179 - protein, 351 aa, unidentified
MDTHKKQHSVALIYPNDENIIQFSVNNTPADIRKMVSKIKRNAPGQVQFCYEAGVCGFTLQRRIVAEGCPCIVIAPSLTPKKPGERKKTDRRDAKKLLRLFRADMLTEVYPPDEKQEAARELTRCREAAQENLKRIRHQLQKMLVRHGYVFNNGQHWTQKHYRWLEAIQFEEPLLQEVFDCYFTEMRHCLQRVKTLDNELEKLAQSEDYKEVVGILCCFYGIKTLTAMSIIAEIFDFGRFASARDFMSYLGLTPSEYSSGEKENKGPITKTGNKRSRRLLTEVAWHHRHAYGVSKVLRKRREGQPQWAIDIADRAGLRLRRRYSRLVNKGKLPCKAVTAVARELAGFIWSA

SEQ ID NO: 484180 - protein, 481 aa, unidentified
MAARKKNTKKDAASGSPAAASQPGDGGAEVAEERAGVVAYAAAVDVAKGSGMVCTRVPGSRPDRKRQTVWQVKAAYKPVVALMDHLRCQGIQRLVLESTSDYWRIWYYLAEAAGLQVWLASARDVKHLPGRGKSDREDCVWLCKLNERGMLRRSFVPPEGIRDLRSLTRTRSKLAQDQVRHQNRVEKILEDALLKISVVISDLFGQSGRRFLDALVAGERSPAALAALGHPRLKATQQELAGALTGRFRDIHAFEIATHLRLIDTINDEITRLDARIEQQLASIPGVAPACTSCGLIGGGHAPGCASQGTPVLGLAERLDEITGVGPRNAQVLIAELGTDMSVFPTPGHAAAWARLTPRTLQSGASSRPGRAGKGNPYLRGALGQCVMAAARTDTRLGEQYRRIARRRGKQKAMVAVSRVICEISCILISDPAARFTDLGAGYYSTLNPRRQTRSRIRELERLNPGMKVTLTPIEPATTAA

SEQ ID NO: 484181 - protein, 339 aa, unidentified
MRERELVFRKAGQWPGVPEDSEKRGNGRDMANPYVGIDVAKAMLDVAIGSDGEVVRAENDERGIARLIEQLGEIAPTLVVLEATGGYESLVAGALAGHGIAVAVVNPRQVRDFAKATGVLAKSDRIDARVLARFAEAVRPEPRPLPTAEAKELEEFLGRRRQIVDMLTMEKNRLSIAATERMKKSLKKHIAWLEEALRRANDDIDTAVRNSPAWREQEDLLRSVPGIGPVSARTMLAELPELGALNRKKIAALVGVAPLNRDSGTIRGSRICWGGRASVRQVLYMAAVSAVRCNPVIRRAYLALRARGKKHKVALVACMRKLLTILTAMVRDQRRWSPS

SEQ ID NO: 484182 - protein, 423 aa, unidentified
MTKLTSTPAGAVLVAIDMSKNRQEILIERPEGGRRRRMTVMATRQDYDGFAEQLAAIGRPIIVGFEATGNYHRTLAHRLLTAGFELRLISSVALARTREALHNGWDKNDPKDAQVILHMLRIGATRRYVDPLVAGINDLQELSKTHETISRMKTQTWHRVLTHYLPLYFPEIARFAGNSRSDWFLALIERFPTPATITALDREAFSAAAWPLIGRKVSKAHLINDIYETASASTALPVPEDSAAITMFRMVIAQGRSLIHQRDEIERLAHARLADDVDYQLLRNIPGIGPINALTILAEAGDLRRFNHHRQFLKFCGLDLATCQSGTFRGRTKLSKDGNARLRRTFWMAAQVAARQRDNSFRDKLGRYVAGHADDADRRRKAMTALTAKMARVAHAVVKTGTEYRPFLERSDARWKDPSLQVP

SEQ ID NO: 484183 - protein, 392 aa, unidentified
MSISVGIDIAKDVHWITAIDADGVVHLDRKLDNTPTAIAGMIDELAALGGAVRIGIDVVGGIAGLAEAMLAEAGFALVHVPGLAVNRARQGTVGGENKSDPRDARTIADQVRMRTDLRAIEPAAEIDLEIRLLVGRRRDLVGAQTQRLGRLHDLLTGIFPGLERSLDLTTKGPLHLLTRYVTPAELRGAGKKRVVRHLKAGGAIPRVEALADVALAAAVQQTISVPAERMTARLIRELAVEALATKTRLAELDRELETLLQGHPDAALIRSLPGMGAVLTAELIAEAGNLARFRSADALAAAAGIAPVIRQSGKTRFLRRPTGGNKGLKRVFYQSAFCSLSQPDSRTFYDRKRREGKRHHQAVLALARRRVNVLWAIIQNRTPFQQNFKLAA

SEQ ID NO: 484184 - protein, 381 aa, unidentified
MSQTTHKAESKAVDRSLYLALDLGWSQWHLAFTTEFGQKPRLRTVHARDLPALQEEIRRAKERFDLPAQARVASCFEAGRDGFWLHRYLLSIGVESRVVDSSSIEVSRRRRRAKTDRVDAIKLVDLLLRYESGERGKWSVVRVPSVAAEDYRQLVRELESLKKERTEHTNRIRALLAAQGVDLGSGASALRRSFDLLRLWDGSELPPVLRARLEREQQRLEFVEVQIRELEQQRKEQVKAPVCRAEEQVGQLLQLRAVGIKSAWLFVSEFFSWRELRNRRQVGSLAGLTPTPYSSGNDHHEQGISKAGNPRIRAMAIEISWGWLRWQPDSDLSRWFWARFGKGGGRSRKVGIVALARKLLVALWRYLETGVVPAGAQLKPT

SEQ ID NO: 484185 - protein, 441 aa, unidentified
MVASEVLESTRRRISFLPASIAVRLRRTTVEVVYERCAGLDVHKKSITACVLWGLPKGKKKQEKRRFATFTQDLLAMADWLRECGVTHVAMESTGVYWKPVWNILEGQFEILLVNAQHIKAVPGRKTDQKDSEWIADLLQHGLLRGSFVPPTPVRELRDLTRYRVSLAQECNRIANRVQKVLEDANIKLASVATDALGASGRAMLDAIIEGESDSTQLAEMSKGLLRNKRAELRLALEGRTTEHHRFLLKQLMKQLRFTEERMTDVEKEIGRRMESHQQDVDRLCTIPGVDRVTAWGLLAEIGFNMDQFPSAAHLASWAGLCPGNFESAGKRLSGKTRKGSASLRRCLSQAGWAVSTKKDNYLAAFYRRVAARRGAKRAIIAVAHQLLVIAYYLLKRKEEYRELGANHFDNINPDRVRRSLVKRLERLGHVVTLQPADQSA

SEQ ID NO: 484186 - protein, 399 aa, unidentified
MFYCEIDIAKYKHEASVIDMSGKALSNSISFANDRQGCEKVLAIFEKSEITPDNVVIGMEATGHYWLSVYTFFLELGYTVKVINPIQSEAFRKMYIRQTKNDSKDSYIIAQIMRFGEYSATTLSEDNIIALRQLSRYRLALVDACGDCKRRVIALLDQVFPEYDKLFSDTFGKTSSELLLNCPTPEDMLAVSTRKLTNILNKASRGRFGKEKAEELKDAAKNTFGIAFAKDAFSFQIKQLMQQIIFTEKQLSELEEQIANLLHETNQYITTITGIGDVLGAIIVSEIGDINRFERPNQLVAFAGLDVTVKQSGEFSGTKNRISKRGSPYLRRAIWLAAQRAAFCDPILSEYYQSLKARGKHHLTAVGAVARKLCNIIFVILKENRPYLPIPPKKSQNLS

SEQ ID NO: 484187 - protein, 387 aa, unidentified
MTLINFVAANQKYYAFNLLSVFIMVFWSVQYLLQHLLVQTQVSHQLLQPLILILQLPQTPQFRHARPGKFFLPVNGMDYFLPLRLTVRNVLTRRITMNIVFLGIDLAKNVFQLCGLNQAGKPVYTKRTGRKELLQTLANIPACLIGIEASTGAFYWQRELEKLGHKVKVISPQYVRPFVRGQKNDGNDAQAIAVALMQPTMQFVPPKSPEQQDIQALHRARQRIVNHRTATVCQIRGLLLDRGIPIGSAVSRARRAIPLILEDAENGLSSRMRRTIAELYDLFNDLGRRIHFFDKEIETVFRQSEACPRIAKVKGIGPKTATAVVAAIGKGTEFKNGRHFAAWLGLVPRQHSSGDRQVLMNMTKKRRQASADTFYSWCPRCRQGCHE

SEQ ID NO: 484188 - protein, 400 aa, unidentified
MISVGIDVSKGKSTVCILKPYGEIVSKPFNITHTQKDLSELSSMLFRLNDEVKIVMEATGIYHLPVLTYLQEKGFFVSVINPYLMKSYRNESLRKAKTDKIDSRIIANYGIDHWFKMKEFQTSGEIYEELKLLGQQYRHYMKLHLLSLAELTHLLDLTMPGIKNLLASWNETNRKDKRSDFVERFWHYDVITSMSEQKFTEEYILWAKEKKYVPSQEKAKVIYTLAQESIPTLPSETSSVKMLVTEAVRVLKEVDATLGLILSRMQEIAKTLPEYSVVREMGGVGNTLAPKLIAEIGDVRRFRNGKALVAFAGIDPPPYESGQFVGCNRKISKRGSASLRKVGYETMRSLKMRSRPEDPVYRYVVKKESEGKSKKSAKIAGLNKFLRIYYARVTELYKNI

SEQ ID NO: 484189 - protein, 405 aa, unidentified
MLLVGIDWADAAHVYCVMDEAGATLASGSIPHTPEGLATLFAAIRTRARAPEEVAVALETSQGLLVGALLDQGFVVYAINPKAVDRHRERFRVAGGKSDLRDAWVLATLLRTDRALYHPLLPDSEPAQELRVLTRDRAELVRTRTMLSNQLTACLKAYFPAFLDLFGDPDRPVALAILQLFPTPAALRSASVKRLEAFLRQHHQPEAAAKARDMHTRLTQPAFQVAPVILRTKARLAQTLGHQLRALAEEIAAYDAEIRRVLKTHPDGELYLSLPGAGDLLAARMVGELGDNRDRYRDPAIAQSAAGTAPITRASGTARTVHVRRACIHPLRETMWYFAFCSTTHCAWAKAYYRAARSRGKHHAEAIRMLSNVWLRIIIAMRRNHRPYDQAVFLSARESHLATAS

SEQ ID NO: 484190 - protein, 320 aa, unidentified
MSFKFFIGIDVSKSTLDVGLLDRDSPGSVHHRKVTNSDDGIVAMLHWLKDQVGFSVENSLFCLEHTGMYNYALLQFFNQQNANVWVENPVQIKRSLGLQRGKNDKIDAMRIAQYAYRQRDQVKLWQPIREVVDKLKHLSALRERLVESKKRLLTPVEELSKVGNESIAKILKKSMSKTMKGLDKDLQAIEDQIKDIIDNDDDLKRLYQLITSVVGIGFVTAVNLLVCTNEFRLFSNHRQFACYSGVAPFEYRSGSSIKGRTKVNHMANKRMKRYLHMASLTGVKLDEGLSSYYERKAKEGKSKMSILNAVRNKLLARVSL

SEQ ID NO: 484191 - protein, 355 aa, unidentified
MKTTTVGVDLAKNCFQLAEADERYRIVRRARFTRTGFAQWMSNHPSCLIVMEACGSAHYWARVLESQGHEVRLLPAQHVKAYVKRNKTDAADAAALIEASRCEEIKPVAVKCVEQQVLQQLHRLRTQWQGGRRARINSLRGMLREFGIDIPVGAVRGVAAIREALEAADNGLPDALRPFIAQLLMEIEAFEEQMKRTEGSLKELTREDAVVQRLEQTPGVGLIVATGMRAAIRDIHRFASGRHLSCWLGITAREHSSGEKRRLGRISKQGDVYLRTQLIHGARSVLLAAKKAAGKGRELDRLRRWALETERRVGHNKATVALANKLARIIWATWKYERPFDGNWKHPAPAVNAAA

SEQ ID NO: 484192 - protein, 334 aa, unidentified
MDTTTGELVTRRLEHGTGEAERFYAALAAPVRVGIEATLATQWFEKMLRHYGHELWIGDAAEIRAAMVRKQKTDDRDALHILDLLMQNRFPRIWVPSPAERDVRQLVRHRHKLVRFRTSVMNQLHALAMGQGLCLRKKLWTTVGRQKLESLTLDPWASRRRRELLELLDQLDPSIGELDRAVISEAESRPTAVCLMQQVGVGPVTALAFVLTVGPVSRFPNSKKLVSYLGLNPSEESTGGRQRLGAISKQGNTMLRCLLVEAAQTSARLDPELRRNYQRLKLRRGNSGVAKVAIARKLAVRLYWKLREADRPNTAARMQGSPASPVVGESLSAN

SEQ ID NO: 484193 - protein, 426 aa, unidentified
MRVLFERVAGIGVHKDMIKVGVRTPGHRAWTRTSEVLEYRTFYGVLQTMARDLRKRDISHVVMEASGVYTEPVYCALTEQDFEQVAVIGPAHAEALKGHKADAKDALRLAGLFECGLLRGSYIPPQALKDLRDLTRYRIKTVQGRTSEIQRLAKALESAGIKLDPVVPDLTGKPAGLMIEALIDGGRRGKVLADLAIGRMRTAGKLADLSQALAGRFTGHRAVLCRLHLDRIALFNTAVAGLEAKITVKVTAYQRELDLLKSINGFGDAVAQAWLAEIGPAPHEHFATQEKLASWVTLCPGNHMSAGKRRHGRTGDAGTCIKPVLVQAAWSAVKSQGRLQARYHKLVRRFGGPKNPAAVKKAILAVAPTLLKIACQVLKSGKPYKDLGAGFYTQRESPEQRRAYLVRQPEKLSPGCTITITPAEAA

SEQ ID NO: 484194 - protein, 414 aa, unidentified
MKKEMIRIYQKRNTCFIGIDMHKDKHCAVVIDCWMNKLGEVNFENRPSKFPAFVEDVRRICGTKEFVFGLEDTRGFGRNLSAYLVGRRFDVKHVNPAYTSAVRLSNPIVFKDDFYDAYCVARVLRDMVDALPDAKHEDIFWTIRQLVKRRDLLVKNNVMNKNTLHNQLMYSYPSYRKFFAMIDGKSALCFWENYPSPMHIKNATPEQVYETLKAINQGLKLERIYDIFAMIESDGDTRKDYQEERDFIVRSLVKSIRNNLEQIKEIDVELERIIPLAGYKLRTMPGIDLATEAHLISEIGDINRFPDSDKLARFMGLAPVSFSSAGKGKDERCRNGNRVLNAIFHFLAIQMVAVSKGGKPRHPVFREYFEQKVKEGKNKPQALVCVARRLVRIIYGMMKTKTEYRPLEKADGKN

SEQ ID NO: 484195 - protein, 439 aa, unidentified
MQSISKIELFRQVKLSIKKNKRYLLVGIDVSKNSSIACFYNIAKEIILKKYSVEHTFEEFKRFTYKIEQMMEINNLQSAIIGVEPTANYHKPLCEYLKKKGYLVVYVSSVAAKSNRKTMDSGRWGKNDPRDAYNVVDLMRQGKILFYRDEDTQSMDIRKYLLLRHRLTQAKTSLKTRVQNNIWTCHFPELSAIFRSADDPDALLLLEQCPSSEHIKNMDFQSFINVFPPATSPRNKQSLRLTRTWQAAKNSIGFPMPSSTVLEAKMIARDIQRTQKDIEVIDKILLNYCNQNDVFRQLFSLPGYGVFTVSVFKSMLGNINDFHHHRQVTKFAGLDIETMTSGKFSGREKISKKGNSLLRYAICQASNVAVSKNTTIREMFERKLKERGNSREAKAKLRIKFAEKFLRAAFYMLKNNVPFDINLFNIPVDDPVNATLGLN

SEQ ID NO: 484196 - protein, 269 aa, unidentified
MIYAGLDLHKSFCQTKICTKEGELVKEGRIKTEAEDIEEFFSGLEDLTIAFEASGNYEYFYDLLEGLGHKVVLAHPLKTKMIAEAKIKTDKIDAKTLAELLRGGFLPTSYVPPKEIRELRHLVRHRIFLGRVRAIIKNQIKTELRRKNIKYPDGAGIFMEKGKKWLRSLKNPVIDSYLAIYEAVDREVKNAEREIEKAGKEYKEMKLLTGIVGIGVYSALIIYSEIEDCSRFSDEEKAFSYAGLVPRVHQSGNTSYYGRITKEGSKYLR

SEQ ID NO: 484197 - protein, 355 aa, unidentified
MNDEKYIGLDVHQATIVVAVMDSTGKLVMESILETKAATILQFFAGLRGTLSVTFEEGTWSAWLYDLLHSRVDKLVVCNPRKNALLKDGNKSDRIDARKLAELLRGNQLKPVYHGETGVRMLRELSRSYLTIVKDLSRVMNRLKAVYRSWAIPCAGRDVYYRRHREQWLAKIREAGVRRRAERLYEQLDMLQHLRQQARRELLAESRKHTITAKLRQIPYLGPIRVALAVALIQTPHRFRTKRQLWAYSGLALETRTSAEYRFVEGQVRRSKKLLSIRGLNKDHNHDLKGLFKGAATMASVRPGPFQDFYTAALAKGIKPTMARLTLARKIAAITLTLWKKGENFDVEKLKSQAA

SEQ ID NO: 484198 - protein, 523 aa, unidentified
MTTTAPRRTRRPHRLSSVAKPSGVLHPRVLKAGPEHFGIVAVDCAKARSKGMLADFYGRILVPPTTVEHSRQGFDNAIAALRQAIATHDLRDVIIAIEQTGVYHRPIQRAFTAAGFETRIVHPLTSGQFRLPADPQNKTDDTDLNAIHRAAVNGFGLIEPKRDLTYHRIQLLSRHRRDLVRKNATLRNQIHVELDALLPGLSAAVGNLFDHEPARVIARQVSSVQEIRDLGLEGLAAILKAQSVRYQRRSLVRILAWADQAPEGTELADIHKTIFKNLDEERLARLQAIRSLERDLAAGLVQTPYVLLMSIPGINVVSAAEFAGEMGPIENSPSDRAITGRAGLFPARYQSDTVDRCNGPLVHQANHALRYAILQIADNLLQCNSYFRGLYAGWNQAGVNRRLMCVWAAKRFCRIAYRMVAGRQVFRHPSCRERHCVIEKLSTFYVEHETAMDQVLRDLGAAAGWIPLAERGAEAVPLKAAMTQVPSRRRSGPCRLGEILPEVLLRLGVPMVESQSKGEADLT

SEQ ID NO: 484199 - protein, 354 aa, unidentified
MSRKTTSLKAVATIGIDIGKNTFHLIGLDKTGAIVLRQKLSRGQVNARLANMPPCLIGMEACVGAHHLGRQLKALGHDARLMPARYVRPYSKGQKNDFRDAEAIAEAVLRPTMKSVAIKTVEQLDLQGLHRVRERLVCQRTSVTNQIRAFLLERGIAVRQGLRPLRAEIPIVLAMTDKLSPRMIQMIEDLCTDWRYLDGRIEMMSDEIETLSEQDEGAKRLKTVPGIGSIISTATVAAIGNGDAFSKGRDFGAWLGLVPRQMSTGGRTVLGPISKRGNRYLRMLFVQAAHAVLLHPQSWEKHGLKSWIEAAARRLNRFKLAIALANKIARIAWGVLHGDRNFEVRSTRPVSQVA

SEQ ID NO: 484200 - protein, 490 aa, unidentified
MKKRKLSTFERLTQGRMNRKQRKELARRLYAEDPGLEVVHRNVAGVDVGNESHFVSVAPGCDPQPVQEFGSWTADLLRMAAWLKACGVKMVVMQSTGVYWIAVYEVLEKAGFEVWLTNARDTKNLPGRKSDVQESQWLMKLQTYGLLRNSFRPSEEIRRLRTVWRLRERHVQEAGRAIQHMQKALTTMNVQLANTLSDISGVTGLAIVRAILKGERDPYQLAQLRDYRVQASEEEIARSLEGHWQEDLLFELQQAVAGYDFCQQQIRECDLQLQKYLAAIDSRPPVQPEPARMESSTVAQSAQPPKRRKNNKQSRKQPRKNEPKFDWEAELNRICGVNLKTLDGVDAMTILTFVSELGVDMSPWRSEDHLVSWLKLAPRRQVSGGKLIKHDRTKVKNRVAEALRMAASTLERSDSYLGARYRSLRSRLGPGKAIKAMAAHLARLIYRMLKHGQAWVDRGTQEFEKRRQARETHSLQRRAAALGFRLVPAA

SEQ ID NO: 484201 - protein, 340 aa, unidentified
MSEVTTIGLDLAKHVFQVHGVDANSAVVLRKQLRRGQVVAFFAALPRCLIGLEACATAHYWARELQAVGHEVRLMPAQYVKAYVKRNKNDAADAEAICEAVGRPSMRFVAIKTAEQQAALLLHRGRERLVRQRTTLVNALRAHLAEFGVIAPHGLRHVARLVAIVRDDSDTRLPALARQVLEVLAAQLEQLTTAVTAIEKELMAWHRNNPVSQRLASIPGIGPIIATALAATVVEPIGFKSGREFAAWLGLVPRQHSTGGKARLGGISKRGNRYLRRLLINGASANLLRSRATNANPWVIGLRRRRPSLVVAVALANKTARIAWAVMRRAQSYRHRSAAA

SEQ ID NO: 484202 - protein, 442 aa, unidentified
MNYVGFDWASRAHDVTVLDEAGGVLDRWAFPHSETGWVTTLDRLARHGSAAEVPVIIERTSGLIVDRLLAAGHPVVPVHPTAFYAARPRWGASGAKSDPGDSYKLADYLRTDGHRLRRLTPTDPGLHELQALVRLRDDQVRARTAATNQLTAILDTYWPGPKQLFMSLASQIALAFLTDYPTPTSAARLGEARMAAFCRRHAYRGGKSPAELLSRLRAAPLAPVGLPPATLAAMVTAQVTLLKTLQTVISDVERLIAVRVVAHPRSNLLENLPGVGMINLAQLLAEVGPILDRVDSAEQAATECGAAPVTRSSGQTRGVYFRWAANTRARKAITSFAHNARMQDDWAAALYANARARGKRNPHATRIVARAWLRVIWACWSSGQPYNPDRHHSSRFLHRCHPAGAQARSRWSPHRRNDLDRAEHRHIMGSGGTVTLDDIDLT

SEQ ID NO: 484203 - protein, 344 aa, unidentified
MKITTVGLDLAKNVFQVHGVNEHGKPALKKQLKRGQVAEFFATLPACLIGLEACGSAHHWARKLQSYGHTVRLMAPQFVKPYVKSNKNDAADAEAICEAVARPNMRFVPIKNIEQQSVLALHRVRQSFVKARTAQANQIRGLLSEFGLIIPQGIANIAKRVPEWIEDASNELTGSFRLLVDRLMDHLKELDKQVFELERQIKEWHRGSDASCRLEKIPGIGPITASALVATVGDAKNFDGGRQVAAWLGLVPRQHSSGGKPTLLGMSKRGDSYLRTLLIHGARSVIFRARQKADKSSWLHKLLERRNPNVAAVALANKNARIVWALLANDREFRSDYAPAVAVA

SEQ ID NO: 484204 - protein, 367 aa, unidentified
MFNDQIKQKETDAMKTYVGIDLHSNNSYFAVMSESGERLFHKRYSNKKEDIVKALDQVNKFGEIKRLAVESTYNWYWLIDFLHELGYQVDLTNPAAVHQYNGLKITDDKSDAYFLAELLRLNILPKCWICPKEDRPLRDLLRTRMHFVQNRTSLKNSLTSLLARQTGQQLSYSKLIMLGREEVNKLVGHEDITYRISQLCSQIYTLDRSIKDIEKRAFEKKKLSPEFRNLTTVPGIGKVLALVIMVETGNINRFKKSGNYTSYCRCVETERKSNGRSKGSNNKKNGNKYLSWAYAEAAINLKRFNSSANKYWQKKAARAPKILAYKSLAAKLTKACYYIIRDQKEFDEKLIFGYEGETGAELLKTAI

SEQ ID NO: 484205 - protein, 431 aa, unidentified
MKYKQSKKQNQRITRISDKTLVIGADIAKETHVARAIDFRGIELGKDCAFSNTRTGLEQLVQWMKELQREHAKSDVLFGIEPTGHYWFNLAEYLGQHGIPLVIVNPHHVHKSKELEDNSPTKNDYKDAKVIADLVRNGKYSEPKLPTSIYADLRILMNLREKIMVNLGQVQRRVQNWQDRFFPEYTEVFKDWEGKASLITLSEFPTPGEIVELGAEAIVQRWKKDVKRAVGTKRAKQLVETARSSIGLTKGLPAAKIEIQTLLEQYDMFTRQLEEILAEVERLLAQIPGTKEMLTVPGVAIVTLAGFLAEVGNLSDYEHGQQIIRLAGLNLKENSSGKKKGKSSITKRGRARLRALLFRAVMPMVAKNAEFKALHQYFTKRSQNPLKKKQSIVALCGKLIRVLHTLGTKQLPYNANDVLGPVRQAQLQMAA

SEQ ID NO: 484206 - protein, 331 aa, unidentified
MNYSHFVGLDVGKKTFDASLMSADEKELSHKSFDNTPTGIQSLLDWIAGYHLSLSKLLFCAENMGSYVTELSVSSVSMGFSLALVCPLTIKKSIGLQRGKNDRIDAKRIANYAVLHYRKLELYKLPDKGLVRLRGWIIIRDNLVKQKVSSIKLLETFSWMAKLADVTESISFLEEQLKSIKERILEVEEDMEQLIAASTSLYTNYLLLRSIKGIGIINAIVLLCVTDNFQRFDNPRKFACYCGVAPFEHTSGISIRGKTQTSSLANKEVKVYLTRAAITAISWDPQMKAYYKRKIAEGKHKAAVINAVRAKIIARSFAVIRRQTPFVTLAV

SEQ ID NO: 484207 - protein, 341 aa, unidentified
MPIVTVGIDLAKNVFAIHGVDASGKAVLVKPRVMRDQLTALIAQLPPCLIGMEACSGAHHWARVFQQYGHTVKLMAPKLVAPYRMSGKRGKNDAADAAAICEAVTRPSMRFVPLKDEHQQATLCLHRTRQGFVEERTAIYNRIRGLLSEFGVVLPQSPERLRREITVPLEALPGWARRCISDLLEHAGNIEDRLAEYDRAISEIARYDARSRRLMQLRGIGPTTASALLASLGVGHDFSNGRQVAAWLGLTPGQHSSGGKQRLGSITKAGDAYLRSLLVNGARAVLANLGEKQDRFSRWVRSLVERRGYWRAAVAIAAKNARMAWAVLKYGDDFKHDPVVA

SEQ ID NO: 484208 - protein, 479 aa, unidentified
MTAQRRRRQKPAVAAGPVEIPDAAHELVIERAAAIDVAKTAGKVCVRLPGKTGRRFSRVWDVSARTGAITELAEQLVELCIEKVTVESTSDYWRIWYYLLQDQGLDVQLVNARDVKNVPGRPKTDKLDAVWLAKLTEKGLLRPSFVPPAPIRRLRGYTRLREDLTRERTRYWQRLEKLLEDAAIKVSAVASTLDTLSTRDMIEALIAGERDPRRLAALARGRMKTKYSELVAALDGRFDDHHGELARMLLGQIDALTAQIDTLTARIEELITELPDAAGGIDHSDSSTSPGAGIDAEPDTGGADPTRGDRAVVADEAPSVIERLDQIPGIGPRAAQTIIAEIGLDMSRFPTPEHLVSWAKLCPRTIQSGPIIRGGKTGKGNPYLKGALGEAANAAAKTNTFLGERYRRLVKRRGKLKALVAVARSILVIVWQLLSDPTARFHDLGPDYHTNRVVTERKVRNHIAQLTAMGFHVTLEPAA

SEQ ID NO: 484209 - protein, 341 aa, unidentified
MQIATIGLDLAKHVFQVHGIDAAEKVVVRKQFRRGQVLKFFEALSPCLIGMEACASAHYWARELTKFGHTVRLMPAKDVKAYVRRNKNDAADAAAICEAVRRPSMRFVGVKSADQQGQLMQHRARDLLVRQRTQVINALRAHMAELGIVAAQGREGTKALLAIIADDEDERLPVDARASLIVLAAQLQALQTMIGSIERRIIAQYRANEASKRVATVPGIGILGASAITATMTDPTAFRSGRDFAAWVGLVPRQDSTGGKQKLGPISKQGDRYLRRLLVVGAHAVLRRAKQSPQNYPWLAQLLARRPFKVVAIALANKMARVAWALLARRATYRAPRLAAA

SEQ ID NO: 484210 - protein, 407 aa, unidentified
MQVYIGIDWSEEKHDIDFMNEAGADLACLCIEHKLEGFVQFDAARRKLGVAAQDCVVGLETAHSLFIDYLWSQDYQNLYVLPPNQVHSNQGRFRQSGAKDDRADARLIADVLRTDRGRLQRWCPDSLLTRQMRAQLSWVLQLNTQVIRLSNRLRAMLLRYYPAALEVFSSLTTQIAPEFVRAYPNPQAARALSYSEFQAFARQHRYSKPKQLPLRYAHLQDDYPETSPETVLIYQSQAVQLADLLLQTMRTRIQNMAQLQVWYRQHPKYAVFASLPGAGELIGPALLVKFGDDPQRFSHPSAVQALAGTSPITRRSGKQKTVRFRSACDKEWRYICQQWAMGLVNQVRSPIACAYYAKIRPHCHSNEHAYRCVANRWLAVAWKLWQTDQPYDETFHFQQRALRSKPR

SEQ ID NO: 484211 - protein, 347 aa, unidentified
MNFYTQQHKHYCGIDLHEKALYVCILDQAGTILVHKNLPTTPEAFLRIIAPYREDVVVGVECMFTWYWLADLCNKEGIAFVLGHALYMKAIHGGKAKNDKIDAHKIAVLLRGGMLPQAYVYPAEMRATRDLLRRRCHLVHKRAELLAHIHNTNSQYNLPEIGKKLAYKANREGVEEHFPDPSVRKTIEVDVSLIDHYDKLLGEVELYITRSAKAHAVQTFARLQSVPGIGQILALVILYEIQDIARFPRVQDFVSYCRLVKCAKESGGKRLGTSGKKIGTVHLRWAFAEAAVLFLRHNQPGKEYFTRLEHKHGKAKALTVLAHKLGRAVYYMLTRKQAFDLNRFVTA

SEQ ID NO: 484212 - protein, 345 aa, unidentified
MEYFAAIDVSLELSSVCVVDGTGKIVREKKVASEPEALAEFFRGTGLTFTRIGLEAGPLSQWLHAGLTAAGLPAMLIETRHVKAALKAMTVKTDRNDARGMAQLMRMGWFRPVHVKTLPAQEVRALLTGRKLLLGKLRDIELGIRGLLRGFGLKVGKISKGNYEKRIRELVTGHPMLEPIAAAMLQARASLRAEFGKLHRMLLAIVRDDPVCRRFMSAPGVGPVVAVTYKTAIDDPGRFRKSRDVGPYFGLTPSKYQSGEVDWTGRISKVGDAMVRTALFEAANVMLSRVTRFSALKAWALRVAKLRGLKRAKVALARKLGVVLHRMWIDGSQFRWNKAPAAVAA

SEQ ID NO: 484213 - protein, 339 aa, unidentified
MELYSAIDLHSNNSHVAIIDDQQNRVFYRKLANDGKLITNAFAPYRERLKGIVIESTLNWYWLADLLMEKGYSVHLANPCGIQKYSGLKHADDKHDAFWLAQMLALKILPEGYIYPKEDRPLRDLLRKRSHLVRIRTSLILSLQNIVMRNHGVKIRSNALKMLTQDPVAELLKDQEELALAGRASKETIDFLTRQIQRIEAAVRRKALLKEPFSKLLTLPGVGDILGMTILLETGPIERFKSVGHYASYCRKVSSRWTSNEKTKGKGNTKNGNPYLSWGFSEAADHARLTHEASRNFYNRKLNQTNASVAHNALAHKLARAGYYIIRDHVEFEEDKMFR

SEQ ID NO: 484214 - protein, 341 aa, unidentified
MGEVSTFGIDLAKSVFQVHGADASGGVVFRKKLRRDQVLPFFSTLPRCVVAMEACASAHYWAREIAAVGHDTRLIAPAYVKPFVKRQKNDMADAEAICEAAQRPTMRFVQGKSAQAQASAVVFRTRDLLVRQRTQLINALRGHLTEFGYIVRQGVGHVAKLVEIVGDPASDIPAQARPILVVVAQGLQTLQAQIAVLDREIASRAKADPVAKRLMTVPGVGPVIATALVALAPAASTFRRGRDFAAWLGLVPRQHSSGGKERLGRTTKMGERSLRRLLILGASSTTKVAARDPEKAGAWLAGMLARKPRMLVTVAMANKMARIVWALMAHGGSYRAPAAVV

SEQ ID NO: 484215 - protein, 443 aa, unidentified
MSELAVLDPRAAFVDVGSEKMHVSIAGEPPALFGTVTSQLHALRDYLAEHQVRSVAMEATGVYWLPLYGVLEAAGMEVVMVDGRQTRNLPGRKTDMKDCQWGATLHAHGLLRAGFVPPANIRRLQDYLRLRGDHIAAAAGHVQHMQKALERMNIKLHEVISSLTGASGLAVIRAILAGERDPQVLLGLCDIRIRNVKAERVVESLRGDWAQEHLFALAQAVQSWDHYQGLIAACDRQIAVVLRQMTDAKAPPSAASTKTGKPRTRPGVNAPDIADLREILAHICGAKDLTTLPAHSEYSVLQLIGEVGTDLTKWRTEKHFTSWLGLAPGSAQSGKRKASVKRRRNRAGQIFCVMARALARSKHVALGGFYRRMAARRGGLVANKALARKLATLFWRVMVKGLDFVETGVAQYEAKVLETKHRILHRLARQLGHQIVPNPAAVV

SEQ ID NO: 484216 - protein, 441 aa, unidentified
MKQKVQGLPVLYPNAAGIDIASRMHYVAVNPAIDKPARCFGTFTEDLQELVNWLISCGVTTVAMEATGVYWVSLFLMLEQAGIEAILVNAKHVKNVTGKKTDMSDAEWVRQLHSCGLLHASFQPDSFTRTLRSYMRHRKNLLEMGATHIRMMQKAMELMNIKLQNVIADITGKTGQAIISAILKGERDAGRLLELADGRIKADRNDIKRSLQGIWKEEYLFELQQSFDLYHIYQSKIIECDRQIEKLVKGKTSMNAENTPLEKKYSKSNKNNLHFNAKEILQQITGTDLTEIFGISDTTAIEILSEVGLDMSKWPTAKHFTSWLNLAPNNKKTGGKVISSKIAKKKNIAGQAFKMAAFAVQRSKNWLAAFYHRIKNKAGAQKAITATARKIAVIFYRMMIDKVTFNPISIESYSEEYKKHQLKKIEKQAKQFGLQLTPMFE

SEQ ID NO: 484217 - protein, 351 aa, unidentified
MFIIGVDYHPSDQYIAFVDTETGECGEQRLNHREGEAEKFYRELAARGVSVRVGMEATGYSRWFERLLAELGIEVWIGDAAKIKTKRVRKQKTDREDARLLLRLLREDNFPRIWVPSPENRDLRQLLWHRHRLVQMRTRIMNQLQALAMNEGQRRKKKLWSEVGRAQLEKLPLAPWASRRRKDLLELLDRMNPTIEELTRAVEQEARKRPEVQRLVTHPGVGPITALAFVLIIGTPQRFPCGKQIGSYVGLIPEEDSSAGHQRLGHITKQGSALLRFLLAEAAQAAVRCDAGWRRRYAHLALRRQRNIATVAMARRLAVRLYWMWRNGWEYAEWVKFGPHAGQLGTGHGVN

SEQ ID NO: 484218 - protein, 312 aa, unidentified
MEAKFVGIDVSKATLDVDCLPVSTPRQFSNDAGGIAALVEWLLGSGAERIVVEATGGYEIAVASALAAAGLPVVVVNPKRVRDFAKAQGVLAKSDRLDARVLALFGERIAPPVRALPEAAQRDLTELLDRRHQLVTMRAQEQARLATVLPVARRDVEQHIAWLDQRVRKHETVLLKRLRANEIWDAKVKLLDSVPGIGPVNLFTLVGRLPELGTLNRQQIAALVGVAPFNDDSGKRRGQRYIRGGRADVRCALYMATLTAKRWNPVIAQMFDRLIAKGKPFKVAMTACMRKLLTILNAILKSTQPWENRLAT

SEQ ID NO: 484219 - protein, 349 aa, unidentified
MVVLGIDAHKHSHTVVAVNDVGRRLGERTIGTTTADHLALLTWAEQFGTDRLWAVEDCRHLSRRLERDLLGAGERIVRVPPKMMAQVRDSARSYGKSDPIDALAVARAALREPNLPAARLDGPAREVRLLAGHRDDLVAERTRVINRLRWHLHELNPAWEPAARSLWRPKNLTAIIDRLSGLGGLVARLARIQVERCRELTGQIREVDQELEPLVAQLAPTLVELCGCATLTAAKIIGETAGVDRFHSRHAFARHNGTAPVPVWSSNRHRYRLSRTGNRQLNAALHRIAITQAHYHPQARELLQRRRAAGDTKTESIRVLKRRLSDVVYRALLADAHRAAPTRNINTAA

SEQ ID NO: 484220 - protein, 348 aa, unidentified
MAHFVGLDVSVKETSVCVVDDAGEVILEQKVPTEPDDIIALLTSLGVSFGRIGIEAGPLSQWLVSALTAAELPVICVETRHMKALLTAQQINKTDRNDARGIAQMMRVGLFKPVHVKTLVAQEQRMLLTSRKLLQRKLLDVESDLRGTLRNFGLKVGAVSGSRYEARVRELVAGFPRLAAIAEPLLYVRRVMRQQFAVLHKMLLDTVRGDRVCRRLMTAPGVGAVVALTYRATVDQPQRFVHSRAVGAHVGLTPKRYQSGEVDYDGRVSKCGDTLLRTVLYEAAHSLLIQSRKWSWLKAWGLRVAQRRGIRRAIVAVARRLAVVLHRMWVDGSEFRWSKDSAAVPAVA

SEQ ID NO: 484221 - protein, 394 aa, unidentified
MKLVGIDIGKKHFFCIMDKDSGEVLLQPSSFSNTKDGFDSLIQKLSSYSKDSILIGMEDTGHYHFALLKYLLEKNFTVALINPKTTDYTRKMQNGITKNDKLDTLTICDVLDTPVRKKQYRITKVNSFDLYEQKQLTRHHHNLKEELNVYTNRLQKCIDIVFPEFNSLFSSKYGIIYMNVLKTFGSAENIASTDIRTIRKCFEIKGRGNRISLTAQQLKDSAKSSIGISSAAEVIKIKHLISQIELINEQLAETDKKIEEFSIQNNSPILSIPGISHFSGTSILAELGEISNYSKPSKIIKAAGVAPYHYESSQYDAQHTAITKKGSPYLRKTLYQIILPVINNNNPVFKQYYDLKISQGKGHRCSCGHCVRKLLRIIYHLSSTNQQFDDALLR

SEQ ID NO: 484222 - protein, 387 aa, unidentified
MPQPNDLSRSPIALNQDGTLIAIIEMSQASWLVAGIVPGSARHPLKKLAADAAALLGLLERWRGEATQAGRQITRVAVAFEAGRDGFWLARWLRARGIEAYVIHPTSVAVSREHRRAKTDRLDTALLKRVFLGWLRGEPGHCTMAAIPTLEEEDARRPNRERESLVGERTRIVNRIKANLARLGIRGFKPTVRGASERLEALRTPEGAALPPNTQAELRRDMARLGFIVGQIKEIEEARQEGLATQPDQGPPAMVRLLARVIGIGIETADMLVHEILSRNLRDRRAVARYAGLTGAPDESGSRRREKGLAKAGNARVRRGMVQLAWRFLLFQKDSALAQWYRARTADARSGTRKTMIVALARKLLIALWRFVATGEAPEGVVLRPAP

SEQ ID NO: 484223 - protein, 399 aa, unidentified
MRMASSSSASRRNAKNALKLKQLARKKGGTASATVALDKLEPIHRRAGGIDIGSAENYVAVPPEAVASGESPVRVFGVFSQQQDALVEWLRSCQITTVAMEATGVYWLSLYDKLEAVGIEVYLVDPHGVKAVPGRKSDWMDCQWLQKLHTYGLLQRAFRPEAPIRRLRTLTRQRAALVCAAASQQQCMEKALVCLNLQLGLVISDLVGETGISIIRAILEGERDPEVLVERHRSERCTKATKSEMKQALCGTYNDEDLFVLQQCVDTWDFLHQQIGECDGKIEVALVAIPTARAVAAKAPPRPIPAAAEQPKKKANGTQGKNAPEKDFTPILQRICGVDLTQVLGLNLLSVLMLIGEIGTDMSRWRSAQAFCSWLGLCPGAKISGGKVLSRRTRSATPL

SEQ ID NO: 484224 - protein, 425 aa, unidentified
MNYKQNEKINQVKESTLVVGIDIGSTTQYARAFDWRGIELGKVFPFSNSREGFESFKAWMQHLQDKYKKSDVIVGIEPTGHYWFDLGAYLEDEGILLVMVNPYAVKQTKELDDNSQSKNDRKDPKVIAKLVTEGRYSAPYTPDGVYADLRIMVANRKRLIREITQIKNRFAKWFAIYFPEYKDVFGDYEAQSSMLLLKKACTPEAIVELGAEKINQIWRDAKLRAVGMKRATTLCETAKRSIGLKKGSSAAEYEMKLLLADYEYKMAQLDSVMEEIESLCKKIPESEQMLAIKGIGVITVAGFLAEVGDVRRFESPRQIQKLAGLSLRENSSGKHKGQTTISKRGRSKLRAVLFNAAIPLIAKNPEFRSLHEHYTTRANNPLKKKQSVIAISCKLIRVFYAILANGVIYNPEKMISDIHRPPQAA

SEQ ID NO: 484225 - protein, 342 aa, unidentified
MEKVNIIGLDLAKRSFQAHAARADGRVAFRKKLSRQKVLAFLADQPRCIVAMEACGGAHHWGRAIGDLGHAVRLIPPAYVKPFVKRQKNDAADAEAICEAAMRPTMRFVAVKTSEQQARAMLFRTRDLLVRQRTQLINALRGHLAEHGVVAPQGSANLKKLAEALEDETTSPPLLVVELSRVFLEQIDQLSKKIAELERAMTHESVRGETTRCLRTLPGVGPITAMAIETFAPPMTVFERGRDFSAWLGLVPRQHSTGGKPLLGKISKMGQRDIRRLLIIGAMSLIRRACRKTAPEGTWLHRLLARKPRKLVAIALANKMARIIWAMLTKEQDYRAPAAAPF

SEQ ID NO: 484226 - protein, 414 aa, unidentified
MEVIVDRCAGLDVHKRTVVACVRTPGPGKAKRQSEVRTFSTFEADLRRLREWLIEADVSQVAMEATGVFWKPVWNVLDDGDAFDEVLLVNPTHVKNVPGRKTDVNDATWIAQLLECGLLRGSFVPPTEIRQLREITRYRRQLSEERSREVQRLQKLLEDANVKLSSVVTDTLGVTGRMILDALCAGERDPDVLAGMAQRKLKIEIDYLRQCVPGRFNEFHAVMTRELLTHIDYLDAAIARLDQQVDRLMAPFAQARDRLDTIPGIARRNAEIIIAEIGTSMGQFPTPAHLASWAGLCPGNNESAGKHKSTKTRSGNQWLTSALVEAAWSAVRTKNCYLAVRFQRIRRRRGEQRALLAIAHTIVVICWHLLTDNTTYQELGPDYLAGKDQPDRRRKLLVRQLEQLGYTVQLTSAA

SEQ ID NO: 484227 - protein, 397 aa, unidentified
MLNAVGIDVSKGKSTIAVLRPAGEIVRKPFDVRHTPKELSILSSYIQHLEGDTRIVMECTGHYHEPILKVLSDSGFFVSAVNPHLIKEYDGDNSLRKVKSDSADAKKIAGYTLDKWHLLRQYSAMDNTPTQLKTLNTQFQYLMRQKTALKNNLISLLDLTYPGVNAFFDSPVRKNGSQKWLDYAYSFWHADCVRTIGLKTFTERYKKFCKRHGYIFQPDKPKSIFESSKELIAVAPKDHIYKDMVLSAIVQVNLISAQIESMRLKMDELASTLPEYEVVMNMFGVGHTFGSQLMAEIGDISRFNHRSALTAFVGVNPGVNQSGKMKIDSNRASKRGAPRLRKTLFQIMQTLMQNAPADNRVYLFMMKKKAEGKPYHVYMTAGANKFLRIYYGTVKAH

SEQ ID NO: 484228 - protein, 345 aa, unidentified
MEQISRIGMDTSKHIFQLHGVNAAEVPVLRKKLRRKEMVTFFEKLAPTVIGIEACSASNHWARVLQSFGHTVKLIAPQLVKPYVKRGKNDAADAEALCEAMSRPTMRFVPVKTTEQQTALMLVGVRDRLIRNRTQLINAIRGYAGEFGYTAAKGKAHLGPLLERIQADESLPGLARELFVAQAKEYAQLQAQIDEVDAKLLAWHRADECSQRLAKIPGVGPIGAVLLKMKTPEPELFRSGRQFAAWIGLTPKDHSTAGKVRLGVITRAGDEGLRSVLVVGATAVVQHVRRGGRASPWLTALLKRKSPKLAAVALANKMARVAWKLMITGENYAVKSAPVPLAGAA

SEQ ID NO: 484229 - protein, 352 aa, unidentified
MQHFIGCDMHTRNQMVAWIEEGTGEIRERCLEHAGEEVRKFYAQFPPGTVVGIEATFPAYWFERLLGELGHELWVGDAARIRASEVRYQKTDWRDAEGILDLLRTGRFPRIWVPSLEERDLRQLLVHRMKQVRARTQVKNQLHALAISQGVCRGRKLWNTKGRKELESLALLPWAAQRRKELLASLDRLDAQVRELDRAVEEAGRARPEVALLRTHPGVGMVVALAYVLSVGPVERFPNGRHVVSYWGLNPREHSSGGRQHLGSISKQGNTMMRWLLVEAAQTAARFDPQLRRIYQRLKKQKASGVAKVAIARRLAVRLYWMLRTRHTYAQLVHMSGSPSSAVVPPEGGSKL

SEQ ID NO: 484230 - protein, 385 aa, unidentified
MDQTSSSAISTNTLHCALELSRNSWLLAIQFPDREQPSLYPIEGGNTEKLMAKLTAALDCWAKVSGSPPAITLCYEVGYDAFWLARFLMGRGIECLVIDPGSLQVNRRGRRVKTDRVDVKMLLRTLIAWCRGERHVWSLVRIPSIDEEDLRRSHRERGRLVRERTAHINRIKGLLFGQGIRGINVKSKYKTLAVDNLVTGDGHRLPPRLACEIARQIQRLAMVQEQIAKIERERDTAPTPCEATERKRHLLLQLKSIGPAISALLSREVYYRQFANRRQVGSFLGLTPSPYNSGAEERCQGISRAGSGHVRAIMIETAWLWIRHQPKSALTRWFVERTAGQNTRVRKIMIVAVARKLAIALWRYVEHGMVPQGAILNPPTTGNAR

SEQ ID NO: 484231 - protein, 348 aa, unidentified
MSLELLAIDLGKRSFHLYGVDRDGLIISRKTGRSKLIETIEELDPETIAMEACASAHYWGRRFVAAGRLLINPRFVKPFVKGSKNDAADAEGIFEAATRPTMRFVPVKSIEQQDLQSLHRMRDRVVCARTALINHMRGLLAEYGVILPQGAWPFLAQARDAVADAELSDLARALFCDMLDELGGLDLRLEKLDRQLAAVCRTNEACRRLSRLPDVGAVVATALVAAVDDGRHFRSGRELAAWIGLVPRQYNRRQTPARRHWQTRQSLSPTANDPRCPRDDVSIGEARRSPFSVAERARGATRLQSSLSPSPIRRQESPGRCSREKRTMRPRDRSAVALKAAVRMRGDN

SEQ ID NO: 484232 - protein, 337 aa, unidentified
MEYFAGLDVSMAETHVCVMNRDGAVVLEVKVPSTPPDIAAALAQAPACERIVFETGRMAPMLYHGLSQLGLPIVCIESRQAYQALKSLATHKTDRNDARGLAHLARTGFFKPVHVKSLPAHALRSLIIARKKLVGQRVTLENQIRGLAVVFGVRLPRALTAAFIRQALRASEGIAGLSAAMRGLVAARAAVLGAIVAIDADIRRMVRASEACRRLMAIPGVGQLTALAFTAAIDDPGRFRRSRDIGAYLGLVPRRYQSGEVDYTGSISKCGDRRVRTLLYEAANVMLTRYKGPLKLKDWAFAIAKRSTMREARIALARRLAIIMHAMLRHGTEFKPV

SEQ ID NO: 484233 - protein, 359 aa, unidentified
MERFSFGIDVDKKTFKVCLLNQVSHLNRKVKSSKTFDNGHSGFNTFEVWINKQLKNIEADSQVCFVMEATGTYHEQLAYFLDKRDYQIHIVLPLKSKRYLQSLGLRSKNDQIDAKGLACMGLEQQLEVWEPASSKMLELRSLTRQIEALHQHKTAFVNQLEGVSHSAIIHPMVKKNLKDMITKIEREVEKLEKQVEIFIQKDECLSKKYKLFVELKGVGIMTFAVVVAETGGFALFKNQRQLVCYSGYDVMENQSGQRSGKTRISKKGNSHIRRILHMASLSAVRFKCSPFIELYQRVSEKTGIKMKGYVAVQRKLLVIMYTIWKKEKEFNPIYKDENSGIEEPKLLFSDQKNIPKGTH

SEQ ID NO: 484234 - protein, 344 aa, unidentified
MKITRVGLDLAKKSIAIHAVDRDERKAFSGTRSREQVLRWFEENVPKGSVVGMEACGGAHDWARRLGALGYVARLMAPQHVKPYVKGLKNDANDAAAICEAVSRPTMRFVPVKTVEQQDAQALHRVRTLVQKARTAKGNEIRGLLIEYGVTVPKGVASLRKALPRVQEDPDNGLSAAFRALLADLHKDLATLDDRLDALDVRIKAHVRGHADATRLMSIPGVGVISASALVAGIGDGRAFRNGRHLAAFLGLTPRQNSTGGKTRLYGIHKGGDSYLRKLLVDGARSVLRVAKRKTDPHSQWLAAIGRRRHKNVATVAQANKTARIVWAVLTRGELYRSDAAATA

SEQ ID NO: 484235 - protein, 348 aa, unidentified
MLADQLDYVVGVDPHRDVHALAIVEVRTGGVVFETSVAASSGGYARALQLADEHAPGRRAFAIEGTGSFGAGLTRFLSGEGERVLEVGRLRRERRSGGKSDALDAIRAARSVLGQKRAAEPRAGGEREALRALMAAREGAVNARRAGLCQLRDLLITTPEPLRSELRPLTRAQLLHRLRAMRPQRQRDVELRGALQALRTVAGRVQHLTAEERELAGEIETLTRKLAPQLLDQPGVGPLAAAQILISWSHQGRIRSEAAFARLAGCAPIPASSGQTIRYRLDRSGDRRLNRALHMILVTRRRAHPPTIAYIDRRLQEGKSGREASRCLKRYLARNLYRLLEHGAPLAS

SEQ ID NO: 484236 - protein, 316 aa, unidentified
MTTSSVVVGVDVAKDRLDVAVRPSGEAWSEANDDAGVRALVARLRPLGPALIVCEATGGFERAAIAALAAAGFPVVVANPRQVRDFARATGQLAKTDQLDAGILALFAERVRPTPRPLPDAAAQLLDAVLTRRRQLLEMLVAEKNRLGFAPKPLHRGIQAHIRWLERQLDDVTTELAGLIEASPVWRARDDLLQSVPGVGPIVSSTLLGELPELGTLSHKQIAALVGVAPLARDSGTLRGKRMVWGGRASVRTALYMAALCGRRWNPTLKAFYERLKAAGKPTKVALIACARKLLTILNAMMRDQSPWTCTVQYSC

SEQ ID NO: 484237 - protein, 387 aa, unidentified
MPLAADLPAQTQPVPRPAQVLYVSLELSPSKWLVTSLLSGTGRMSKHLVIGGDGNALLRLLAALRTRAEQRAGAPVVIVAIQEAGLDGFSVHRLLEANSVESWVVDPASVAVPRRMRRAKSDAIDGETLLRTLLAFRRGEPRVCSMVHPPSVEEEDRRRITRERRTLLRERIEHTNRIKGLLMGQGVTGYDPLGKDRWARLESLETRDGHALPPRLKAEIGREIERLELLARQIRQVEAERDALAATVPEVAASPAALLLRLKGVGPEAATLLWLEGLFRTFANRRQLAAYAGLAPTPWLSGRIRREQGISKAGNPRLRTAMIELAWLWLRHQPESALSRWFGERVRAGGGRNRRTTIVALARKLLVALWRYLVHGQVPDGAVLKPS

SEQ ID NO: 484238 - protein, 392 aa, unidentified
MRFAGIDIAAETHFVAVVDEASNTVVKPGSFSEDAAGYEKLLSLLGGPGDMLVAMEATGHYWQNLFAALAAAGYAVALLNPLRTRRFAGEDLERTKTDAIDALGIARFAAQKRPPATRLPDSATQELRELVRFRDRLMQDFGDRVRQLHRLVDLGFPEFTRYVHSLDSELASAILHEYPTAEAFLGLPWKRLAKLCYDRVHKVGEEIAKGLVEAAKTSVGRHHGPAYRVQVRCACEDLDVLRRRLREIDSDIERTLGDHEVGTLLTTLDGIGPTTAARLVAELGDIASFRSAAAIAAYVGAIPALRQSGKRQATRAGLTPHGNARLRAKLWMPTLTAVRKNPWLRAYYLGLLRRGKLPKVALIAAMRKLLIAVYFVAKHRKPFVPILAEAHA

SEQ ID NO: 484239 - protein, 414 aa, unidentified
MSYKIAGIDVHKRVLMVVVMDASTPEEKPERRRFTTMASDLRRLSCWLREQGVEEAVMESTAQYWRTVWLELEPYLRLQLAQAFSNRAPRGRKHDFKDAERLVRRLIANELILSFVPGGEQRTWRNLTRMKTQLRRDRVRLQNQMECLLEEMRIKLSIVVSDLLGASGLRILRALAQGETDPKKLALLGDDQLKCSEEQLVEALTGRPQPMHREMLGLQLERLQLIDRQIEKLNGLVAQAMKPHQEAVIRLAEVPGLGVDSAQQVIAEVGVQASTFTSAAEFASWVGTCPGKEESAEENHSSRSAKGNKYLRRVLNQSAHAAVRKKGSHFQALFRRLLPRLGYKSAIWAIAHRLCRLIWKILHEGVRYIEQGSESDPKVREHRARTLARALHKLGYDVALTLINPATAEKAMQT

SEQ ID NO: 484240 - protein, 341 aa, unidentified
MEQAITIGLDTAKHVFHAHGADVGGHVLFRKRLTRAKLLGFLAAQAPCIVAMEACAGSHYWGREIGKLGHAVRLIPPAYVKPFVKRQKNDAADAEAICEAAQRPSMRFVPVKDEEQQANGVVFRARDLLVRQRTQCINALRGHLSEYGYVFRQGITHAATLVAHVEDPNSSLPESARAILRLLIDTFSALEVQIKELDGEINRRSKADPAARRLMTIPGVGPIAATAITALVPAAGSFRAGRDFAAWLGLTPLQKSTGGKQKLGAISKRGERTIRRLLILGASAVIRQACRRGASAGSWLAQMLARKPKMLVTVALANKMARVVWALLVKGGVYRAPATAA

SEQ ID NO: 484241 - protein, 336 aa, unidentified
MNIASINHFKSCVGIGIDVSKESLALAELTEDKTYISNLDNSLEAINLLAQKLVKEKYLGKIICESTGHYHLKLVSVFSKYEINLVVLNPLQSSKHSKANIRKVKSDPVDAETLATMCITEKNLPKSTALNDDKVLIRLKTGQLASLEKFIQRLQSSVNMYHETYEELGFEQSDIQQDLAKTLAELKKVKERMIKEVERLIITLCSSKKEVSDVQEIPGISEITASLVSQLDTDVKGPNSWIAFAGMDTSVRQSGTWKGKGKMTKRGNPYLRKRLYNAAWGAMMHDEHFKAYYEQLRSRGRGYVESLCIMAKKILRIAYQVRVNHIKYDPKVAFPA

SEQ ID NO: 484242 - protein, 389 aa, unidentified
MKIFVGIDIAKLNHFAAAISSDGEILLEPFKFTNDADGFQLLVSKLESFDKNSIIIGLESTAHYGDNLVRYLVAEFYQVCVLNPIKTCQMRKNNVRKTKTDKVDTFVIVKTLMMQDDLRFITFFDLDMMDLKALGRFRQKTIKQRTRLKIQLTTYVDQVFPEIQYFFKSGLHQHAVYALLKEAPSPKEIASMHMTHLANLLKVNSHGHFTKELAKELRVLAQKSVGANDSAISIQITQTIQQIELLDSQLEKIEAEMTDIMKFNDSVIMTIPGIGYINGGMILGEIGDIHRFSNPNKLLAFAGLDPSVYQSGNFQAKTTRMSKRGSRVLRYALVNAAWNVVRNNATFKAYYDAKRAEGRSHYNALGHCAGKLVRVIWKMLTDNVEFNLE

SEQ ID NO: 484243 - protein, 662 aa, unidentified
MLSMRALECLVTIVEQGSLTKAAAALHMSQPALSHQIAAIERELGTPVVERLPRGIRPTSAGLAAVAEARIALAAADRAVIAGRRVAAGKGGRIRIACAETMTAWVLGPALRDWRRRFPDLELDLKEDTSADRMLDVLLGGWTLLSGRRRREPMSTSGSSAPRRSWWSLRPSTGSQECTRCRWPSCPASRSFTTTQAMGIRCGSISSRRSAASCCRSRRCARADVAGLHQLSQELRRHGPAAGIAIERAEGLLVEMPQEAGHRLFCVSPKMSARARERHRIAPGKSDAFDAFVLADSLRHEHRHWRSLAVPSLLLAELRALTRDRERLVWNQRDTENQLRAIVLAYHPAVLHLFSSLDRDISLAFLRDYPTPGQARLVGPARMAAFCSRHGYSGRTRPELLTERLRAHLLSASPGTTTGKAFTALLFADQLDLLNQQVRAVTARITELLATHPDAPILLSIPGMGQITAATMLAEMGEDRSRFPTADVLLAETGTARVTRSSGRSGTVRFRYAVNKRMRHAIDWQAFVSVRENDWARAAYQQARARGQQHNRALRGVGARWVQILWRCWTDTRSTTPPATSKTPQPANHRQHRQARGQHAAPRSMPGKSHRATARRTARLTAGVCIVHLLRNSFKYASKKDWAGGRQRPQARLHCGVRSRGP

SEQ ID NO: 484244 - protein, 307 aa, unidentified
MFVGIDVSKDRLDVHLRPGGEAFAVTRDGQGIDALIAALAKVVPRLIVIEATGGFETVVAAGLAAAGLPLAIVNPRQIRDFARAIGRLAKTDALDAEAIARFAEAVQPEPRPLPDEAARELGELVARRRQLIEMIVAENNRRRSLTRAKPIKTVDRVLATLQKQLTAIESDIDDSIRGSPAWQATENLLLSVPGIGSKIARTLIAELPELGTLDRRQIAALVGLAPFNRDSGLMRGRRAIAGGRRVVRNALYMSILVAIRRKLPLAATYDRLRHAGKPAKVAIVACMRKLLVILNAIVRDQKPWATA

SEQ ID NO: 484245 - protein, 548 aa, unidentified
MVHDKTMGIAAASAEAEAFRDSIALRECGIICGVSDIVAADAPLHIGADCPIVRLSSARPMFNGRVGAVDRDDVLPRQDFTSIPPKPPPCSGKGEKDMARKSNRFDEVRRHVAGIDLAGNAEHYVCGPRKDDGTHDIERFGTTTNELLRMVAWMKERKVESAAMESTSVYWIPVYDTLESSGIDVVLVDTRTVKMVPGRKSDVKDCQWLQRLHSCGLLRGAFRPPEMFNAVRSVIREKGNVLQMRTQAIQSIQKALDQMNIRLHHAVSDIDGMTGMKILGAIVAGERDPRRLAALRDWRCKKSEAEIAEELTGSWREEHLFNLKQAYETLCFLDGRVADYDSQIRAMYAKIAASFPPVDPPPNGGGRKPKDKEDAKAKADLARICGGFDMTKIDGIGYDSATAILSELGPRLDAFPTESHFVSYIGVAPALGKSAGKNVSSRKKHKNTSRVGIVLKMAASTLSRSESSLGARYRCVRSRTCSRTAIKDVAREMAKRIYRGIKHGQAYIDEGERAYLERTRERTINSMKKKISKLGISAEELGIYAVAV

SEQ ID NO: 484246 - protein, 391 aa, unidentified
MQQPEIGRSTATFVPDETLVAVIEMSLSTWLVAGLVPGVDRRPLKKLSPNENDLLLLLDGWRCEAMAAGRTITRVVVAYESGRDGFWLARWLRARGIEAHVIHASSVAVSRDRRRAKTDRLDTALLTRVLLGWLRGEPGHCSMVAVPGIEEEDAKRPTRERENLIAERTRIVNRMKATFARLGIRNVNPALRKTAERLDKLRTPEGGMIPANTLAELRRDIARLRMVEEQIAEIERERMDRIAQAAPQRSRADGMLRMLSRVVGVGVETADLLVQEILLRDLRDRRAVARYAGLTGSPDESGARRRERGLSRAGNARVRKAMVQLAWRFLVFQKESALVKWYRERTADGRGRTRMALIVALARKLLIALWRMVKTGEVPQGALVRPDPAAA

SEQ ID NO: 484247 - protein, 371 aa, unidentified
MIVKEYFIGMDVHKDIVQMAVFAETGEEPIYERRLKNDIAILLKEATAFSKKGKTEAAYEAGSLGYVIQRAMEQAGIPCYVLPASKVAKKRTDRIKTDKRDARLIGRELRSKSIRPISVPSEADEAARDLLRCREDVSEDLRRVKQRLLKFMVRHGYVYTGGGNNWTKMHWHWMDRRQFKQEHERIVYEEYRSQIRSLEERLVRLEQQVVETAESPRYRTAVNRLRVFKGIDYIIALSVVCEIGDFRRFANAKAFMSYLGFVPSENSSGGKRTQGSITKAGNGHLRRLLIEGAWHYTKNARPGKRVEKRREGSPANIIDVADRALHRLHKKYLRLVFNGKHVNKAVTAVARELAGFIWAVQVSMDHESKAA

SEQ ID NO: 484248 - protein, 429 aa, unidentified
MNYTQNEKIEQVTDSTMVVGVDIGSQIHYARAFDNRGRELTKRIFSFHNDLEGFNSFNLWAETLKTENKKTAVLIGCEPTGHYWFAFAKYVNDHQKRLVMVNPFSVKKIKELDDNSPKKTDSKDPKTIAKLVVDGRYSIPYMPEGIYAEIRDLVYSRDGIMKQHNISANRIQRWLAIYFPEYLGLYTRFDAISGLAVLEKAPLPKDVIALGVNGIRKIWHDKKMRGRGVTEDRAKTLVEAAHNSVGLDGGIGTKSELYMLLEEHRLWTSQLEAVNKVLEEMILKVPHVEKLLAIKGVGSITIAGFIAEVGDIRRFDSPKQIQKYAGLELVENSSGKHKGRTRISKRGRRKLRKILYQVMVPLLARNKEFRGIYDYYVTRVKNPLKRRQAMVAVSCKLIRVFYAVLTKGVEYDRFKMMSDIHRKSDIIAA

SEQ ID NO: 484249 - protein, 373 aa, unidentified
MKYKQSKKQNQRITRITDKTLVVGADIAKEIHVARAIDFRGIELGKDCVFSNTRIGLEQLVQWMKELQREHAKSDVLFGIEPTGHYWFALAEYLGREGIPLVIVNPHHVHKSKELEDNSPTKNDYKDAKVIADLVRNGKYSEPKLPTNVYADLRILMNLREKIMVNFGQVQRRIQNWLDRFFPEYTEVFKDWEGKASLITLGEFPTPNEIVELGAEAIIERWKKDVKRAVGAKRAQHLIETAKSSIGLTEGLPAAKMEIKTLLEQYEIFAKQLEEILAEVERLLSQIPGTGEMLTVPGVAVVTMAGFLAEVGDRSGYKHGQQIIRLAGLNLKENSSGKKKGKSSITKRGRARLRALLFRACGIHFVHRLMILI

SEQ ID NO: 484250 - protein, 321 aa, unidentified
MMDAVLGIDIGKAKFHVTLRFGDGTRRRKACANSPAGCAELLTWMARHGAGRVHACLEATGAYGELLATTLVDAGHQVSILNPAIIHHYAKSRLSRAKTDPVDADLIADYAATEHPPLWTPLARELRELQALVRRLDALIGMQTDERNRAQAGALTPAVQQSIAAVLGHLEAQIDTVRQQIRQHMDTHPGLRAQRDLLTTIPGIGEATAALLLAELFNKTFASARQAAAFAGVVPRPHDSGLHEGRRVMCKLGPGRVRKGLYFPAIAAIRFNPSLQPLARRLRGAGKPPMLIIGAAMRKLIHLAFGVLKSRRAYDPDLAKA

SEQ ID NO: 484251 - protein, 428 aa, unidentified
MDRVIIGVDPHKLSVTIEARDTREILRATGRFGTDTRSYHQLLKVARQWPQRVWAVEGANGIGRPLAQRLLAGGERVLDVPAKLAARARVFDTADAHAIVMVALRDKGLRELNVDPELTVLRMLCDRRDELSRARAQALNRLHRLFLGLLAGGAPVKKSAGQYRTLLSTVRPRDLAGKTCRRMAAEELEDLERLDVKLKAMKAELKAAVLATGSHLMDIHGIGPAGAARILADVGDITRFPDRGHFASWNGTAPIDASSGQHTRHRLSRAGNRRINHVLYMAGIVQLRNDTPGRVYYRRKLQQSKTSMEAMRALRRRLSDAVYRKLVADAAARQAALQQTGPGGHSGAALSSSAAGLPPGTGTSDQPLPGPAHQTLPPARAALKTPAAPVAATSRRRARGVNVERPTGRTTLTPTSAGARSTAPGPRT

SEQ ID NO: 484252 - protein, 418 aa, unidentified
MQTELSQFTAIIGMDWADKKHDVCVQATETKQRKTYQIQHKADKIDEWARSLYQRYGGPIAVALELSKGPIVSALQKYDFLVIFPIDPTTLANYRKAFTPSGAKDDPTDAELALDLLLCHPDRFQALKPQSVEMRTLMTLVEQRRRLMNDRVRLTNRLRNALKQYYPQALEWFDRIDTPLFCDFIKRWPSLAQARRARKATLEKFFHEHNMNRKALLERRVTAIKSAMPLTTDEAVIVPYRLQALTLVAQLKVALESIRIYDEEIAGLAPQHPDYGLFNTLPGAGPSLAPRLLVAFGEQRERFTSAAEVQKYGGSATVTPRSGQTTWIHWRWQCPTFLRQTFVEWAAQTINKSYWAGLYYYQQRAKGCSHQAAVRALAFKWIRILYCCWVTHTPYDEAKYLKALQDRGSPLLKMAEAA

SEQ ID NO: 484253 - protein, 352 aa, unidentified
MQAIFVGCDAHKHYSQLELQDASGQVLNRVRIDHSPGAVSSFFSRLPGGTPVALESVGNWYWIADEIEAAGCLPLLTNPAKAKLMMGHVNKTDKLDANGLATLLRIGSLPTVWLPPAALRDQRELPRTRMALTALRTSIKNRIHSLLAKYNLSPENGTQLFSKQGRSWLESSLSRLPPETGRCLAQQLELLDFLSLQIDTLEERIHNLIALTPTMQLLKSLPGVGDMLAILIEREVGTISRFPSAPQFSSYCGTTPRVSSSGGKTRYGKLRTESNQYLKWAFIEAANAISAHHAQRGWTARHVSKLYLRIRSRKGSSVAIGAVARHLAESTFWVLSKNEPYCEPLRFSPRQG

SEQ ID NO: 484254 - protein, 350 aa, unidentified
MEHYAGLDVSLKETSVCIVDGAGKIIRETKVASEPEALVGYFSSLEIKVVRIGLEAGPLSQWLYAALMQAGYAVVLLETRHVKAALSAMTVKTDRRDARGIAQLLRMGWYRPVHCKTLPSQEVRAIITARKTLLGKLIDIELSMRGILRGFGLKIGSVTRKSFEIRVRELMAGQATLTTIMEGLLNARATLIAEVAKLHKKLLEIARADEVCRRLMTVPGVGALTALTFKTAIDDPTRIAKSRDVGPLFGLTPGRYQSGETDIIGKITKVGDVMVRTALFEAATVMLTRSTKSSRLKGWALDLVKRRGTKRAIVALARKLGVILHRIWVDGSTFRCAKEGAAMPVLITAK

SEQ ID NO: 484255 - protein, 412 aa, unidentified
MKDLLEISCGLDVHKEKIVACILTGPLGKPTRSEIREFSTLIPDMIALRNWIVSKNCHHVAMESTGIYWMPIYEILEDAFSGDITLLVVNARHMKNVPGKKTDMRDSEWISTLLRAGLLNGSFIPEKRIREFRDLNRYRKSVIRDITSQKNRIEKFLQSSGFRLSSFISDIFGASGRNIILHLVEHGQIDKTALDSCLKTKTRNRIDEILMSVNGTLSEHQKAFLRILMTHYNSLKKHLTEIETSLEEDMPPFALQVEQLNSIYGISTTASCAIIAEIGIDMKPFKTAEHICSWAGLCPGNNESAGKRKSTSVTKGNPYIKSMLCEIAWVIAGKRNTYLSAWYWRIKQKKGAKKAIVALARKLLVIIYTMLKQGTLFDESCFETRRKHCEQKQLSRYIRELEKHGYHVEAQS

SEQ ID NO: 484256 - protein, 405 aa, unidentified
MNAVGIDVSKGKSTVTIRRPGDVVLMPPCDIPHTQSAINALIKQIKSLDGETKVCMEHTGRYYEPVANWLSDAGIFVSAVNPILIRDFGDDSLRTPKTDKADSKKIARYALDRWAKLKQYGSMDKTRSQLKTMNRQFGFYMDQKTAMKNNLIALLDQSYPGANDFFNSPARSDGTQKWVDFVYTYWHVDCVRSKSLQAFTEHYQKWCKRNGYNFSAAKAQKIYLGSSDLIAVFPKDDSTKTLIRQAVTMLNTASQTVEALRLKMDQTAATLPEYPVVMAMNGVGPSLGPQLMAEIGDVTRFTHREALTAFAGVDPGKNDSGKRNQKSVRTSKKGSPSLRKTLFQIMDGLIKRFPVDDPVYAFMDKKRSEGKPYYVYMTAGANKFLRVYYGRVREYLAFLEGTRES

SEQ ID NO: 484257 - protein, 356 aa, unidentified
MSRILAIDLGKFKSVTCLLDSDTNQTEFWSMATDRHYLLAVLKNYHPDLVVIESCGLAGWVHDICSEEGYEVLVCNPNQEAWKWKHIKRKTDRDDALKLAKLAAPGQLVPVYIPCRQQREYRRLVKYRQVVLGRINRVQNNIRAIFAQRGMEMVRGQKAWALERLELIAQHRKPLAECSLDELWRGELDLELIQLEHLRQHQYEIHKKLKALAAADERVQLLQTIPGVGRKTAEVVVAYLDDPHRFQNARQVSSYAGMVPRRYQSGEMDRHGRIHKRGPRQLRSALVEAAWLMLRYNPWAKTVYERLTSGQRTRKKKAIVAVARKLLVRCWVMLLRKEPWNKETMIRQSAGIAVAV

SEQ ID NO: 484258 - protein, 430 aa, unidentified
MKSNTQNAKIEAITEKTLVLGIDVGSEMHYARAFDYRGIEYSKKPFKFSNTEAGFVTFKEWILDLKERHEKDKVIPGMEPTGHYWFNLGKFLQDNEMKPVLVNPHHVKKSKELDDNNPTKNDRKDPKVIAGLVREGRYMIPYLPDGVYADLRTASNIRFQLQAELTRIQNRISRWFNIYFPEYKTVYGKPDAKSGMLILKAAPLPEDILTLGIDGVNQIWRDAKLRAVGKARAKTLIEAAEHSVGSKEGAVSARMEIRMLLEDYESRNTRLQEVMVLIEELVKGIPMAEKLLEIKGVGIRTVSGFLAEVGDISRFNNPKELQKLAGLALVENSSGKHKGETTISRRGRKRLRYLLFEVAMSLVSKNQEFRELHNYYTTRRLNPLKKMQSLMAIAAKLIRVFYAMLTKGVDYDPKKMVSDIKRPAVYLQAA

SEQ ID NO: 484259 - protein, 346 aa, unidentified
MEHYAGIDVSLELSSVCVVDAQGKIVRETKVASEPEALVAFFASLGFAVKRIGLEAGPLSAWLHAGLKRAGFDTVLLETRHVKAALSAMMVKTDRKDARGLAQLIRMGWFRPVHAKSMGSQEVRALLVARKQLLGRLIDVELSIRGILRGFGLKVGVVTRKGFEGRIRELVTGHITLERIAGAMLSARATLKVEYEKLHKIVLTIVREDAVCRRLMTVPSVGPLVAITYKSAMDDPNRIAKSKSAGALFGLTPKKYQSGEKDVTGGITRAGDEMVRTALYEAANVLLARITRFLKLKRWGMDVAKRRGSKRAKVALARKIAVILHRMWVDGTTYRWTDAQPTAVQV

SEQ ID NO: 484260 - protein, 433 aa, unidentified
MHEVEDEPLFAERAAGIDIAKAGIEVTVRVPSDTRAGRRQQETRSFATTRRELLSLADWLRAWGVTKVGMEATGDYWKPVYFVLESQGLGCVLYHAAQVKALPGRPKTDRADSVWLARITERGSLPSSFVPPAPIRALRTHTRYRRHLTQARTAEKQRVEKLLEDGHLKLSAVISDIHGVSGRAMLEAIIAGERNPAALAQLARGTMRGKIARLEQALDCSFLTEEHVAILAMMLAAIDSFTTQIDKLTARIEILAEPYWRQIQQLDAVHGAGVTSAQDVIAEIGVDMTVFPTAAHLVSWAKWCPQVSQSGGKRKGSNAAGRGNPYLSAALGEVSMSAARTQSFLGAKYRRLVKRMPKKKALVATGNSVLTIFHALLSDPAATYHDLGPDYYEQRASTRHQARNHVRSLERLGYHVTIQAINPDTGELLIATA

SEQ ID NO: 484261 - protein, 414 aa, unidentified
MQVVHERCAGLDVHKKSITVCRLVPNGEGGWKRETRTFETKTPDLLELSDWLKQECVTHVAMESTGVYWKPVFNILESSFTVLVVNAKHIKHVPGRKTDVRDAEWIAELLQHGLLKASFIPDEPQRDMRELVRYRTHLIQERTREVNRVHKALEDANIKLSSVATDIMGVSGREMMQAIIAGKDDPAALAELAKGRMRNKIDELEKALTGHVRRSHRLLLRMHLEHIDELNERITELDGEIGNLMRPFDQEDLVERLDAITGVGKQTIEVVIAEIGTDMSRFPSHRHLASWAGLAPGKNESAGRNRSARTPKGNQYLRTALVEAALAAGRSKGTYLGEQYRRLARRRGKKRAAVAVAHSILVIMYHMIQDGTEYMERGSTYFDNLNPQRTQKWLVRRLEQLGFQVSLEPIAAAA

SEQ ID NO: 484262 - protein, 466 aa, unidentified
MENNYILYVGMDVSKGKADAAILKVSDRRSVKPKFLRKKLSFKFVKSEVASFLETVRSYSDVNCTSICFALEVTGIYSTNVYNFIKDNLNDNESIKFLNTDFVNQWRNAHNIAKSDPLDAQTISTIIGTDSDVQYVNDNVFENKNGYQDLKALVHRHYQIKKIYSQEINRLIAQCDCLFPELQYVFEPKSAAFIAVLSSYPTTHDIINASRVEVFDVVYEATKHRCSMDKVDKLFELCQDTLVPDDISSYGKSIILDLVENIKNIKGQLKSIERYIKDIASLNPAYKLLLTITGCGPITAATVIAETGNIRRFKNADCFVSYSGTSPRNKRSGTSVETMGKISKKGSRYLRHAIYMIAEFARRHNPVLKHQFERIKNGNKKRHKLANIAIANKIARYIYSIMKNKSSFVILHDHIMRLPEETRDTFFNSISLDFPKNTRKQIYQYSDINGELHRFVYIKTDEMIPA

SEQ ID NO: 484263 - protein, 404 aa, unidentified
MNNVAGVDVSKGKSTVSVLRPFGEVVAKPFSVGHTGSELKELADYLKSLDGETRVVMEHTGRYYEPVARFLHEEGIFVSAVNPKLIKDYGNNTLRKVKTDKADARKIARYGIDNWVELRQHTPMDTIRMQLKTLNRQQGLYTKTKTMMKNNLIALLDQTYPGVNALFDSPVREDGSQKWVDFATTFWHVDCVRNMRLIAFTECYRKWCKRHGYNFSQSRAMEIHAEAQDLIAMLPKDTLTKTMIQQAIDALNTISKSLEQLKAEMRTLAAQLPEYPVVMAMRGVGDSLGPQLMAEIGDVTRFAHRGSITAFAGVDPGADQSGTHEAKSNHTSKSGPPALRRALFLVMDCLLKTQPEDDPVYRFIDKKRAEGKPYLVYMTAGANKFLRIYYGRVKEYLASLENAD

SEQ ID NO: 484264 - protein, 387 aa, unidentified
MSQPFDASRSLTSLEQDSTIIAVIEMSQAKWLVAAVVPGVERQPLKRLDADEAALLKLLHRWRNEAGQAGREIKRIVVAYEAGRDGFWLARWLRVRGVEAYVIHPASIAVSREHRRAKTDRLDTELLLRAFLGWLRGEKRHCSMVAIPTVEEEDARRPNRERGNLVTEQTRIVNQIKAILTRFGIRTFRPTLRKAEEHLEGLRTAEGLPLLENTRAELRRHLARLHVVREQIRAIEQSRLGKLAMTSEKGRHAMVRLIARVVGVGVETADMLVNEVFSRHLRDRKAVARYAGLTGSPDESGKRRRERGLARAGNTRVRCGMIQLAWRFLRFQKDSALTQWFQARTADGRGSTRKTMIVALARKLLIALWRLVTMGELSDGIVLRPAS

SEQ ID NO: 484265 - protein, 412 aa, unidentified
MEVLHPRCAGLDVHKETVVACVRIVSGGEVSRAVRTFETTTARLIELAEWLEASGCTQTAMEATGVYWKPVWQVLAGGGFGLVLANASHVKNVPGRKTDVNDATWLAELLAHGLIRASFVPGPEIQELRGLLRTRKQLVREKASHVQRLQKTLEEANIKLESVLSDVMGRSGPAMIQALIAGETDPAKLAALAHPKVRAPQARLREAFRGRVKRHHRFLLDLHLQQIDALDAGIAAIDREVDAGLASFRDAVKQLSTIPGVSELSAQVIVSEIGIDMSRFATAAHLRSWAGLCPRNDESAGKRRSTRLRTGAPWLKATLVQCGWAAARTKATYLNAQFVRLRARRGPKKAVCAVAASILTAAYHMLKDGTFYEDLGPAHFDRRRPVAQARRLVKRLADLGFSVELKPAAAVS

SEQ ID NO: 484266 - protein, 355 aa, unidentified
MELYIGLDVSLASTAICAVSTKAKVHKEITAASEPEELVRVLRSLPGTVVGVGLEAGPLSQWLHRALVDAGFDAVLMETRQVKGALQAMPIKTDRRDAEGIARLLHMGWFRPVHSKSISAQKMRALLSARKAIQQAMLNIEGSIRGILRNFGLKMGKVAKGRYEERVHELVGGNAMLEAAARPILTVRSALRQELAGLEKLLRDRAKTDPVCRQLMTMPGVGALVALTFKSSIDDPDRFRSSKDVGPWAGLTPRRQQSGERDIVSQITKAGDAGLRTALFQAATVMLSLGKPNRLSAWAWNLAKGRGKKRATVALARRIGVVLHRMWSDGTEFRFQRAEVTAAAYTRSAHRVSEV

SEQ ID NO: 484267 - protein, 344 aa, unidentified
MKLTTVGIDLAKNVFQIHGVDERGKTLLRKKVSREQMATFFVRLEPCLIGMEACGSAHHWARKLQAMGHTVKLMAPQFVKPYVKSNKNDAADAEAICEAVTRPSMRFVPIKNTEQQAALSIHRARQGFVKARTALGNQIRGLLAEFGLIVPVGIAHIVTRVPELIEDATNDLTATFRQLIDRLIEHFKELDRQVKELEVQIKVWHRDNALSRKLEDIPGIGPITASALVATVGNATSFDDGRQMAAWLGLVPRQHSSGGKQLLLGISKRGDVYLRTLLIHGARSVVRMAQAKIAAGIAQPSWLHKLLERKHANVAAVALANKNARIVWALLAHGREYEAGYAMA

SEQ ID NO: 484268 - protein, 340 aa, unidentified
MRGLYAGSDLHGNNNLVGIIDEEGKRVFKKRVPNDPQLLRDVLKPYKGEIVGIAVESTYNWYWLVDALMEEGYKVHLANPAAIQQYWGLKHEDDKHDAFGLAEMLRLGILPEGYIYPKEARPVRDLLRKRGQLVRLRTALILSLQNIFIRNSGVRVKVNDVKGVREDRISGLLGESEDLALAGRVSKETIDYLTYQIHQIEKVVEKRVRLEEGYRYLLTVPGVGKILSLTIMLETGPISRFATVGEYASYCRKVPSKWMSNGKRKGSGNKKNGNKYLSWAYSEASDFARRGYPEPRAYYQRKMQKTNAAVAHSALSHKLARAAYYVMKDQVPFRPEKLFG

SEQ ID NO: 484269 - protein, 413 aa, unidentified
MDLLHDRCAGLDVSKKDVKACVRSPGARANQRHSEVRTFATTTNALLELREWLIEQRVTLVAMEATGDYWRPPFYLLEDDLNVILVNPAHAKGLPGRKTDVSDSMWLAQLAECGLLKASFVPPQPIRQLRDLTRYRTTLAREHTREASRLEKELEDAGIKLSSVATDILGVSGRAMLEALIAGERDPQILAQMAKGRMRTKVNALSQALVGRFGEHHAFLCRMHLDRLDALDEDIAKLSTRIEQALAPFRDTLARLDTIPGVGRDVAEVIIAETGGDMSRFPTPGHLASWAGVAPGLNQSGERRKPARTRHGDHWLTGALGVAAMAANRTQDTTFLGARYRRLARRIGKLKALVAIQHSILTAVWHVLSENTDYHDLGGDYHAKRDPQRALRRITHDANRLGYTVRFDPIQAA

SEQ ID NO: 484270 - protein, 346 aa, unidentified
MSKVIGMDLGDKKNVVVVFDEDGTEHAAEYVTNTKVAMTKYFKKYKEAVVVMEAGTHSAWISRLLSGMGHDVWVGNPRRMRAIWDSADKSDERDARVLGMMYRLEPRLLHRIYHRGEKAQCDLAMIKSRQMLVESRTKLINHVRCIVKGMGERIKTCSAASFHKRARLEVPEPLSDALNTVIDQIEHLTQAIKDLDKRIKILAETKYPETQYLIQVPGVAELTALAFVLTIENADRFKRSREVGAYLGLTPRRDQSGQTDKQLPITKQGNTYLRTLLVGCSHYILGPFGKDCDLRRHGERIYRSGGKNAKKRASVAVARKLAVLLHSLWASQSEYIPLQKELAKVA

SEQ ID NO: 484271 - protein, 408 aa, unidentified
MNAVGIDVSKGKSMVAALRPMGEVALLPQEFLHTAVGLEQMAYAIIAPGEDTRVVMEATGRYHEPVAAALHECGIYVCVLNPLFIKQSGGGSIRKVKTDKADAMKIAKYGLDNWVDLREYTPMDTIRQQLKLCSRQYNLYIKTVVSLQNNLISLADKTFPGVNELFSSPERADGHQKWVDFATTFWHCDCICRVSEKAFTERYQKWCKRKDYHFRAEKALDIYAGSCGHFTTLPMNDNTKLLITTAAQQLLAGKMTLAALRAEMTHLAKQLPEYDTVLAMYGVGETTSAQLMAEIGDVRRFPRRSSIVGFAGVDPAVDQSGKHEAKSTPTTKRGSPHLRKTRYQIVCTYLRKAPEDEPVYQFLDKKRTDGKPYFVYMTAAQNKFLRIYYARVKECLEAFDAQQDTVQN

SEQ ID NO: 484272 - protein, 390 aa, unidentified
MFYLGIDIGKFHHAAALMDQRGKVIATLPSFPNTRSGFHKLLALITAHLPPAEELRIGMEATGPYWIPLAEWLKAHGWIPVILNPIKTASLRNYGVRGSKTDNIDSVLIANTLRIEEEQPQQASPKLSEELRHFTRLRADMVKDRTRIALRVTSLLDRLFPELLSSFSKTLAPSCLTLLAAAPTPARVLALGEERLTTLLRKASGGKLKATRAKEIMDKAAVSVGITTQASEEVLALLLEQINLIGSQLTTLDHRITKLYKQAGLYFTSIAGVGTLTAGTILGEFGSVTRFTQAKQMVAFAGVDPKLRASGQHQGQVHISKRGSPYLRRALYLACQGTVRNDDYFHSIYQRHRDNGKSYKEAIIAVMNRFIHVLYAIWRDNRPYYPLTSA

SEQ ID NO: 484273 - protein, 347 aa, unidentified
MRFYTGQHRYYCGIDLHARTMYLCILDHASGKVLLHRNLRSEPELFLRTIEPYRDGLVVGVECIFCWYWLADLCNRESIPFVLGHALYMKAIHGGKAKNDKIDSHKIAVLLRAGAVPVGYVYPQGMRATRDLLRRRLFFVRKRSELYTHIRTTFHQLNLPAPAGKLRHRCNRVGVAESIPDPVVRASIEADLALVSHLDDIIRSLEQTICDQAAVEDPDTLELLQTIPGVGRILSLTFLYELHEIARFPRVQDFLSYARLVKSQKASAGKITGTSGAKIGNAHLKWAYSEAAVHFLQKNPPGQRLIHRLRSKHGKGKALGILAARLGRASYYMLRRSTAFDMDRFMN

SEQ ID NO: 484274 - protein, 402 aa, unidentified
MNAVGIDVSKGKSMVAIMRPFGEIVSAPFEIKHTASDINSLVELINSVEGESRIVMEHTGRYYEVLAHQLSAANLFVSAINPKLIKDFDNDSLRKVKSDKADAVKIARYALDKWQNLKQYSVMDELRNQLKTMNRQFGFYMKHKTAMKNNLIGILDQTYPGVNTYFDSPARSDGSQKWVDFASTYWHVDCVRKMSLNAFIDHYQNWCKRKKYNFSQSKAEEIYGKAKELVPVLPKDAITKLIIKQAVDQLNSASTTVESLRTLMNETASKLPEYPVVMAMKGVGTSLGPQLMAEIGNVSRFTHKSAITAFAGVDPGVNESGTYEQKSVPTSKRGSADLRKTLFQVMDVLIKTHPQDDPVYQFLDKKRAQGKPYYVYMTAGANKFLRIYYGRVKEYLASLPES

SEQ ID NO: 484275 - protein, 392 aa, unidentified
MVVSVGIDVSKDKHDCFIVSSEGEVLADVFTISNTMDGFNCLLQRIQNCTTPQDKTKVGLEATGHYSYNLLGFLLDNGLTTYVLNPLRTNLYRKSLSLRKTKTDRVDARTIASMLLSDAGLKPYTDTAYHNEELKSLTRYRFDKVKERAKLKSSIARLVCILFPELEKLVPSLHIASVYALLEEFPGAKQIAAAHLTRLKALLETASKGRYKRDMALEIRDAARNSIGARIPAKSLELQHTIRLIRELDAEIHEIETEIENMMDEIHSPITTIPGIGYRMGAMILAEAGDLSRFDSPDKLLAYAGMSPSTYQSGQLKNCYPHMEKRGSRYLRYALYNATRYVCLWDPTFAAYLAKKRAEGKHYNVAISHAAKKLVRLIFAMEKSKQPYCSAA

SEQ ID NO: 484276 - protein, 356 aa, unidentified
MNEYIAFDSHKRYTLAERENASTGEVRQCRIEHRPGAIREYLRDCQAGTAVAVEALGSWYWIVEEIEQAGLRPKLVHPRKAKLMMGMINKTDKLDVHGLNRLQRNGTLPTVWIAPGPLRDLRELTRTRMVLSQQRARLKNRLSSALAKYGLAVEGWSDPYCPGARATLKELLARLPEQTGWTGRMLLEQLDFVQGQIESHEQRLAGLVEETPGMRLQRTVPGFGPILSPVVVLEMGDVRRFPDAQHFASYAGTTPRVHSSGGKTRYGKLRPDVNRYLKWAFVEAGNVAARHHLSRPDRHVSRLYARLKPRKGGAKAVGAVARHLAEATYYVQMGRVPYRDPALSRVRKEGLSATMP

SEQ ID NO: 484277 - protein, 431 aa, unidentified
MKNITKNRRLSEINTTTLIVAIDIGGYEHHARAFDWRGIEQQKKAFKFKNDRYGFESFLSWIERIQWMSGFTEVMVGLEPTGHYWFALFDYLLSRNLRLVITSPISVKQTKEAATTSASKSDPEDPKAIAHVMISGNYQEIYRPQGNYAELRKAYTLRNSVMEQKKATSNRIHAWASTYFPEWHKVYSSVQRIGFLTLLRRAPLPSDIVKLGVHGILHHWHECQLLGGISRNRAERLVEEAKRSVGVTEAAEMARVEIQMLLQHYDLQEAQLTRLDKRLEELVEQYPGGKRLMQIPGIDLQIAAGFLAEVGDIRRFPSAAQLQSYAGLDILRNSSGKRRGQSRISKRGRNKLRRIMFVAALCVVNHTSEFRAVHQYYKHRTKNPLKAMQSLIAVACKLLRVFHVMLTKDVDYDPDKVTCGLVVKSSEKQVA

SEQ ID NO: 484278 - protein, 356 aa, unidentified
MSHDVKYIGMDVHKEAVVIAVLNSSGKQVMESIVETKASSILQFIHGLRSELHVTWEEGTWAAWLYDLLQPQVKRVLICDPRRNALLKEGNKSDKIDARKLADLLRTGMVRPVYHGEHGLRTLRELGRSYQTISQDLNRVMNRIKALYRGWSIPCAGTQVYAPRYREEWLQKIEHVGVRRRAELLYQQLDGLQALRRTLRPELLAESRKHKASKLLRQIPCIGPIRAARLIALMQTPHRFRSKRQLWTYSGLGIETRDSAQYCYVHGQLQRTKKPQQIRGLNRNHNHEMKEIFKGAATRASCGVGPLRDFYVALVAKGMKPEMARLTLARKIAAIALTLWKKEERFDTEQLKPQAA

SEQ ID NO: 484279 - protein, 342 aa, unidentified
MYYIGLDVHKKTISYCVKDAAGKIHQEGKIGSTRRELDAWIKTLPQPRMIAMEATIFTGWIYDHLLPHAEKVKVAHPLMLRAIAAAKRKNDKIDASKIADCLRCDFLPECYMTSTEIRDRRRTLGYRGLLVKQMVQMKNRISGLLMEAGVSYNKQRLHKVGYFTELMAGNEEIDCVRPLLKLSRETINRSQKLDYALLSSLERDPLLSERLKRLRTVPGVGPITALTWVLEIGDVARFQSIKNAISYCGLCGAEKRSADKVVRTPISKQRNKHIQQVLVEAAKLAPRYSHELSLIYEKEKQRGNRNRATLAVARKMVAWMVAVERRKQDFVPAEERGGTVAA

SEQ ID NO: 484280 - protein, 422 aa, unidentified
MLEPAQDHQEIIGRIAALDIGKATLVCCTRVPGPGGTRRAQEVTTYSTMTRSLQAMADRLLELGVTRVVMEATSDYWKPAFYLLEAHGFEVWLCNAKDVKHLPGRPKTDVLDAVWLCKIAERQMIRPSFVPPAPIRRLRDLTRYRAALVSDQSGEKNRVEKLLEDAQIKLSVVASDIFGVSGRDMMARLIAGERDPKVLAQLARSRMRSKLAQLEEAFVGNFTDHHAFLLTQMLGRIDRLGADIAGVEARIEAEIAPFASAVERLDEIPGVGRTAAHVIIAEIGLDMSRFPTAGHLASWAKFAPGVKESAGRKKGNGSTGHGDPYLARVLGEAAVAASKTDTFLGERYRRIARRRGKKKAIVAVGRSILVIIWHLLNDPDAQFHDLGSDFYDRRLGTERAKRNHIRQLESLGFKVTLEPTAA

SEQ ID NO: 484281 - protein, 364 aa, unidentified
MKNCITWVGMDDSANKIKVAVFLGNANTPHEEFGVDNDPSGHGRLVKKLKLLPGEVRCVYEAGVNGYHLQRVLSRNKISCDVAAPSLTPRRSGKRVKTDPLDAKALAGLYRAGELTSILIPETRQETVRDLVRAREDAMEDQQRARHRLNRFLLRRGMKYRAGKAWTGAHLKWIKAIHFEEAQAQAVLDEYRLALDEQTERMKRLEGLVEEAAKAPEYRKLVGYLMALRGVRVLTAMTIIAEMIDLKRFPDARKLMAAFGVVASEHSSGEQERRGGITKTGNVHGRRVVIESSWHYRHPPVVGKALRKRRAGLPQEVLEIARKADRRLHKKYWHLVNRGKRTQTAVVAVARELVGFIWAIGQVV

SEQ ID NO: 484282 - protein, 315 aa, unidentified
MDPTLAQSVGVDISKDFLDVAFHPAGETARFANDAKGQRALIKRLGARELARVVFEATGAYHRLFERTLAEAGLPLVKVNPRQARRFAQATGKLAKTDRCDAAMLARMGSALQLTPRPVVNQTIDEMRELLNARDALIKDRVAALNRRKNALSPLVKRQLADRLRQIDSQIEAIDRQQQNLRSADPQIAQRFEILTSIPGMGDITANALIAEMPKLGDLEQGEAACLAGLAPFAKDTGKSSAPRSIRGGRAKARRALYMPALCAIKFNPQCKAKYHALIKAGKAPKVALVAVMRKLIILANALLRDQRKWAHNAP

SEQ ID NO: 484283 - protein, 405 aa, unidentified
MRYYVGVDWADQTHAVWVVDESGTKIAARAVSHTAEGLGEWGRELDEWRAQGIDLWAAIERPDGRVVDVLLDHGVVVYPVNPKALDRARDRFRQSGAKSDPFDARVLADFLRTDHAHLRALQPSSEAAQELKLLTEDCQRHIRQQTRLVNQLTATLKAYYPRALEVAEVTSALAREFLPAYPTPAALTALTERQWQRWARAHRLPEARAGELWAVLRPPQLPVPGHVVRAKARLMQTLMEQLRPVVAAVAQYRKAIDDFFARMPAAQWARTLPIGKHGIPAPTLWARLGDAPRRWESFRHLQAHAGTVPVTKRSGKQQRVVQFRFACDKALRYVVDQVAYLSLLSSAWARPYYDQQRARGHSHRQALRALGAKWLKIIFIMWQRQVPYDEQYHLATMTRQQLGRR

SEQ ID NO: 484284 - protein, 469 aa, unidentified
MRIIGLDLAITGKHAAIVMAENGQYLSPVFKLRTWPKELAALLDRSRQDVEAAHPVAVIMEPTGYAWLPVASYLCRQAGVTVYLVNTQAVADLRRYLKKHAKSDRIDSRVLCKIWLVSPEKLHPLRLPEGDMLALRQACKQLDQVTDRITAIKNQVTALDHTVWLGGLSRLVFKEAFGPAALWSRQHFYDPRQVLCAGADSIRQQWQAAALDEADPGQWAQYLVELAAEVVAIYDHPSPYVDFAAWQAQMHLNLHSLAHFEAQQRHLRLKVVRPLYRRLHPSRHLETLRGVGQDSAAVFLSFIAHPDRFATQRLLRGWSGMVPRSSQSGESESQGLRISQAGPDLVKKYAFLDADVARLWDPQLAKIYHDQMVHKGKHHNQAVCTVATHLLDRVLVILKEDRPYQLRDVDGSLLTRQQARQVVLEHYTVPKEVRQRNNKNARRKRANQRAERNFARSQDKKVGKAPSAG

SEQ ID NO: 484285 - protein, 313 aa, unidentified
MIIPVRYVGIDVSKKHLDIFDEGDGVPRRIANATQAITQQVARWRCDALVVFEATGAYDLALREALGRAGVRFARINPARARDFARASGQLAKTDPIDARMLAAFGRVMQPATEQAVNPARNALSRLAKRRDQLVLMRAQEKNRRSEADDRIMAERISRLIEVLDGEIAEIETDIKALTKAEPEIADDARLMRSLPGVGPVACMQLIAKMPELGHVGAKQIAALAGLAPFNVDSGAFRGKRKIAGGRKRVRDALYMAALNAVRRAEPFKAFYARLRQAGKPAKLALIAVARKLLTVLNAMMRDRKPYLQTKPT

SEQ ID NO: 484286 - protein, 339 aa, unidentified
MAQVTTLGVDSAKNGVCIHGVDAHGHVIVKKRLARQKVLPFVAQLPPCLIGMEASGRAHYWAREFTKLGHTVKLLSPQFVKPYVQSQKNDPNDAAGICEAVARPRMRGVPVKSVAQQDIQALHRIRERQIKARTALINQIRGLLMEYGIVIPQRASQVRHKLPFVLEDAENGLTITAREWLQALAEELQVLDQRLAATDHRIEQVFEADEACQRLAQLGGIGPLTATALVAAVGDATGFKNGRQFAAWLGLVPRQHSTGGKTTLLGITKGGNRYLRMLLIHGARAVLRVVDRKTDAWSRWLQGVQGRRGTNCASVAQANKTARVAWALLAKGDRYRRAA

SEQ ID NO: 484287 - protein, 372 aa, unidentified
MEQNTGVFVAMDTHKETIAVAVAELGRSGEVRFWGEIPNRADTVRRLVGKLASKYGRLSVCYEAGPCGYELHRQISDLGHECVVVAPSLIPVRSGDHVKTDRRDALTLARLHRAGELTAVWVPDAAHEAMRDLVRARTAAMEMVRRARQQLQSFLLRHNRTFTGRCPWTGAHRRWLATQRFEHPAQQIVLQELIDTVTDAETRRDRLNGQIEELAQSWTLRPLVEALQAMRGVAFLSAVVLATEIGDFRRFASPRQLMAYLGLVPSEHSSGRKVQREGITKAGNTRARRVLIEGAWSYRWPARVTNEIRARLEGLPKAVQGIAWKAQTRLCARFRRLTATGKNHNVVVTAIAREMAAFAWAIAREVEPVQAP

SEQ ID NO: 484288 - protein, 348 aa, unidentified
MVCSKIAIGFFTGPAWLKEPKGSHRKEGSRKMSKHSMVCAGIDIGKHKLDVACDGRPERLQVDNTADGHRKLSAWLRRQRVKRVGVEATGGYEQAVVAQLRHAGFQVIVFQPAQVRAYARFHLQLAKNDKIDAVLIAACTADTKKVFAPPDPRLAAWAQHLTFIDQITEDIARLKTRRESCRDERLEHHWSQDIARLKQLQRSELKALVAAIRQHHDLAEQLDLIASVDGVGLPTAVAILVRMPEIGRVSREQVAALAGLAPFDDDSGQQHGKRHIKGGRARLRRSLYAAALPAAFRWNTQLIALYRRLIAAGKEHKAALIACARKLLIYVNTVVERGTPWIGENRPA

SEQ ID NO: 484289 - protein, 338 aa, unidentified
MEHFVGIDLHKYVSQLAVLRESRSPSQLRFANDVVTVEQVLKKLPKGSKIALEAMGSWWWMVELAQKTGHEVFLSHPKQTKAIASARLKSDKVDALMLAKLLKADLLPTVWIPPENQRHVRELLTHRARLVRQRTAVINELRAVYAKRNIDPQAKLQRAQPQVSGAEDLSGYAPRIVGEDVELLGFVNRQIGGLDKELMKIALEDGSAKRLMTIPGVGAVSAVAMSCWIGEIARFSNAKKLASYFGLAPRVRQSADTERHGHITKEGNRMVRALVIQAALVHTRTGKGPSRKHYLGVLKRRGKPIARVAAANKLLGVIFHMLKERIDYHEFLRRSDAQ

SEQ ID NO: 484290 - protein, 399 aa, unidentified
MLNPQSLQLRVGVDVGSRCHSVAVGLTDGSLLEEFEIPHTAAGFEDFFARIEGHAKRHPYPISVAMEGYNGHVRPLDSLVKARGWRLFNVNNLKLARFKEIFPAAAKSDRIDSAKTLELFQLRDHLPMAGDVLQEVMTTPEENDILKRLSRRRRRLVNERGRVINSLQADLQAVAPGLLQITREVGNLWFLNFLTCRKGLLKLARVRRASLLKVSGIGATYADAIQEWQGRAFFGHDASLVGDMIQQDAARILELKQQINALEEQMAHIAESSSIARQLASIPGYGSVCSAELAGEIGTIERFRSEASLALYLGMATLDNSSGKYRGSKAPKHVNARAKAAMMIAVDHHRKRVPQSQRYYEKKRAEGKRHNQAIRALGRHLCRVIFKMLTQERPYWIDP

SEQ ID NO: 484291 - protein, 473 aa, unidentified
MARKKGKDPAGIGGPGLTGEPAGVSDEPAEVIARAAAIDVAKGSGMVCTRVPHESGPRRRVQRIWQVSARYSEIAALMAELAKLGIQRLVLESTSDYWRIWYYLAEAAGLEVWLVNARDAKHLPGRPKTDKLDCVWLCKLNERGMLRRSFVPPEAVRDLRALTRLRSRLAQDQARHQSRIEKILEDALLKISSVISDLMGASGRRFLAALVAGERAPDKLAALGDRRLKASPAQLEEALAGRFRDIHALEIGMLLELIDDITAKMARLDAEITARLARIPGLAPACTGCGEIGGGHAPSCPQAGAPVLSVIERLDELTGIGIDAAQVIVAELGTDKTTFPTPGHAAAWAKLASRTIQSGSTSKDGRTGKGNPYLRAVLGRAAMTAAKTDTYLGERYRRIARRRGKQKAIVAVSRTICEIAWMIITDPSVRFSELGPDYYARLDAGRQTRNKIRELERLNPGMKVTLTPAATAA

SEQ ID NO: 484292 - protein, 516 aa, unidentified
MLNSIPEPVDPVGNAFRYVCCALKLALELGHPPGAPRPACASSRLGRTCAPTGSAIDARPVGSCAASASTGAMRHRSAPSQWETEAREEVVVDDEYRIYVGIDWATEAHQACVLDCTGCILAERSFAHTGEAVAGFTQWLHGVAGGDPSRAAIAIEVPRGAVVETLIEQGFHLYAINPKQLDRFRDRHSVAGAKDDRRDAFVLSDSLRTDRARFRQIRLDDPLVIQLRELSRVDEDLGREINRLTNRLREQLNRFYVQALKLCPSADEPWLWALLERASSPAAGNRLQQKTLERLLRQHRIRRVNAQDVLAALRAPALRVAPGVVEAATEHIALLLPRLRLVHTQRQRCGVRLDALLDKLAAVDGDEGQQREHRDVEILRSLPGVGRVVAATVLAEASGPLAERDYRALRTHAGIAPVTKQSGKRRTVVMRYACNGRLRYALYHWARVAVTCDPASKTYYAALRQRGHSYARALRSVADRLLRILIAMLKSESLFDSTHPRRSPHPAPTPEAPCAA

SEQ ID NO: 484293 - protein, 376 aa, unidentified
MREKLRFLGLDVHAETIAVAIAEPDGEVRSLGTIANREESVRKLIRKLGAAEHLRACYEAGPTGFVLYWQLAQLGVECAVVAPSLVPRKPGDRVKTDRRDALKLARSHRSDDLTEVWVPDESSEALRDLVRAREAAKQDQLRARHRLSKFFLRTGQRPPMGVRPWTERYWEWVQQIHYTQPAQEATLLDCMNEVHHMGERIKRLEQAIVEAVKLAPASVQEVIRALQALRGVAHISAVTIAAELGNITSRFESARKLMGYTGIFPSEDSSGKRIRKGSITKQGNAHLRRIVVESALSYRHRPGTGIKLRRRQEGIPAEITEIAWKAQNRLHRRYINLLAAGKDQRKTITAIARELMGFIWAIGIKAEAACEQRLAA

SEQ ID NO: 484294 - protein, 410 aa, unidentified
MIKENYIYVGIDLHKETHTAVMIDCYNQKLGEITFPNRPADFPKLVAKVKKCNTDGKTIVFGLENAYGYGRPLAVWLIDKGYFVKDVNTAISHRQAKHRGAMYRKSDSDDAEAIALATLNMLDKLPDACPNDAYWSLGQLVHRRDNIMKQRTRLVNQLHEQLCIAYPSYKQFFNDISRPTALYFWEHYPSRKYLKGKSVEDLRAELVPVSHNKCSTKTCEKILDAVASDKVKNNAYQDARDMVTLSIVSDLQHYDSQLTEVDKMLEQMYKMLGCTLTTIPGVNVITAVKILAEIGDIKRFSNANKLAQFAGIAPLHLSSSGKGKDVATKQGNRRLQATIYFLAIQMVQVSSKGTPRNSVVRAYYEKRKAEGKTSQQALICISRRLISIIYGMLKHGTEYRMPVVESAGEK

SEQ ID NO: 484295 - protein, 365 aa, unidentified
MPTRKLPNPDDFQGQKFYIGIDVHKKSWAVTVRSLNFVVAHFTQPPSPAALLSQLQHKFPGGEYFSTYEAGFSGTSAHEELCKLGIKNIVVHPGDIPRTDKEKKNKTDVHDSRSLAFHLEKDNLHSIYMLSRQQQEFRALFRLRESKARDVARAINRLKACLLYFGIDYSSTFEGYISARVISWLRKLHMTNEAGAFTLKKYIDDLVHQRSELGKITKTLRNQAKKDYGLPYKCLLSVPGIGFTTAIGLLAEIGDFNRFKDPAEYCSFLGLIPWQHSSGDSVQVKGIQPRCNKHLRPLLVEASWFAIRNDSSLLKYYRKHAVKNSRHAIIKVARKLALIAKGVAQKLQMYDAAYSPFPDLPNRYI

SEQ ID NO: 484296 - protein, 977 aa, unidentified
MSVAYAELQVTTYFSFLRGASSPIELFEQAKALGIEALGICDRNSLAGMVQAHVAAKETGIRLVVGCRLDLADFAPVLVYPTDRVAYGRLCRLLSLGKARAGKGQCHLLWEDLVAWGEGLLVILLPDTADDACALHLRKLKDAFADGAYMALTLRRRPNDQMRLYELANLAQQARVPIVVTNDVLFHTHDRRILQDVVTCIRNHTTIDEAGFARERHADHYLKPPAEMARLFSRYPEALARTTDIVERCRFSLDDLAYQYPDEVSVPGQSPQQALEALTWERAAAAYPEGIPPEVRKILDHELALIGRMDYAPYFLTVHSIVRYARSQGILCQGRGSAANSAVCYVLGITAIDPARTSLLFERFVSEERREPPDIDVDFEHARREQVIQWIYGHYGRNHAALTAVVTRYRAKGALRDVGKVMGLPEDLIRTLSGQIWGWGRKLDEGALNETGIDLSDRRIRLTLDLARCLIGVPRHLSQHPGGFVLTHDRLDELVPIEPAAMDGRQIIEWDKDDIDVLKFMKVDVLALGMLTCMKKGLDLLAEHKGQHYTLQTIPAEDPRTYAMIRKADTIGVFQIESRAQMSMLPRLRPRVFYDLVIEVAIVRPGPIQMGWTASMRHQCAMMRSEDHSEETARMKVTIIGLDIAKSVFQVHGTDASGKCLLKKKLGRSEVISFFEKLERCLVVLEACSTSHHWARVIRDTGHEVKLIPPEMVKPFVKRGKKNDAVDAAAICLAAIHPDTRFVPIKNREQQSLLSLHSTRTLLVKQQTMLVNALRALAAEFGLIVPLGNARLPELLAKIETSSNLPDALKQTTMLLFEQYGRLNESIENLEGGIRTHAKQDEDARRLLTIPGIGPVTASLIVASVTDIGAFDTARHFAAWLGLVPRQHSSGGKTRLGRITKTGNREIRKMLVLGATSMLYRAQKWDSAAGVWLCKLLERRPGRLATVALANKLARIIWVLLSRKEIYRPAGRSVAIV

SEQ ID NO: 484297 - protein, 324 aa, unidentified
MGILDGGFKRVFKKRVANDLGLILETFEPFRKDLQGIVVESTYNWYWLVDGLMDAGYRCVHLANPSAIQQYEGLKYSDDKHDAFWLAHLLALGILPEGYIYPKEDRPVRDLLRKRSFMVRQRTEHIHSLQSMIERHTARRLNGNEVKKLQSENLEEIFEHEYSTLAADADSCAIRFLTERIKQIEKAVLEKVKLKEPFKRLLTVPGIGEILALTIMLEVGDIGRFPKVGHFTSYARCAPSGRISNGKKKGEGHRKNGNHYLGWAFVEACNFARRFYPKFRSYHQRKASKSHPFVATKAICNKLARICYYVMRDGVCFREEAIFC

SEQ ID NO: 484298 - protein, 351 aa, unidentified
MLIIGVDYHPSFQQIAFVDAETGESGERRLAHTTGEAEAFYRELKKAGVNVRAGMEATGHTRWFEDLLAELGFELWVGDPGRIRAQRVRKQKTDRQDAQLLLKLLMENRFPRIWVPDKQNRDLRQLLWHRHRLVEIRTRVMNQLQSIAMNEGIRRKKGLWSKAGRMQLESLPLAPWSSRRRQELLELLDQLNRLIEELKAAISKEAEKQSEVQLLMTHPGVGPITGLAFVLVIGNPERFRCGKQIGSYLGLIPSEESSAGRQRLGHISKQGNGLLRFLLIEATHNTVRLDADWRRHFLHLAMRRGRAIAQVMVARKLAVRLFWMWRKGWTYQQVLKFGSHVEQPELHHGVK

SEQ ID NO: 484299 - protein, 311 aa, unidentified
MDEIIIDKGCGLDVHKGAVVACVMGEGIKKEIRTFSTMTEDLFGLKSWLLDKGITHVAMESTGPYWKPVFNVLEDSFEVILANARHIKNVPGRKTDVKDSEWICKLLRSGLLAASFVPPRAIRELRDLTRYRRKLTEAISSEKNRVQKVLEDANVKISSVVSDTFGVSASRMIEAILAGNLNPEAISDLAVGKLKGKKAELKKALVGNFQEHHRFMIQASLDHIGSLEKIIAGLDQEINRKLKDYHREFELLQTIPGVKEQGAASIIAEIGADMDIFPSEGHLSSWAGMSPGNNESAGKKKVERRPTAIRI

SEQ ID NO: 484300 - protein, 343 aa, unidentified
MTYFAGLDVSVKETSVCIVDDAGKIVREVRVASEPEALLPVLTNTLYRLKRVGLEAGPLSQWLYSSLAEAGLPVICVETRHMRAMLKAQINKTDRNDARGIAQMMRVGLYRPVHVKTLRSQKLRVLLTHRKLLQSKAIAIENDLRATLRNFGLKVGVVGTVKFEARIRELVESLPDLAELVEPLLIVRRVVREQLGILHRRLLAIVRDDAVCRRLMTIPGVGPVVALTYRATVDVPARFRNSKAVGAVFGLTPAKYQSGENDRTGAISRCGDEMMRMMLYEAAQSMLVRSTKWSWLKAWAMKIARHRGIKKAIVALARRLAVIMHRVWVDGTEFRWTREVAVA

SEQ ID NO: 484301 - protein, 405 aa, unidentified
MKVYIGIDWSENKHDVCCMQEQGEVVLLLQIQHRMAGFRQLDQARQSLGVGREEVVIGLETAHNLLVDYLWDQGYEQIYVLPPSVVKSAQTRYRQSGAKDDRWDARLIADVLRTDQPRYAIWKPDLPLTRQIRAEVRFAMQLGREVVRDGNRLRSILLRYYPAALDAFPQLDSVVFLAFLQVYPTLPQAQALPFEQLKVFLHAHHHTQSRSWPKIYAGLHSDHPQSNLALDAAYAPLTVAQARILETLLRSRNECLARLGKLFLLHPDREIYDSLPKAGTLLAPALLSKLGDDRARYPTPAVLQAVAGTCPFTKRSGKHAHIHFRTACDRELRHIVQQWARLTLDVSPWAATYYHSVRPHCQTDNDAIRRLANRWLEVLWRVWRDRTPYDETFHLKQHVLRTQAR

SEQ ID NO: 484302 - protein, 397 aa, unidentified
MYIVGIDIAKRKHEAAVIDGEGTIIIKPFSFTNNCSGYNRLLAMLAKAKLPLDEVSFAMEATGHYWLALFTRLQKEGFRVQVINPVQTNSIRSFYIRQAKTDPRDALLIAEVIRFGHFSESTLHPENIYELRELCRGRHAIVSMQADVKRKVVALLDQVFPEYETAFTNMFSDTSMAILQTCPTPKELSEMPLEELCHLIEVSSHKRFRMAKAQELQALARNSFGFAMAGDVFSTMIRLYAKHLDFLKQQVREMDRKIAEIMDTLDTPITTITGIGPTLGAYILSEIGDINRFSSSAKLAAYAGIDPTMRQSGEYNGVRNRMSKRGSPYLRHAIWLATSSAVLHDPALKLYFQKKRDEGKPYMASVGHACRKMVSIIYAVMRDNKAYTPHIPNEISA

SEQ ID NO: 484303 - protein, 407 aa, unidentified
MECVVERAAGLDVHQATVVATVRVPGPGRRREDTATFGTTAAELVVLRDWLAAYGVTHVALESTGVYWKPVYYALESDFVLVLANARHVRQVPGRKTDVRDSAWLAQLLEHGLIRGSFVPPPPIRELRDLTRARTALMQDRTRVVNRLHKVLEDAGVKLATVASNILGVSGRAMLEALAGGTTEPSTLADLARGSLRRKLPALRAALTGQFRAHHALLVAQALGQLDHLDEMVATLSAEIAERLRPFAGAVTLLRTIPGVHERVAEVIVGEIGVDMQPFPSAGHLASWAGVCPGQYESAGKRKGGKTRRGNRWLRGALHMSAKGAIRAHAAGALGARYRRVLRHRGHPKAVRAVEHAQLVAAYHILTTQVPYRDLGPTYADERAAERARRRAIRLLEREGYRILPAA

SEQ ID NO: 484304 - protein, 355 aa, unidentified
MNQEKYIGMDVHAATISAAVMNAQGKVLTKCVMETKASTILEFIQAQRGTLAVTFEEGTMAAWLHDLLKPHVSRLVVCDPRKNALMRDGNQNDRADARNLAELLRTNQVHAVYHGKHGIRALRELGRSYSTLTQDSTRVMNRIKSVYRSWAIPCAGTSVYSRRHRAEWLAKLVEPGVRIRAEHLYQQLDSLEPVRQAARRELLRESRKHAAVKLLRQIPTIGPIRSALLVAILQTPHRFRTKRQLWAYSGFAVQTYDSGEFRFERGKLKRNRERITVRGLNRNHNHDLKNLLKGAAISAIERPGPLQDFYAALVGKGMRPSMARLTLARKIAAIILITWKKGVSFDPKQLQRQTA

SEQ ID NO: 484305 - protein, 420 aa, unidentified
MLAPAPAAPPPVLLKYVVGIDIAKATFAACLGSIDAAQRLRLGKVAEFANNAAGFEALRRWVAAGQAEPGRPVWFVVEATGVYYEELAYYLSAQQQALSVLLPNKVKHFARSTEQKSKTDALDARVLCRLGLERQLPAWQPLTPAMRQLRSLTRERAALRTQAAQAKNRAHAYTHSYEPDLLALQRLQQRQALFEAQMTEIDAQTAAVVAATPELARKLTQLTSVPGIGLTTAVTIVAETSGFALVENERQLASYAGLDVVQRQSGNLARPTAISRRGNARLRTALYLPAVSSLRYNEQQKAFYARLRARSPNGKVGVIAVMRKLLLLSYSLWKNDQAYARTTTPLPSSCTKPPRHPREPRRHRMHPQVLLWRPKSKKKLALLLAFHHSICCILTLRQPHGQPLATLTFGCQSATEGQRS

SEQ ID NO: 484306 - protein, 408 aa, unidentified
MERLYNQKVLVVGVDIGRERHTAVGLTPDGRRYGHFDFSNNGEGFRKLLNEVMKWKVESGMERVLFGIEPSGHYWLTLAHFLRKNGYEFFTVHPFAQKRMRDIEDNSPLKSDKKDAYIIADLLMQGKCIRGVIPEGIYAELSKLMVFRRKLVKEMVGLKNYITSAVELVFPEIFLVFKSLWTKTAIYFLKNYLPLERVKKIGFETLYFELRRVSRGKIGVVEVVQKLKSLAETSVGLKDGADIMVEELRFYIRRLEEVMEAINKVERRIKSLVKSVEEAEFLLSIKGVGYLTVAAFLGFTNGLRDFHSSDEVLKFMGLNLFFKQSGKRKGKAHISKRGNRILREAMFLAGLRQAKKNSPLYNYYLRLNKKGKPRMVILIAVTRKLVRIMFKIVKNKTHFNPDYISEAA

SEQ ID NO: 484307 - protein, 340 aa, unidentified
MAITTVGIDLAKNVFAVHGVDQNGRTVLVKPKVSRAALPELIASLPPCVIGMEACSGAHYWARLFRQYGHEPRLMAAKFVSPYRMAGKSGKNDAADAQAICEAVRRPHMRFVPVKDESQQAMQCLHRTRQGFIEEKTATYNRLRGLISEFGVIAPQSTDSLRHMVSAQKNSLPLQVQQCADDLLEHVARIEANIAEYDRILSRMAKTDHRSQRLMELKGVGPTTACALVASIGNAHDFKNGRQLAAWLGLTPSQYSSGGKSKLGRITKAGDAYLRTLLVQGARSVLIGAEKRTDSFSRWVCMLVERRGYWRAVVAIAAKNARLCWASLHYGDDFRLYSAN

SEQ ID NO: 484308 - protein, 415 aa, unidentified
MDVLVERCAGLDVHRDNVVATVRTPGIGRRLRAQQTRTFRATVGGLDELGGWLGELGVTLVGMEATGVYWKTVFQALEARFECWLLNAQHLRNVPGRKTDVKDSEWICQLVEHGLVRASFVPPVWVRRLRDLTRLRKAQVNERTRAIQRLEKVLQEAGIKLTSVASQTYSKSSRTIIEALLAGIVDPAVLAELAKARLRSKIPQLREALANRFDVAHHGILCAQLLGHIDALEASIATLDERIEFALEPHARLVELLCTIPGVAARTAQVLIAECGLDMSIFPTVGHFASWAGICPGHHESAGRRRSGRTRPGPRWLTEALTEAAKAASRTKGTYLAAHHAQLRGRRGEAKAIGATRHDILVAYYHIVRDQVPFRELGPDWNRRRYSIEHRARRLQRQLEALGYHVTLTETAATA

SEQ ID NO: 484309 - protein, 313 aa, unidentified
MDNPIPQTIGIDISKATLDVYAHPAGCERQFTNTAKGHRELIDWLGQWQIDRIAYEATGAYHRQLEQALSDLPCVKLNPARARRFAQAIGTLAKTDKIDAVILARMATTLQPPVRPANTPKQAKLAELISARDGLVRDKIALQNQAKNLTLPLLKRQHKKRLDQIEQHIKQVDVELATIIAADAELARRHEIISSIAGVGTRTADQLVATMPELGALDPKQVASLAGLAPVARQSGQWKGRSFIQGGRANVRRALYMPALVAARYNPDLKAKYQSLIASGKPAKVAVVTLMRKLIVMVNALIKADRLWVEKRA

SEQ ID NO: 484310 - protein, 420 aa, unidentified
METLKKERIDIYQKRNTCFIGIDMHKDMHCAVIIDCWMNKLGEVSFENRPSKFPAFVEDVRKICSNMEFIFGLEDTRGFGRNLAAYLVGRKFDVKHVNPAYTSAVRLASPIIHKDDSYDAYCVARVLRDMVDTLPDAKHEDIFWTIRQLVKRRDMIVKNNVMNKNQLHSQISYSYPSYRKFFSVIDGKSALCFWENYPSPEYIWSSTPEEIYQTIKPVHQALKIERIHEIIAMIEKDGDTRKDYQLERDFIVRNIVKDIRHNKELIAEIDEELRKLIPLTGYKLQTMPGIDLVTEAQLISEIGDINRFPDSDKLARFMGLAPVQFSSAGKGKDQRCRNGNRALNAIFHFLAIQMVAISPSGKPRHPVFREYFEQKVKEGKNKPQALVCVARRLVRIIYGMMKTKTEYRPYEKVVDKSQFR

SEQ ID NO: 484311 - protein, 363 aa, unidentified
MLRDSIFLEMVVRHCEDLVQILTAMESTGCYHLNLFSFLNDHGMQVVVINPLLISNFAKLSLRKTKTDKKDALTIAQFILQHKDAISRLAVSQGLQDLRDLARERESLCHLISETKSEIKRVLRTTFPELESPCDISTKVMLQFLLQYPSARMITSAKQKDIVKALGRKGVGTRLTFSAQDIIKAAKNSVGIVSPAKEIILQGKVSTLMHLGERVEQMTKLMTALCKASMLQELEIVTSIKGIKTKTAVPFLAEAGDIKNYSCYKKLIAFAGLDPSVRQSGKFVGQSKISKRGNRHLRRALYLMASSVVRSNNFFRQYFIRKKKEGASAQKALFAVTHKLIRIIFAMLRNKTYFTLKEVSVNS

SEQ ID NO: 484312 - protein, 339 aa, unidentified
MERVYAGIDLHSSNNFIGIIDERDKRLFGKKLPNDTETVLKTLEPFRENLVGIAIESTYNWYWIVDDLMEEKFKVRLANPSAIRQYEGLKHTDDKWDAFWLAHMLRLGILPVGYIYPKEERPVRDLLRRRLFFVRQRTALILSLQGMITRNLGIRFSGNKVKSLTEHDAEEMFGHRCLVASAVSSITITRSLLVEIRGIEREIVSHAKLRPEFEFLQTIPGIGKILALTIMLEAGDIGRFPKVGNYSSYCRCVKSERISNEKLKGRGNTKNGNKYLSWAYVEAANFAIRHSPEARKFWQRKMAKTNRIVATKALANKLARASYYIIRDRVPFDSERLFG

SEQ ID NO: 484313 - protein, 322 aa, unidentified
MENEQQKPVVEFDQIVLRGCGLDVHEKTVVATIDGQGIRRETRTFDTFTSSLNELRSWLKQYGITHVAMESTGVYWKPIFNILEDSFEVILVNARHLKNVPGRKTDRIDSQWICKLLLGGLLKASYVPQEKIRQLRDLSRYSTKMVQQLAAEKNRLQKILEDANIKLSSVVSDTSGAVATRLIDGLIAGRTDLAQLIRECHHGKLKASQADLLKALTGRVTDHHRFMLKQIKKHMGWLEVEIGELEAQMDKLLEQDEESIELLTTIPGVDKAAARKIVAETGTDMGAFGSEKKLASWAGLCPGNNESGGKKKADEPPTATNT

SEQ ID NO: 484314 - protein, 389 aa, unidentified
MKKNTTARRQIGIVNKMKAKRVRKGNRQEKLTIGLDLGDRSSSYCILDEQGEVMLCGEIPTSKSGLDHLCKGLPASRVTLEVGTHSPWVSRYIAALGHEVIVANPRNVAWITKSRNKNDRLDAEKLARLARVDVKLLAPIQHRREETQRDLAVIRGRADLVEARTKLINCVRGLVKSLGERLKGCDSERVGEWLLESVSPATGRMALPLLRTVAEINAQIDAYDQQIAEIGKRYPEIELLTAVYGVGELTALTFVLTLEDPARFAHSRDVGAYLGMRPRQDQSGQRDPQLRISKEGDRHLRWMLVECAQCILRRRAVDSDLRRWGLAKLEEQDKQRQNQKNQKKKNRKKRVLVAVARKLAVLLHHLWVNGEVYDPLYQAKATAAESPAA

SEQ ID NO: 484315 - protein, 344 aa, unidentified
MMIIGCDFHPSWQQIAFVDTETGESGERKLIHANGEAERFYRGLSGEVRVGLESCGNSHWFVDLVSGLGHEIWVGDAARIRAKEVRKQKTDRRDAALILDLLMKDDFPRIWTPSKQERDQRQLLIHRYKLVMLRARVKNELQHLAMNKGMQKGCSLWSKEGQKLLKQLPLDYWAGVRRQNLLEMLKEMDQQIVTLDHAVKKAAEENEKARLLMTQPGVGPVTSLAYVLTMGDVTRFQRGKQVASYLGLIPREYSSAGKQRLGGITKQGNRFMRMLLVESAQVAVRYDSGFRSEYLHLCHSKPKAVAKVAAARKLAIRLFWMLRTHTPYPEVVHIESSSRVPLAG

SEQ ID NO: 484316 - protein, 361 aa, unidentified
MDGTMTWVGLDVHARSTHASAIDVVTGELTRARFGTGSEEVVEWLVGLPGPARVVYEAGPTGFALYRAGRAAGVAIEVIAPSKTARPSGDRVKNDRKDAELLARLAMAGQLTAVVVPSEFVEAARHLSRSREQVRGDLMSARHRVSKLLLAHGRVYEGTTTWNRAHRSWLGAQRFEQAPTELAFIDLLAAVDGLVARKDALDERLSRLATDERLWPTVARLRCFRGIDTLTALAVHLELGGDWQRFSSPRKLFSWLGLTPSLDQSGQSKTQGSITKTGSTYARRLLVEAAWHYTRQPRIGATVANRQAGQPDHLLQIAWRAQHRLHRLHTRLRERGKPHNVTTIAIARELAGFLWAAATAP

SEQ ID NO: 484317 - protein, 316 aa, unidentified
MQSILDLGADVDSRSVMVACSAGSFKPCRIANERRAIAAWVRKMPPGSRLAMESTGSYHELLADLAHGAGLQVFIVNARDIRRYGQGIGRRGKTDRIDAEVIARYIAREHEELHAYMPPTDEQRMLTKLISRRAKLVQAESSIKQSLGGLPALGIETRRLSRHIDQVIASVDLLMQRTVQQMPAVHEAAERITSSTCFGVLSSTYLGHRFTRVPYSTSDAVIAAAGLDPRPDDSGLRQGRRRLSKRGPAEDRRLLFNCARSAAQRNPWRPYYEVQLAKGLSKTAAAVVLARKMLRVAFAVYKHRQSFNPLLIEAKA

SEQ ID NO: 484318 - protein, 315 aa, unidentified
MSQPNPLCVGIDVSKATLDIAASSDVAQFTVSNDSDGFNAIITGLRRHSVALVLMEATGGLEVAVACSLQAEGFEVAVVNPRQARDFARAMGYLAKTDRIDARVLTQMAEVINRHPERKRFIRALPDAERQALAAMVVRRRQLIAMLVAERNRLHPFHPQNKKSINTIIKALEDELVRLEKEMDSHIRNHFKEIAERLSSIKGVGTMTVSAMLAEIPELGTLSRREISALIGVAPVNRDSGTMRGRRTIFGGRAGVRSALYMAALVATRFNPVIKTFYVRLLAAGKAKKVALVACMRKLLTILNAMLRKNEEWDE

SEQ ID NO: 484319 - protein, 466 aa, unidentified
MIRRLVGVDLGIASAHTVRVLAEDGREVCRRRCEPTVDSLSRVEAAALAGAPAGTVLEVVMEPTGPAWLPVAVFFTARGHLVFRVSSAKAADLRRFLSRHAKSNGIDADTLARLPLVDPTGLHRLELPGAEAAALDRRVRATDRLTMLAARHKVRIKDLTRQLMPCSPLTGELGVADLAVLQRWADPRALLAAGPARLTAVIVKASHGQLGADRARQWRAAAAAAVELYGDHPAIAWMDLAAEVGTEVRLLRVTQAELAAHAQERETAYRYTDLGGLARTLPGFATVGGPVLVAGMGRPARFGNGSAFKSYTGLAPRASETGNTDRKGQPMSKAGSSLLRTTLIRAADNARRQDPQLARIYYTRMVERGAEHLKALCVVAGALAERAWAVMNRQMPYVICDIDGTPVTPEQAKRIIAQDFTVPDEVRRRRRSSKTPGRNPIRPRPRVGEGPSASRTRRHEKSHTYT

SEQ ID NO: 484320 - protein, 450 aa, unidentified
MNLYIGIDIGKEFNYASFLNEKGVEIDKRFKFKNNYLGFLNLKDNIDKLTYDYNLKYDDILVGFESTGHYWINIDWFLTEKLNIKTAMVRNDAVRHTRALNSQGKGKNDSLDSRTIAECLKNGYYFDVQGRKEDYIVLRRLTRERSELEKEIARYKNRFRAWLDVNNPIFLENFSNVFSAGALALLKIYPSPLDIIKDSYLEVREKLREVGYTRTNKTLKIYYEEVQTYKNIINGISYADRLEISEYIEALEMYIKKKENLDERIEVLMNFLEGKVYTSLSEIKGMPKAQVASLIAEIGNINNFKSARHLLSYAGLNLQGEGSGKNKGYSWISKTGNRKIRKELYVITFNLVIHNDYFRGLYCYYKSYKRPNEKSSKEMLIALMCKLLRVVYGMLKYNVEFNLNEMLKNYDFRNINKEKFIDEFLGNSEKKQRIITQEIEDIFLNNRKSN

SEQ ID NO: 484321 - protein, 342 aa, unidentified
MQHYVGLDVSQKETAMCVIDDAGRIVFEGKARSEPGALARLIAKRAPHAVRIGFETGAMASWLWHELKRIDLPVVCIDARHAHAALSVRINKSDPNDARGLAELMRMGWYREVRVKSEESQLVRSLLVARARLVRIRRDLENQIRSLLKENGLLFPRAVGRQFRDRVRDLVSEDQPLRAIIDSLLAVHERVSDEQEALDGRVRGLAKTDQTTRRLMTVPGIGVVTALTFRHTIDDPTRFRAATSVGAYLGLTPRRKQSGELDLTGHISRWGDRLLRSYLFEAASVLIHRTKRRSPLQEWGQRLVKRIGLKKAKVAMARKLAVILHCIWSDGTEFNWGKPQMA

SEQ ID NO: 484322 - protein, 390 aa, unidentified
MQALYPRPDEHAAVRTDLKAIFVSLELSRSTWVITSLSPGGGEKMSKHAVPSGDVAALLARLSKLKEKARLRTGQVFPILVIQEAGLDGFWIHRVLQQEGIESHVVDPASIATSRRCRRAKTDRIDGEALVRALLAYKRGEPRVCAMVKAPAPHEEDRRRTSREREVLTAERVQHVNRIKGLLFAQGIGDYEPLHRNRRERLEELITGDGRPLPECLKAQIRRELDRLELLIEQIKAVEAERDALLAQAQASSGVPAPAAQLLTLKGIGPEAAATLWTEGLFRTFNNRKQVAAYAGLAPTPWQSGSVHRDQGVSKAGNPRLRTIMIQIAWLWLRHQPQSALALWYRARIKRTGGRLGKTMIVALARKLLVALWKYATAGVLIEGAVLKPA

SEQ ID NO: 484323 - protein, 322 aa, unidentified
MSEMLIERFVGIDVSKGSLDLFADPPAAKLPRHSAYEDSALKTLCDGLAVVAPTLVVVEASGGLEQRLASELAARGVALAVVNPRQVRNFARASGELAKTDAIDAQVLCAFARAIRPHARPPKDADTQDLADILARRRQLVDMRVQELQRQHTAKSSSLRKSLTEHIAWLDKRIERLDEDMGQRLMKSDVWRARDDLLQSIPGVGPVLSRTMLGLCPELGELNRREIAKLIGVAPLANDSGKHRGRRRIWGGRADVRRVLYMATQAAMRHNPTIRAFAIELKAKGKLPKVVIAACMRKLLTIMNTIVKTGQPWRQSAAPATA

SEQ ID NO: 484324 - protein, 387 aa, unidentified
MQVSTVDTPTAGYCGTIFVTIELSQKTWLVTLHSPDRDRISRHKLEGGDHAGLLALLERIRGRAAGKLGSAPKIVSCYEAGYDGFWLHRLLTAAGITNYVFDPSSIAVDQRARRVKTDRIDGETMLRTLMAYLRGEPRVVRIVRVPTPEQEDARRDTRERDRLTKEQTAHTNRIKALLRLHGFAVGQPRRRDWLSWLAAQRDWQGQGVPPRVLSEIENEHARLMLVRKQLAALARTPAAADPAPAVAEMVRRSELLQRLKSLGLVFAAKLTQEVFYKDFRNRRQVASYFGLAPSPWQSGGTDRDQGISKAGNPRARCSAIELSWLWLRHQPDSELSQWFRQRTLNAGRRTRRIAIVALARKLMVALWRYLTTGLVPAGAVLKSAEAS

SEQ ID NO: 484325 - protein, 463 aa, unidentified
MKHNSTRERKEKSARRSVSLLERIQPDAAGIDCGQNSHFVAVPPERDPQPVHEFRTFTADLHRLADWLMQCGVKTVAMESTGVFWIPLYEILEQRGLQVVLVNARDVHNVPGRKSDVKDCEWLRELHSVGLLRASFRPAAAIVPLRSFMRQRETLVEEAATRIHRMQKALSEMNLKLHTVLTDLTGQTGLRIVRSILAGERNPERLAAHRDYHCHASQAEIVAALTGNYRTEHLFALRHNFATYEFLLKQIAECDGEIEALLTTLAAQQPPPSAPLPAARRRRASKHQPQFDIRGPLHRLTGGADLSQIDSIGPQTALQLIAEIGTDMRRWPSEYHFASWTSLAPNNRISGGRLLSSRTPPSANRVAAILRRCAMSVGKTSTALGAFYRRLAIRIGKAKAITATARKLALLVYRVLSGQLVYNDPGADAYHQLNRTRELKSLRKRARLLGFHLVDQTTGEVTT

SEQ ID NO: 484326 - protein, 369 aa, unidentified
MDHHSVAYVGFDTSKTKHAVAVAEGGREGEVRYLGEIEAAPAAVERLLGKLERKYKTLHVCYEAGPTGYGLYRHIRALGHACDVIAPSLVPKRPGDHVKTNRRDAVTLARLLRAGELTPIWVPDEVHEAVRDLVRAREAAAQDLRHKRQQVLSFLLRHGRIFTGHRHWSRAHLRWLAGQAFNHPAQQIVFQDQVDAVADAQARLERLDRQLTDVVPTWSMAPVVAACQAMRGVSFLVAVTFVAEIGDVRRFESPRQLMAFLGLVPSERSTGDTVRRGGLTLAGNRRVRRALVEGAWSYRHPARVTETIRVRLAGLPKAVREIAWKAQVRLCTRYRRLIAAGKKAPVAVAAIAREMAAFLWAIGRVVEPA

SEQ ID NO: 484327 - protein, 367 aa, unidentified
MFTERTSVGLDVHARSVAAAAIDGVTGELVQCKLTPSYEHIRSWIADLPDPVAVTYEAGPTGFGLQRVLMAAGIRCEVAAPSKLQKPSGDRVKTDAKDAVHLARLLRLDEITAVAIPSVDQEAARDLVRAREDCSGDLMRARHRLSKLLLRHGIVYYGGDAWTGKHDTWLRHDAAPQLVSRGTRLAFDSDYETVIAVKARRDRLDLAIAEMASESEFTELVRRLGCLRGVSTLTGFALAVEIGDWHRFTGNTIGSFVGLVPSEYSSGNSRVQGSITKTGNTHVRRLLVEAAWHHRARYTVGKTMRDRWELAPSAARIRGDEGNRRLHQRWVKFIERRKRHTIANIAIARELAGWCWSLAVLEEHPQH

SEQ ID NO: 484328 - protein, 314 aa, unidentified
MSNKVVVGIDVSKSRLDCFALPLEQAWSCDNEQVGIEQLVQRVQQLGGELVAMEATGGYETQAATALAAAGLRVAVVNPRQVRHFAKAMNQLAKTDRIDARVLAEFALSINPQVRPLPDEGTRELSDLLARRSQLVAMRTQEKNRMLQAAPALRAGIKTHIKWLEVEIAKLEVDLTAKLRASEAWCDKRDLLLSVPGVGSTTTLALLAELPELGQLNRQRIAALVGVAPLNDDSGKRQGRRFTWGGRAAMRSVLYMAALSAMRHNPVIRVFYQRLRANGKPFKVAIVACMRKLLTILNAMVKQHKPWQPQSKPT

SEQ ID NO: 484329 - protein, 344 aa, unidentified
MKVSVLGIDLGKNVCSIVGLDASGAVILRRRAKRETLIGLVAKLPPCIVAMEACCGAHHLGRLFARQGHDVRLMSPEYVRPYVKAQKNDDRDAEGIAEAATRPTMRFVELKSQEQLDMQTLHRSRDRLVAERTALINQLRAILLERGIVIPQGKRKLEQYLVTLMDEQDAQGLSPRMRMLIVDVRVQWQELDRRIGVFDREFAAFTKDNEDARRLATIPGVGVMIASALIAAIGKAEAFEHGRDLAAWLGLVPRQSTTGGKPTLLGISKRGNKYLRKLLIRGARAALPHIAERDTALGRWAKGLLARVHQNVAVVALANKLARIAWAVLRREEKFTAKGSSLAA

SEQ ID NO: 484330 - protein, 325 aa, unidentified
MKARRQGHEQLLAWARSLSDERLWALEDCRHVSVSLERFLLASGERVVRVPPKLMAGTRRSARTRGKSDAIDALAVARAALREPALPVARLDGPEREIRLLLDHRDDLVGERTRTQQRLRWHLHELEPELELPAGCLDRSRWLDRVGRRLARAEQTAQVRIARELVRRIAELTRRANELERELASLVAAQAPALLELPGCGTLTAAKLLGESAGAERFRGDAQLAMHAGAAPLQASSGNRNRHRLNRSGNRQLNCALHRIAATQGRHHPPARAYLARKEAEGKSRKEALRCLKRHLARTVYRTLTAPTKEKMKASNQAALTPALT

SEQ ID NO: 484331 - protein, 337 aa, unidentified
MKRYLGVDLHRTQMTVCTRLESGEESVREWAIKDLPEFAEQLRAEDEIAVEATGTTGRFYDAVVGRVARLVVVNPHKFKIISESVSKTDGKDCRELALFLSKDLLPEVRMKPKKQRELAHMTETRDLLVKQRSALKGKINNLLAMQGINLKREALSSKVALERGMGLEVSAMVKLELRVLVEQIRALSASIGELEELIAEEGEQLPGHRNLTSIKGIGSLSATVLLTTIGSVGDFADENKLAAYLGLVPRVQNSNATERNGAITKMGNKLARTALVQCGLVAKRYSPYLNRFYQRIKERRGGGKAKIALARKMVKIVYDTLKNNWVFDDFPSFTLAA

SEQ ID NO: 484332 - protein, 337 aa, unidentified
MNNSVIGLDIAKNIFHLYTFVEGKAVKKKLKRAKLLAYFANYQKSLIGIEACGSAHHWAREFIKLGHEVVLLNARYVKSFVVGNKNDFNDAAGIFDAVTRPNKRTVAIKTIAQQDIQLVHTVRQGLVGKRTALVNQIRGLLSERGIIIPKSINQVRKQLPLILEDAENDLSHLSREIFAEQYTKLAVLDQEIKEQDQRINQLCKNDATAKRFLAVPGVGPMTASIVASDIGNGKGYQRSRDYSASLGIVPRQHSSGDKQVYLGISKRGNRYIRTLLIHGARAVLKNCSKKDDKLSLWLQALIERRGFNKAAVALANKNARILWAMANQDKEYNALLA

SEQ ID NO: 484333 - protein, 373 aa, unidentified
MKYSTVYVGMDVHKETFSVCCYTNEKEEAEYCQTMDAQYSKVLNYIESMRFHYGEEAMFICGYEAGCLGYTLYHQLTDHGIKCVILAPTTMSKPTNEKKMKTDRRDARLIARCLAHHDYKSVYIPTEHDEQVKEFIRMRDDHNLALKKIKQQILSFCLRHNYRYEGSKQHWTQKHLDWLRGLELEEIYKEILNEYLLTYQTLVDKIERLDRRIEYLASDEAYNDKVNKLVCFLGIKTHTALSVIVETGDFKRFKDARSYSAYLGLVPGENSSGPKKNGLSITKAGNRHIRRLLVETAQSYTRGQVGYKSKALKARQKGNAADVISYADRSNERLRRKYYNMTLRNNKKTNVAKTAIARELSCFIWGMMTANYI

SEQ ID NO: 484334 - protein, 383 aa, unidentified
MLIIGCDYHPGFQQIAFVDTETGELQERRLQHREEAEKFYRDLAAQGMKVRVGMEASGHARWFERLLAELNIELWMGDAAEIHRKRERKQKTDRQDAQHILRLLLKDDFPQIWVPSWENRDLRQLLWHRHRMVQARTRMMNQLQAVALNEGLRYKKRLWRDAGRKQLEAFRLAPWASRRRHDLLELLDHLNPTIAELTQAIEREVEKCPEARRLQTHPGVGPLTALAFVLIIGNADRFQCGKQIASYLGLVPLEDSSGNRRRLGHITKQGNSLLRFLLVEAAQVTARSLPEWRSKYVHLTMRRGRKIAKVAMARRLAVRMYWMMRKGWDYEQVKKFGSQGRKSGSHAGVPSASTRYPRLRSSRIIRLVRLRLDFAFTAGPRSS

SEQ ID NO: 484335 - protein, 372 aa, unidentified
MGWTPPHPIGTYMPDWELVFPVTTEKESEMKLTRVGIDLAKNVFQVHGVDEHGKLVWKRQLKRATWLQVLLDRAEPSCVIGMEACGGAHHWARELQSRGYTVKLIPAQFVKPYVKSQKNDAKDAEAICEAMSRPGMRFVSVKTVEQQDIQSIHRVRSLLMSERTAKANQIRGLVAEYGLVAPQHMSPLRQAIPGWLEDAENGLTDRFRSWLHELWNELLRLDQRRKALDAEIKRISDTHPGAKRLKQLRGVGPLVATALVARFGDGRHFQRGRQAAASVGLTPRHHGTGGKNRLYGITKQGDRYLRSILIHGARAVVWQSKRRDDRLSLWLTELAARSHPNVAAVALANKTVRIAWVMLRHGTDFDPELAVA

SEQ ID NO: 484336 - protein, 414 aa, unidentified
MAFARWVGRAIGLDVHRDFCVVAICEDGQVRTAGRVPSTPEGLQTLAANLVRSDRVALEVTGSCWEIARILEPHVERVVVVSPDDTGITRARAKTDRLDARTLAQLLWSGELESVWMPDERCRVLRRRLARREQLVRSRSRAKNEIHAVLQRRLQGKPPCSDLFGVKGRRWLAGLELPVEERESVDAGIRHVEFLDSEIAAVERLIAQQALNWPEIRRLMTVPGVNLICAATFIAAVGNPSRFLSSRKLVAYLGLDPKVRQSGEAPARSGRISKRGSAAARWALVEAAWSVVLQPGPLHAFYDRTRARRGHGKAIVATARKLAVLFWCMLCRGEDYAHQQPSLTKKKLRRLELTAGAPKYANTARGVWSTNQAIRKAERELATQAEASYKRLVTDQQAGAPARKVGASATPERA

SEQ ID NO: 484337 - protein, 328 aa, unidentified
MCKGILYVGVDVGQEDLWVAIEGRKPCSFKHTIAGVRGLYNLVHKIYTETTLHFCMEATGVYSLKLATSLSVYPEVQVSIVNPAQIASFAKAQLRRSKTDKIDAQVILAFAQSQHPQPWAAEPKSLRQLYELVVQADALLETQRRWVNRVHTQTYVPELPTVVSKTTSALKKHLERQIAKVEKAILKLCETDPVLKTQMELLCTIPGVAQRSASRLLAYGKIALTGYSARALVAHAGLAPKHRQSGTSLLAKSHLAKEGNKRLRHALYMPALVGIVHNPLLKKYYKRLVAKGKPKMLALVACMKKLLIMIRAILTQKIPFNPAIQSLT

SEQ ID NO: 484338 - protein, 345 aa, unidentified
MEYYAGIDVSLETASLCVVDATGRIVREAKVPSETEVLIDWFRNLGFAVARIGLEAGPLSQWLYAGMRDAGLMVELLETRHVRAAFKVMPVKTDRKDARGIAQLMRLGWFRPVHCKSLPAQEVRALLTARKLLQTKNHDVEMSLRGVLRGFGLKVGPTTPRTFEGRVRELIASHPTLSVVAEALLAARATLFAEWQKLEKRLRSLARDDRRVRLLMTAPGVGTIVALIYASAIDDPARFRSSKAVGAHFGLTPKKYQSGETDVTGRISKIGDGGVRTALYEAANVILTRPVKGSALKSWGMRLAARAGMRKAKVALARKLAVVLHRMLADGTSFFAEKAAAAAAR

SEQ ID NO: 484339 - protein, 351 aa, unidentified
MKSINKQVQGEELFVGIDLHKHRWHVTIRTADVGIFSNSIAGRWQELKKVLNRYNGCRIHAVYEAGCFGFWLFDHLTNFGVDCIVTPPSLIPQEHGNRVKTDRLDSRKLARLLAKGLLKSIWVPSAQERFHRQVIRRRRQLVGDRVRTQNRIKSELCFYGIDLPTPRSKWSQVYFANLQRIKFKNHWMQKSFNQLLEQYEFLSVQIDKQTQLLKQLAKLPLYCDRVKILCSIPGIGILTAMEILLELQDFSRFRRAQQLAAYVGLTPSQYSSADKIRMGRITGAGKNTVRSALVESCWILIRKDKAMRKKYEQIKARAGGKRAIVAVSRKLILCIRRLLLDNRPYVYESVS

SEQ ID NO: 484340 - protein, 356 aa, unidentified
MDKVIREGAVRVGVDLAKRVIQVHAVDATGHVLTSRALPRARFIDWCVRLPAGCVVAMEASSSAHHWARKLVALGLDARIISAQLVEPYRMEGASGKNDANDAAAICEAASRPKMRFIPVKSIEQQSMLCVHRLREGFKEDRTACINRIRGLLAEFGLVFPQSPRELQAVLSDVLEDAGNELGTLARLTLQRAQAQWRELDDHLAWCDERIDAHRRSNPEVQHAATLIGIGPVTASAAIATVGDFKQFKNGAQFGAWIGLTPRQRSSGGKNNLGGITKRGDTYLRTLLIQGAKSAVMTAHRRHDKISSWVLALRERSGWQKAVVALANKNARILWAVMTRGDVFDPNHLSVKPTAC

SEQ ID NO: 484341 - protein, 367 aa, unidentified
MKKVSTTQTKLSRNISQPGRTIGLDLGDRNSWYCALDETGQIELEQRVRTNAKVLQEVFGAMPRSRIALETGTHSPWISRLLSELGHEVIVANARKVRLIGESRKKDDRLDAQTLARLARIDPQLLCPVKHRSAKAQADLTVIRARAGLVRARTSLVNTARSLTKSYGERLRGCNVRNLDPEKAEGLSPELQRALEPLLSAIAEVSERICEYNDRIEALAQASYPQVELLKQIKGVGTLIALTFLLTLEDPHRFSKSRDVGGYLGLQPGRRNSGQSAPQLHISKEGDPYLRTLLVQGAQHILGPFGIDCDLRRWGLKLAERGGRNAKKRAIIATARKLAVLLHHLWVSGEVYEPLHNRRPTTVAAAA

SEQ ID NO: 484342 - protein, 274 aa, unidentified
MKATTIGIDLAKEVFQVHGVDEHGKRLFNKQLKRSQIASFFADIPPCLIGMEACASAHFWANKLQGLGHTVKLMAPQFVKPYVKTNKHDAADAEAICEAVTRPNMRFVPIKSPEQQAVLALHRSRQGFIKQRTAQANQIRGLLAEFGIVMPIGIHQLLRRLPEILEDAENQLPSLFRVQLSLLQKHIEYLFDVVSTLDKQIEQCHQQNALCQRIGKIPGIGPITASALIATIGNANNFENGRQLAAWLGLVPRQHSSGGKQVLLGISKRGDTYS

SEQ ID NO: 484343 - protein, 346 aa, unidentified
MKIIGCDYHPSWQQICWVDTVTGETEEKKLDHASGEAEKFYRGLPGAALIGMESTGNCQWFVEMATTAGHDVWIGDAAKIRAGETRQQKHDRRDAALILRLLLEGRFPRIWTPSGAEKDLRQLLIHRYKLVRIRAQVKNELQHLAMNQGVTKKARLWSKAGEQVLRELPLKPWASRRRTDLYKVREMLNEQIGSLDLAVGEAAEQNEKAKLLMTQPGVGPITSLAFVLTMGDVRRFQRGKQVASYLGLIPREYSSGGKQRLGSISKQGNRFMRMLLVEAAQSAVRYDPQMRSEYLHRCHQKAKGVAKVAAARKLAVRLYWMLRSNRPYPEIVHVESSSRVPLVSAS

SEQ ID NO: 484344 - protein, 355 aa, unidentified
MCQQKYIGMDVHQATISVAVMDGNGKLIIECLLETKAATILEFVQGLHGTLSLTFEEGTSAAWLHDLLKPHVSRLVVCDPRKAALLKEGNKSDRIDARKLAELLRTNQLKPVYHGEHGIRTLKELGRSYLTVSKDVTLTMNRIKSLYRSWAIPCPGTTVYAPRHRLEWLAKIVQPGVRVRAEHLYEQLDNLQPIRQQARRELLRESHKHSAVKLLRQIPSIGPIRAALLVALLQTPHRFRSKRQLWAYSGFAVETHDSGEYRYVRGKVQRNRERITVRGLNDNHNRDLKNLFKGAAISASTRPGPLHDFYLARVAKGMRPTMARLTLARKIAAITLTMWKKGVSFDPQQLSRQAV

SEQ ID NO: 484345 - protein, 356 aa, unidentified
MERYIGLDVHAASCTLAVISQAGKRLKDFPVETNGQALVEAVRMIPGHKHLVFEEGLQSAWLYETLCRHVEEIVVAGVPRSRGQKNDRRDAYGLAEKLRTGTLDKRIFKAPRQFSVLRELSRVHMTVVRDVVRVQSRLKSLYRSRGISVSGPSVYSARHREAWQKRLPSSARTRALRLYAQLDFLTEQKKQAEHDLLRESRKHRIVRILETAPGFGPIRSARLVPIVVTPHRFRTKRQFWSYCGLGIVTRSSSDWVRTADGDWMRAPVQQARGLSRQYNHVLKDMFKGAATTVITQRNKDPIYGNYACMLDAGTKPNLAKLTLARSIAATVLRMWKDEEAYQPEQHRGSIEVDRSA

SEQ ID NO: 484346 - protein, 341 aa, unidentified
MTEVATIGLDLAKNVFQAHGASASGTVVFRKKLRRDRMLTFFAAQPHCLVAMEACASAHYWARELTRLGHDVRLIAPAYVKPFVKRQKNDAADAEAICEAAQRPTMRFVAIKSEAKQALAVVFRARDLLVGQRTQLINALRGHLGEYGIVAPQGPSHVDRLIGEIEDPNSIVPESARSCLQLLVDTLRALRDRIDHLDAEIATRAKQDEGARRLMGIPGIGPMIATALQALAPPAETFRSGRDFAAWVGLTPRQKSTGGKARLGRTSRMGERTLRRLLIIGASGVVRWAKRKGVPQGTWLSGMLGRKPPMLVIVALANKIARVAWALIAKGESYRTPAVAA

SEQ ID NO: 484347 - protein, 349 aa, unidentified
MIIIGVDFHPEFQQIASVDTESGELQEQRLQHREEAESLYRELAARGVRVRVGMEASGHARWFERLLGELPIELWIGDAAEIQRKRVRKQKTDRQDAQLILKLMLKDDFPRIWVPSWENRDLRQLLWHRHRMVQARTRIMNQLQAVALNEGLRCKKRLWRRERQRLESFPLAPWASRRRHELLELLDRLNPTIAELSQAVEQEVEKCPEAQRLATHPGVGPLTALAFVLIIGKAERFSCGKQVASYLGLVPLEDSSGNRRRLGHITKQGSSMLRFLLVEAAQVTVRSLPEWRSKYFHLMMRRGRKIAKIAMARRLAVCLYWMLRQGSDYQQWNKFGSHAGQPGNRHGVQ

SEQ ID NO: 484348 - protein, 346 aa, unidentified
MTIVDRAVVCGGVDTHLETHVAAALDGVGGVLGVESFPTTESGYGELLAWLAGFGPVWRVGVEGTGSYGTGLARFLAERGVDVVEVDRPNRQLRHRRGKSDPTDAVAAARAALSGQATGRPKSRNGPAEQMRVLLVARRSARDQRIQTLNQIRHLVFCAPEPIRTRFLGRYQRGMLSEMARMRPRAGSDPVTYVTLCTLRDLARRIKALNAETKQIRAQLGGLVAEVAPALLELPGVGPETAAELLVAAGDNPHRIRSEAAWAHLCGVAPVPASSGKTIRHRLNRGGNRNANSALYRIVISRLSCDPRTQAYVARRRAEGRTNGEIVRCLKRYVAREIYKLLPRDA

SEQ ID NO: 484349 - protein, 466 aa, unidentified
MKPFYLGIDVSKGYADFMIINSKKQPVVQCFQLDDTFDGHRSLYNILGRFLVKHSDSTLFAGLESTGGYENNWYNSLIEFQGSLEIQTARLNPFGVSHNSKADLKKNTTDKISAQNIAEYLVAHSEKVVYQQQDRLAGLRKQWGFIKMLTKQCSQLLNQLNGLIYSANPELLSYCQNGVPGWVLKLLVKYPSAANLKKVHAKTVAKIPYVSREKAQQLIANAKRSVASTKDIITEQLIVATAQQVLHLKKTVADQSNSMLCECSIPEIELIKTFTGISDLSAVGLIIEIQTIKRFANAKKLASFFGVHPVYKISGDGVGGIKMSKQGRKAPRQILYMVALSAIQHNPLIREIYEKHQKQGKHNMAIIGICMHKILRILYGMLKNNKPFNPTTDIANRLRSVRLKNDTPVDNKNRRFQKYDQQAPVSRRQRKKRLERERSQSACDTHSGITAPVPLANVIADILPQL

SEQ ID NO: 484350 - protein, 387 aa, unidentified
METVNPVGQAQSSVSAEAVTLFVSLELSRARWLVTSLSPGSSKISRHSVVGGDSRDLLRLLADLRMKAERHIGATVRVVTIQEIGFDGFWIHRVLASNTIESHVVEAASIAVPRRRRRAKTDTIDGELLLRTLMAFKRGEPRVCAMVVVPSPDEEDQRRLSRERKTMIKERIEHINRIKGLMACQGITGFEPMRANACEKLGELRTGDGRAIPERMKAEIRRELDRLELLRRQIAAVEAERDALLHTEETPNRSPGAQLLKLRGIGPEFASVLWQEGLYRRFANRRQLAAYAGLAPSPWRSGDMKREQGISKSGNARLRTTMIEAAWLWLRHQPGSALSRWFQERVRADRGRLRRVSIVALARKLLVALWRFTIHGEIPEGASLKAA

SEQ ID NO: 484351 - protein, 411 aa, unidentified
MRLFVGDDWAEDHHDIEVMDEAGKVLAKRRLPEGVAGMTQLHALIGRFLPEDADDAEVVIGIETDRGPWVAALIAAGYTVFPVNPLQASRYRERQGVSGAKSDGGDAHMLADMVRTDSHQLRPAAGDSPGGQGVKVVARAHKTLIWDRTRAVQRLRHQLREYFPAALEAFEDLDAPDVLELLGKAPDPARASKLTRAQVAAALKRARRRNIAGKTDAILAALRGEHLSQPAALTAAYAATVRSLIAVITTLNEQVKILEEQVREHFGRHPDAEIYQSQPGLAAILGARVLGEFGDDPRRYVTAKARKNYGGTSPVTRASGKKKVVAARFIHNDRLVDALMSWAFSSLKASPGARAFYDEQRAKGLQHSDALRRLANRLVGILHGCLKTRTLYDEATAWGHRENLPQSSVAA

SEQ ID NO: 484352 - protein, 345 aa, unidentified
MQYFAGLDISVKETSVCIVDAEGRIVRETKVPSHPEDLLRVLSESGHQYRRIGLEAGPLSQWLYSALAEANLPVFCIEARHTRAFLTAQINKTDRNDARGIAQMMRVNIFRPVHVKTITSQKQRALLRARKMLQSKAMDIENDLRGILRNFGLKVGIVSTLNFEQRIRELIDDDEELLAIVKPLLAARREIRSQFNILHRQLLAIAKNDGICRRLMTVPGVGAVVALAYRSAIDVPARFQNSKAVGAFVGLTPASHQSGEKSRVGKVSCSGDTMVRTLLYEAAVTLLTRGQKWSWLRAWGMRIAKSRGVNKAFVAIARRLAVIMHRMWQDQTDFRWAKEERAATT

SEQ ID NO: 484353 - protein, 374 aa, unidentified
MADYSEVFVGIDTSKLRNAVAIAEGGRNGEVRYLGEIDNTEAATSKLVKKLAAQHRRLTFCYEAGPTGYGLHRLIKTLGHECVVVAPSLIPKKPGDRVKTNRRDALNLAKLLRAGELTAVWVPDARHEAMRDLVRAREAAVDDLKSKRQQVLSLLLRLGRHFTGKRTWTRAHMNWLVSQKLAHREQRIAFEEMLLAVRQANERVIRLERAIAAAVPDWSLAEVVPALMALRGLDLISATIFLAEIGDLSRFASPRQLMAYLGLVPGEASTGDRVWRGGITKAGNHRARRILVECSWSYRHPPRVGKKKLAKVEAAPPAVQEIAWKAQARLTARYRALARRGKRPTLVVTAIARELSGFIWAVSRAVGTPATPAR

SEQ ID NO: 484354 - protein, 418 aa, unidentified
MLVAGIDIGAESHHVAVVDRAEAVVVKATAFAENAAGYQELFALLARAGARGGADLPLAAASAEQERTLVVMEATGHYWQNLFAALVAQGYAVALVNPLRTHRFAGEELARTKTDSIDCLQLARFGAQKRPAVTCLPEAAVGELCELVRLRARLMQDVVDRVNQLHRLVDLGFPEFTRYLKNLNTQLATAILRQYPTAAAFRGLSCKRLARLSYDGRHRVGEELARQLIAAAAVSVGSQHTTAHQTGVRYACEDLETLRQRLKRLDGDITAGLQQHQVGKILTTIAGIGDNTAAMLIAELGDPARFHSAASLAAYVGLCPGHRHSGQHQPKSSSLTPIGNRRIRQALWMPTLSAATCSNAWLMAFYRRLIERGKPHKLALIAAMRKLLAAIYSVAKHRRPFVPFLHSQPLDDEVPARL

SEQ ID NO: 484355 - protein, 414 aa, unidentified
MERVYERCAALDVHKAQVTACVHVPDRQGKRAELCAEFSTMTAELLALRDWLKGLGVTHVAMEATGVYWKPVYYLLEDDFELLLVNAQHVKNVPGRKTDVQDAQWLCQLLEHGLVRSSYVPPKPIRELRDLTRYRKSLVWERAREANRLHKVLEDANIKLDCVASRPFGASGKAMLKELCEGNNDPVALADLAKGKLRAKLPALHQALEGRFRDHHALLVGHLLAHIEYLDQTIAELSEEIEERMRPFEHKRELLCTIPGVAERTAEVIIAELGPDMERFPTHRHAASWAAICPGHHESAGKRYSGRTRKGDSWLRTALIEAAQSAAGRTKDTYLNSQYLRVKRRRGHKKAIVAVAHSILVAAYYILRDQVPYEELGGDYFVRREDQDRLTRRLVRQLERLGQHVTLEPALEAR

SEQ ID NO: 484356 - protein, 333 aa, unidentified
MTGRFIGVDLHKRFCVFTELDTMGNILRRGKFGNNLEEVANFASSLSKDVELAVEPVLNYLWFLDQVEPYVKAVHPTNPYKTRVIAEAKCKTDKYDSWVMAELLRINFLPESYYIPQAIRIIRELIRRREYLVRLRAGFKSKIRDLAFKEGVIIKAKDISSVKAKTEIARNYLSPSTRQAIAQYQDLISLFGEQIKPLEQRIESSCQGIKEIDLLMSIKGIGRLRAVIIYAEIIDINRFATRKRFASYAGLIPIFRESGDKHYGGGLTKTGSKPLRTALVETAIFAVRHYPGLQRLHSRVRFRSCPQKARIAVARKLAIIIYAMLKKNTPFNG

SEQ ID NO: 484357 - protein, 442 aa, unidentified
MSVRKRVFELTHPNAAGIDVGAASHFVAVPPDRDEQAVREYPSFTEDLNRLAEWLRACEVDTVAMESTGVYWIPLFELLESRGFTVYLVNARHVKNVSGRKSDVLDCQWLQQLMSFGLLSGAFRPQGEICALRSVARQRAMLLSYQSRHVQHMQKALTQMNIQLAQVISDVVGETGQRIIRACLAGERNGQVLAKLKHFRIRATEEEITKALQGNWREEHLFVLKQAVALYDAYATELAECDRQLESMLAALARHNREPGKAKRRARAKNAPRFDMRTYLFRLCGVDLTQIDGIDVTTAFKVVAEVGADLSRFKTAKHFASWLGLCPGTKVSGGRILSGATKRTANRAAQALKLAAASLRSSRSALGAYYRRLAARMDKPHAVTACAHKLARLIYALLTKGEAYVDQGQAHYEERYRQRVLRQLTKTARKLGFQLIPNPQSA

SEQ ID NO: 484358 - protein, 422 aa, unidentified
MEEEVYYRRCAGIDVHKKLLVVCLRIGRKSAVREFGTLTHEIRDMVAWLKSNGCQMAAMESSGSYWKPIYNIFEQAGMPVMVCNAYHIKNVPGRKTDVNDAQWIARCLSLGLLNPSFVPDRDQRELREMTRFRKSQIEERARNINRLQKFLEGANVKLGSWLSDIEGKSATKLLELVIGKADFTVEDVAERMHGKLKSSSKELFLSLEGSITQNQREFFTHVMAVIREQTAQIEKTDAMIQRSLNTNYKAAVQALDAIPGIGRVSAEQILAETSADMSHFRNQHSLSKWAGVCPGNNESAGKRKSGRTPPGNKTLKSTLTQCAKAAKNKKDSFFNAQYSRLLTHRGKNRATMAVAHSILIAVFFVLKGAEFKDLGANYYNQFNRERKILSHVKQLSRFGVAIPSEILKDALRRPPDPRSRSA

SEQ ID NO: 484359 - protein, 331 aa, unidentified
MKIRETVGIDLSKSTLDACIHSNQLFAKFENSNKGFKELVKWVSKHSAHEASETLFVFEHTGRYSHNIGRFLSKHEVKFVIVPGLEIKRSLGITRGKDDKADAARIALYAYRLRDELKPTKLPEKQLTTLKRLLTLRDRMVRQRAGYKASLGEDKRIFCDKEDHCLFECQDNLIEELSKQISQVDKEMMKIIHGTKKLKKIYKLLLSIKGIGTQTALYTIVYTAGFTKFKTWRKFASYCGVAPFPHQSGTSIKGRNKVSNLANKKIKSLLTMCVGTAIQYNPEMKAYYERRLKEGKEKMKAQNIIRNKLLARMFVVVKRGTPYVNTMKYAA

SEQ ID NO: 484360 - protein, 339 aa, unidentified
MYPFYLGIDLHLKRTYMVLMDAKGEIIDKGRISNQEIRKYLQEKVPQETYAVLEATRNWPFMYDILNEHVQKVDLVHSKGVRAIATAAVKTDQIDASTLAHLARMNYIPKAYAASKEMRDLRQLLRHREWMVNQRTKAKNRIHAALASYNLVSPVTDLFGVAGRAYLAEVMEKELRPAARQVVADHLALLDHLGERIHSLEKSISLNERQNHIVKLLMSMPGVGRLIALTILAEIGDISRFHKPKSLCSWAGLTPRVHNSDAVVQHGHITKEGSRYLRTAMVRAATTACRVSPRWYVTHEHLALRCGRRAARVAVARRLLTVIYFMWKRDQPYQENYGQ

SEQ ID NO: 484361 - protein, 416 aa, unidentified
MFAVGVDVANGRSMVAVLDGMRNMVAKPFEVVHTAQGFAALVEKLRQLDGEVRIVMEHTGRYYESFAMSMHRAGFFVSAVNPLLIKNYQGSINVRKVKTDKADAQKIAQFALDKWTILPHYTPMDTIRYNLKTLHRQFQLASKTKTALSNNLIALLEQSYPGANRYFDSPVRTDGRQKWVDFVDTFWHVDCVARSSEHAFVERYRKWCKRHGYVFSEQKAIQLHADARQKIPLVPKSDTCKLLVREAVSQLNAVSRTVETYRAEMDRLASQLPEYETVMGMTGVGKSMGPQLMAEIGDLRCFAHQKSLVGFAGTDPIKEESGDKVSQSAPSSKRGSPYLRKTLFVIMTILLQLQPQEDPVYQFLDKKRSEGKPYYVYMTAGGTKFLRVYYGKVRDCLKAKGLWEVPASASQEVNPG

SEQ ID NO: 484362 - protein, 408 aa, unidentified
MIYCGIDWAETHHDIALIDDTGMLLAKRRIMDDAAGYRLLLDLLAEYGDTQDAPIPVSIETSRGLLVSVLRQGKRKVFAVNPMAAARYRDRHGVSRKKSDPGDALVLANILRTDMPMHRPLPDDSDLARAVAVLARAQQDATWNRQQAANQLRSLLREYYPAALQAFAVWQNGLCRPEARVLLAVAPTPAKAASLSLAQLRSALKRAGRVRGIDAEAQRLREVFRADYAHQPPLVEDALGKQMLSLLRQLDAACTATDDLAKAVEESFREHPDAEIILSFPGLGPQTGARVLAEIGDDRSRFADARGLKAYAGSAPITRASGKKHHVGRRMIKNNRLHNTGYLWAFASLTASPGANAHYRHRRAVGDWHAQAQQHLFNRILGQLFHCLKTGEQFDEHQAFPSFPAVAA

SEQ ID NO: 484363 - protein, 338 aa, unidentified
MELMQLYAGLDMHSKTTTGTIKDDAGNSVRVLEVETSKEGMKKLFKRFKRCQIKAVFEASKNWPYYKGLLEPHCKEIILAHPLRVRAIASARIKTDAIDSNVLADLLRTNLIPESYMPSLEIVQLRELLRYRATLSKERGKLKAKVKSILAREGKTCEFADVTGKRARLWLNNVVVNNLNRREINYMVSLIDNMSKEIKLLDEQIEKEQYKYPEVELLKSIIGINTYSAMLIIAEIADFSRFDSPHKLTAYAGLVPSTYQSSSTQYHGRITKLGSKWLRWILGQCAHACVKSRKSHKLKRFYNRIKKRKGEQKAIVATARKMLVVIWYLIYKNAYYTY

SEQ ID NO: 484364 - protein, 409 aa, unidentified
MRYYLGVDWADQTHAVWVGDERGTKITARTVPHTAEGMIEWGRELDEWRAQKLELWAAIERPEGRVVDFLLDHGVVVYPVNPKALDRARDRFRQGGAKSDPFDARVLADFLRTDHPRLQALQPSSEAAQELKFLTEDCQRQIRQQTRLVNQLTNTLKAYYPRGLEVAELTTALAREFLQAYPTPAAVAALTERQWQRWARAHRLSEARTQELWAVLQRPQLPVPPHVVRAKARLMHILLAELELVVAAVGTYRQAVEDFFAALPAAQWIRTLPIGEHGVTAPTLWARLGDAPGRWESFHHLQAHAGAVPVTVKSGKQQVVHFRFACDKALRSVVDQVAFLSLRSSEWARAYYDQQRARGHEHREALRALGAKWVKIIFVLWERQVPYDESYHLATMARQQLRQRPKKLA

SEQ ID NO: 484365 - protein, 340 aa, unidentified
MDEVSIVGVDLAKQVFQVHGAAQDGRVLFRKKLSRLQFPKFMAALPPCVVAMEACGTAHYWGRQLSGFGHEVRLIPPVYVKAFVKRQKNDAADAEAVAEAAMRPTMRTVALKTSDQQARAMLFRTRDLLVGQRTQMVNALRGHLAEHGIIVGKGLDKVDRLGALITSENLPELVQSMSRLYLGKIEQLYVEIDQIDRLIASEARKSDVVRRLQKMPGIGPICAMAITAFAPSMQEFRCGRDFAAWLGLVPRQHSSGGKQKLGRTSKMGQRDIRRLLIIGAMSVVHWKGRGGGKPGSWLSNMLARKPRMLVAIAMANKMARTVWAMLARNEEYRDPTGSVC

SEQ ID NO: 484366 - protein, 337 aa, unidentified
MNYSGIDLHSNNSVVSVIDETDRVVAEKRLPNDLAKILAFLAPWRAGMAGVVVESTFNWYWLVDGLQTAGYVVHLANTTAIKKYDGLKHSGDETDARYLAHLLRLGILPVGTILPARLREVRDLARKRMQLVRSCTSHILAVENITARQYGTRITSNQVKRLDEHAVDQMGLPDNVALAVRANVAVITTLREQIAIVERRLQKEVARHPDYVLLTTVPGIGQTLATVIMLETGTIERFANAGNFASYARCVDSQRMSNGKKKGEGNTRNGNPYLCWAFIEAANFAMHFSTEARRFYERKKARTNSVLARKALAHKLARACFHMLKERKPFDVTRCFA

SEQ ID NO: 484367 - protein, 337 aa, unidentified
MERQYVGIDLHRRSSTIYRMNGEGEMVGCVRIPSQPAELAQAMADAGESPEVVLESTYGWYWAADLLKELGANVHLSHPLGNAWGNRRVKNDERDAKDLAAMLRLGRLAEGWIAPPEVRELREVVRHRFHLVVKRSSAKAQVHGVMAKNGILPALGDMWGKGGAAQLDALELPRAYATRLGSLRDLITFLDNEVDIFDRYIHHQLKNDPGYQAIQRIDGVGRVIAAIFCAEIGDVSRFSSPKKLCSWAGLTPKHRESDEKVIRGKITKQGSPLVRWAAIEAISKYRGGPKLRSDYARLAERRGRFKARVAVARKLLTLVYYGLRDGEIRSLEPAKAA

SEQ ID NO: 484368 - protein, 384 aa, unidentified
MNKHNILFIGLDTHKVSTEVAYIEDDRGALPIHHGKIPSTKTAIKKLVRHFESKYPKATLHFAYEAGPCGYWIYRLITSLGHCCYVIAPFLIPKKPGDKIKTDKRDALRLAKLLKTEELTPIYVPEPEDESISDLSRARETAMKDLNDARFQLKAMLLRNNINYKGTANWSKKHLRWLSELILPHPAQQIVLQEYLQTVNERINRLARLVNELQHQVQNWRYYPVVKALQAMRGVRLLVAAGIIAELGDLTRFDHPRKLMSYLGLVPGEHSSGDNRRLGPITKCGNTRARRLLIEGAHSYRYAANISTELQKRQESLPKEIIDIAWKAQLRLCRRYQQLMHKGKHYNLVITAIAREMIANIWAIAREVVLSQVNPKLRISRVPA

SEQ ID NO: 484369 - protein, 363 aa, unidentified
MFLALELSNSKWKLGSTLGMGQKPRERTIAAGDLGGFHEEVSRAKRRFGLASSARVVSCYEAGRDGFWLDRHLRQSGIENIVVDPSSMEVSRRRRRAKTDRLDVGKLVRDLMRWWGGESKVWSVVSVPSVEAEDQRQLHRELEALKRERTRYTNRMTSLLITQGIRLKVSKDFLARLSAVRLWDNSPVPRGLRTRLEREYMRWVLVQEQILELERERRCALRTARDRGAQTARRLFRLRGIGENYAWLASMEAFAWRQFANRRQVGAMAGLTPTPFSSGNLDRDQGIGKDGNRRLRAATVEIAWGWLRFQPDSELSKWFQERYGPGSRRSRRVGIVAVARKLLIALWRYLETGVVPAGAVLKT

SEQ ID NO: 484370 - protein, 342 aa, unidentified
MQITTIGLDIAKNVFQVHGIDANEKVVVRKQLRRSQVIAFFRALPPCLIGMEACATAHYWARELRKLGHEVRLMPAKDVKAYVKRNKNDTADAEAICEAVRRPTMRFVRIKSAEQQGQLMQHRTRDVLIRQRTQIINALRAHLAELGIVAAQGAAGVNALRAIVADERDERLPIDARASVIVLAAQLEALQTLIGSIEKRIKMQHRSNKTSQRVETIPGIGVLGATAIVATAADPTVFRSGRDFAAWIGLVPRQDSTGGKQKLGPISKQGDRYLRRILVVGAIAVLRRAQENPGKYPWLTQLLARRPFKVVAVALANKMARTAWALMVHGGTYRAPELVEAA

SEQ ID NO: 484371 - protein, 361 aa, unidentified
MTYLGIDLHTRNMTICAVSSNGKKIGEWKLTNDTTLLDQLIQELSAPLKAVVEATSSWYWLADWAQSRDIELVLAHAKMLKAIAYAKVKTDSVDAHRLAELLAADLIPRAHMVMGVQRELRELLRGRLRLVWRRCKVQDSLYNLFFKYNVSISKYPFRDLNRLEKHLNSHLPPASSLEASLQIDQFRLLEAQTYRIEKQIDAFRPDFPGYDRISGVPGIGKVSSWSILAEIGDISRFESDKHFASYCRLVPGAADSGGKRRHKSRNKDGNKYLKIAFSQAAVGAITYYPPVRAFYNKIRRRSGKHVARTVVAKELARIVYFMLSRNQPYKGFKGKPTPKDTYLNWPHSVSPRSIRGRDQPR

SEQ ID NO: 484372 - protein, 345 aa, unidentified
MEPMYYIGLDVHKRKISYCVKDSSGKVFAEGLLPATRLDLDLWMKTLPQPWSAAMEATMFTGWIYDHLKPHAAVLKVAHPLMLRAIAAAKKKNDRIDAGKICDCLRCDFLPECYMASTAIRERRRTLRYRNLLVRQMVQMKIKISALLMEAGVSYNKQRLHKAGYFRELLARNPDIDEGLGSLLRLCRETVVRLQKTESALVRSLERDPLLLDRVERLMTIPAVGPITALTWALEVGDVQRFSSIKKAISYCGLCGAEKRSGNTVQRTPLSKQRNKHLQTTLIEAAKMAPRNSPELAMLYDKEKQKGNANRATLAVARKLVAYLVAVDRRQKEFLTVERENRTAA

SEQ ID NO: 484373 - protein, 310 aa, unidentified
MENIIVGIDVSKDRLDVAVRPSGEVFAIERNPVGLEQLTLRLRSLSPELVALEASGGFETVVAATLAAARLPVVVVNPAQIRAFARAVGQRAKTDPIDAAVIAHFAAATRPEPRPLPDEATRLLGDLVARRRQILEMMGAERQREKRVTVPHLRKSIVRLLKALKRELMSVDTDINDAVRGSPVWREKEDLLASVPGVGPTIARTLIAEMPELGRLSRRQIAALAGLAPFTRQSGQWRGKSFIGGGRAVVRTALFMGAMVAKRHNPVLRAFFNRLVAAGKPKMVALIAVARKLLTMLNAILRDRRPWQTA

SEQ ID NO: 484374 - protein, 419 aa, unidentified
MSFKILKNNCCGLDVHKTWIYACIGITDSHSRTEYKQARFSSFTKGLQELCDWLAKYNCTDVCMESTGKYWIPVFNILEKNNFWVTLSHPKYTKPQKGNKTDRKDAKWICDLYMCGMVKPSFIPPADIRELRDLVRYRFKLTCMITGEKNRAHNCLTVSNYKLDDVFTDIFGKSSRSITEQILQQPGETFDVAPFVDGRCKTPIEEIQAAVDGTISTEQAVKLRQCLNHIDELEKHKTEIEREIFRLSDKYECILNLIRTVPGFDKNPLTAIQVLSEIGGDMSVFPTAKNLVSWAGCCPRNDQSNQKIKSTRISRAGYYFKPVLVQIANALIKSKKHPEFTTRYRRIKARRGHKKAIIAICRMILTAIWHILTDLKPYTPEGFLESRPENEVKVLTTSQALNLLKQQGYVIKDDIVSVT

SEQ ID NO: 484375 - protein, 350 aa, unidentified
MKYVGIDWAYRQAQWCALGAGGEVAGEGRIPADRDGLARLVLELGDEVKACLEMMSGALWVRDELLAYGWQVQVADARKVKTLAPLAAKTDKVDARLLAELSRRDLVPALWLPSLDERALRERLRRRMHLVRLRTSAKARIAGLQTQWGVRVSLHRLRHADGIELLERAGMPAVWRRSVSECLAVIDFLDARIEPLDQELKPFAHADPRAVLLDTIPGVAELLALTIAVEVGEIGRFAGPEKLVSYGRLAPRVHQSGQARPRSGPLSKSGSRLLGWAAVEAAQQAWRESNPWHDLYTDVARRSHNKNSAKAAVARKILIAAWHMLSRNEPFNPAPRTTSVSASSRFALAA

SEQ ID NO: 484376 - protein, 385 aa, unidentified
MRLDGVTGRPWNLADGVAVPQSDGVLKRRQAVLAPSIIRGTTMEYYAGIDVSLESSSLCVVDATGRIVREAKVASEPEALIAWLQSLGFDLARIGLEAGPLSQWLYAGLKQAGLAAELLETRHVRNAFKIMPVKTDRKDARGIAQLMRMGWFRSVHCKSLPAQETRSLLGARKLLQGKLHDIELSLRGTLRGFGLKVGKTTPKTFEARIRTLVADHPTLTLIAEALLRARAVLLDEFIKLDKKVHALARQDPRARLLTTAPGVGSMVALTYAAAIDDPARFKSSKTVGALFGLTPKKYQSGETDITGRISKTGDAAVRTALYEAANIILERPVKGGWLKAWALGVAKRAGMRKAKVALARKLAVVRHRMLVDGTPFDLNRVTATA

SEQ ID NO: 484377 - protein, 411 aa, unidentified
MEEAVRIIGMDIHRVAAEVVSLLDGEIVKLGRVQMLRDKLEEFARKELTHDDHVVIEATGNAAVVAEVLTPYVDRVVIANPRQVHMIAHAKVKTDTIDATVLAKLYASGFLPEVWVPDPETLALRRQVTRRTQLVRQRSRLKNLIQSILHAHLIPPCPHGNLVSISGRKWLARQILPADERAAIERHLSLIGEINEALTVVEADIAAHALQDPTIRRLMTLPGLDVTVAASVAAAIGDIRRFSNPQRLVAYLGLNPSVRQSGEGPAHHGRITKQGRGHARGMLVEAAWAAARSPGPLRAFYQRIAARRGKHIAAVATARKLAMIIWHMLSKDADYIWARPALLARKFRSAELRAGLPTKHARRGVAYDYNIPARRAEERSRVEQAEAAYAAATSRWRMRPRKPEAVEKASS

SEQ ID NO: 484378 - protein, 343 aa, unidentified
MGEVSTIGLDIAKSVFQVHGVDVDGAVVIRKRISRAKLLEFFATLPTCLVGIEACPTAHYWSRRLQGLGHTVRLMPPSYVKAYVKRSKNDANDAAAICEAVTRPSMRFVATKSEEQQSGLMLHRSRQLLVCQRTMLSNAIRGHMAEFGIISAKGRNGTAELLKIIADEQDDRIPAAARFSLNVLARQYAAIREETVAIERRIQAWHRSSEESRRLEQIPGVGPIVATALMAEVGDWKTFSSGRSLAAWIGLVPRQHSTGGKERLGRISKQGNRHLRWLLVAGAMAVIRYARQHGTKRPWLARLMDRRPIKVAAVALANKIARMAWAMMVRGERFKEPKLLPAG

SEQ ID NO: 484379 - protein, 424 aa, unidentified
MKITIASEKVKHAGSLVVGFDVGQSKLNALSRVEVDGRLVQLEDELRNRTDTIRRCLLKYSEHAAAYGLGNVHVVCEPTGGCERKLLRTARQLGFTTEYVSGQAVHRCTTVESNDTGKSDRKDPGTIHTLAMLGRTLRVRDLSGPYLELRRLNEFYEDEDRTVVNIRTHLYAVVQELFVDWPLPPQFLYTGPGRALVEHYGCSPYRIVADGRDRFVERMRAAGPGFRIATAAKLWKAAETSVLHRHEEAVERRLADRVQALRADWERHEGRRESIKQELVRIYEQLPEAKAFSSLPKQVGRHLLARVIAETGPLRDFGHVRQLWRFAGLNLRERSSGTFKGQLKISKKGRALLRRVIYQIAFGNLIAKGGMYATWHGRKKREQANGMKSIVAVMRHFLKCLHAIACSGQPFSAERLFLSEAMAA

SEQ ID NO: 484380 - protein, 322 aa, unidentified
METKVKKIIGIDVSKLTIDVYDGKKSYQFKNNIKGFKQLLKKTSGHYVMEATGSYHIKLASYLFDGNCLVSVVNPLVVKRFSQMRLLRAKTDKSDAIMIYEYGQFDELKLWKAPKNYIVEVKQLFTAVDLMLKNRSGYRNQLEAFSHMKIQNKQVILSIKKQILTLDKLIEKLEKEAENMIRANAKILYEKLRTIPSIGRKSAIMLIAITNEFKNFENSKQLSSYIGISPRIYQSGTSVNGKGKICKMGMGQMRKILFMASLTASRHNLACKQMFNRLVEKGKPKKVALVAVMNKLIKQAFAIGTKLENYSETKFNMEIKLN

SEQ ID NO: 484381 - protein, 435 aa, unidentified
MDEVTDEPLYRDRVCGIDIGKAGMVATIRVPSDSNPARRAAETRSFGTTRREVLALADWLRCWQVPAVVMEASGDYWKGPFYRLEAEGFDCVLADARRVRHLPGRPKNDPSDSRWLAACFERGAITSCFVATPEFRVIRLHTRYRRDLTEERTREKNRAEKLLESAAIKLSSVVTDLHGVTGRDIMNHLIAGQRDPKVLAQLARARARRKISELEAALEGAEFFTGEHAALLAAMLGRIDRVNAEITRLSEVIETLLEPYEEQLAQAESMPGWGRRSAQDALAETGTDMSRFPDGAHLASWAGRTPLDNSSGKRQGKAKAKKGNRYLTGLLGETAVAAGKTRTREGARYRHIARRRGKAKALVAVGNTQLNVYHALLSHPGTRYRDLGPDYYERQASVRRQIAHHVGKLGALGFEVTLCRIPEPEPSSPASIPAA

SEQ ID NO: 484382 - protein, 339 aa, unidentified
MWHSGIDQHKQFGVITTYGPEGPRVKQSRVPSTSLEVARYFAEFPGPHRAVVESTGGWYWLADTLAGLGVELVLAHATRVKAIAAAKVKTDKVDSDTLALLLRADLIPLAHMIAPAQRGPRDLMRTRLRLVEKSVSAQNSIDRLLEKFNLTSVTELEECYQLQANCHSAQPALLETQIATLERALYPHLIPNADVQRLLWIPGLGKVNAFTIYTEIDGITRFPSARQFFSYCRLVPGADNSAGRTRHRSGSKAGNRYLKLAFSHAGIRAVQYNPEIRAFFKAKARKKPIRIARTLVALELARIVYHVLARHEDFNGQFKGRELSHRKHAKWPRRASPPA

SEQ ID NO: 484383 - protein, 394 aa, unidentified
MAFKIFRKNCCGLDVHKTWIYACMGITDTNGRTEYKQARFSSFTKGLQKLADWLAKYDCNDVCMESTGKFWIPVFNILEKTCWVTLAYPKYTKPQKGNKTDHKDAKWICDLYMCDMVNPSFIPPPDIRQLRDLMRYRSKLTNIMTSEKNRALNCLTVSYLKLDDVFSDVFGKSSRSVIRYILEHPGETFQVAPFIDRRCKHPVEEIQAVIDGTISHQQAVKLRECLQHLDELEVHKTNVEKEILCLVQQYPYQLELLQTVPGFSGNIMTAIALISEIGADMSVFPSAKHLVSWAGCCPRNDQSSKKVKSTRISRAGVYLKPLLVQVAIQPFTANADKLSAAGALEIRCQICDGRFLSMWAALFIFLGCPLPPCPKNLHVHNGRIVILASVAWIF

SEQ ID NO: 484384 - protein, 328 aa, unidentified
MHKQNQFILGIDISKNHFDVALLLPSGKRKNKKFRNQPPGFEELETWLDKWGVESLHACLEATNIYGHRLAEFLHDQGFDVSMVNPARVKGYAQGELLRTKTDKQDAALIARFCQAMSPSLWVPEPKNVRELKALVRRLDALIEMKQQEVNRLDVADDVVQQDIEEHIVLLCERIKQLRDAIKQHIDDDPDLREQRELLLSIPGVGEKTVAMVLSYFATIERFSSAKQLASFCGVTPRQVQSGTSINRYGRMSKVGPAQLRKALFFPAMVALKHNPLLLSMGERMLAAGKPKMVIIGAAMRKLIHLIYGVLKSRTPFNLDLVQKNLAC

SEQ ID NO: 484385 - protein, 348 aa, unidentified
MTVYIGVDFHARQQTVSYLTTEDGEIKQLVLVHEEPARVRAFYEQFAGQRVVVGFESSGYAAWFEELLEEVGCEIWIGHATYIRQFAKRRQKNDRRDADLILELLVSGDFPRIHRYSRSTRQMLQQLRYRQRLVKMRTMVVNMLLFMASSRGHSFRTQLQSKRGQARLGQLPLPEPLAQQRDELLSLLAQLDPKITTIEGWLEQQTAEDVAVQRLRTHPGIGLLTSICVRYTLEDVGRFATTRKVSAFAGFDPMEDRSDERRHMGAISKQGSRWLRFFLVEAGQVAMRRDADLAAVYQRVSRRGGHAKAKVAVARRLLVRAFIMLRDEIDYAEFQRRGVAARSSRGSA

SEQ ID NO: 484386 - protein, 382 aa, unidentified
MDVVYRCCAGVDVHKKSIAVNLLRRGIPGKEDLDEVRTFGTMTRNLLEFSEWLAEAGCTNVAMESTGVYWKPIYNILAAAGFEVLLVNAKHIKNVPGRKTDVQDCQWIGQLLQHGLLKGSFIPPEPIRELRDLTRQRKQLVRQRASCIQRIQKVLEDANIKLSSVASDVVGKSGWDMLNRIVAGEGDVEKMADLARGRLKSKRDDLILALEGRVTDHHRFLLRQHMHQIEFLETAIAEYDQRIEEQIRPFVEYVPLLDTIPGINQTAAFAIIAEIGANMDQFPNEHHLSSWAGMCPGNNESAGKHRSGKTRHGSKWLRSLLVEIAWAAARTKGTYFSAQFKRLASRRGKKRALIAVAHSILIVIYHVMKERGAISGTWRRLL

SEQ ID NO: 484387 - protein, 457 aa, unidentified
MARKSAQKSKGGSRMLPVMHPDAAGVDIGAEEIFVAVPADRAADSVRSFGTFTRDLHELADWLQKCGVRTVAMESTGVFWIPLYQILETRGFEVFLVNAQHVKNVPGRKSDVSDCQWIQYLHSVGLLKASFRPPDEICVIRSLWRHRESLVQMAAEHIMHMQKALSQMNLQLHHVLSQITGLSGQKILDAILAGERDPMRLASLCNGRVKSSRETVAKSLEGDYREEHLFALRQSLVGYRFYQTLIAEVDRELELKMRKLPRASGGPEQMPPRTKACFYQRADNEPAFDLKGELFRIAGVDLTDVPGISAITAHTILMEVGPDVSRFRNASAFAAWLGLCPEKQISGGKVLYTRSRKVKNRAAIALRLGAHCLYRAKNYWGEFYRRMRWRLGAPAAVTATAHKLARIVYHLLSTKEPYSEHVLAYCDRLANKRAEIRLRKQAANLGYQLTPIPEPNS

SEQ ID NO: 484388 - protein, 310 aa, unidentified
MVLEKFIGIDVSKKSLDVAIRPGKKVKQYLNTPEGVKELIQTLKKESSTLIVMEATGSYHLLCLTELVEDQLPVVVLNPRQVRDFAKATGQLAKTDKIDARVLAHFAEAIRPEVRSVFNQESLQLVELLRRRTQVVQMLTSEKNRFQGSHSKKMKEGIEKHIQFLKSEQSDIEMELDKLIDGNSNLKNKENILKSVPGVGNIVAQTLIAELPELGQISSRQISTLVGVAPLNRDSGSMKKRRMICGGRARVRQMLYMACISAIRWNPILSSFAERLKQSGKPFKVIITAVMHKLLIILNAMIRENTLWKY

SEQ ID NO: 484389 - protein, 338 aa, unidentified
MQNYSAVDLHSNNGVLTIIDETDRTVRQKKLPNDLSAYVAELEPFRATLQGVAVESTFNWYWLVDGLRAHDFPVVLVNTAAVQQYEGLKHADDQYDSWFLAHLMRLGILPKAYIYPREERAVRDLLRKRSTLVQQRTSNVLSVQNIEQRNRGVKISSNDVKQLTAERIGEIYTNEDLALAVETTSMVIDALTTQIKRLERAVLKKARLRDEFKLVRTVWGIGEILGLTIMYEAGDMKRFAEPGHFASYCRCVDAKRLSNGKKKHDNNAKNGNKYLAWAFVEAAHFAVRFYPEVKRFHDKKAAKTNVIVAIKSIAHKLARATFYVLRDQQPFDPKKVFG

SEQ ID NO: 484390 - protein, 412 aa, unidentified
MFKIFRNNCCGLDVHKTWIYACIGITDPNGRTEYKQARFSSFSKGLRKLAAWLAKYSCTEVCMESTGKYWIPVFNILEKSCFVTLAHPKYTKPQKGNKTDRKDAKWICDLFMCDMIKPSFIPSPEIRQLRDLVRYRLKLTNMLTGEKNRAQNCLTVSNLKLDDVFSDVFGKSARSITNYILEHPGETFDVSPFVDPRCKTPVSEIQAAVDGAISPEQAVKLRQCLAHIDELEAHRKEIESEILQIAEPFSAVLDLLSTLPGLDKNPMTAIAILSEIGPDMSVFPSSKHLVSWAGCCPRNDQSNQKVKSRRISRAGSYLKPLLVQVANALIKSKKHPELKERYHRIKSRRGHKKAIIAVCKMLLTAIWNMLSKLEPYNPEGFLEHRPVKQEKTLTVSQALELLRLRGYTITNQ

SEQ ID NO: 484391 - protein, 418 aa, unidentified
MYYVGIDIAKQFHIACVLDESNKLLVKNLRIESEISDFSLLNSELINITADKSKFLIGMEATGLLFENLYIFLQGLGYNVVLLNPYQTTRFREMQTMKYVKNDNIDSQMIAALLKSGQYSKGYVSEDIYQAIKSLYRHKATLMQEMKNAKRQVSTTLAVVFPEFEQIIKDPFSVSGMALLNKYPTAKHYKGASGERILKLFRNIKGNNFNLQKANDLLDLAKLTIYQGNASDERAYVIHSNLRRISFLKDEIEACESQMFTLLNDVNKTIETSKENEVYIADLVDNLRSIDGVADKTIFAILSECGDISRFHSGQAFIGFLGLYPTLYQSGNSTKYGKLAKRGAKLAKLALYQASIACVRHNDELKKIYLDKKSGGRAPKECVIIVARKLAMIIYSIYKNNTPYNPARVFNTQTSLSH

SEQ ID NO: 484392 - protein, 344 aa, unidentified
MTSVPTIVGIDLGKNWFHLIGLDERGATVLRKKLNRVQLAEYATTAPTCVVATESCPGSQYWGRIFAKAGHEIRILPAQFVKPYLKANKNDFNDAEAIAEAGGRASMRCVPLKTNEQLELQALHRVRRRFIIERTAVVNQMRALLLEHGIVIPLGRALFARRLPAIFEDAENGLSPRLVALLHRLRQRWLAIDVEINDATRDLTAWAEQSDLCRRAATVPGIGPMIATAVVAAVGNGRMFTRGRDMAAWLGLVPGQYSTGGKPTLGRISKRGNTYLRQLFIQGAHALYLHMKRDHSHLGEWLRQVEACSHRNVAVVALANKMVRICWKVLTSEQVYQPYPARVA

SEQ ID NO: 484393 - protein, 356 aa, unidentified
MSSNIKYIGLDVHKEAISIAVLNGAGKLVMESILETKALTLVQFLQGLRGELHVTLEEGTWAAWLYDVLKPRVHEVVVCNPRRNALLKEGSKSDRVDARKLAELLRAGLLRPVYHGEHGLRTLRELGRSYQTISKDMRRVLNRLKALYRGWGIPCSGTQVYAPRYREEWLNKIRQAGVRRRAELFYQHLDGLQVLRRQVRSEFLAESRKHKTVKVLRQIPCIGPIRAALLLAQMQTPHRFRSKRQLWTYSGLGVETHDSAQHCYVDGRLQRSKKSQQVRGLNQNHNHEMKEIFKSAATNASRCAGPFHDFYAGLLAKGMKPEMARLTLARKIAAIALTLWKKGGRFDAEYLKAQAV

SEQ ID NO: 484394 - protein, 343 aa, unidentified
MEHYVGLDVSLKQTSICVVNQVGSVVREGVVDSEPEAIATFVRSKAPGAVRIGLETGPTATWLWTELKQLGLPVICIDARHAKAVLKMQINKSDRNDAAGIARIMQTGWFKEVRVKDLDSHSVRALLASRALLVKIKRDLENQVRGLLKNVGLVIGRAKFNVFAVRAEELIEDRPELIAVVGPLLKARKAIEQQTDDLDRKVLKLARYDAQVRRFMTVPGVGPITALCFKATIDDPTRFKRSRSVGAYVGLTTRRHASGEIDWTGRISKCGDAMLRSYLFEAAGVLLTRVPKWSALKAWGMRLAKRNGLRKAKVAVARKLAVILHRMWIDGTEFNWSKKEVAA

SEQ ID NO: 484395 - protein, 386 aa, unidentified
MQASTVDTPTAGHCGTIFVAIELSQRSWLVTLHCPDRDRISRHGLESGDHVGLLALIDRVRERAARVLGRAPAVASCYEAGYDGFWLHRLLLAAGITNYVFDPASIAVDQRARGAKTDRIDGERMLRTLMAYLRGEPRVVRIVRVPAAEQEDARRVTRERDRLITEQTAHTNRIKALLRLVGMAVGNPRRRNYLTWLAAQRDWQGQGVPPLMLTEIKHEHARLLLLREQLKELEQPRAEADLSPAAAEMAQRSERLQRLKCLGPAFSTTLTNEVLYKDFRNRREVGSYVGLAPSPWKSGGIDREQGISKAGNPRARCAAIELAWLWLRHQPDSKLTQEYRRRTLGASKRIRRIAIVALARKLIVALWRYLTTGLVPEGAVLKAVEM

SEQ ID NO: 484396 - protein, 421 aa, unidentified
MYNTRVKHQKRSFVNDKALISTVDIAKDELMVYIRCPFGEEVKPFNVTNNYQGLKEYWATIMLYQKRYHLQDIIVGFESTGIYSEPLKNFMMDKAVKLVQINPMHTKKMKDITDNSPGQTDRKDTRVIADIIQLGHYLSLIVPEGAAAQLRELAHARENQMVHQTRLINQLEALIFKIFPEFVQIIKNLSTKTAQYLMSKYPTPQRLKGVSLEQLTSEIKMVSRGQLGKDLAQRIYQASRESLGTKEAQESILLEVNYLLGQLIQTAQFIKVLEKKMATALDQIPYAGNLLSIKGIGVVLLGGVIGEVGDFRRYRRQSDLVKLAGLDLYEMSSGKYHGLRRISKRGRWFLRKLLFYGALNTVRTGGILRDYYQGLIGRGMKKIKALIAVSRKLLRIMFALVRDNTHYHQKEEQINSIKVPA

SEQ ID NO: 484397 - protein, 342 aa, unidentified
MKFYCGIDLSARDCHVCVIDQQLKVMVQQKLRNDLPKIVQLLEPYKANLKIVVESTFNWYWLIDGLQAEGFEVVLAHTLGLYLITGAKVKTDRRDAYSLAKLLLVGAVPTAYIYPVETRPVRDLLRRRARLVQLRAGEYGSLRRLLLRQGILSSKQQEIKTATDAELEQWFEHPLVRLHASQELQRIELYSEQIAELEKTILELAKTERSYELLLKLPGVGQTIALTILYEVGELTRFANVKDFSSYCRVVPGIAQSGKVNRRGRGSKQGNHYLKAAFSQAAVHAVRCYPKVRRCYERQLKRHQGRGRQMICYNIIAHKLAQAAFHVMKEQTEYREELLFGR

SEQ ID NO: 484398 - protein, 333 aa, unidentified
MVEGTEGSHHKEGSTKMSKYTTVCAGIDIGKHKLDVAIDGGAQRMQVDNNSQGHRSLSAWLRQREVERIGIEASGGYEQAVVLSLRADGFVVIVFQPVQVRAYAKFVLQHAKNDTIDAVLIARCTAAATEIHEPPDARLAPLAQHLTMIEQLTEDVGQLKTRREACREERIREFWKQEINRLKVLLNRELKQLVTAIREYRDLANRLDLIASVDGVGLRTAVAILVRMPEIGRVTREQAAAIAGLAPYDDDSGLRRGSRHIKGGRQRLRQSLYAAALPAVFYWNPQLKAFYRRLLVAGKPHTLALVACARKLLIFVNTVVARGTSWRSSALTT

SEQ ID NO: 484399 - protein, 362 aa, unidentified
MTSMTAHSHLMQPPITFAGIDTHKHTHHVAVIDADGRLIADRQFGTTHAQYLQIQRWLAHWHLRSIGIEQTGTYGAAVTNVLASAGYRIIDVNHPDLSVRAREGKSDPIDAVMAANAVRTGRCQVIAKDRTGQLEALRFYCAARTSAVKARSAALTQIAALAITVDPKLRERLGTTSRDIVTCARTLRPDTTRPHDPIQAAKTALRALATRITDLDTEIKSHDRALTEIITPLAPRLLALPQVGIHIAAQLLLTIGQCPNRITTDAQFARLTGVAPINASSGRTNRHRLHRGGNRQANRAIHLIAIGRLKHHQPAIDYYHRRTSNNLSKTDTIRAMKRHIAREVFGALKADLTTHKTTIDTP

SEQ ID NO: 484400 - protein, 485 aa, unidentified
MKEATLIRSVGIDLSRTGSHQVHCLDGQAKPCDSFSFDSTLEGLEKFEKRVFSNSDTPTIIFEPTGLAWIPMAVYLRARHPECQMVKARLQKVAALRRYLRSYTKSDRVDGVTLAKMPFIDAEQLDEAYLPPAEYHSLQRLTRQRERLMKSITVRKNRIGSIVNGYLPGLQKAFSDEWSDRARLFYRQRLNPFTVVRDGKSALETFLVSVKARGAQTESNRVYQACQKLAEFYEKSKAAGMINEDFFDDLQEEIACELRLMETEEAEVERVSVRIEELYGHLHPSDYLRSIPGIGVRTAQVFLAIIGDPHRFRSQSAFANWTGVVPGARQSAGTEGKGLRMTKAGPSMMKRALFQAGDIARRYDPQLAHLYYREMVHHGKTHLQAMGAVMSHLGARIMAVLREGRPYELRDSQGKLLTKKEAMELIRSAYKVPEETRQARRRRKPNEGRLTSRRTREAAKAPQSGPLIPPPKTVYCGEELQSIAN

SEQ ID NO: 484401 - protein, 386 aa, unidentified
MRKPNDLSRSLSVLNRNSTLIAVIEMSQSSWLIAGIVPGVERQPLKKLAVDESALLKILHRWREEAEKAGHKIERIAVAFEAGRDGFWLARWLRARGIEAHVIHASSVAVSREHRRAKTDRLDTELLKRAFLGWLRGERDHCKMVAIPTLTDEDAKRPNRERESLVGEQSRIVNRMKAALARLGIRGFNPKLKKAGERLEGLRTPEGEPMPPNTLAELKRDMERRRLVRNQIREIEKTRLERIEQAPSDGPHVMVRLLARVIGVGVETADMLVQEVLIRNLRDRRAVARYGGLTGSPDESGKKRREKGLARSGNARVRRGMIQLAWRFLMFQKDSALAQWFYARTKNAPQTRKTMIVALARKLLIALWRLVREGTIPEGIVLRPAS

SEQ ID NO: 484402 - protein, 321 aa, unidentified
MQEWYLGIDVAKKKLDCALRLPNGKYKHKTFDNAPKGFEELRVWIFSFDVTQLHVCMEATGVYWEAVAEYLANHQYVVSIINPVQIKAFGASRLVRTKTDKVDAKLIADFCKENRPEPWKAPSLEEQALRAMVLRLDALQEIRTQESNRLDVARVSVKDGIVSHIAWLDEEIKNLSKKIRDHIDSDPDLKDRKALLESIPGVGERTIALLLAFSLAPGRFTNARQVTAYAGLDPRHHESGSSVQHKTRISRVGHNLIRKGLYMPAMVTLYRTSWGKHFLARLSSAGKKPMVIIVAMMRKLLHVAFGVLKSGQKFNPDLHAA

SEQ ID NO: 484403 - protein, 343 aa, unidentified
MEHFAGLDVSVKETSVCIVDDTGKIVREVKLASEPDALLAELRNPAYRFKRIGLEAGPLSQWLLSALAEAELPVICVETRHMRAVLKAQINKTDRNDARGIAQMMRVGLYRPVHVKTLRSQKLRMLLTHRKLLQSKAIAIENDLRATLRNFGLKVGIAGKVKFEARIKELVENQPDLAVLVEPLLIVRRVLREQIGILHRRLLAVVRDDEVCRRLMTVPGVGPVVALTYRATVDVPARFRKSKAVGAVFGLTCSKYQSGEIDRSGRISRCGDEMMRVMLYEAAQSMLFHSTKWSWLKAWAMKIARHRGMKKAIVALARRLAVIIHRIWVDGTEFRWTKEVVTA

SEQ ID NO: 484404 - protein, 451 aa, unidentified
MEDEVIKMEVVNPQAAGIDVGSRSHWVAIGQREEDVREYGVFNDDLFSLCDWLKECKVRTIAMESTGTYWQNLYAVLISRGFHVILCNGKFTKNIKGKKTDIKDCQWIQRLHSLGLLSSSFLPDGKTEELRTYCRHRQNLLHESASTSKKMQKYLRLLNLRLDVVVKDTCGLTGLRIIRAICNGEKNPEKLADLRHHNCHTSKADIARALQSNGREDYLFALQQELDMYEYLHKKIEECDLKIEEKLNSIINDDENKKQHHIEPKPHKKVNKNTPKNIDLNLKSYQMFEGTDLLAIEGMSYSTVLALMSEIGVEGIRKFPTAKHFASWLRLAPNNKVSGGKVLSSKVPKGSNNLKISLRNAANAIGNLKDSTPLRDFFMRISFRKGRVSAISATARKLAVIIWNMVVKGVPYHNPEEYLFRDQKKKLGLLKRIQKQITKFELESTDFQFSN

SEQ ID NO: 484405 - protein, 348 aa, unidentified
MIIIGVDFHPEFQQIAWVDTDTGEFQEKRLVHPEEAENFYRALAGKKVRVGMEASGHARWFERLLSELQFEQWIGDAAVIHSKRVRKQKTDRQDAQLILQLLLEDRFPQIWVPSWENRDVRQLLWHRHRMVQARTRIMNQLQAVALNEGLRCKKRLWRERGRQQLESFRLAPWASRRRQDLLELLDRLNPTIAELTQAIEQEAEKCPAAQQLRTHPGVGALTALAFVLIIGEADRFHCGKQVASYLGLVPLEDSSGKRRRLGHITKQGSSILRFLLVEAAQVTVRRLPEWRSKYFHLALRRGRKIAKVAMARRLAIALYWMWRKRWDYEQVKKFGSHAGQPENRHGVK

SEQ ID NO: 484406 - protein, 427 aa, unidentified
MPYRIAGIDVHKKMLAVVVADVEVEGDFQFERQKIGTSPADLRALADWLVAREVDEVVMESTAQYWRPVWEALELHWRPKRRTREGASPISGTLHLAQAQSNRGAGGRKKDFPDAERLVKRLVAQELTLSFVPDAEQRLWRTVMRRKYQITRNRVQLHSRLESLLEEAHIKLSSLVSDLLGTSARRMLQALADGETDPATVAALADQRLRATAAQLSDALSAGTTLHPVYRRLLKLTLEELRLIEEHVGQLDQQMADLLAEHHEAVHRLAEVPGLGVDSAQQIIAEVGATAGTFPSPKHLASWMGACPGTEESAGKNYSHRCPKGNRQMRRVLNQAANAAVKAKGTIFAIVYRRLVPRLGHAQAIGAITHRLCRLIWKILHQGVRYEERGPAVSEKAKKVRARKMIRELRTLGYRVELLPAPSSSPA

SEQ ID NO: 484407 - protein, 403 aa, unidentified
MNSVGIDISKGRSTVAVMRPFGEVVTSPFEVRHTDSELSELARRLKSLTGETRVVMEATGNYHAPVAKLLHDAGLYVSVVNAKLVHSYGNNDLRRVKTDRKDAVKLANYGLDRWLTLPRYVPEENTRLLLKNCYRQYRQYSKVQTVLKNNLISLLDTVFPNANRLFSSPIRGDGSEKWVDFVAEFWHCRCVSEKSERTFTNKYQRWCKKHGYNFREAKAHTIYAEASGHIGVMPKSETTKLLVEQAASQLRATSAALAALKHEMQSLASQLPEYPVVMDMFGVGPTLGPQLIAEIGDVRRFYSKKALVAYAGLDAPPNDSGDVTGRHKSMSKVGASSLRRTLFLVMSVYLQNAPLDEPVYQFMDKKRAEGKPYRVYMMASANKFLRIYYATVKAYLESLELTA

SEQ ID NO: 484408 - protein, 404 aa, unidentified
MIFVGIDWSETHHDACILDVDGHVLAKGRVPEGVDGVAKLHEMVGAHAEDPSGVVVGIELDRGLLVGALVGAGYAVHAINPLSVDRYRDRHRTSGAKSDPGDARVLADLVRTDRHLHRGVAGDSELADAVKVLARAHQSLIWSRQRQLNQLRNALRDFYPAALEAFGTDLGSPDALAVLEVAPTPAEGRSLGATRIAAALKRGGRRRRITERAEEIKVALRSSQLEAPAVLARAYGDVVRSIVGIVKEMTSQIETLANQLEASFEGHPDAEILRSLPGLGSVLGARVLAEFGDDPIRYADPKARKNYAGTSPITKASGRSKVALARFARNHRLADALQMWAFCSLGSSPGARRYYDAHRAKGHTHQRALRSLANRWVGILHGCLRHRERYSEATAWPATIEVAA

SEQ ID NO: 484409 - protein, 409 aa, unidentified
MRLFVGLDVSSFDIKVCILNGEGKKLDSFSVNNDLPGATAIKERLLQRIANQEVKTFKIGLESTSVYSFHPSMFLHYDEDLPRFGAKVFLMNPKQIANFKKSYSDMDKTDEIDAFVIADYLRFGRNQMSIVKESQYVALQQLTRSRYQLVRMLTKEKQHFLQHLSYKCNTFSQEVDSSIFGNAMMELFLEKFSLEELADMSLDELAEFLQMKGKNRFGDPKCVASTIQKAVRSSYRLDKVVEDSIDVLLGTSIAVIRTYQQQIKEIEKSIKRIMAGLTQTLESIPGIGPVFAAGIIAEIGQIERFDDETKIAKYAGLYWRTHQSGRFTAENTSLSRNGNHYLRYYLVEAANSVRKHVSDYQEYYVKKYNEVPKHQHKRALVLTARKLVRLVDALLRSHQLFAPERGVKV

SEQ ID NO: 484410 - protein, 367 aa, unidentified
MNKISTAAVKQNRTFSGQKLTIGLDLGDRSSWYCVLDEAGGVLLEQRLSTTPKMVKEVFGSMPGCRIALETGTHSPWVSRALSELGHEVIVAHARNVRLIGESRKKDDRLDAQTLARLARIDPQLLCPVKHRSAKAQADLTVIRARAGLVRARTALVNTARGLAKSYGERLRGCNVRNMNAEKAEGLSPELRTALEPLLAGIESLSEQIREYNERIELLAQQSYPQVALLKQVKGVGTLIALTFLLTLEDAHRFRKSRDVGCYLGLQPGRRNSGQSEPQMHISQEGDPYLRTLLVQGAHHILGPFGADSDLRRWGLKLAERGGKSGKKRAIIAVARKLAVLLHHLWVSGEVYEPLRPSKPRAMPAAA

SEQ ID NO: 484411 - protein, 367 aa, unidentified
MKKVSTAAVKATKNFSQPKLTIGLDLGDRSSWYCLLDEVGEVLLEQKLGTTPKAMREVFGSMPCCRIALETGMHSPWVSRLLSELGHEVMVAHARNVRLIGESRKKDDRLDARTLARLARIDPQLLCPVKHRSAKAQADLSLIRARAGLVRARTALVNTARGLAKSYGERLRGCNVRNMNPEKAEGLSPELPRALEPLLAGIESLSEGIREYNERIEKLAQQSYPQVALLKQVKGVGTLIALTFLLTLEDAHRFRKSRDVGCYLGLQPGRRNSGQSEPQMHISKEGDPYLRTLLVQGAHHMLGPFGADSDLRRWGLKLAERGGKNGKKRAIVATARKLAVLLHRLWVSGEVYEPLRNGKQTAMPAAA

SEQ ID NO: 484412 - protein, 382 aa, unidentified
MPDGIRWVGLDVHARESTFAVFDQDSGEVITKRVVGRPHELLPWLRGIERPARMVYEAGPTGYGLARRARAEGIELGVCAPSKTERPPQDRIKTDKRDAIHLARLLAAGELVLVTIPSVEREQLRDLVRCREDIRHDLARARHRIGGFLLRREIYYEGPAGAWTRKHRAWLTSVRFTDHASQATLADYLHAHDVLIARRDQVEADLAKLALTASCADTVARLRCLRGVDTLTALGLCTEIGEWERFDHPDQLSAYLGIVPSEHTTGRQRRLGAITKAGSTHARRLLVEGAYHYRRGAVVGPALERRQRGQPPEIINISWKAQRRLNARWRQLKDARRKPAGVVAVAIARELAAYCWEIATYPTTTPAPPPISTTRKRLTNSR

SEQ ID NO: 484413 - protein, 330 aa, unidentified
MAIGTGEEPLGELRVRASAAQAQRLLAWAAGWPERTWAIEGAAGLGHLLAQQLLAAGERVLDVQPKLGARVRLLAAGAVNKNDPNDARSVAVAALRSASRREVTADDHAAVLKVWSKRHRDLGRTRTQVACRLHAVLCELIPGGVSKRLTAAHAGGLLEAITPSGAVEAARCELAAAFLEDLRRIDAQMRDAKKKLTVAVAASGTTVTEVFGVGPVVAAIVIGAVRDVSRFPSRDHFAAYNGTAPIEVSSGPRKIYRLSRRGNRRLNHAIHMAAVTQVSHRHSDGRAYYERKLAEGKTPKEALRALKRQVSDTIFARLQADAQRAAAGTR

SEQ ID NO: 484414 - protein, 430 aa, unidentified
MGLIEPTPMPPERDEQATSYNWYVGIDWGSQQHQVCVLDRDRHVVGERVVDHDGSSLAQLATWLWALSAGHPQRVAVAIEVPRGAIVEGLIERGFHVFAMNPKQLARFRDRHTMSGAKDDRRDAFVLADSVRTDQPSFRRLHLDAPQLLLLRELSRAEETLLEEFRRSANRLRDQLHRLYPQMLHLCSGADAAWLWDLIDLAPTPAHAALLSKEQIQRVLKAHRLRRVKATEVLTCLQASALPVAPGAAEAAQAHGAFLLPCLRVLAEQLRSCAQQAEALLHTLAEAPDETGGPSDVAIVQSLPGVGRKITAWLFAEAAQPLTERDYQVLRTQGGVAPVTKQSGKRRPVVMRRGCNPRLRHALYHMARVAMQREAYFGGVYEALRAKGQRHGQALRNIGDRLLRILIAMLHDRTCYDATRSRREPVVQMG

SEQ ID NO: 484415 - protein, 400 aa, unidentified
MDSNRTVAGLDVHKDSVYLCIMGHDESIIFQKTYGVLTPALRQMRDDMLCRGVKECAMESTAVYWIPVWNELYGSMVLKLVNPYFIKQLPGRKSDVKDAQWIAECVLKNLIKGSFVPAPVIQDMRKLNRRIMDLNEDMTYNCNKLDAALQRCGFRLSNYVSTTRSKSYQSVLEAIISGQTCPDELVRLVHGRTLNKHGRDNVKAAVTASFSKTDLTVLRQLNEAISLIERQVEECQKELTALCKEHFPEQYERIQTIPGVKERAATAIIAETGIDMKMFATAACLVGWCGLKPRNDVSNGRFKSRKVTHGNRYLRQILIEIAWAASRTRNCFFSNFSYVQTTVKKKSKMKIQVAIARKILVALWHMLSKREDFIDVYLKRLEELKKAERQIRQLESCMAN

SEQ ID NO: 484416 - protein, 379 aa, unidentified
MQQDSEIYVGLDTSKLKISVALAEAGRSGEVRFFGDIDSTPEAVARLVAKLEKRHGRLAFCYEAGPTGYGLHRQITTLGHACTVGAPSLIPRRPGDRVKTNRRDAVTLAKLHRAGELTAVWVPDPGHEAMRELVRAREATMAELRRARQQLQSFLLRQGRIYTGRAAWTKAHARWLSEQAFTQPALYLVLQEHRQAIADAEKRLERLTRQVTEAAETWSMAPVVAAYQALRGVAFLTAVTFVAEIGDVRRFDSPRQLMAYLGLVPSESSTGEQVHRGRITKAGNSRARRVLIEGAWTYRHPARMSRLLQERQADLPPAVREIAWKAQVRLCGRYRKLMARGKRQTVVTTAIAREMAAFLWAIGHEVEPTAAAPADGQLH

SEQ ID NO: 484417 - protein, 337 aa, unidentified
MEFKRIAVDTSKSVFTLYGVDERDRPILRQDLTRARFETFLGKISPTEVVLEACGSSHHWGRVAQELGHTVRLIPPQYVKPFVKRGKNNRNDAEAISEAACRPTMRFVPVKSAETQAEAMDLSARDLLVRQRTQLVNAVRGHAAEFGIVAAKGIAQVDPLLRKIAETDMPQAAKETLAQLGRVIAQLDAQLAEINQRLAAQHKTNPVSQRLAAIPGVGPLTALTVAMKVDAGQFESARHFAAWLGLTPKERSTGSHQSLGGISRAGNERLRQLLVVGAMAVIRHAKSGSKTATPWLLQLLGRRPRKVAAVALANKMARTLWAMMANGTAYRRTPQAA

SEQ ID NO: 484418 - protein, 392 aa, unidentified
MQISVGIDIAKEIHWVTAIDAGGVVQVDRKLLNTPAGIATLVDELTALRGTVRIGLDVIGGIAGLAEAMLGDAGFALVHVPGIAVNRARQGTVGGENKSDPRDARTIAEQVRTRSDLRPIEPATELDLEIRLLVGRRSDIVQAQTQRLSRMRDLLVGIFPGLEACLDLKTKGPLHLLTKFVTPAELRDAGKKRLVRHLQAAGGVPKVEDLADRVLTVATEQRIAVPGERTTARLIRELAVEALASRTRLTELDRELEALLARHPDAALIRSLPGMGAVLTAELIAEAGNLARFRSADALASAAGMAPVLRQSGRSRFLRRPSGGNKGLKRVFYQSAFCSLAHDDSRAFYERKRREGKRHHQAVIALARRRVNVLWAVVHSRTPFQTAFKTAA

SEQ ID NO: 484419 - protein, 356 aa, unidentified
MSQKLDTSPAVIGIDIGKNSFHIVGQNQRGAVVLRQKWSRGQVEARLANLPPCRIGMEACVGAHHLSRTLRGLGHDARLMPAKYVRPYSKGQKNDYRDAEAIAEAVQRPTMKFVATKTADQLDLQALHRVRERFVGQRTGIINQIRAFMLERGIAVRQGLRFLRAELPGILATRTNALSPRMLRILEDLSADWRRLDARIADLSGEIEALARQDKGCERLMSVPGIGPIISSATVAAIGTGDAFSKGRDFGAWLGLVPKQLSTGDRTILGSISKRGNRYLRSLFVQAAWVVLVKIGPKRWDRYGLKSWIEAAKKRLHHNVLAVALANKLARIAWAVLHKGRAFECVKTNEAAYQPA

SEQ ID NO: 484420 - protein, 387 aa, unidentified
MQRPHDDSKVCRAAFVQDSTLVVVIEMSLTGWLVAGMIPGVSREPLKKIDPKPEELLQLLFRWRDEAIKAGKEITRIAVAYETGRDSFWLARWLRSRGIDAHVIHATSVAISREHRRAKTDRIDTAMLRRGFLGWLRGEPGHCSMAIVPTVGEEDAKRPHRERESLVQERTSTVNRMKSILIQFGVRSFNPVLRKASEKLDAVRTPEGIPLPPNAAAALQRHMERFRVIKEQIKAIERTRLQRLQRDPTDKMNAMVFLLVRIIGLGVETAEQLVHEILSRNLRDRKAVARYAGLTGAPDESGSKRREKGLSRSGNGRVRVILIQLSWRLLKLQPGSELVLWYKKRTADAKGSRKPMIVAFARKLIIALWRYVNTGLLPEGFELKAAA

SEQ ID NO: 484421 - protein, 457 aa, unidentified
MNKVKQHKTSRFEKMPVVNLAAAGIDVGSRSHFVAIGQNTEDVKEFGVYTEDLHTLCKHLVASGITTVALESTGSYWQPLFVLLQQYNLDPILVNGKFTKNVKGRKTDVQDCQWIQKLHTMGMLEGSFIPDLFTEQVRQYYRHRQTLVANAASYINKMQKALRLINIRLALRDVMGRSGKDIIEAILKGERDAKVLASLAQPTVKTSKEEIVAALTGDWREEYIFELRQCYEIYQHYHKKIDECDEVIKQIVTAEVQRKQTEENLAKAEGVKIKKKKARKNEARINIQQLAVDLTGGVDISRIEGVGLGLVLCITSETGLDLKAFPTAKHFSSWLSVAPDIKKTGGKVINSRTRKGKGRLARALMHAANAIGNMKTGNYLVHFFKRIERRRGRPTAIIATANKLSKIIWNMLVKKQTYNPIMPKEYLDINRKREVKNIQRKIKQLNIQEEEIVFATP

SEQ ID NO: 484422 - protein, 339 aa, unidentified
MHIKTIGLDLAKSVFQAHGIDEAGDAVLVKKLHRKQMIPFFSKLPPCLIGVEACATAHHWARTLSAMGHDVRIMPPSYVKGYVKRGKSDAIDAEAICEAVGRPTMRFVPMKTVEQQSILMAHRTRALIVRQRTMAANALRAHLAEFGLVANPGIANLVKVADKAFADATLPPYAHRALEILIRRMAELTDEICALDQELKAWHASNKASRRLAAIPGIGVITATALAATVTDPDQFSSGRQFAAWLGLTPKQHSTGGKTRLGGISKQGDRYLRRLLVVGATAVMRHAKRNPTPMTDWVNNLLEKKPFRLVSVALANKLARIAWVVLIRGETYRPYGLAA

SEQ ID NO: 484423 - protein, 315 aa, unidentified
MATSSEKFVGIDVSKDKLDVAVLGERKASQVGNDEKGIASLVKKMKSLKPELIVVEATGGYQRAVVDGLFRSGLSVAVVNPSRVRQFARAYGLLAKTDKLDAQVLAVFGERVKPRRYEGKDEKERELSGLLVRRRQLEEMLKAEKNRLRTIRVSLQGSVERMIACLQGEKKVVDEKIRQYMAEQKEWQAEREILESAPGVGLVTTATLLADLPELGKMDRKKIAALVGVAPMNYDSGKKRGYRKTKGGRADVRSVLYMSTLVATRYNPVIQKQYQSLLKRGKVKKVALTACMRKFLTILNAMVRDQVPFRDTAAV

SEQ ID NO: 484424 - protein, 345 aa, unidentified
MLMVSGVVGGVDTHADVHVAAALDQNGGLLGIESFPTDGAGYRSLLSWLLGFGPVVKVGVEGTGSYGVGLARHLHREGVVVVEVDRPNRQKRRRLGKSDPIDAEAAARAALSGEARVTPKWRDGTVEQMRVLMIARRSARMQRNQTLNQLRQVVICGPDEVRVRFKDRYKTGLVSEAAAMRPRKGNDPIVFTTNMVIRGLARRIKDLNDEMHTLDRALTELISQTSPSLLACHGVGVVTAATLLITAGDNPDRLNSERSWAHLCGVAPVPAGSGKTTGRVRLGHGGNRHANAALYQIVLTRMSSDPETRNYVRRRRAEGLSTREIMRCLKRYVARQTFKHLPRAA

SEQ ID NO: 484425 - protein, 315 aa, unidentified
MTRLSPFVGVDVAKADLVVAIQPPGERWVVANDDAGVTQLVRRLRRLAPALVVLEATGGYERAAVAALAAVRMAVVVANPRQVRDFARATGQLAKTDAIDADTLALFAERIRPEPRPVPDDAARTLDGLLTRRRQVLDMLGAERNRLTHALPAIRRDITQHIRWLERRLDDVDQDLDRTIRSSPVWRAQENLLRSTPGVGPVVSRTLIGDLPELGALTRKQIAALVGVAPLARDSGTLTGRRLVWGGRAPVRAALYMAALVASRHNPAIQTFYQRLLRAGKPKKLALTACARKLLTILNAMMRTQTPWRPTPQLT

SEQ ID NO: 484426 - protein, 448 aa, unidentified
MGKPQVFDDQEQERVYERVAAVDVAKASGVVCLRLPHPAQPAGRRSQVWEVPATMGAVGELAGRLAGEGVQKVTLESTSDYWRVWFYVLEEAGLDVQLVNASQARNLPGRPKTDKLDAMWLARLTELGLLRPSFVPPAEIRALRGYARARTRLTQDRTRCWARMEKLLEDALIKVSAVASTLTTVSVQDMIRAMIAGERDPQVLAGLARGRMRSRRGALAEALAGMFTDHHAELAQLLLDQIAFIGTQITRLNLLISEQLAATRAAWGIDADGATGPGAGAGPGAIALPAVARLDEATGISAELAASILSETGLDMTQFPTPGQIVSWTGLAGRTIQSGPRTRNGKGHGNAYLRGYLCQAAIGAARTNTFLGERYRRIARRRGAAIAQVAVARSILVIVWHLLNDPTARYHDLGPGHYQNKTDKSRKARSHIRQLEALGYTVTITQAA

SEQ ID NO: 484427 - protein, 335 aa, unidentified
MPILAELVDAVVGVDTHRDTHEVEIAHPNGAVIATCQISNATSGYAEVLAWILDHAPGPRLVVSIEGTRSYGIGLARAVSAAGVAVIECEQPTRNTRRGRGKSDPIDAHLAVLTALRLDADRLPTPRADGDREALRILLGARHELTTTNTAQTNRLRALLLTGDDHDRDRARGKLSDTALTTLARRRLPRDADRAQAIRHAEIRRLALALREATHALAANRAQLQAIIDELAPGLTDRRGIGPVSAAQAVVSFSHPGRCRNEAAFAALAGTSPLPASSGNTVRHRLNRGGDRALNRAIHTIAMTRARCCPTTRAYITRRRAEGKTDREIRRCLKR

SEQ ID NO: 484428 - protein, 355 aa, unidentified
MRWSLPPSRYYAEDRLSFGELSWKTLRSLVSIWVKLFPYSLRDRRGKAVYRKKFTRPKLIEFLATCPATTIAMEACGGSHFMARKLEELGHSPKLISPQFVRPFVKSNKNDFVDAEAICEAASRPSMRFVQPRTESQQAMRALHRVRESLVQDKVKTTNQMHAFLLEFGISVPRGAAVISRLSTILEDNSLPLYLSQLLLKLQQHYHYLVEQIKDLESQLKRKLDEDEVGQRLLSIPCVGTLTASTISTEIGDGKQYASSRDFAAATGLVPRQYSTGGRTTLLGISKRGNKKIRTLLVQCARVFIQKLEHQSGKLADWVRDLLCRKSNFVVTCALANKLARIAQALTARQQTYVA

SEQ ID NO: 484429 - protein, 328 aa, unidentified
MCTLGIDVSKNKIDLCLLTAGPGGKKKHKVLTNEPAVARKVVDWLNAQKCVPESVTVVLEATGIYHENLAYGLHEAGVSVCMANPCRVREFAHGMDILNKNDAVDAFVLACYGELKSPAVWVPPSPEVRKLRALLRQRDALREDVQRTVNRLEKANSTSTPQEVIRSLERMKSWLNEELARIEKLITDHTDNDPGLKADLDLLKSIKGVKDQVGREMLALLKDGTFKSASQVAAYLGLTPVEKTSGSSVRGRPHMSKTGPSGVRAKLYVAALTASRWNKQAKAIYERLVAKGKAKKAAPGAVMRKLVHLCFGVLKTRLPWDENYVATA

SEQ ID NO: 484430 - protein, 386 aa, unidentified
MRVVTTQTESPIAIRTDLCAIFVSLELSRSKWLVTSLAPDSGGKLSRPEVAPQIGALLPVLAQVRAKTKARTGEDFPIIAIHEAGLDGFYIDRVLHSEGIESHVVDPASVAVSRRARRAKTDRLDGEALIRTLLAWKRGEPRVCAMVRAPTPEAEDRRRIARERKVLTKERIQHVNRIKGLLFGQGISGFEPLRRDRRARLAELVTGDGRPLPTHMLAQIGRELDRIELLLKQIAQVEAERDAMLAAEQVAAPGLSLLLGLRSIGNELAASLWSEGLSRSFDNRRQLAAYAGLVPSPWQSGQVCHDQGVSKSGNPRLRTMLIQLAWLWLRHQPDSALTAWYKTRVQANGGRQKKTTIVALARKLLVALWKYTHDGVVIEGAALKAA

SEQ ID NO: 484431 - protein, 385 aa, unidentified
MSQSFNGAEVVQYDRTLVLAIELSNKNWVLAAQVPGLPQTKAKRAIEPNKLALQSAIDGYCARAAAAGHLVDRVVATYEAGWSGFWLARWLIAKGVEVHVIQPSSVPVDRRMRRAKSDGIDAELLLRTLLAWLRGEPRVCSMVPIPDEADEDARRSVRERTELVSERVSLANRIGAVLATLGVEDYNPLLKNRRRRLADLRTGLGDPIPPHALAKIERLLSRLELVLDQIATLEHDRDEVAEVPASDDASRMIQQLCSLRGIGVQSATILVREAFVRRFAKAKALGSYAGLTATPYNSGGVEREQGIGKAGNRRLRTVMVELAWLWQRYQPGAAQVAWFRERTGSTGRRVRKVMVVALARKLLIALWRFAVDGVVPEGATMKPAV

SEQ ID NO: 484432 - protein, 340 aa, unidentified
MTITTVGIDLAKNVFAVHCVDQNGKTVLVKSRVTRAALPGLIAGLPPCVIGMEACSGAHYWARLFRQYGHEPRLMAAKFVSPYRMAGKSGKNDAADAQAICEAVRRPHMRFVPVKDESQQAMQCLHRTRQGFIEEKTATYNRLRGVISEFGVIAPQSTDALRHIVFEQKNSLPLQVQQCVDDLLEHVARIEDNIAEYDRILSRMAKTDHRSQRLMELKGVGPTTACALVASIGNAHDFKNGCQLAAWLGLTPSQYSSGGKSKLGRITKAGDSYLRTLLVQGARSVLIGAEKRTDLFSRWVCSLVERRGYWRAVVAIAAKNARLCWASLHYGDDFRLYSAS

SEQ ID NO: 484433 - protein, 428 aa, unidentified
MHSTQNERINQITFSTLIIGVDIAKFRHVARAQDFRGVEFGKPLTFENNREGFELFVSWFRKIATEQGFKDAIVGMEPTGHYWLNLAHFLKEKQVKYGVVNPLHVKKSKELDDNSPTKNDIKDAKVIAQLVKDGRYAVPSLPQGVYAELREAMKIREHLTTDLCVVQARVHNWLDRYFPEFLTVFKDWECKSAIQMLSLHLLPHELVSVPDETLLQHLREAAKRGLGLGRIQNLKAAASRSVGIRQGPELAKMELKLLLTQYEWLQNKLEELGVKLDELLLQIPHVKQVLAMKGIGRDTIAGFLAEVGDIGQYRHPKQITKLAGLNLKTNSSGTHTGQTKITKRGRKKLRALLFRVMMPLVAKNSAFRALHEYYIKRPVNPLKKMQSLIALCNKLIRILFGILQKGHEFSEEKMIQDIPRFTEILQAA

SEQ ID NO: 484434 - protein, 349 aa, unidentified
MVVVGADVHKRTHTFVAVDTVGRQLGHKTFPATTPGHRDAVRWARQQFGDDLVWAIEDCRHLSARLERDLLTAGQSVVRVPPKMMAEQRRVARTRGKSDPIDALAVARAAQREPDLPVASHDERSRELKLLVDRRDDLVKRRTATINQLLWRVHELDPAWTPPARSLDLAKHQQTLAARLQDVAGIVAELARDELADVIALTERINTYQRRITGLIETAAPTLLAMPGVGALTAAKIVGETAGVTRFKSEAAFARHAGIAPIPVWSGNTAGRVRLTRSGNRQLNAAIHRIAVTQIRIDGLGKAYYDKKKAEGMSTPEALRCLKRRLARIVFNRMTTDHATAATTIATAA

SEQ ID NO: 484435 - protein, 366 aa, unidentified
MEVTTIGIDLAKSVFAVSGADSRGRVVIRRQLRRAQVLGFMRGLPRCVVGMEATGGAQYWARQFTALGHEVRLMSPALVIPYRKGNKTDRNDADAILEAVSRPSMRFVMVKSVAQQDLLALHRVRAQLVKSRTALCNQLRGLLRERGVAVRMGVAGLKRALPAALAYDSNELSGEMRELLSEMSQWLRTLEQRIASCEARITRKFKHDERCARLAEVPGVGPLTATALVAAVGNAQRFKNGRELSAYLGLVPRQHSSGGKTVLLGITKRGDRYLRTLLIHGARSALRQCKLEGDARSRWVARISAARGPNVAAVAMANKNARILWALLSRGDRYRSSRVLTRAVLRPGSPPPVERARGAKLRVAKD

SEQ ID NO: 484436 - protein, 405 aa, unidentified
MKVYIGIDWSENKHDVCFLKETGEVVLVLQIQHTMAGFRELDQARQSLGWGRQEVVIGLETAHNLLVDYLWDQGYDQIYVLPPRAVKSAQTRFRQSGAKDDAWDAHLIADLLRTDQPRYAAWKPDLPLTRQIRAEVRFAIQLGREVVQDGNRLRSILLRYYPAALDAFPHLDSVVFLAFLQAYPTLRQAQGLGFEQLKLFLRDHHHTQSRFWPKIYAGLHSDPPSSNPELDAAYAPLAVAQARILETLLRSRSECLRRLANLYRQHPDREIYDSLPKAGTLLAPALLSKLGDDRARYPTPAVLQAVAGPCPFTKRSGKRFSVYFREACDREFRHIVQQWARLTLDGSPWAATYYQTVRPHCQTDNDAIRRLANRWLEVLWRVWVDRKLYDEMFHLKQHALRTQAR

SEQ ID NO: 484437 - protein, 400 aa, unidentified
MTTRTTAWAGIDIGKTHHWICAVDAGGAAVVSVKVANVEADLMAALATVTDLADQVVWAVDIVGAPSALILALLARAGSPVFYASGRVVNTMSAAYTGEGKTDAKDAYVIAETVRLRRDLPMVDAVTDLIRELALLTAHRSDLIADRVRMINRLRDVMTSVFPTLEQQFNYSSHKGALILLTEYASPKRLRRLGETRLTQWLRRRQVRDAARVAARALAAARGQDIELPGQQVAEMIIAELAGSLLHLDQRIQGLDQQIAATFRRHHQAITIESMPGFGPILGAQLLVAAGDVRAYPSAGHLAAAAGLVPVPNDSGRRSGNLHKPRRYSRPLRHVFYLSAQTSMMRAGPNRAYYLKKRAGGHTHAQAVITLARRRIDVLWALLRDDRTFSIDPPTLAAAA

SEQ ID NO: 484438 - protein, 406 aa, unidentified
MAVMIGIDPHKGSHTAVAVGAAEEPLGKLRVRACPDQAVQLVAWAQAWPERTWAVEGARGLGRLLAQQLVAAGERVLDVQPKLAARVRLLEAGDTNKTDPNDARSVAVAALRSKGRQEVTADGHPGVLKVWAKRHRDLSRTRNQVVCRLHAVLCELIPGGVPDEITAGQAARILERVAPAGAVAQARCQLAAELLADIRHLDAQRREVKKKLAAAVTASGTSLTEVFGVGPVIAATVIGDVITVARFPSRDHFAAYNGTAPVEVSSGQRKIYRLSLRGNRRLNHAVHMAAITQIRHKHSDGRAYYQRKLAEGKTHKEALRCLKRRISDAIYARLRADARNAAAASTRDPGGQPGNDTGSSVTGSHPGHGLFGQATLGPEPSPRAPATLTQATPAPEPSAKKIQRAT

SEQ ID NO: 484439 - protein, 415 aa, unidentified
MAMKKNFILFDQVVERGAGMDVHKETIVVTIQGKGIKTETKSFRTFTSSLKKLREWLKQHGITHLAMESTGVYWKPVFNVLGDDFMIILVNARHVKNVPGHKTDKQDSKWLAKLLLSGLLKGSFIPGKEIRDLRDLVRTKTQLTGEISSAKNRFIKFMESANIKLSSVLTDVFCVTGQKIIAEILDGDYKPERLLYHVHGRVKASRQDIIEALTGNLDEHYRFMMKTMLEHIANIENVIAKIDAQIMQKTEDHKEILELLETIPGVGRDGAICIVAEIGTNMEAFASHKHLASWAGMCPGNNESAGKNKSGRITYGNAFLRTFLVQMAWAAARTKNTYLSSKYKSLVGRRGKKKAVIAVGHKILIAAYFIMKNKVGYNELGEEYLNNFRRDKLINYYKNQLQKLDPNVNFDKEVA

SEQ ID NO: 484440 - protein, 374 aa, unidentified
MNSVGIDISKGRSTIAVMRPFGEVVISPFEVRHTDSELSELARQLKSLDGETRVVMEATGNYHAPVAKLLHDAGLYVSVVNAKLVHGYGNNDLRRVKTDKKDAVKLANYGLDRWLTLPRYVPEEDTRLLLKNCYRQYRQYSKVQTVLKNNLISLLDTVFPNVNRLFSSPIRGDGSEKWVDFVAEFWYCRCVSEKSEKAFTNKYQRWCKTHGYNFSEAKAHTIHAEASGHIGIMPKSETTKLLVEQAVVQLRATSAALIALKREMLTLAAQLPEYPVVMGMFGVGPTLGPQLIAEIGDVRRFYSKKALVAYAGLDAPPNDSGDVTGRHKSMSKIGASSLRRTLFLVSICGVRRWMNRSTSSWTESALRANPSAST

SEQ ID NO: 484441 - protein, 419 aa, unidentified
MSKSLFCGCDIASDNNTIWLMLDDGSQPVKLFGVDNNQLGAEVLVERVYSIAKEHCVSDILIGTEATSMYDWHLLEYLAESKLALEFNLKLYRFNAKWIKNFKKSLAPRGKTDPIDSFAIAERLRMGRLPKEYVPDVKYQPLRKLTRFRYHLMQQITREKDFFLANLFLKASAYSSVKPFGSTFSATSLAVINDFFSVDELAAMPIEELTEFILEKGKSHFSKPDEIVDNLKRVARESYRLKPELTPTVNLILASTFNNIHCYKEQVKLVDSAIAENLKAFKHTLESISGIGPVYAAGILAEIGDVHRFPNDSALAQFTGLTWPKHQSGKFQAEETRMSHTGNQYLRYYLVEAANSVKRCDATYKAFYEKKYKEATKHHHKRALVLTARKLVRLVWTLLTRQALYQPGYCSFEDLSKIG

SEQ ID NO: 484442 - protein, 438 aa, unidentified
MSNKVIFNLDELFISVGIDVGADFSWMSIALPNQQFVGKPYKILHNSIDSLTTAVSKIKEAEELYSLESRIFLESTGIYHYPLFCYLRDKGFNCSVINPIITKNSTNINIRKVHNDRFDSKKAALVGLKPDLKVSLMPSDLALNCRNLCREYYDLMDNRSAYVNKLQGELRMAFPQYLGIFSKVTINTSLTLLETYTSPSAFLKADKQEIIDIIKSTARFGLTYAQNKYNAIIQAATDANQFGYIIDSNIKRIRLYISFIRKYDEEINSILESLHELVDANEDSDFVKQIHLIETFKGAGFLSAVSIMGEIGDFSAFSKPKQLFAYFGLDPAVKQSGKFEGTKVQMSKRGSAIARCVIHTLTLQSISISRNGEAKNPVLREYYLKKCDSKPKLVAMGAVSHKVCNMIFAILRDNKPFKIIAPQEHIKQYNSAKCDIAA

SEQ ID NO: 484443 - protein, 353 aa, unidentified
MYIGVDTHKRSHTLVLLDPTGQTIDTLTIANTPEAWLTALTWARPLATTRCWGIENSGSLGKGFAQFLLEQGEGEVREITPHRTAQYRRRGRTQDKTDTADALAMARLLLVEQTDLPAVQRDDASTELRLLSDQRDNLVAERTRLINQLHAQMLQIDPGYKERSGRLTATRGVEYCRDLQLPDAAPLIQTRLFIARQLADQVLRLFADIATLTRELTRRVKALGSPLQQLRGLGPLLIARLLGELGSTLRLPSAAALAALAGIAPLTVASGGRAGHRVNRGGNRQLNRVFHLLAWCQRRWEPKAQTYYAKKRAEGKTERAALRCLKRRLVDVVFRLLRPPVPTERAAEVALAV

SEQ ID NO: 484444 - protein, 358 aa, unidentified
MLGVAGYQGRRTVQIIVGVDTHKDQHVAVAINLQGVRLDERHVTATTHGYEELERWSHRMGGAGVFGIEGTGSYGAGVARFLMDRGHRVIEVNRPDRSVRHRKGKSDPVDAEMAARAVLAGVADSTPKSGDGEVEMIRMLKSARDSAVKTRTQAANQMKALVVTAPADLRDTLNGLTASALAKRCRNFRPSRLDNPKTAAKYALRSLAHRYRHLSDEIKNLEAELERLTWSIAPSLLNAFGVGPDTAATLLITAGSNPDRLRSEAAFASLCGVNPIPASSGKTNRHRLNRGGDRQANAALHRIVVVRLVYDPRTQAYMHRRTAEGMTKREVIRCLKRYVAREVYSIIQKPIQIVSKAA

SEQ ID NO: 484445 - protein, 373 aa, unidentified
MKDCTRQKDPNAKTIEKQFQYYCGIDIHKKKSYFYIINNKGKRVFSGNINTDIDDYRELLEQYESEEIQIAIEIGSLTFSYCDLFLEMGISFYIVNTAKHYAIAKSSSKTDKKDAKRLAINLWKDVLPQKVYMPTPEERQLRILISHRAYYVKQLNRLINTTMAFLATYHIVLNRKALRSHKTWMELDEEIKAGDNRILKHLFSHAYQDFLFSCQCTDETEELLIELIGERKEFTEKYDLLLSIPGVGTITAITVICMAGNIGRFQNVRQFVKYLGLAPKVRDSGGKQYGSRKITKEGNGNLRGYLGQCTLGMIRTKKLEALPLQSWYGTVKKKRGWKKARVAATRKLVHIIFGVLKHETPYNPAMVTLKRLA

SEQ ID NO: 484446 - protein, 331 aa, unidentified
MFPVGIDVSKNTLDLCILYDGIKGRIKTRNIQNNRHSVENILRWLRLQHCGPEDVHVVMEATGVYHERLATELHDAGFRVSLANPHRSREFARGMGIMTKTDKVDAYMLACYAFLKKPHHWEPPSPEIRYLAALLRRRDVLLGDALREENRLEKYLSTDTPADIISSCRRMAQLLREEVSNIERQIKAHIKASPVLRRDYTLLNSIKSVGPQLGMHMLVELRSHNFASAEQAAAFLGVVPIEKRSGTSVRSRPRMSKIGPPQLRARLYMSALCGKIYNKRMRNIYDEMCLRGKPKMVAIGALMRKLVHWCYGVLKTGTVFNDEGLKQVLST

SEQ ID NO: 484447 - protein, 402 aa, unidentified
MNCVGIDVSKGKSMIAVMRPFGEVVVSPFEVRHTANELSELAGLLKSLDGETRVVMESTGNYPAPVAWLLHGAGLYVSIVNAMLVHDYGNNSLRRGKTDKKDAVKLANYGLDHWLTLPRYVPEEDTRLMLKTCYRQYQQYSKVQTMLKNNLISLLDTAFPDANRLFTSPPRTDGSEKWVDFVATFWHCECVCGLSKKAFTAKYQKWCRKHGYNFSQDKALDIYASACGRFGVMPKTNTAKLLVEQAISQLQTTSAALAALKQEMQSLAASLPEYPVVMGMFGVGPTLGPQLIAEIGDVRRFHSKKALVVFAGIDAPPYQSGQIDVRSRSISKRGSASLRRTLFLVMGVLLQCAPMDEPVYQFMNKKRSEGKPYRVYMMASANKFLRIYYASVKAYLDSLEHD

SEQ ID NO: 484448 - protein, 463 aa, unidentified
MRKKVENKNSGRRDKPKVDWKALDIVHPNAAGVDIGGSEHWVAINPELDEKPVRCFQCFTEDLQQMADWLIERGVRSVAMQSTGVYWIPVFEILQQRGLEVYLVNARHTKNLPGRKSDIAECQWLLKLHTFGLLNNSFQPSDEVRRARTLWRHRGGLVAQASSTIQRMQKALTEMNIQLSNVLSDLSGVSGMRIVRAILDGQRDPKALAALADPQVKASKQVIAKSLEGNWRQELLFVLGQEVEMYGMYQDRIAACDRELQQQLRVRASKVDLQAQPLGPRPKGKRARGNAPKFDLRSELYRISGVDWTQVDGIDVQVAQSVIAEVGVDLEAFPSERNFASWLGLCPTNDSSGGRVLNRRTPKVVNRAKVAFRQAASSLIRSQSYLGAQYRRLRTRLGPPKAITAMARKLACLFYRLLKQGKQYVDKGTEYYEQRHREQQVRFLIKRAKQLGLQVVAPATTNA

SEQ ID NO: 484449 - protein, 403 aa, unidentified
MSICFAGLDWASRTHAVCVIDERGSVLTQFEINHDASGLADLHRRLRGAGVTAVAIERPSGLIVDALLEAGLSVVPIHPNVVKASRPRYRSHGGKSDASDAYLLADLLRTDGHRFKPLAPQSDDIRSLRALVRGRDDLVATRVQLANQLRSLLHSFWPGATEVFADVDSPIGLAFIRRYPTPASAQRLGPKRMAAFCSQHAYSGRRSPEELLDRLHQAPAAALGKLEMAAKGELALSLARTLDRLGDQIRLLTRRIENHVSSIDDGRILMSFPRAGRICAAQILAELGSVRERFDSDEHLAAEAGVAPVTYASGKSKAVTFRWACNHRLRAALTCLADNSRHANAWAASVYAKAKARGCDHPHAIRILSRAWLRVIWRAWTDRKPYDPALHGSAKLLLKTQGG

SEQ ID NO: 484450 - protein, 346 aa, unidentified
MLYAGLDLSRKRLDFHLLDAEGAIVDVGASPPDADGLRGLSERLNRYGEPIRAAIESMNGARFVHDRLELAGWQVEIADAQKVKGLAPLACKTDRIDARVLAELARRDLVPAIWLPDPRVRAERERARWRLHLVRHRSSLKQRVHAVLLTHGKPCPVSDLFGLRGRQLLARLGLPEPWQGTIEASLRLIDELDREISECERELRRLGADHRYVPLLCTVPGISWVLAYTIAAELGDIGRFATPRKLAGYSGLCPRVYQSGERDLRGPLSKQGPRYLRWALVEAATHACTHPVYRDRYQQTKARIGKQRGAKVAQVDLARRLSEAIWHMLTRDQPFAPKGATDPLAA

SEQ ID NO: 484451 - protein, 340 aa, unidentified
MQITTIGLDLAKSILQVNGIDASGQAAVRKKLRRAEVLGFFKALPPCLVGMEVCATAHYWAREIGACGHDVRLMAPSYVKAYLRRQKNDAADAEAICEAVQRPTMRFVPVKSAERQGVLVLHRTRELLVRHRTMLINAIRGHCAEFGIVAPQGARRAVELIEHIRQTEAGDISQLVRASLLTLADQLDAIAVQIHALERRLLVWHRQDQDSQRLATIPGVGIISATALAASVPDPKLFRSGREFAAFLGLVPRQNSSGGKARLGRISKMGDRYLRKLLVVGATSVIRRARTGALAAAPWIRSLLERRPARVVTVAMANKTARIVWAVLARGEVYRAPASA

SEQ ID NO: 484452 - protein, 316 aa, unidentified
MDEPRPACCVGVDVSKDRLDVHLRPSDEAFAVARDGKGLENLVERLKALNVSLIVLEATGGFEITVAAALAGASLPLAVVNPRQIRDFARALGKLAKTDAIDAEVIAIFAEKIRPQARPIASKEVQILGELVARRRQIVEMIGMEQNRRRRTADKRLAKRIDRHLAFLEKELVDIDGDIDASVRASPAWRETEELLTSVPGVGPVTARTLIAELPELGQLDRRKLAALVGVAPFNRDSGTWRGHRMIAGGRTSVRNALYMAALVAIRHNPLIKAVYQRLIARGRPKKVAIIACLRQLLTVLNAIVRDATPWAIQNA

SEQ ID NO: 484453 - protein, 340 aa, unidentified
MAQVITIGLDLAKSVFQVHGVDAAGEVVVRRQVKRSQLLQFFARQPACLVGMEACASSHYWARELVALGHHVKLMPAQYVKPYVKRGKNDAADAEAICEAVTRPTMRFVAIKTADQQSAMMLHRVRLVLCRQRTQLSNALRAHMAEFGIVAPVGRMGLERLLEVVAEPADHRLPPAARNCLQMLAAQLDVVKAQILDNDRKIIADARRTELGRRLLEVPGVGPVLSSALVAAVADPGIFRTGRDLAAWIGFVPRQNSSGGKERLGSICKAGHRYLRQMLVVGAMAVIRHAERSAKKRPWLVQLLARRKAKVAAVALANKTARTVWAMMMTGERYREPLPA

SEQ ID NO: 484454 - protein, 427 aa, unidentified
MNEPRYKPTLCVGADVHKDEIVLRAVDKAQGHEVLEPFRVTNNLPGAQSAAATLAQVAAELGYTRIEIGWEATGMLWIPFHRYLSHEPLLQPFELELVCFNPKLVAKFKDGLVLRGPKNDDRDAFDIAARIRFGELPVTYVPSDFWQGLRRLTRYRYRLSKALSQEKMRFQSYAFLKASDWKRVKPFANVLGATSAALLTEFTVTELQQMTHDQLVDLIARRGRGRFADPTTTARLVRQALRTSYPIDPRMDDMVTASLAAMWDHIRYLDRAIKRLDQHIARYIDLIPNPIITIKGLGAVITAGILAEIVDVLRFKEHKHLAQFIGLTWRKSSSAGFVSQNTRLTKVGNVYLRYYFILGANLLRQHNLEYKAYYWRKYQEVSKYQHKRSLVLTARKLVRLVHALLTKNLPYVRPRMTDPSQEDDKLQ

SEQ ID NO: 484455 - protein, 377 aa, unidentified
MNDLIRIGIDTSKSVFVLHGVNAAEQPILRKRLRRRQVVDYLGKLPPMRIGIEACGAAHYWGRELTALGHEVCLLAPQHVKPYVRRNKNDEADAEAICEAMSRPRTRFVPIKTAEQQAALMLAGVRDQLVRRRTQLSNSIRGYAAEFGLVAARGLDKIEPLLARIAADETLPALARELFAEQAEDYAELTRKLRRIDAKLLAWHRQNALSRRLAEIPAIGPIGASLLAMKVPDPAAFKTGRDFAAWLGLTPKDHSTAGKTRLGTITRAGDESLRRVLVVGATALIQQVRKGRGHPSPWLIALLKRKPPKLAAVALANKTARIAWKLMVSGGHYDRNRAAASRAERCAPLVGGFAARPALEAHTMPRRKVAPAAMPKA

SEQ ID NO: 484456 - protein, 351 aa, unidentified
MEHTTIAVDLAKSVFQVAVSHRAGRVDAERRLSRARFLAYFAQQPPATVLLEACGSSHHWARQLEQFGHVVRLLPAHDVHRYVRRNKTDRTDAKALLEAARNEEIHPVPVKTVEHQAIASLHRLRSTWLATRTARLNTLRGLLREFGILIPVGAQHVVPRVRELLGEPTATVPVAVQSTLANACAEIAVLETNMRDVERQLAAIARQLPDVALLQTVPGVGLITATALIALVGDIGRFGSGRHFASFLGLTPKEDTSALRRRLGAISKQGDVYLRMLLIHGARSVLWHAKSCAPPRSFQAWARCAEQRRGHNVAAVAVANQLARIVWAVWSQQRPFDPNHRHAETTSVSNN

SEQ ID NO: 484457 - protein, 349 aa, unidentified
MIIIGVDFHPEFQQIAYLDGDTGELSEKRLGHREEAEQFYRTLVADGVQARVGMEASGHARWFERLQGELGIELWIGDAAEIRTRRVRKQKTDRQDAQLILKLMLKDDFPRIWVPSWENRDLRQLLWHRHRMAQARTRIMNQLQAVALNEGLRCKKKRLWRTKRPQLESFQLARWASRRRHDLLELLDRLNPTIAELSQAVEQEVEKRPEAQRLATHPGVGSLTAMAFVLIIGKAERFQCGKQVASYLGLVPLEDSSGNRRRLGHITKQGSSMLRFLLVEAAQVTVRSLPEWRRRYFHLMMRRGRKIAKVAMARRLAVCLYWMMRQGWDYQQWVEFGSHVEQPGNRHGV

SEQ ID NO: 484458 - protein, 340 aa, unidentified
MKTHRSVNWGISLIAPGEFRKSAAQAGDQVDSVRVDNDPLRFAEVVSQAPAGSDVVIEATYGWYWAADLLKEMGYVVHLANPQGNDWGHRRVKNDERDARDLADLLRLGRLAEAWIAPPLTRELRELVRFRAKLSHLRTGVKAQAHAVMAKNGVLPCRGDMWGIGGAAQFDALELPTAYSHRIEVLRDLVRVYDKEIAQLDHMTHAILRDDAGYNAVQAIYGVGRVFGAVFVAEIGNVERFGSPQALSSWAGLTPRHRESDTKVQRGRITKQGSRLVRWAAIEAVARYHGGEAFREQFAVIAERRGRPKANVAIARKVLTLVYYGLRDGEIRCLQDRQAA

SEQ ID NO: 484459 - protein, 369 aa, unidentified
MKKNIIEQPKKNRKDRKQLDGNLTVGIDLGDRSSRYCILNEDGEVAQAASVATTKKDLNRVFGALRHSRLVLEVGTHSPWVSRHLKALGHEVIVANPRRTRLIAASSNKNDRLDAETLARLGRVDPKLLFPIRHRGEEAQADLMVIRTRATLVEGRTRLINTARGLTKSFGERLRKCDARYVNEELAKDLPPALKGAIEPLLKQIGEMSAGIKEYDATIQRIARERYPEIALLTAVGGVGVLIALTFILTLEDSHRFQRSRDVGAYLGMRPRRRQSSGSDPEYGISKEGDIYLRKILVQGAHVILGRQGSDSDLRRFGQKLMARGGKGAKKKARVAVARKLAVLLHHLWVTGEVYEPLHGQAAPVAVAA

SEQ ID NO: 484460 - protein, 409 aa, unidentified
MSKMEITAVGIDVSKGKSTVAVRRPGGEIVMMPFTVLHTAKGLTELTNTLRSISAEIRIVMEHTGMYWRPIALALKEGGFFVSVVNAMLIHDFSDNSIRKVKTDRADSLKIANYALTFWQELRDYSETRQMLKIQSRLYERTLNSSIALRNGLISLLDQTFPGANKLFDEQRAKSGHIKWVDFVRRFWHKDCVAALSFSSFADTFQKWCKRTGYHYSLADAERIHGIARNSVATLTKNDSTKLLITQAVDSLNAVYDTLQILRNEMQRLASMLPEYEVVMAMQGAGPITGPQLMAEIGDVRRFTSKGALVAFAGVDAPPFQSGTFDSKSRHVSKRGSPHLRRVLFTICSVILQHSDHENAVFQFMDRKRTEGKHFYVYTVAGCAKFLRIYYAKVKEYLNNIDSCSDYVV

SEQ ID NO: 484461 - protein, 333 aa, unidentified
MKKQTPPEKMTATTYVGIDVAKATLQVHLNGHQIEFNNNSKGHAQLTKKLAQLTRPHVICEATGGYERPVVAAFHQAKILVSVLNPAQTLAAAKAQGIRAKSDCCDAEALTDYGQRYQPQPTVPVPPELREMTELALWLQQLIDHRAVAKTQAEHHDNAFVRQQHQELLAHYQGQIKAVEEEIKKRIQSQQEFQQRLDCLAEIHGVGFRTALMMLIRMPELGQINRGAAAALAGLAPWTRDSGTMKGKRGIGGGRAQVRPVLYMSALSASRCNPVLAPFYAALKKRNKPSKVALTAVMRKLVIYMNHKLKVLATTPPAQETKTPTKPKKDLAN

SEQ ID NO: 484462 - protein, 343 aa, unidentified
MEYYVGLDVSLKQTSICVVNQTGSIVQEGVVDSDPEAIASFVRARAPGTVRIGIETGPTTTWLWTELKRLGLPVICIDARHAKAVLKMQINKSDRNDAAGIARIMQTGWFKEVRVKDLDSHAVKALLASRALLVKIKRDLENQVRGLLKNLGLVIGRAKFNVFAVRAEGLIENRPELVAAVRPLLAARRAIEQQVEDLDRKVHKLARRDVQVRRFMTVPGVGPITALCFKATIDDPTRFKRSRSVGAYIGLTTRRHASGEIDWSGRISKCGDAMLRMYLFEAAGVLLTRVPKWSRLKAWGTKLTKRNGLRKAKVAVARKLAVILHRMWIDGTEFNWSTKKAAA

SEQ ID NO: 484463 - protein, 342 aa, unidentified
MYYMGIDLHKKYFVSTIMNKEGKVLKRSRVSTDRESIKHYFGLLKNIRPVKAVIEATFNWVYFYDEISPFVDEAILAHPLKTRAIAEARIKTDSIDSNTLAHLLRSDLIPRAYTPSFETRDLRNLLRFRMALVKVRTSLKNRVHAVLDRNYIEDPTFKGLSDKFGKTGMKIMRALNLKGNDTSILNGYLDLIEEITKKINDLEKRIKSFVKDDEITLLLKTIPGIGDIIAFLIRYEIDDIERFSSAKKLCSYAGIVPSTYSSGGKTYHGRITKQGNKWLRWALAEASHRAIVKSPSLRSYYHKIKYKKGSNTATVALSRKLLEIVYKVWKEKRPYYEKEIWF

SEQ ID NO: 484464 - protein, 407 aa, unidentified
MRLFVGDDWAEDHHDVELMDSAGRVLARKRLPEGVAGIARLHELAGQHLGQDPDDAEVVIGIETDRGPWVAALVAAGYTVYGVNPLQASRYRERHGVPGAKSDRGDAHMLADMVRTDSHQLRAVAGDSAAAEAVKVVARTHKTLIWERTRQVQRLRHQLREYFPAALAAFEDLDAPDALELLGRAPDPGRAAALTRAQVSAALKRARRRDITGKATAILTALRSAQLGRPPAVTAAYAVTARSLIAVITVLNEQVKALESQVEADFGRHPDAEIYRSQPGLGSILGARVLGEFGDDPDRYVSGKARKNYAGTSPIIRASGKKKTVAARFIRNDWLIDALMAQAISALRASPGARALYDAERARGTGHNPALRKVANRLVGILHGCLKTRTLYDEATAWPHYENTLAA

SEQ ID NO: 484465 - protein, 368 aa, unidentified
MDKSTKLYVGMDVHKDSIDVATGEDAAGEVRHYGAIGGERAAVSRLARKLQSRGKELVFVYEAGPCGFGIYRMLRARGHECWVVSPGMTPRSNADRVKTDRRDCLKLARLARAGELTPIHVPDEIDEAMRDLVRAREDAVLMQRQARQRLGALLLRNDIRYNGKTLWSPAHRRFIAELKLPHPAQHIAFEEYAQGVDEAGQRIQRLEAAIGDELTRWRWRPVVQALQALRGIRTIHAVRLVAELGDLTRFAHPRHLMGFLGLVPSENSTGNRRRQGAITKTGNSSARRALVEAAWAYRYGARVSVGIARRQSGLPKPVTDLAWKAQLRLCSRYRRLSARGLNRNKIIVAVARELSGFVWALGQQVKPL

SEQ ID NO: 484466 - protein, 338 aa, unidentified
MKVQILGIDLAKNVFQLHGVDRKGRSVLTRRLRRDQLMKVIGELEPCLIGIEASTGAFYWQRQFEKLGHAVKIMAPQYVKPFVRRQKNDTNDAEAICTAVQQRNMRFVPKKTLEQQDIQALHRARQRLVNHRTALISQMRGLLLDRGIAIAVSATRARRLIPKILATPSDELTELMREIVSSLYAFMLQIDERIKAFDRKIDAIFKASEVCQRIAKIRGIGPKTATAMIAAIGDGSDFKNGRHLAAWLGLVPRQHSSGDRRVMMGISKRGSQHLRTLLVHGARAVVRTAVRKTDSRSMWVNELRQRRGYNRATVAVANKNARVIWAVLTSGEPYRAAA

SEQ ID NO: 484467 - protein, 351 aa, unidentified
MSHKTAATVAHTIGIDTGKNTLHLIGLDEKGAIVLREKIARGRIAARFANMPRCLIGIEAGMATHYVARELTALGHDVKQVPPAYAKPFRQGHKNDFRDAHAIAEAVQRPSTRCVPVKTDDQLDLQALHRVRSRLVGQRTAVINQIRGFLLEHGIAVRQGLRFLRQQLPDILAKRSDVLSPRMIRIMEDLSGDWRRLDERIEHVTEEIEVLAHGSEGCRQLMTVPGIGPIIASAMVAAIGNGAAFAKGRDFAAWLGLVPKQMSTGDRTILGRISKRGNRYLRTMIMQGARVILLRPANWAKHSFGPWLTAAANRLHHNVLATALANKLARIAWTVLMQARSYEARVEPRTA

SEQ ID NO: 484468 - protein, 349 aa, unidentified
MSSTFTSTIVTIGIDLGKNTFHLVGLDRRGAIVSQLKLSRGQIERRLANVPPCLIGMEACSGSHHIGRRLIALGHDVRLIPAQYVKPFLKGHKNDYRDAEAIAEAVQRPTMRFVAIKTPEQMDLLALHRVRSRLVGQRTGLINQIRGFLIERGITVRQGVLPLRKALPDILSSNAEVLSPRMVSLIADLIQDWRRLDERIETVSAEIEALARQDESCQRLMSVPGVGPIISSAVVAAIGNGAGFKQGRDFGAWLGLVPKQESTGDRTILGKISKRGNKYLRTLFVQAAHVVLVRRPATARRGLWPWIEQASRRLHRNMLAIALANKLARIAWAVLARGRAYEPRVPAHA

SEQ ID NO: 484469 - protein, 351 aa, unidentified
MQVIGVDCHKARHTAVLVDAAGQEQARWDGENTPAGWQALAAWGQHQATTLVWGIEGTGQYGRGLAQLLVAAGQTVHEVNPRLTAAQRRVSRRRGKSDAADALAIARVVQQEPHLPRVQAEDATAVLAVQVIARDRMVHDLTALRNRLHQHLTQLRPVLPTPRPTLTSRAGIAALVDLQIPAGDAMVQAYAQLVRLLAAQMLLVMTQIAELTATIAALCGAWTAPLQAVTGVGVLSAGMLAAHLGGKTFQTDAALAMYAGVAPLDASSGRQVRHRLNRSGNRFLNAVFHRIALSQAAHSPRARAYLAKHRANGKTAKEALRCLKRMLARLILTAWRQCQPPPLAHISLPLT

SEQ ID NO: 484470 - protein, 317 aa, unidentified
MNEKISVVVGIDVSKAILDIAVRPLGRRLRFTNDETGIVALVAEMRGLSPLLIVLEATGGFETPSVAALAAASFAVAVVNPRQVRDFAKATGQLAKTDTLDANVLAHFAEVIRPAARPIKDADLQALEALITRRRQLLDMVTAEQNRLSMASPHTRKGIVRHIAWLKKQLKDIDEQTTRRIKESPLWLLKDQLLQTVPGIGQVTSSTLLVALPELGKLSRREIAALVGVAPFNCDSGTLQGKRRVWGGRAQVRSVLYMATLVAVRFNAVIRAFYTRLCSAGKPPKVALTACMRKLLTILNAMLKTNTLWAQSTPENA

SEQ ID NO: 484471 - protein, 315 aa, unidentified
MHIQQSFMVGIDVSKAHLDVAVEGKRAVVRFDNDAPGCAALATAVAGAELVVVEATGGYEMAIVRTLMAAGIPVAVVNPRQVRDFARASGRLAKTDQVDARVTLHFARAMRPAQIPHIDDGRIALAALVTRRRQLIDMAVAEKNRLEHAPEAVAALVGETLAALKVQLARVDAAIALAIEAEPDTAERRDLLLTVPGIGEVGAAVLIAELPELGAIDDKKLAALVGVAPIAHDSGTWRGQRHIAGGRATVRCALYMATLSAIRCNPAIKTFHKRLRDAGKPPKVAIVAAMRKLIIMINTILKRRTPWNQPQQHGC

SEQ ID NO: 484472 - protein, 419 aa, unidentified
MTTNYQVAAGLDVHKRFIQATILWINETKKQRQFPRTHEGLLGLKDWIIEHKCDVVACESTSDFWVCIYDILISHVLVIVGNAHDIKVMAHKKTDKIDAEKIALLALKGMIAPSRVMPRYHRDFRKLVRLRHFLVGKRTDIKNRIHSILDGELFQLSLIFSDMFGVSGQRIMEGIQRGSSVEQILQSIPPWVLAKKENELRALIEQNVSPNAMIQLGHCLRVVRQLDEEIEMLTDEALTYVLQKYPREYTILKSVPGIGNIAAITLIAEIGNFGDFISGNKLASWIGIVPKVYQSANHIVKCLITKRGSRIARWIMTEVAHAAIRQRKNVFREWYEEKKAVIGSGKAIIAVARKMTTIIWHLIVNDEEFINKYNEPEQPKSKKVHTIHIPVSKNYTVEQVLALVADAINFLNKSDPDPI

SEQ ID NO: 484473 - protein, 430 aa, unidentified
MEKIRKHVAGIDIGAKKLFVSVENEPVKNFDTFTDDMEVLGDYLLSHNIETVAMEATGVYWVILYDILLSKNLDVWLVDGRSTKQVPGRKTDVKDCQWIQQLHSYGLLNRCFIPDNLVQELRAYQRLREDHIRSSAMHINHMQKALVLMNIRLKEVISQIHGVSGMRIIRAILSGERDPEKLALFCDSRILKTKAALVVKSLNGHYSASSLFSLEQAVKCYDFYREQIASCDIRLEQVLKKMSKDGSNQSKPNKSRKAIRHHKPNIEDMGFHLIKIFEGKDATVLPGITDYSWMQLLSEVGTDLEKWSSEKHFTSWLGLAPKQHNSGKRNRNYKVKGTPKAGLIFKQAAVSLLNSKHIALGVFGRKIRAKKGGLVAIKAVARKLAELYWKLFVKGLEYVENGIKKYQEKMLLNKQRSVKRMARELGLEII

SEQ ID NO: 484474 - protein, 363 aa, unidentified
MFTERTSIGLDVHARSVVAAAIDGVTGQVSQTRLTPSYEHIQEWIKQLPGPVAVADEAGPTGFGLYRALTGAGIRCEVLAPSKLQKPAGDRVKTDARDALHLARLLRLDEVTSVSIPSVNREACRDLVRAREDCRGDLMRARHRLSKLLLRHGIVYHGGAAWTDAHDRWLRARAVPQLLMPATRMAFDSDYEHVLMLQARRQCLDSAIEDIAADSEFTAVVRRLSCLRGVGTLTAFALAVEIGDWDRFTGNTIGSFVGLVPSESSSGSTRAQGPITKTGNTHVRRLLVEAAWHHRPKYQVRAVMRSRWELAPAAARARGHEGNRRLHNRWLGFLARRKRSTVANVAIARELAGWCWSLAVMDD

SEQ ID NO: 484475 - protein, 356 aa, unidentified
MSHDVKYIGMDVHKEAIVIAVLNGSGELVMETILETKASSILQFIHGLRGELHVTWEEGTWAAWLYDLLQPQVQEVVVCNPRRNALLKEGSKSDKVDARKLADLLRTGMLRPVYHGENGLRTLRELARSYQTIGKDLTRVMNRLKALYRGWGIACAGTRVYAPRYREEWLNKLPQTGVRRRAELLYQQLDGLQALRRNLRPEFLAESRKHKATKLLRQIPCIGPIRAARLIALMQTPHRFRSKRQLWTYSGLGIETHDSAQFRFVSGQLQRSRKPQQIRGLNRNHNHEMKEIFKSAATRASCGMGPFHDFYAGLLAKGMKPELARLTLARKIAAITLTLWKKEERFDVEQLKTQAA

SEQ ID NO: 484476 - protein, 347 aa, unidentified
MLADQLDYVIGVDPHRDRHALAVVEVRSGGVLFETTVEADSAGYQAALLLADAHAPGRRSFAVEGAGSYGAGLTRFLSDHGETVFEVGRLPRERRSGGKTDALDAVRAARSVLAKSRPALPRAKGEREALRALMAARDGAVTAKTAALSQLRGLLVTAPEPLRAELRPLTRARLLAHLTASRPDRRQDPELRGTQLALKAVARRIRQLASEERELAREIEQLTRSLAPQLLAEPGIGALSAAQVVLSWSHPGRIHSEAAFARLAGSAPIPASSGQTIRYRLDRSGDRQLNRALHQIVVTRRRMHPPTIAYIERRTREGKTRREATRCLKRYLARNLYRLLEHPPTTT

SEQ ID NO: 484477 - protein, 374 aa, unidentified
MSNSIIYVAMDTHKKEHDVALHYSGQEEIVQFTVKNTNREIAKMVKKIIKQASGEVRFCYEAGVCGFALKRQIEDQGCKCAVIAPSLVPRRPGDRVKTDRRDALKLLTMFKAALLTEVHAPDERQEAARELTRCRQAAQENLKRVRHQLLKFLLRHGYIYSEGSHWTIKHFKWLRALEFEDGYLRQVFDNYFTEMQHCIGRLESLEQDVKRLAESEPYKEVVGLLRCFHGIDTLSAVTIITEIFDFGRFSSPGELMSYLGLTCSEHSSGERQKKGPITRAGNKRVRRILVEVGWQYRHPYSISGGLRQRRAGQPQWVIDIADRAGQRLRKKYGHLTARGKMPCKVTVAIARELAGFIWSVFREYQIRGNVKEAA

SEQ ID NO: 484478 - protein, 337 aa, unidentified
MSKIILVGIDTAKNVFHLVGVDRRGNYVYRKKLSRKRLLPALAQIEPCTVVLEACAASHHWARSMRQLGHTARLIAAQHVKPYRRGQKNDYRDAEAIISAALSPGMHFVGVKSVEQQAEQALHRVRSQLLRQRIAAANGLRGLLGEYGLAFSKGMRRLRKGAVGFVDSGQAEALGLTELVWDVLDELDRLQQRINSYERQIEQRVRHDPISKRLRDELHGVGRLSASALRVKVADARDYANGRNFSAYLGLAPGHRGTGGKVKIGKIRRSHDRYLRQLLIHGARSVLSHLGDKQDKQSRWLRSLRDRRGFNVATVALAHKNARQAWAILAQEQALQD

SEQ ID NO: 484479 - protein, 341 aa, unidentified
MKIRTLGIDLAKNVFHLHGEDAKGKVVIRKRLSRNKLPEFIANLPSCLIGMEACGGAHYWARTFRKMDHQVKLMPPQYVKPYVKTNKNDYNDAEAICEAVRRPNMRFVGIKEIEQQDIQSLHRIRSGYMQARTRLVNQIRGLLSEYGIVIGRQVGQLRCRLPGILEDGENQLTEFGRELFSGLYEELIRLDRQVEACDKQIERIFKANEVCQRLAEVEGIGPLTATALVASVDDPHVFQKGRQMAAWLGLVPKQHSTGGKPVLLGISKRGDRYLRTLLIHGARSVVSRTEGKSDARSLWINQLKQRCGINKACVALANKNARIVWALMARGDDYQKPAELH

SEQ ID NO: 484480 - protein, 331 aa, unidentified
MTYIGIDVSKATFVVAYSSEKNSKTRTFKNTVKGIHAFVQTLSSKEDHCIMEATGNYSSLLVYLLNEAGVTTSLENPLKIKNFARVILSTIKTDELDARIIALYGERMQPRPYKLPSDAILTLKQKRTVIRQLKKQLIATRNLKGSMELLPFFDPSCKKSVTQTITFLEKQIKTLEEDLSVLAHKEYKKQMDLLTSIKGIGVTLAAALIMATGGFTYFDNAKQLTRYLGLSPNYQQSGTSVNFKGHINRNGDISLRSQLYVAAFASLRCNKECRACYDRLRSNGKPGKVAVIAVANKLVRQAFAVVTHEKPYVDGYVSTLGSAETSSSVEG

SEQ ID NO: 484481 - protein, 383 aa, unidentified
MRTVCGLDVHKDSVYLCILSSTGEIYEKKFGVLTTELIEMRDLMLSHHVLEVGMESTSVYWVPIWRVVEPHFKLKLINPYFIKQLPGHKSDVKDAQWIAECMLKDLVNGSFVPPERIQQLRQYDRRIYDLDDEIIRKLAKLDAAVQRCNIRLSNYVSNTDSVSYKAVIDKICEGVTDPNVLVEEIHGRIINHHGKETIIASLTGSITECDIDIMQQLKAEIDLAEQHKQECMDKMLAICENEYSTQLHNLQTIPGVKMRTATSLIAEIGTDMSHFETANHLASWSGLKPRNDQSNKTIKSRRITYGNRYLRRTIIQCSWGASRTKNCFFSRFSYHQTQVRKKNRMKVQVAIARKMLICAWHILKDGVSYKDFNNIIEASVTNG

SEQ ID NO: 484482 - protein, 366 aa, unidentified
MKRVACLGVDYHTKTITIAVYLGKEKKFYETIRLNNDDKIIKKYMKKLSNQFDLRICYEASCSGYVFQRKMQALGYHCDVIAPSLTPRKPGDRRKNDIRDAKKLAQNYANDLLTIVHPPSQEEEAVRSLIRCRIAMKESAKRVKQQINSFLLSQGCRWAKSKWTKQHRLWLSELEMPNRYLQQVLDEYFSHLSYLESRLQHIEQQIEQIANSKLYAPSVKKLRALRGIETLSAMILISEITDFRRFPSPRSLMAFLGLIPGEDSSDDTRKNVSITKAGNHRCRNVLTEAVQHYVTKPRLSLKMKQLLSEVDAHCAVIAQKCMYRLHKRYWSLVMKGKARQKAIIAIARELVGFIWALMQPVPCTGA

SEQ ID NO: 484483 - protein, 399 aa, unidentified
MSKSAHLELRVGIDVGCHSHNVAIGLSSGEILDEFSVSHNPEGFRLFFSRVEKQEKKHGCPVSVAMEGFNGYARPLDTLVRARNYRLFNVNNLKLARFKEIFPSAAKTDDIDARKCLELFQLRDHLPTAKDVLQEVAATPEENDILKRLTRRRRRLVNERARVLNNMQTDLQAVCPGLLEITADAANLWFLRFLTSTDSLIKLARLQRTTLLKISGIGTKYARLIQEWQKQAHFSHEAELVGEMIQEDACRILELSDKIKVLEAKFEDIASRSVIAQTLSTIPGFGTVSKLELAGEIGTIDRFKDEASLALYLGMAALDNSSGKKKGTKDPKHVNTRAKAAMMIAVDRHRKCIPESQRYYEKKRSEGKRHNQAIRALGRHLCRVIFKMLKHEKGYEIRN

SEQ ID NO: 484484 - protein, 360 aa, unidentified
MRYSTIVGIDTHSKKNAVCAIVPETGEMRETILSEDPEQLLAWIVEQDFPKPVGCVYESGPTGFGLARSLVAGGVACTVAATSKLSYRVDRQKNDRADARWLAQQMLAGGVRAVRVPTPEEESLCHLSRLRGEVAADLRRAKQRVSSFLLLTNTEYNLTKKKWSKTFYRWAESHEFDQPADTFAFRCKVSAVLRLEERLAEVEAEIMRVVAASPKLSERMSRFTCIHGIGKVSAFSLVCEVHDFDRFKNGASFASYLGLVPSESSSGKKVSRGAIAKQGNSHLRRVLVEAASCYSKQFKAVKSEDAAVPEAVRAKADRCAVRLRKRRAALKERNVSANKAKVAVARELAEWIYYIAVMPA

SEQ ID NO: 484485 - protein, 351 aa, unidentified
MLIIGVDYHPSFQTIAFLMEETGECGEQELNHSDGEAEKFYRDLNQRGVSVRVGLEATGYSRWFEGLLAELGFEVWIGDAAEIKKKRVRKQKTDREDARLLLKLLLENRFPRIWVPSPENRDMRQLLWHRHRLVQMRTRIMNQLQAVAMNEGYRWKKKLFSEQGRALLEKLSLAPWASRRRKELLELLDQLDPKIAELTAAVEQEANQRPEVLRLMTHPGVGPVTGLAYVQVIGTPDRFPCGKQIGSYIGLIPCEDSSAGRQRLGHLSKQGNALLRYLLGEAAQAAVRCNPHWRRRYVHLAMRRHKNIAKAAMARKLAVRLYWMWRNGWNYSQLVEFGSHAGKLATGHGVK

SEQ ID NO: 484486 - protein, 377 aa, unidentified
MIIIGVDFHPEFQQIASVDTDTGEFQEKRLTHREEAEKIYRALACAGQKVRVGMEASGHARWFERLLAELQIELLIGDAAEIRTKRVRKQKTDRQDAQLILSLLLEDRFPRIWVPSWENRDLRQLLWHRHRMVQARTRIMNQLQAVALNEGLRCKKKLWRERGREQLESFRLAPWASRRRRDLLELLDRLNPTIAELSQAIQQEVEKCPEARRLMTHPGVGPLTALAFVLIIGEADRFQCGKQVASYLGLVPLEDSSGNRRRLGHITKQGSSMLRFLLVEAAQVTARSLPQWRSKYLHLMMRRGRKTAKVAMARRLAVHLYWMSGSNSVRTRDSSEIAMVCSRTSSILIGRPAPLHGGVRSSNHDRPLPTEEMHGSN

SEQ ID NO: 484487 - protein, 352 aa, unidentified
MDKGSKLDFRGQHIYVGMDVHKKSWSVSIQTEQFEHKTFTQPPEVEKLTNYLQRTFPGATYHTVYEAGFSGFWLHDQLREKGIDCMVVNPADVPTKNKERAGKTDRVDCRKLARGLRNGEIKGIYVPSRVKVEDRSLVRTRQSMVRKQTRCKNQITSILFFYGITIPEESRWSRQFINWIESIRMERASGDFALKAHLEELKHLRQIIANLNRAILSLSRTEEYRADVLLLKSVPGISTLTAMILLTELADIFRFPSLDKLASYAGLVPDIKSSGETEYSTGITFRRNAALRGLLIESSWVAVRKDPALIMAFNKLSMRMRKTQAIVHIARKLLNRIRFVLKNRQNYVPAVV

SEQ ID NO: 484488 - protein, 395 aa, unidentified
MVLKVKVWLPSFVLMVKLFLHHLKSSIVSGIRSLIEHIQAIDGESRIVMEHTGRYYEPIVRELSQADLFVSAVNPKLIKDFGDNSLRKVKSDKADALKIARYTLDSWTELRQYSFMDEIRNQLKIMNRQFDFYMKHKTAMKNNLIGILDQTYPGANTYFDSPAREDGSQKWVDFATTYWHVDCVRKLSLNAFVDHYQKWCKRRKYNFSQSKAVEIYEASKEIVSVLPKDDLTKLIVKQAVEQLNMASQTVEQLRAMMNEAASKLPEYPIVMAMKGVGRSLGPQLMAEIGDVSRFTHKGAITAFAGVDPGVNESGSYEQKSVPASKRGSGTLRKTLFQVMDSLIKTKPQDDPVYLFMDKKRSQGKPYYVYMTAGANKFLRIYYGRVKEYLASLPES

SEQ ID NO: 484489 - protein, 341 aa, unidentified
MNASKTVVGIDIAKRVFQLHSIDMETGEIVSLQLKREKFLEHFANRQPCLIGMEACGGAQHWARRLTVMGHQVKLLPGKAVKGFMTGNKNDRQDARAIWTAVQQPHVKAVAVKTEEQQAILALHRMRSQLVKFRTAQINGLRGLLTEYGEVMPQGKAGVRKGISEALARLQDRLPAMVIETLREQWARIGKMDEEIATVEQRIKRWLKQDDACRRIAEIPGVGPLTATAAVAMMGDAKAFNSGREFAAFVGLVPRQIGTGGRVKLLGISKRGDAYLRTLLIHGARSVLTHAKDPGPWVTELRQRRPLNVAVVALANKMARTIWAVLAHDRTYQKGFVSRPV

SEQ ID NO: 484490 - protein, 345 aa, unidentified
MEQISRIGMDTSKHIFQLHGVNTAEHPVLRKKLRRKEMFAFLEKLAPTVIAIEACGASHHCARLLQSFGHSVKLIAPQLVKPYIKRGKNDAADAEALCEAMSRPTMRFVPVKTAEQQAGLMLVGVRDRLIRNRTQLSNAIRGYAGEFGLTAARGKAHLAPLLERIHADESLPALARELFAAQAEEYAQLQAQIDEVDARLMAWHRADECSRRLSKIPGVGPISAVLLTMKTPEPELFRSGRQFAAWIGLTPKDHSTAGKVRLGGITRAGDEGLRSVLVVGATTVIQHAQRGGRPSPWLTQLLKRKSPKLAAVALANKTARIAWKLMVTGENYAAKAAPAALAAAA

SEQ ID NO: 484491 - protein, 375 aa, unidentified
MKEKVRFLGLDVHAETIAVAIAEADGEVRSLGTIANRAESIRKLVKKLGPVEQLQACYEAGPTGYVLYWQLAELGIKCDVIAPTLAPVKAGDRVKTDRRDAEKLARCHRAGDLTAVWVPDAGSEALRDLVRAREAGKQDQLRARHRLSKFLLRSGQRPAAGLKAWTQLYMAWVRQLRFEQVAQESTRLDYLHEVEHMAERVVRLEQAIAEAVKLASPELQEVVKDLQALRGIAQISAVTIAAELGNITRFESARQLMGYSGAVPSEDSSGKRTQRGSITKTGNAHLRRIAVEAAWSYRLRPGVGPGLRKRQEGVPDEIKEIAWKAQHRLHRRYSRLAAAGKDQRKIITAVGRELLGFIWAIGVKAETAAKQRMAA

SEQ ID NO: 484492 - protein, 348 aa, unidentified
MSSVTRFFVGVDLHKTIIQICVLDQGGEIVEERRYQAPDLVAGMEVIGSLMKYKKRGRIAVEAIGVNRWFVNNLLEHGFEVVVCDPTKLNLKMLGRKTDRRDALEIARRLMLGDIDRNATTYYPSDDEYGKRKVIRSRHKLTQMRQGVINQIRSMLNAYKITGLGSDLTAKKSIRQLWRMEWPTEELAVVGQVWITTLEHLGEAIAHLNNQLKEMARDVEVSRLSDLPSVGPVSATAIFYELGDVIRFKHSRSVASFSGSVPRVYQSADTAHHGKLTKRGNRVLRHVLGEWAVRLMSSDERVIRWAKPRLRRSHKNKVRMALARRLVIGVYKMLRTGEAFSMERCLGM

SEQ ID NO: 484493 - protein, 404 aa, unidentified
MFYCGIDIAKYKHEATVIDETGTALLDSISFANSKEGCEKLLSLFSRLDISREDLLVGMEATGHYWLSVYGYLLEQDFEVKVINPIQSEAFRKMYIRQTKTDRKDSFMIAQIMRFGQFSATNLSEETIVALRQLSRYRLALVDACGDCKRRVIALLDQVFPEYAALFSDTFGVTSKEVLSQYPTPEDLLSVSTRKLSNLLEKTSRGRLGREKAEQMKAAAANSFGVSFAKDTFSFQIRQLIEQLEFLEGQIAELEEQLASLLKQTGSYITTIPGIGDTLGAIILGEIGDIHRFDAPNKLVAFAGLDVRVSQSGEFTGTRQKISKRGSPYLRRAIWLAASRAAFCDPILSEHYQSLRARGKHHLTAIGAVSRKLCNIIFAIISENRPYETVPPKGIRHGSADFTT

SEQ ID NO: 484494 - protein, 337 aa, unidentified
MQDRSLCRLQPMAIIGVDIAKDTLVTATFGSDTLLTLANTPAAIRAWLKHVAAGTCIAMESTGRYHLELATQAKAAGLLVYVLNAMDVHHYAKAMGQRGKTDPLDARLIAQYVAHQLIGQASGQGAARQRLRPWEPTPALLGQLRELLKARAQLANSSAKLGMALQHVQPIQDEVKVLLTGFRTLMAQIDAKVAALLSSDAQLAQGCKLMRSIIGVGPQGAALLATLFARMEFANSDSVVAFSGLDPRPQDSGAKRGKRSLSKKGDPYLRRQLYLCAMSATRSALLRPRYEALKARGLPTTAAVVVLARKLLRIAFAVWKSGTPFDPQKLQMDASTA

SEQ ID NO: 484495 - protein, 337 aa, unidentified
MNITTIGLDIAKRVFHVVCCNQQGHLMKKKMLRRAQVHSFFQSHPTCLVALEACATSHYWAREIEKCGHTVKLIPPQHVKAFLIGNKNDFNDAFAIAVAARQAHIKSVGIKSIEQQDNQAQHKARSLAIGQRTALCNQARGLLAEYGVCLPRGVSTIRKNIPILLDDNNEELSGVFKVTLRQLAEQLASLDASIAVFDKAIIQAVKNNDICKRLQSIPGIGPMVSSAYFNEIGNGSAYRKGRDVAASLGLVPKQHSSGGKDVLLGISKKGNNYLRCLMVQGSQSVVTSARKKDDKLSQWLNRLVETRGHNRACVAYANKMARMAWALTVSGEEYSLS

SEQ ID NO: 484496 - protein, 340 aa, unidentified
MTITTVGIDLAKNVFAVHCVDQNGKTVLVKSRVTRAALPGLIAGLPPYVIGMEACSGAHYWARLFRQYGHEPRLMAAKFVSPYRMAGKSGKNDAADAQAICEAVRRPHMRFVPVKDESQQAMQCLHRTRQGFIEEKTATYNRLRGLISEFGVIAPQSTDALRHIVFEQKNSLPLQVQQCVDDLLEHVARIEDNIAEYDRILSRMAKTDHRSQRLMELKGVGPTTACALVASIGNAHDFKNGRQLAAWLGLTPSQYSSGGKSKLGRITKAGDSYLRTLLVQGARSVLIGAEKRTDLFSRWVCSLVERRGYWRAVVAIAAKNARLCWASLHYGDDFRLYSAS

SEQ ID NO: 484497 - protein, 411 aa, unidentified
MSYKIAGIDVHKKVLMVVVIDATTPEEKPERRRFATLPSDRQRFLIGLREQGVEEAGMESTAQYWRSVWLELEPHMRLHLAQAFSNRAPRGRKHDFKDAERRVRRLIANELILSFVPGGEQRTWRNLTRMKLQLTRDRVRLQNQMECLLEEMRIKLSMVVSNLLGASGIRMLRALAKGETDPKKLAELGDQRLQCTEEQLVDALTGRAQPLHREMLALQLERLPLIDTQIAKLNGMIAQAMKPHQEAVMRLAEVPGLGVDSAQQIIAEVGEQASTFPSAAELTSWVGSCPGKDESAEQNHSRRSAKGNKYLRRVLNQAAHAAVKRKGSYFQVVFRRLLPRLGYQSAIWAVAHRLCRVVWKILHEGVRFLEHGIEPDPKAKMRHARRLAQALRKLGYQVTITPTNLASGMQM

SEQ ID NO: 484498 - protein, 357 aa, unidentified
MISKKISVKSKKNNSCSLTENESYDHYIALDWSEKNMAIARMGKKDTVPKIIDVPSDLKELKLYLSKLQGEKILTIEETTTSQWLYVELYEYADRIFICDPYRNRLLTDGPKTDKIDAGKLCKLLKNGMMKEVYHSTNELYELRKLVSYYDDEVRAGVRLLNQKSALYRAENKSWKKKQELEASRVNKFIVAQLDEKIESYREKKKKYEEEFEKISKKTKVIRSLKSIPGLGPISSVTILSIVIDGRRFKSSNHYLSYCGLVKHEKQSGGRSYGRRSPRYSRRLKAVYVSAAVRVASTENPLRQYYEYLLNEKKLPVYNAKNALARYIAKISLGIIKSGEKYKPYKWRESKKGKEAA

SEQ ID NO: 484499 - protein, 320 aa, unidentified
MTTFDSQVVVGVDVAKDEIVVYRRDLEKTQVIANEGPALKKWLRSLPADSAIAIEATNIYHLETVELAYSMGHRIFVVDPGKLSKYRDSLGKRAKTDASDAALLARYLAHEGGALRLWSPPPEVYSELKNLLHRRAKLVSIQVTLRQSWGKREDLPHEFGAVMDSLKALDHAIQTLMKDLLNKAGLMPQIKRCEGIEGVGFLTATAFLTAFMRGEFENSDAYIAFLGLDLCVRDSGKKSGRRRLTKKGDPEIRRLGHNASMAACRTETWKPFYQRHLDSGKARTQALVILTRKLARVAFSLMKNQTDYRPNSMFGASPQT

SEQ ID NO: 484500 - protein, 459 aa, unidentified
MSQRRSQKMRRRKFKVQSLPKHLQHINVNAAGIDIGSEQHLVAVPEGRDEVAVRQFGTFTTDLIAIADWLAQCGVTTVALESTGVYWIPLFELLEQREFEVKLVDARHVKNVSGRKSDVLDCQWLQQLHTYGLLAGAFRPPDEICVLRSYLRQKEMLTQASAQHIQHMQKALQQMNLLLHNVVSDITGVTGMKIIKAILGGERDPQVLARNRHGCCQNSSETIAKSLIGNYRNEHLFALRQAVELYETYQAKIADCEAAIIKQLNSYPDTTDGQPPAASKQINARTRIRNGVDVRELLYQKTSVDLFAVPGLGADTLLTVTSEVGFDMGPWKTVKHFSSWLSLCPGTRISGGKLLSKKIKRNANRAAQAFRLAAASLARSQTALGAFYRRIKARYGGQHAVNATAHKIARIYYTMLTKGTTYVELGQQAYEQKFQERRLARLQAQAKTLGLQLVPCTVT

SEQ ID NO: 484501 - protein, 364 aa, unidentified
MSEPITYVGIDAHKVELHVALLAPDVSAPVTWKVQNEARAVERLRRKLEKAAPGPVACCYEAGPCGYALQRQLERGQVQCQVIAPALVPRKPGERIKTDRRDARKLAELHRAGLLTEVRPPTPAEEAVRDLCRARDDARVDGQRCRHRLGKLLLRRGLHYPGRAWTQAHRRWINGLTWPHPADRVVVDDYLLAIDHLETRLMELDAQLATVATTDPYREPVGWLRCFRGIDTLTAMLLLAELHDVQRFPTARALMAYLGLVPGEHSSGKRHRRGPITKTGNTLARRLVVEAAWHYRHRAGVSRTLAQRRSGQPPRVIALADKAQQRLCRRFRRLAEHKPSPVVAVAVARELVGFLWAALHPETA

SEQ ID NO: 484502 - protein, 413 aa, unidentified
MRVMVERCCGLDVHQETVVACVLIGAPGVRPTKEVRTFRTMTRELQALRDWLKAAGVTHVGMESTGVYWRPVYAVLEGHFELIVGNARHIRNVPGRKTDVKDAEWIADLVRHGLIAKSFVPARPLRELRELLRYRRKLVESQSAERNRLLKLLETANIKLASVASDVFGVSGRAMLRALSEGNVSTEEMASLAKGQLRRKHDDLVLALEGRVEEHHRFLLAIQLHRLEAAEHDIEVMDSRIAKRLEPYRTQHALLMQIPGVDWVVAAVLIAETGIDMSVFHSPNHLASWAGVCPGNHESAGKQKSGHARKGNVHLRTILVGAATSASRTKGSYLKDKYHRLKARRGPLRAALAIAHKILVAAYHMLAKGLAYRDLGEAYLDQLDQTRTAANLKRRLERLGYTVVLQLKETATA

SEQ ID NO: 484503 - protein, 371 aa, unidentified
MDEFSKTVYVGLDVHKESIAVAYAPEDRGSEVVSLGAIGTRQCDIDTLIRKLQSKGATLVFVYEAGPCGYWLYRYLTRKGLSCHVVAPSLIPRKPGDRVKTDRRDAAALARLMRSGDLTSIYVPRVEDEALRDLSRGRDDAMQDLKRSKRRLKSFLLRQDIRYGGRANWRPAHLRWLAGVVCGTPAQQIVFQEYVQAVSQQQERRERLEHELHEAVKGWRLYPVVEALQALRGVELTGAVTLTTEVGDITRFATPRQLTSYLGLTPSEYSSGARRRQGGITKAGNSHARRVLVEGAWAYRYPAKVSRHLQLRLERVPPEVQAISWKAQVRLCKRYRQLSARGKHVNQVVVAIAREMAAFAWAIARLVPVAA

SEQ ID NO: 484504 - protein, 343 aa, unidentified
MKEIATIGLDLAKQVFQVHGADPQGATVFNRRLRRGEVRSFFEKLPNCVVAMEACASSHFWAREISALGHQVKILPAQYVKPFVMRGKTDAGDAMAITEAMKRPDIRSVPIKTAAQQAATMTLRTRTFFVRQRTNAVNALRGYMAEFGLVGNRGIAHFGKLVAALPEQGDARIPPAARLMLDEIMAEIETLTARIERIDDRIAAHAKQDEDIGRLTAIPGIGTLTASTIQAHVPDPGCFKSARHFSAWLGLTPKQNSSGEQLRSGSISRMGNAELRSLLYLGAMGVLNAARRFGTHSGWLRRLMNRRPLKVVAIALANKIARIVWALLTKGGSYQAPTELAGN

SEQ ID NO: 484505 - protein, 356 aa, unidentified
MSQKLNAAIAVIGIDIGKNSFHIVGHDHRGAIVLRQKWSRGQVETRLANLPPCLIGMEACVGAHHLSRKLQMLGHDARLMPAKYVRPYSKGQKNDFRDAEAIAEAVQRPTMKFVATKTADQLDLQALHRVRDRLVGQRTGVINQIRAFLLERGIAVRQGLRSLRSELPGILATRTDVLSPRMLRIIEDLAGDWRRLDERIEGLSSEIETLARQDKACERLMTVPGIGPIISSAMVAAIGTGDVFSKGRDFGAWLGLVPKQISTGDRTILGNISRRGNRYLRSLFVQAAWVVLVKIGPKHWDRYGLKSWIEAARKRLHHNVLAIALANKLARIAWAVLNKERAFECVKTEETASRPA

SEQ ID NO: 484506 - protein, 324 aa, unidentified
MVVLGVDVGKADFYCSLLVEGRARSNSFSNSKAGFERLLGWLCNRNVTHVHVCLEATGGRSEELALFLHEHGHAVSFIIPSAIKAFGQSELSRTKTDKADAALIARYCQRNGTQALAAAQAGRSGIYRRLGRHRTALVEMRTQEHNRLEGPGIDELRDSLEKSLAFLNRQISEIDTEIAAVIDDDPDLRGKLELLESILGIDERVASTLLGEVPQMTEFRSGKVLAAFVGLCPREFRSGTSVSAAWLSKVGNIRVRRVLYMPALAAMRCNPIMAYFPTRLCARGKRPKQIIAAVMRRMLVLAYGVLKSGRFFNAAFPLDAGHGI

SEQ ID NO: 484507 - protein, 410 aa, unidentified
MHHKLKYLYIGIDLHKRHHTAVIMTCFHEKRDEIQFENKPSAFPKFLQQVEKMAKREGLTPVFGLEDVGGYGRGLAMFLNENKYEVKSVNPALTISIRRSSPNNKKTDAWDAECVARILISNLDTLPTANPHDLYYAISQLVTRRENIVSVVTGIKLQLHQLLGYHYPSYKKFFSQVDGKTALAFWLKYPSPSCLRGVSVDELATFLYKKSNRNMSTKKAEEILSFVQQDGDTSKDYQEANDFLIRNVVRDLIIRDHQLSQIDTELAKHLALLDYKLETMHGISTVTAAELIAEIGDISRFSSADKLANFAGIAPVQHSSGNKQKSKKSKLGNRSLYDIFYNLAIRQLGVSRAKKPNHPVYHAYYERKLAEGKTKWQAIICVMRKLVNVIYSMMKYKTEYKMPVLTEQAA

SEQ ID NO: 484508 - protein, 345 aa, unidentified
MELHTIGIDLGKTVFHLVGLNLRGDVAVRKKFSRTQLLRFTANIHVELIGMEACGGSHFLGRALREQRHEVRLIPAQYVKPYVKTNKSDYIDAEAIAEAVGRPTMRFVPIKTDDQLDMQSLHRVRERWVMRRTAVINQIRGLLLERGITLRKGRHHVDAALPLILEDADANLSGAVRLLLAQLKLDLDQLSVRIDEADAVIQKTAHENEACRRLVAIPGIGPVTATALIAAIGNGGAFHKGREFAAWMGVVPREHSTGGQQKLLGISKRGNSYLRRLFVQGARAVMQQRTKQSSGLSAWLAQLTSRTHRNVAAVALANKLARIAWAVLAKNEHYRPPVLADVAAA

SEQ ID NO: 484509 - protein, 340 aa, unidentified
MNEVITIGVDLAKNVFQIHGIDAEGAVIFRRQLRRGQMVPFFKKQPPCLVGMEACATSHHWARQLIGLGHKVKLMPPRYVKPYVKRNKNDMADAEAICEAVTRPTMRFVEVKTPEQQSVLMLHRTRQLFVRQRTTLINALRAHLAEFGIVAGVGRNGLEKLLQVIEEGDDDRVPPTARDCLLALRDQLEMVKHQILGADRRILDWHRGSEVSRRLDDIPGVGHLIATALVASVPDPHIFKSGRDLSAWIGLVPKQNSTGGKERLGHISKAGNSYLRTMLVVGALSVIRRAKQVGYTKRPWLTKLLERRSTKIAAVALANKNARTAWAMMAHGTYYQEPVS

SEQ ID NO: 484510 - protein, 366 aa, unidentified
MRKVMAGMDLHGNNVMVGIVDDQGARLQHRRLACELPEIIEFLAPYKAELESIAVESTFNWYWLVDGLRAAGFPVVLANPAKIDQYSGIKHADDKNDAYFLAELQRLKILPTGYVYDPELRPVRDLLRRRMSLMRQRTTLFLSAKSLHQRTTGRGLELRRLKAMEPEEAAALYTHPANQLIAQIQKEHIDSLDQSIRQIEKAVLKVALQQPYYQRLQTMPGVGIILGLTISMEVGNIDRFAGPGQFASYCRTVDAKRISNGKTKGDNNQKCGNKYLAWAFVEAAHGARRFDATCRRWYDRKAGKKCTTVATKALACKLAKAAWYVMAKGTEYQAGKIFPGLTEPKAEEISGEQASASKGVGPNPED

SEQ ID NO: 484511 - protein, 423 aa, unidentified
MLLNNSLIVGVDVHRRSNVVQVMDGQGQVLTTSLVVSNNRHGTAYLADCLAETARRGNFTTIHIAAEATGAYWLPFFCQLQQEPRLAAWSLTLYPFNPRVVHNFRKAFVDLDKVDLNDAHLVAERLRFGRNLPAPFVMEEQFLPLRSLTRYRFHLVHELVRVKSYCTYLIYLKSSEYTADRDMQPFSNLFGATSRAVLRDFPSMDAIIEMPFDELVEWLDVKGKRRFPDPEANAHKLVQVAEDSYRLPAPWLESVNTILGLNLRHLKTLENLIQRVDTAIAEEMEAIPNTLTTIPGIGPVIAAGIIAELGDLARFDYDQKKVASYAGLKWSRRQSGDFLAEETHLKRQGNRFLRYYFCEAAHLVRMNDAEYNAFYTKKYNEALKHKHKRAVVLTARKLVRLVVRLLTTNQPFRVRRVDSDEVA

SEQ ID NO: 484512 - protein, 387 aa, unidentified
MAQVNDLSRSLTAFDPISTLVVVVEMSKASWLVSGAVPGVERQPLKKLEPDATVLLRLIERWRNEALRGGRPISRIALAYEAGRDGFWLARWLIARGIEAHVIHSASVAVSRERKRVKTDRLDAAMLMRVFLGWLRGERGHCGMVTIPTMEEEDARRPSRERESLVNERSRITNRMKSALARLGVRGFKPHLRKAPERLAGLRTAEGTGLPVNIIEEFRRDMARLALVREQISSIEKTRAERLDQAPDTGPHAMVRLLARVIGIGIETADMLVREILSRKLRDRRAVARYAGLTGSPDESGSKRREKGLAKAGNARVRRGVIQLAWRFLMFQKDSALARWYRTRTEGPSGARKTTMIVALARKLLIALWRLVTTGEVPDGVELRPAA

SEQ ID NO: 484513 - protein, 405 aa, unidentified
MEVYIGIDWSKEKHDVAYMNSAGSVIAYQTIAASPVGYAALDARRQQLGAQLEECWIGIETVHNLVLDDLVRRGYPHLYLIPPSLVKDSRGRFGESKANSDRKDAQLLADLLRTDRVRLHPWQPDSCVTQQMAVQVSLESFLTSSIIRVTNRLRNGLWRYYPNAAQVFSSLDTQIALEFICAYPTPQQAQALTFEAFRAFAQQHHYPNRKKLPACLARLQQPQPEPALSTLLAYQPEAVYLAQLALQLVQHRVKVQKSIQDLFAQHPDATIFASLPGAGEKLAPALLTKFGDDRQRFPTPASLQAQAGTCPYTKASGKRRRVLFRHACDKEFRTIAQQWARASLDLSPWATAYFHTVLPRCQSTSQAYRCLANRWLAIAWRLWQDRKPYNETYHLHQHALRAKPM

SEQ ID NO: 484514 - protein, 340 aa, unidentified
MKLYGAIDLHSDNNVTVLIDEKDEVVYRKRLPNDLRFILEQLSAYQSRVEGIVVESTYNWYWLVDGLMEQGYKVHLANTAAIQQYNGLKYTDDDSDARWLAHLLRLGVLPVGYIYPRADRPVRDLLRKRSQLVRQRTTNLLSIQNLMTRNTGSSLSAKQIKGLDVQQVDALLPEGDLALAVKANLSVMLSADEQSEILERTILQRVQLRPQFRFLKTVPGIGEILALTIMLETGDIGRFTRVGNFASYCRCVDSRKISNRKKKGKGNTKNGNKYLCWAFMEAANFAIRFNAKIKSFYQRKKAKSKGVVAIKAVAHKLCRACYYIMRGQVAFDVTKAFGPK

SEQ ID NO: 484515 - protein, 396 aa, unidentified
MRNDVTIYVGIDFSKEKFNACLLMEQGVMGESEFPNSKMGYLKLTKWVKNTSELGRSFDSSLVLFCGEHTGTCSIGLCEYLYAKGMKIWLESALKIKYGSGLKRIKDDKADAEMIAYYAKRFYEPGSCALFEPDSADLKTLRTLYQFRNRVVCDRVAIGNRISSGAFDCSTLVRNRMVKHHKEAQKDEKDIEKEMVKLMETSEELASNYQILISFKGIGPITAAALIIYTSNFKKFDNPRKFACYCGIAPFGKQSGTSINTKPHVSRFAHIGIKAAMVQACKSAMQHNAVIKAYAQRLYAKGKHEGIVMNNVKNKVMHIIFKMIQTQTLWEQEYQQKHMKECKAIPGKNGIGATEAAPIINATLKTSSSVVECTFLEEHSFQKNSKKTSSFSCVET

SEQ ID NO: 484516 - protein, 408 aa, unidentified
MILVGIDWAEDHHDVGVMDQDGRMLAHERVPEGIKGVGRLHALIGDYADDPEQVAVGIETDRGLLVASLVAAGYQVYAINPKAVDRYRDRHSVSGAKSDRGDAKVLADMVRTDRHNHRRIAGDSDLAEAIKVTARAHQNLIWTRQRQINQLRSALREFYPGALAAFGTELAHPDALAVLAKAPTPELGRRLSVAQIAAALRRGGRQRNVDKRAAAIRDALRAQQLAAAPLTADAYGDTAHALVAVITVLTAQIADLESALADRFEQHPDAVILRSLAGLGIILGARVLAEFGDDPNRYEHAKARKNYAGTSPITRQSGNRKAVLARFIRNRRLADALTWWAFSSLTSSPGARAFYDRHRAAGDGHHQALRALSNRWVGILHGCLRHRTGYHEGTAWPTDAKEQIDIAA

SEQ ID NO: 484517 - protein, 352 aa, unidentified
MVTVGIDAHKASLAVALIDELGRELAHEQFANDPDGHRGLHAWVERLAPGERRFGIEGTGWLARGIACLLLERGEQVVDVRGTLTDRQRKRMHGQGKSDPRDAVAIARVTAREEGKLAPVRIDSALRDLKLLCSYRWQLVGERNRAANRLHVDLVSLRPGYQRRIPNLDSKVRLERAQRLLAGDQSVQAALARRRIEKLCRLDGEIKELEQEIAQSVKTLGSGLPQLVGLSYLSAARIIGEVGDIGRIQTKDRFARMNGTAPVPASSGERNRHRLNKGGNRRLNHAIHMMALTQARMDPRARAYVERRRAEGRTQRDAVRALKRHLSDVVYQQLRHDAATAPVGAGLNSETK

SEQ ID NO: 484518 - protein, 395 aa, unidentified
MNPEQQKKYFVGIDISKDSFDATLIDEYQKKLFYQKFEMNKNGFKSFLQKLEKFDKALLQITVESTGVYFVSLYNYLLNTGFSISVINPLLVHNFHKSMSLRKTKTDKKDSFIIALFTLKNLEILSKHSKQTSTMRRLCRERDKISEEIAKVKTEIKSDMNILFPELEKHIDIFTKSMLLFLEKHSSATSIRKLRTTQIDAVFNKTKGNKVRMKSAELKKLAKDSIGNGDKYLEKVLNSKIQRLKLYQELSKEFDLEISLFIDQNQSTDFDILTSIKGIGKITAQKFLIEVDDIRNFNNHKQLTAFMGTDPSLKQSGTSIMYQGKISKRGNKYLRKTLFQMAVSCIRNDSTFNAYYHKKRDEKKKYKQAVIATGNKLLRVIYSMLTKENYYCEEY

SEQ ID NO: 484519 - protein, 385 aa, unidentified
MIYVGIDVAKQKHQVAILDDEGEIYRDGLVIMNNRTGFQELHEILCHIRVVTKQDCQIAMEDTGHYSLPILQFLKRNNYSTYCYNPILIKEFSKVHTLRKTKTDKIDALVIAKKLMSDFEKREKKLNETKMELKELTRHSGRLGKHQSFLKTQYTRILEKSFPELATYGQIRHSAYMIKLLKKYPSPKKIAAAHQKTLSNLLGVNNSHVSASKLQQLAKESIGYYSEVTELELTQTIEQLNMYEKQIKKVDKRIQEIMDILDSPIITIPGISYRLGSIILAEIGDIHNFETPSQLLAFAGMEPSIYESGKSKGSGKMVKRGSPYLRWAMYHAARLIAIYSPTFKTYYEKKMSEGKHYNVVISHVAKKLMRVIFHLLRKGQAYKEA

SEQ ID NO: 484520 - protein, 414 aa, unidentified
MKLFVGIDVSSDHLDMCLMNMEGEQLESFRVDNNLPGAQHLRDRIVRLANTLLPAEIHIGLEATSVYSWHPAMYLHEDESLKQRKTKVFTINPKLINKFKAAYADLDKTDRIDAWIIADRLRFGRLTTTIVMQEQYLALQRLTRMRFHMVHNLTREKQYFLQNLFYKCNAFRSEVDSSVFGHAIMEMLSERFSLDEIAGMDVTDLADYLKDKGKNRFPDPENVARCIQKAARASYRLSKVMEDSIDLVLGTSIQTIRSIQAQLKDMDKAIAKILDGIVGSKCLRSIPGIDLVYAAGILSEIGDIERFDDQAALAKYAGLTWRKHQSGSFEAEETKRIKSGNRFLRYYLVEAANSVKNREPEFGEYYRKKCNEVTKHQHKRALVLTARKLVRLVDALLRNGQLYTPGRKVNKARD

SEQ ID NO: 484521 - protein, 407 aa, unidentified
MELSALYKCVIGLDVHQAQITACALIQQPDGSTRIEQRQFGGFARDRRELADWAASLHPDEVVMESTGIYWKSPYAALEAVGIRAKVVNARHVKHVPGRKTDVGDAHWLAMLARAGLLRASFVPPAALRELRLIARQRQKLVGQLASEKNRLHKVLTDSGIRLGVVVSDLHGQSARAMVKAIIAGQAPQQVINLASRRLKASREEIFDALQGDLTASHRFVLDELMQHIEEIEARIDRFDVRLLAGLESERGTLALLQTIPGVDLIGAAMLLVEIGSDMGAFGSADRLASWVGVCPGNNESAGKRKSGHTRKGNPYVRRLLCEFAHAASRTTSVFKSKFQALVVRRGYKRAIIAIGHKILRTLFFMLKRREHYRDCATDYEALSVQRNAPRWIKALTKFGFITPACA

SEQ ID NO: 484522 - protein, 399 aa, unidentified
MKPVIGIDVAKGKSVIQAFLKRNVPYGRDQLILHSPKGFERLFQTLVELEVKTNRKPVVILEPTGHYHRVLVNYLQSVGYETILVNPLQAQRARRTNLRKVKTDASDAWHLGDLYYQEESWLVHPSPKESLMDLQFITRQHEFITSLYVQAKLNTRTLIDQVFPNYESVFRDLFSKTSLNLLEMCLSPKGIEERDHNTWAAVVRESTKAARSEDWMNRKIEQLNVAIKDNPVMHVPYGLEMALRSMLTVIRDLQNQLAELEKIILELSEMIAEVQLLKSIPGVGTKLATSIAAEIGDASQFRHPKQLVAYAGLDPSVFSSGKFVATQNRITKRGSKRLRRAAYLAVTCGLRGDLNLRIREYYDKKKSEGKPHKVAVIACANKLLHHIYAMLKKRQPYTL

SEQ ID NO: 484523 - protein, 372 aa, unidentified
MGKSIRYVGLDVHAETIAVAIAEGRGEVRSLGTVPNRLESVRKLVKRLEPTSTVRVCYEAGPTGYALYWQLTELGVKCEVVAPTLVPVKAGDRVKTDRRDAEKLARCYRAGDLTPVWVPNAAHEALRDVVRAREAATKDELRAKHRLRKFLLRHGRRYPEGIKAWSMKFWSWLASVRFDYGAQNATLLDYRTEVERAADRIKRLEAAIDEAVQEAPPQMKAVIDALQALRGVAKVTATTLVTEIGNFSRFTRPKQLMGYGGVVPSEYSSGASRRRGGITKTGNAHVRRVLLEAAWNYRHQPRLCGRHKKRQEELSEQIRDIAWKAQHRLHARYWRLTAKGKVPAKAITAVARELLGFIWAVGVRAETEAAAA

SEQ ID NO: 484524 - protein, 342 aa, unidentified
MQRVYVGVDLGSSNFHQVAINQGGATTLNRELVTSAANLIKAFSGLRGEIHVHLEAGELAPWASEIIRPLVQRVVCSHPQTNAWIARDRDKSDRIDAYKLASLLRLNEFKEVHYPREQLRRDFKTLVQHYDELTRQQARLKTKLKARLRMQGVIVSGTEVFSARGRKAVLREVKSAVVRAAIQQLYEVLDQSIASQVAARTLMLRAAQALPELKIMRTAPGIGPIGACRFSAYVHTPQRFSSTRKLWKYCRLSVSHRSSNGKPLRRPRLDRNGCGGLKEVSRKAFEAAIRKRDHNGFQRAYYRALAQTHDATHARLTVQRKIVSTLRAMWINQTPYCDQLMP

SEQ ID NO: 484525 - protein, 412 aa, unidentified
MDVFCGIDWAEDHHDIALAGRDGQLLARRRISDDAAGLAVLLSLLAEHGDSAEDPVPVAIETPRGLLTACLRATGRKVYPINLMAVARYRDRHSIAGRRSDHGDAVVLANVLRTDAYAHRPLPADSELAQAIAVLARAQQDAIWARTSAHNKLRSHLREYFPAFPAAFASQRDDIIRPEARVILAAAPDPAAAAALTITQLRALLRKAGRSRGIDPEAARLRDAFRAPQMRQLPLVEQAMGRQALALLRQLDAACASAADLEHAATESFNQHPDAGIITSFPGLGPLTGARVLAETGDDRSRFADAKGLKAYAGAAPVTRASGETLAVLHRRVKNQRLAAAGYIWAFSALTASPGARAHYDRRKADGDRHAAAQRNLFARLLGCLHHCLATGTEYDETTAFPAAAKKIPQAA

SEQ ID NO: 484526 - protein, 341 aa, unidentified
MKKKVFIGLDYSKLTVDATCFHIDNKENVEYAQFENTEEGFISLIEWVRKLYKDTDLWLVCGEYTGIYSMTSTYVFNDKGIDLWLENPSQIKLSCGVRREKNDKLDSYDIAMYAARFTERVRLYKPKSDHLIRLRDLVRFKDRLTKTKVALQVPAKESKSVRKTCTDTKYICDTTDSFCSNIDKQIKEIEKRMMLLLKTDPELKQMYKLITSVVGVGMQTAIYLLIHTWGFEAFDNPRQLACYCGVVPFSKQSGTSLKGKAHVSKIANRKLKSLLHMCALNAVRYDPQLKLYYQKKVEEGKHKMKVLNNVRNKLIHRIYAVITTGQEYDKNYYQNNMNIAA

SEQ ID NO: 484527 - protein, 386 aa, unidentified
MSRPSNILVRAINYDHTLVLAVELSNKSWVLAAQAPGLPRTKAQRTIEPNKNALLAAIDGYRARAVAVGYTVDRVITTYEAGWSGFWLARWLVAQGVEVHVVQPSSVPVDRRLRRAKSDGIDAELLLRTLLAWLRGEPRVCSMVPIPDEADEDARRCVRERTELLSDRVGLTNRIGAVLATLGVNDYNPLLQSRRRRLAELRTGLDEPIPPNALAKIERLLARLELVLAQIAELERERDEVAAADAPDRAGKMIQQLASLRGIGVQSATVLVREAFVRHFPNGKALGSYAGLTSTPYSSGGIDREQGIGKAGNRRLRTVMVELAWLWQRYQPGAAQVAWFRDRVGSTGRRIRKVMVVALARKLLIALWRFVIDGVMPEGAVMKPSI

SEQ ID NO: 484528 - protein, 359 aa, unidentified
MNQRTSVGLDVHARSVVACGLDADTGELFERRLTPNHREILEWIRTLPGRAAVTYEAGPTGFGLARFLLAAGIECLVAAPSKLQRPAGDRVKTDKRDARHLARLLHLGQITPVAIPDVEQEAARDLVRAREDVRGDLMSARHRVSKLLLRQGIVYYEGKAWTRVHDTWLRRQRFDAPGLQLAYDTAYDTMTAAVDRRDRLDAAIAEMAATSIYTPVVTRLGCLRGVAALTAFALAVEIGDWQRLTGRSIGAYLGLVPSESSSGATRSQGAITKTGNGHARRLLIEAAWQHRRPYRPGVALRRRWDNAGPASRARGQQGNRRLHARWNEFDQRHKRPAVANTAIARELAGWCWSLAVLDD

SEQ ID NO: 484529 - protein, 343 aa, unidentified
MSTYYYIGLDIHKRTISYCIKAIDGSLIGQGKIEADRKSLDEWAKGLPGPWIGAMEATIFTGWVYDFLKPHAVALKVAHPEMLKAITAAKKKNDRADAEKIADLLRVNLLPECHMLSEEIRDLRRVLRYRNHIVRTAVKMQNKISGLLMEVGVSYSKRRIHGKKYFHEILERVEEIPPSVKELLKLSRSGYEMFRSFQKRLVETLRTNTLIHDRVQRLMTIPGVGEITALTWVLEIGDSGRFTSIRKAVSYCGLCSAQRESAGKEQRGPISKKRNKHLQTMIIEAAKLAPHWNEQLAIVHERELKKGNRNRATLAVARRLVAYMLAVDKKQADFKLPAEMQAA

SEQ ID NO: 484530 - protein, 323 aa, unidentified
MDAAPTSSAAPCVGIDIAKDRFDAKFLPENRLHTFANSPQGIQLLLDQLKALPGCLVVVEATGRYERALVAELVNAGHRVAVVNPRQVRHFARALGQLAKTDRIDAHVLALFGQRMQPRETEKVSKIQEELQQLVVRRRQVIALRTAESNRLPQTTSKLAAKGIRKLLALLDKQLSELDAEIAKLVQSDDDWKAKDQIIQSVPGVGPVTSFALLAELPELGRLNRQQIAALVGLAPFNHDSGKLKGTRAIAGGRRSVRSALYMAALTARRFNPTLQRFAQRLERSGKRFKVVLTACMRKLLVTLNSMLRNNTPWNRQFVPLPT

SEQ ID NO: 484531 - protein, 378 aa, unidentified
MKRILKIGMDVHTTNYTLCAMEPIIGEDDRVFATIKVTPDYKNILLFIENLKTKLGLNDEYDIQCGYEAGCLGYSLYNQLTAAGVKCVILAPTTMLTPQGVRIKTDMRDAYMIAQCLSYGGYHAVYIPTEDDDSVKEYLRMRNDHKLALKKIKQQINAFCIRHGFCYDGTKWTLKHLKWLKKLEITNELYRETLDEYMASYEEQEAKIERYDKRIEEIAEQTKYHDKVKKLECFLGIKTHTALSLIVETGDFERFAKGNQYASYLGLAPGENSSSDSIHRLGITKAGNSHLRQLLIEASGGICKGAVGHKSKDLRARQNGNTAEVIAYADKANPRLRSRYYKFIRHGKKRNVAVAAIARELACFVWGMMTDNIEMKAV

SEQ ID NO: 484532 - protein, 496 aa, unidentified
MSAFLRRSGQNPHRWATKGMKSKKELLAKKKHIKRKSAKAKHNRVLGIHNPHAAGADIGATEIYIAVPPDRLEMNVRCFGTFTQDLRAIVQWLREYKVTSVAMESTGVYWIPLYELLEQEGFEIYLVNARHVKNVPGRKSDVQDCQWLQYLHSVGLLRGSYRPAQDICAMRAISRYRDNLLHFGAQHLQHMQAALDQMNLRLHHVIADLSGLTGMAIIEAILAGERDPRQLAKLRDPRIKASQETIAKALEGNWRVEHLFVLGQALQSWKQVQQQLGQCDQKLGELSSQLEGKIDLANSPLPPSAKYCGREPRSKNQPNGPWREELYRHFGVDLTEVPGLSLGVVLTLFVELGADLSAFPTPRHFAAWMGLCPDNAITGGKVIRRGTRRNRQRIRLALRLAATSLHHNKTQLGECFRRLRARLGAPKAITAMAHKLPRIIWHLVTHRVGYDESIFAEREEQLLRRKQRQLRNLAHSLGFTLVPNPRPAATSNAEVS

SEQ ID NO: 484533 - protein, 412 aa, unidentified
MEGETVIAGVDTHKDVHVLCLLDGLGRKIWSGSFGADPEGYDRLAEAIGDPGSCMVVGVEGTASYGAGLTRRLVELGYNVVEVLRPKRDKVRPGEGKSDPLDAERAARKAASGRGCSVPKSQDGWVEAVRQLYVARRLAVATSTSCVACAKSMLTTAPGALRERFRGRERPKDLMPLLARGRKAGDALEESVLASLRSVAAVWKEARSQVESLDERIRALLEANAPALLGVEGCGTTTAAALVVAAGDNPGRLRGEAAFSMMCGASPIPASSGKTERHRLNRGGNRQANWALYEIAIKRTAYDERTRRYVARRTSEGKSRREAVRCLKRYIAREVYRVLMDPNPAGAAPEGPELAKMRKAMRVTQKQAAAGLGMSAASLGHLEHGRRRSTKLERRYYELLCELERALPQTAS

SEQ ID NO: 484534 - protein, 411 aa, unidentified
MYYVGIDIAKSFHVVSIIDETETLVLKKPFRVNNSLDGYDKFIEKLNSISSNCNDFTIGLEATGIYGENLWEYLNSKGYSVKLLNPFQTSRYREQITMKKVKNDNIDSKIIALLLKDGKFSSGYVTDDEYQSLRTLYRNRASIQSDMKEVKKRILTQVTVTFPELENFIDIFSISGLALLDKYPTAKHYERSSVDRILKVFRHIQGNNFNQTKALEVLNLSQISVYSGKAKEARAIAIRSSIRLLKMYQEELSILEAEIKSLLDRKNTQSNNDDTTAPNSLIENLKTIPGVADKTIAAILSECGDITRFQNVTKFIGYIGLFPTENSSGNSTKTGHLSKRGSSLVKHALYMSSVSCLIHNSQLKQLYDIKRSQGKSKQEAIVTISRKLATIIYAIFRYNTPYNPARVFAKS

SEQ ID NO: 484535 - protein, 391 aa, unidentified
MVCVGIDVAKDKHDCCILDSDGTIRADCITIPNNMDGFKQLLQTIRDCTKKSDKIKVGLEATGHYSYNILGFLLDNDLAVYVMNPLHTNLYRKSLSLRKTKTDRVDARTIATMLLSDVDLKSYTDIAYHNEDLKSLTRYRFDKVQERAKLKQSVSRLATILFPELEQLVSSIHGTSIYALLGEYPGAKQISEVHLTKLTNLLTTASKGRYGKEKAIQIREAARASIGSVMPAKSLELKHTIKLIQELASEINEIEDSIQKIIDELNPPILSIPGMGVNSAAVILAEIGDFSNFSSPDKILAYAGCSPSTYQSGKLTNCYAHMEKRGSRYLRHALYNATKYVCYWNPVFAEYLAKKRAEGKHYNVALSHAMKKLVRLIYALQKSGKAYLAAA

SEQ ID NO: 484536 - protein, 413 aa, unidentified
MEKVLFDQVVKVGCGIDVHKDIIVATIRKSENKYETKEFTSFTSSLTELREWCKSESVTHVAMESTGVYWKPVFNILEAGDFEIILVNARHVRNVPGHKTDKQDSQWLSKLLVSGLLKASFIPPVEIRDLRDLVRYRKKVVAQASSEKNRIIKILEDANIKLSSVLTNVDGAVGTKIIEDLIAGKVDINELMKHYHGKIKASKSEFRLALEGRLTKHHRFMLQVIQESMADKEKLIEKIERQIDEMAKQYSVEIDLLQTIPGVAYDSAVSIISEIGADMSQFSSEEHLSSWAGMSPGNNETGGKKKSTTTIHGNKYLQSTLVECAWGATRKKDGYLKRKYQSLITRRGKKKAIVAVGHKIIIASYHIIKNKEAYKEPILNNNPKRRNKQINNLLTKLKELGLEIKQEELIAVA

SEQ ID NO: 484537 - protein, 368 aa, unidentified
MSNHPHYKVGCDAHKHYSLFSVLDDHGHLIQRTRVNHEPGAIRAFLSQFPPGTPVALETVGNWYWIVDEIEEAGCLPLLAHAAKAKSMMGHVHKTDKLDAAGLATLLHLGTLPAVWIPPADLRDERELPRTRMAFSKVRTMLKNRIHSTLAKYALSLDTASDIFTPKWRPQLQQLLQHLPAETRRCVDQELELLDLLQTHIQRLEARILQRVEITPTIQRIMSIPGPAEILSIVIDRELGSIERFPSPKHLASYSGLVPRVSASGGKVHYGRMVRQSNHYLKWAFIEAANVIVRQRRHPNWRGMYVVRLFERTRQRKGHAVAVGATARYLAEAAFWVLKKGEPYREPVPRHPAGRTSPASPKQGQART

SEQ ID NO: 484538 - protein, 410 aa, unidentified
MEVLYPHCAGLDVHKNTVVACVRHMANGAVRREVRTFNTTTKDLLALSDWLAGEGCTDIAMEATGVYWKPVWHILGDGEFALVLANAAHVKAVPGRKTDVNDAAWLADLLAHGLIRGSFVPDEQTQEMRNLLRTRKQLVRERSSHIQRLQKTLEDANIKLDSVISDVMGLSGRAMIEALIAGESDPDRLAELAHRRIKAPPEELREALRGRVHKHHRFLLRLHLSHIDAIDGAIADIDREVDANVEPFRTAIQLLTTIPGISELSARVILAEIGRDMHRFPSAGHLISWAGLCPKNDESAGKRRSTRMRKGAPWLKTTLVQCGWAAARKKGSYLQAQFHRLRSRRGAKKAIGAVAASILTAVYHMLIDGTLYHDLGADHFDHRAKATQTKRLVARLQNLGYAVQITPLAA

SEQ ID NO: 484539 - protein, 409 aa, unidentified
MLKIVYPNCCGIDVHKTFVVAVIAITNNQGITEYHRKRFSTFTNGLTQLRDWLEYYSCFDVCMESTGKYWIPVFNILEEQTNVCLAHPKYVKAIRGKKTDKKDAQWIADLFKHDLVVSSFIPPLKIRQLRDLFRYRMKLTQLQVGEKNRYQNCLTWSNLQIASVVSDVFGKSAQAIIKSILDNPQDKPNIEQLVHKRMKNKVQDLEIAMEGALTPEQAEKIRVIKAHYDALAICKEDLEQMIRELGQDYQHQVKLIQTVPGFKEDLSALRIISEIGCDMTVFDSAAKLCSWAGLVPANNESAGKKFSTRISKGGKYLKPFLVQVANAVVKSDKHPELRNKYLKLKKRRGHRKAISAICRRLLVSVYQVLRKQEDYNPVLQGLTEIRNPDKTMSVQDAVRFAQQHGFNVA

SEQ ID NO: 484540 - protein, 415 aa, unidentified
MNDRKRWYAGVDWASESHHVRLLDEDGSDIGERIFKHSGEGLAEMAAWLLAASGADEPGQIHIAIEVPHGPVVEMLLERSFAVYVINPKQMDRFRDRFTLAGAKDDSLDALVMGSALRTDPHCLRRLAASDPIVVELREWSRIAEDLGGERGGLTNRMRQQLWRYFPAFLDLDSDLGAPWLLELWQAMPTPDKARRIRPASVAAILKRNRIRRLDAAQVLEILRQPPLTVAAGTTEAARAHIATLIARLRLINRQLAEAHHQLDALTARLGSAEDAEPGQVTQRDAEILASLPGIGRIVLATLLAEATDALQRRDYPALRSLTGVAPVTKRSGKTRLVVRRHACHRRLSNAVYHWARVATQHDHTSRAKYAALRARGHSHGRALRSVADRLLNVACAMLKSSTTFTPSIATTITP

SEQ ID NO: 484541 - protein, 471 aa, unidentified
MKGKKAAKGRGRAARKLVKAGLPKSLEQVNLNAAGIDVGGASHFVAVPADRGPTPVRSFPSFTADLHRLADWLQACGIDTVAMESTGIYWLPLYEILEERGIEVLLVNAHHVKTVPGRKTDVLDCQWLQQLHTFGLLRGSFRPAQEARTLRAYMRQRDTLVRYAAQHVQHAEKALVLMNLQLRNVITDVVGATGMAILRDIVAGKTDPHELAKHRDYRCHASEEEIARSLTGNYRPEHVFALKQALDLYDRYQQSIAECDEHVEHLLRELAALTPAPARPAPAPRTKKNPRRNEPAFDIRGPLYDLTGVDITQIPAIGPYTALRVISEIGTDMSRWPSAKHFASWATLSPGSKISGGKVLDARTKPFKNRLAMILRIAATSLRNTQTALGAFYRRIAFRRGAAKAVTAVARKLAVYIYTSLRQRSPHSDPGADYYEIRYRARALHGLQRKAADFGYLLVPAPQNPEQPVAG

SEQ ID NO: 484542 - protein, 392 aa, unidentified
MRSVPSVSSVGWDSHRTFSTVALRDEAGQIIERRRIEHGDRPAMRKTRADWPARTPVVLEGTFGWSWISDELAAAGHQPHLASSRKLAAWREARGLAKSNRLDADLLSELMSEKSRWWEVWLPPVEVRSQRELLRYRMSLVQTQTAFKNRMHAILHRHGVLHEFPDLFGTAGRRFLQQLAGGKSVAGVLLPANARTALKGDLQLLDHLRRQIAAATRLFRSNVERSPIARRLKSLPGVSWILAYTLLAEIGRIERFKDSRHLASYCLLAPRASDSGDDDGSNPKGRRVGHAGRGTLQWALVEAAHGAVRKDARMREVFNRSTDGGKRNRNRGYIAVARHLATCAYVTWKQNVDYSPQQPPPPPRPGSKQRRRKLLTNRPGTGQPEHPMVAVR

SEQ ID NO: 484543 - protein, 343 aa, unidentified
MDSIGLDLHQRESQLCILTEEGEVIERRIVTSQERFTAVLGERSRARIVLEASTESEWVARHLESLGHEVIVADPNFAPMYATRRRGVKTDRRDARTLAEACRLGAYRPVHRASAVQRHVRAQLAVRDALIRTRTRYVSVVKALARRDGLRVPPGDPVHTEAKLVGLPLPAPLAEELAPLRALLTPLNGEITAADARLAAAAMADPVVERLRTAPGIGPVTAVAFVATLDTVTRFTSAHHVAAYLGLTPREYSSGEQQHRGRISKTGSPRMRALLVEAAWRVLRSPQAAAAPLRAWAERIALRRGRSVAAVALARRLAGILYAMWRDGTDYHAPRSTPAIAVA

SEQ ID NO: 484544 - protein, 335 aa, unidentified
MKKYFIGIDVSKEKLDICLISEDQIIAEAIVTNDTVAINDNLQILLTENDLDKQDVLICAEYTGQYTYPLSCICEELEIDLWLENPAQLKYRSGIQRGKNDKMDARKIAIYAKRYQDDVRLFSLPEKQISTLKQLISERDLYVVDKAKYQGQITDQKRFMSQEDYKRKSKRLNRLIVELEDAIKQIEQEIQSIIDKDDTLSNQHKLLCSVDGIGDRTAIKMIVETNAFQDFKDPRKFRCHAGVAPFEYTSGSSVHSRNKVSNRADKSIKALLHMAALSVATRKSGEMSEYYRRKVAEGKNKMSVLNAIRAKLVHRMFAVIRNNKFYEKNYINSLV

SEQ ID NO: 484545 - protein, 435 aa, unidentified
MKVIHVHAAGIDVGSRSHYVAVGQDPEDVSEFGVYSRDHQQMIDWLNERSVTTIAMESTGNYWQTLFSALQGAGFEVLLVNGNQIKNVKGKTDVRDCQWIQRLHSLGLLRGSFLPSADIEKLRHYQRHRNWLVEQCSKMSNKMQKSLRLMNMRLDVALNDIMGKSGRRIIESIIGGERDGEQLASLIDGRVKKSKQEVAAALSGEWKEELLFELRDCFELYELYQQKMEQTDEQIALLLQAMVTPGQECPDQIRRVQKRHGKNQPRFDLSSLSCAYLGVDLFAIDGVSHTTVSGFISEVGLDIYKFGSAKRFVNWLRLAPNNKISGGKVLNSRTPKGKHPLGIMLRNAANSVGLRKSGTLKSFFNRIAYKKGRAAAITATARKLAVIIWNMVVKKQAFAPLDETTYTQKIRIATIAGIKKKMRKLNLSPSDLAMI

SEQ ID NO: 484546 - protein, 338 aa, unidentified
MKEYKLISIDLAKNVFQICAFSGKNNIVFNRKASRSALLNILRNIAPTTVVMEACYSSNHWGRAIQGLGHKVHLIPAYQVKPFVVGNKNDANDAVAIAEASWRPKASFVSVKTIAQQDVQTLLRVREQIQKVRIMVSNQIHGFLAEYGVFCKKGHKALVETLAEVLAPESQQLSAVAIEVIHMQMEQYMHLKRQEEKINQTLVALCRDNPCYRYLQSIPGIGPIVAATLIASIGDPGYFKNGRQLSAWIGLTPLQYASGEKSRMGKMSKRGNRSLRKMLIHGARSIINWVAKKDDKLSLWIKALQKRMNPGKVVVAVANKLARISWAVMSTQVEYVAR

SEQ ID NO: 484547 - protein, 422 aa, unidentified
MNHLTDNAFTAYVGIDWADAKHDICVQAAGDQQREFDCIPHQVDQIEQWAQSLHKRFGGIIAVALELSKGPIVYALQKYDFFVIFPINPSTLAKYREAFSPSRAKDDPTDAELALDLLVRHPERFTPLKPQSVEMRTLVCLVEQRRNLVNDKTRITNRLRSALKQYYPQMLEWFEHLDTVLVCDFMTRWPTLTQVKRARKSTLEKFFHEHNMRFSQVLDARLKSIKAATPLTLDAAVVTPYSLQALVLSDQLRVSLQAIQRYDDEIAELAPKHPDYGLFSALPGAGPSLAPRLLVAFGEQRERFDSAAALQKYSGIAPVTERSGKKHWVHWRWQCPTFLRQTFVEWAAQTINKSFWAGAYYRQQRDKGCTYQAAVRALAFKWIRILYRCWQTRTPYNESVYLNALKRRGSPLLNPSTTVKMT

SEQ ID NO: 484548 - protein, 430 aa, unidentified
MAAVSIPIVDWLDKPQSFHFAQGYEDRFLWNTVVANDTRSDAYMIYLGIDVAKNSHVAAAMSSEGEVLLMPFSFANSADGFTLLREKLNNLPKLPLLVGLESTAHYGENLFCFLCGNGYHVAMINPLQTAAIRKSAIRKTKTDKVDAFVIAKALMMEGYTELQQSDIQILKLKGLCKTRQNLILMRTRCKIQLGSFVDQLFPELNRFFRSGLHINVSYTLLKAHPRPAEVGALHLTYLSNLLRKASRGKYKKEDAIRLRELARNSIGTDNPALALQIRQAVSQIELFSAQLKQVESEISTIMDSLDSPIMTVPGIGYLNGAMILSCIGNIQRFSSPAKLLAYAGLDPAVVQSGNFSAKSTRMSKRGNSMLRYALINASHNVVRNNETFAQYYNSKIAQGKSHYCALGHTAHKLIRVIFALLTNNIAFDLA

SEQ ID NO: 484549 - protein, 372 aa, unidentified
MQQTIRAFVGLDTSKMKISVALAEDGRQGEVRFLGEIDNTPQAIRRLLNKLNGKYCQLLFCYEAGPTGYGLHRQITDLGHDCAVIAPSLIPKRAGERVKTNRRDAITLARLHRAGELTTIWVPDPGHEAVRDLVRAREAAMEDLRQKRQHLQSFLLRHGRIYAGRRSWTGVHARWLSSLMFEHPAQYLVMREYRQAIEDAETRLERLTQQVAEVVATWSMAPVVDAFQAMRGVAFLTAVTFVAEIGDVRRFETPRRLMAYLGLVPAERSKGDQVRRGGITKAGNPRARRVLIEGAWTYRYPARLSRVLQVRQESLPKTVRAIAWKAQLRLCARYRRLMAAGKRQTLVTTAIAREMAAFLWAIGHEVEPRSAG

SEQ ID NO: 484550 - protein, 344 aa, unidentified
MKQITGGESRREAVRVGVDLAKRVIQVHAVDALGRVLTSRTLGRDRFIEWCTRLPAGCIVAMEASSSAHHWARKLAAIGLDARIISAQLVEPYRLEGASGKNDANDAAAICEAASRPSMRFIPVKSIEQQSMLCVHRLREGLKQDRTACINRIRGLLAEFGLVFAQGPRELQLILSDVLEDAGNELGTLARLTLQRAQAQWRELDEHLAWCDERINAHGRDNVEVKQAATLIGIGPVTASAAVATVGDFKQFKNGAQFGAWIGLTPRQRSSGGKSNLGSITKRGDTYLRTLLIQGAKSAVMTAHRRHDKISSWALALRERSGWQKAVVALANWQTRTHASSGRS

SEQ ID NO: 484551 - protein, 347 aa, unidentified
MVTLGADAHKRSHSLVAVDDTGRQLGAHTVAATSAGQLDALRWAQCWPERRWAVEDCRHVTRGLERDLLSAGEVVVRVPPHVAAEGRRSVRERGKSDAIDALAVARAALREPNLPEAHLEERSRAVKLLLDHREDLVGERTRIQNRLQWLLHELEPGFQVANGALSRRPAIRRVEGLLEGRAGIVAELARELTARTAQLSMRIDELEQQLAGTMPALSPSLLALPGCGILTAAKLVGETADVRRFRSRAAFAMHNGTAPIPASSGNVQRHRLNRGGNRQLNAALHRIAVSQIRRPGLSYDYFHRRLTAGNTKREAYRALRRRLSDEVFKLMLIDQRTCVSSAESAAA

SEQ ID NO: 484552 - protein, 334 aa, unidentified
MKSKTFIGIDISKKVIDLCLLDSEENTFIHCKNEIKAITKNLKQLFKKKSLNMEEVVICAEYTGMYIYPLIKVCQSLGVNLWLESGATIKWSSGLQRGKNDKVDSERIAVYASRFIDKATFYTYHDEQLDELAYLNSERELLKGDRAKYKSQIKDQKGYMPSSVYKSKKARLSSQVRHLSKSIDEIEAKMSELIKENEQLQGQYEIITSIGGIGRQIAMQTIIATRGFTKFTDARKFCCHVGVAPFAYTSGSSQTSRWKVSQRANKKLKSLFHLAAISTIRMNGEFTQYYERKVGEGKNKMSVINAMRSKLIHRIFALVRDGRMYEEKYLNSLV

SEQ ID NO: 484553 - protein, 429 aa, unidentified
MARVIIGMDPHKRSATIEVMDGRGRVLVQGRYGTDSHGYRAMLAAGGRFPQRVWAVEGCFGIGRHVAQRLVADGETVVDVPAKLSARVRVFDTGQGRRTDPVDAHSVAVVAVRTTGLRRVTVDDDTVARRLMVGRRDWLGRAGTDTVNRLHALLLDLVPGGAKKHLSALQARTILAGVRPRDVVGRTRRQLASELITELAVIDKKIKQSNAALTDLIAATGSKLQQLNGIGPSVAARLLGDIGDVSRFASRNHFASWSGTAPLDASSGDQHRHRLSRAGNRRINRALHIMAVVQLRHDTEGRAYFRRKLAAGKTPMEAMRCLKRRLSDVVYRQMVADTKVSPGGHSGATLTSSADDPTPTVDSSDKPQPGLTHERTPATRLVETDPPPALTQSAKRPRTRTAKPARPAALTSIFGATSTRPRKRSSSKA

SEQ ID NO: 484554 - protein, 409 aa, unidentified
MQQMEHEQHVVIGVDPHKLSATIEIVDLDERRLGAGRFPTDQAGYAAMRTYAKAWPDRVWAVEGANGTGRPLAQRLLEAGEKVVDVPAKLAARVRLFNTGHNRKTDALDARSIAIVAVRTEGLRVLKVDGELEALRLLTDRREALTRRRVQTVNRLQALLAELLPGQAKKDITPLQAKAMLARVRPRDIAGKTRRSIAAEELAELVAVDAKITKATAELKTLVLARGSRLMDLRGVGPVVAARTLADVGDVARFADRNRFASWTGTAPLDASSGEQNRHRLSRAGNRRMNHMIHIAAVTQLRHDTDGRTYYRRKRAEGKKPLEAMRCLKRRISDAIYHQLLADQQQADAKVRDAGPGGQCGASQESSAAGSHPHTSTSDRPLPGPAHPTLRPAANPRKTDSIKTLEVTG

SEQ ID NO: 484555 - protein, 373 aa, unidentified
MKKVRVLGLDVHAETIAVAIAEPDGEVRSLGIIPNREEPIRKLVKKLGPAEQLQACYEAGPTGYVLYWQLTALGLKCEVVAPTLVPVKAGDRVKTDRRDATKLARSYRAGDLTAVWVPNEEHEALRDLVRAREVAKQDQLRARNRLSKFLLRHGRRAPAGIKAWTQKFQEWIKEQVHFEQPAQEYTLLDYLHEVEHVADRIRRLEQAIAEAVKLAPPQMQEVIQSLQALRGIAQISAVTLVAELGEISRFEGARQLMGYSGAVPSEASSGKRIQRGAITKTGNAHLRRIAIEAAWAYRHRPAIGLALHKRQEGLSEEVKEIAWKAQHRLHKRYRTLSAAGKEKQKVITAVGRELLGFVWAIGVQVERKHKRVA

SEQ ID NO: 484556 - protein, 435 aa, unidentified
MKVIRENAAGIDIGAKKVFVYVEGQEVKSFYTFTEDLEQARDYLLKFRTETVAMEATGVYWNILYEILEEAGIDVWLVDGRQTKQVPGRKTDVKDCQWIQQLHSYGLLNRCFVAEANVKELRSYQRLREDHIRSASMHVNHMQKALTEMNIRLKEVLNQIHGVSGLAMIEAILRGERNKETLLKLCHSSVIKNKKEEILKSLNGRYTQSGLFALQQAYDGYNFYQRQILQCDQKIDEIIKKMGKGDKTDKDQKPKKVRKAIRHNKPNIEDLGKYLINIFGGKDATVLSGITDYTWLQLLSETGYDLSRWATEKHFTSWAGLSPGQHWSGKMRKNKKKAGRPKAGQIFREIAQSIITSKYIALGAFGRKLRARKGPSIAIKAMARKLAVLYWRVMVKGLEYVENGIQKYEDQLLAQRHKTLTRLAKELNAQVSYNV

SEQ ID NO: 484557 - protein, 404 aa, unidentified
MTAAVVGHTAGQEVFGGVDSHTDTLHIAVISDNGGHLADAEFPTTAAGYTAGLAFLNAHGHVLAIGVEGTASYGTGFTREARACGHRVVEVNRPDRAERRRIGKSDPIDAYAAARAALSGRASSAPKDDTVAGIRALHNAARSAVKARTAALNQIGQLLITAPEAVRTRYGRLKTAERTDALARQRPAGDAVHTAVLTALKSLARRVKELTAEHQALTKALDAEVTAHNPGLRAAYGVGPDTAAQLLVTAGGNPERLRTEAAFAALCGAAPVPASSGRTNRHRLSRGGDRAANAALYRIALCRMSGDRRTRDYVTRQTEAGRTKKEIIRLLKRAIAREIFRCLTTNVAVPEIADLRPARQAKNITLTAVANHFGVWPATISTLERGLRRDDDLANAYREWLTTA

SEQ ID NO: 484558 - protein, 325 aa, unidentified
MQASTVVTPTAGHCGTIFVAIELSQKTWLVTLHSPERDRISRHKLAGGDHGGLLALIEQVRARAAGKLGAVPAVTSCYEAGYDGFWLHRLLEADGIRNFVFDAASIAVEQRARRAKTDRIDGELLLRTLMAHLRGEPRVVRIVRVPSLAEEDARRASRERDRLITEQTAHTNRIKALLRLQGMAVGNPRRGDWLAWLQRQRDRQGQSLSPQLLAEVTREHVRLMLVRQQLAALEQAQAARTLPLPAPMAERQDRLLRIKAIGTTFGANFRNRREVASYCGLTPSPWKSGSIDREQGISKAGNHRARHKAIAKGAFAPCHRQMLGS

SEQ ID NO: 484559 - protein, 379 aa, unidentified
MMTPSIAATCFVAIDLSKSKWLVALDAPHLAKIKSVRLDGFDTPGLIDLVRATVAAATELCGADQRPVVCFETGYDGFWLQRLLSNEGIETLVVDPTSFLVNRRARRVKTDRVDAEGMVVLLKNYCSGDRKAFRTVRVPTVAEEDAKRFHRERKRLMSERTGHINRIRALLALQGVRHINPAMVTWRKKLDGLETADGRPFPDQLMREIVRSFERLELTNKMIKALAEERDEALATESERFPEHEKAVLLEGLRGVGRHSAMLLSAEVFGREFKNRRHLSSYLGLTPSPYSSGDVERSQGISKAGNRPARTLGIELAWCWLRYQPQSALARWFRKYTAERPGMRKKVAIVALARKLIVALWRYVETGLVPSGAVLKAEV

SEQ ID NO: 484560 - protein, 369 aa, unidentified
MPQLKVRYVGLDVHKDSIVIAVAEQGRSAAFDVGSFASDWESLRKQLEKLAEGFTLELCYEAGPTGFELHRRLVEAGYDSQVIAPSLIPTPPGERIKTDSRDAKKLATCLRAGVLTPVYVPDADTEALRDLERARTAAKNAETTCKHQLGKFLLRHGRRWEQSNWTIRHMTWVRQQSFDHEAQRRVLRDGIKALEDATERVNGLTKDIEELIAVSTLAPLVTALQSMRGVATISSVVVAAEIGDLRRFDKPGAFMSYLGLVPSEHSSGKRTQRGSITKTGNKHVRRILIEAAWHYWKPAVMSRALRTRNALVSDEVSKIAWKAQKRLHRKFHHLVHEKGKAPQVAVVAVARELAGFLWAIAQEDQWLAA

SEQ ID NO: 484561 - protein, 340 aa, unidentified
MRRLYAGTDLHSNNNFLGIIDEQGKKIFKKRLANDPGVVLENLEPFRRKMVGIVVESTYNWYWLVDALMDKGYQVHLANPAAIKQYQGLKHADDQHDAFWLAEMLRLGILPEGYIYPKEDRPIRDLLRKRGHLVRLRTSLILSLQNIITRNCGVHLNGNQIKRFKTNHVAPLLEGHEDLALTGKVSKECIDFLTRQIKQIEKVVQDKVRLKDQYQYLETIYGIGKILSLTIMLETGPVERFSKVGNYVSYCRKVPSKWTSNDKTKGKGNKKNGNKYLAWGFSEAAELARRYDNPARAYYNKKLAKTNFMTAHTALAHKLARAAYFVMRDQVPFDPGKVFA

SEQ ID NO: 484562 - protein, 352 aa, unidentified
MSMLADLVEVVVGVDTHKDTHTAALLDTRTGGVLARATVNTDPDGYAELVALAEQHSGLRAWALEGSGGYGAGLARHLADAGELVVELDRPVRPARRAGAKSDAIDAERAARDALARTRLAQPKTGPERAALQARLTARRAAVEASADAQRQLHALVITAPEVVRARFRGQSTRLMLTTATRLRPTTSAEVDVFTSLTVLRDLARRVRFLEAEALEHEKAIRTIVRSWRPDLLQLTGVGPIVAATVLTAWSHPGRCRNDAAFAMLAGAAPIPASSGKTIRYRLNRSGDRQLNRALHTIALTRLQRDEPTRAYADRRRAQGKTDREIKRCLKRYIARELYRRLETPPQPLDAA

SEQ ID NO: 484563 - protein, 428 aa, unidentified
MDKLNRNRLEEFRQLRQEIRHSKEYLIVGIDVAKDRHHAFFGMATGKTLLRRLVFSNDHEGFRKLLDQAEALRVAHGLKKVVYGMEPTANYHKPLGEYLIHLGRTVVLVSGVTVKRNRESLDGRWDKHDVKDSANVADLISQGKCLYYEYPSAALRGLRGLLSLKRRLKRQEHGYRVRIRNHLIAQYFPEMDRDYERLGAVGLSIVRWCFPTSQITALDMDLFIERVISRRVRMETRRRLERVWEKAGASIGCDAVPGLDHEAKVMVEGLRQIREVIKETEDKIQELCEQFPGYPYVLTVPGFGPDVSAKVLGAIGDPDRFQNGKQVLKMGGLDLSADRSGNDSDKATPEISKRGKADLRYALYQAALIASHKNREVMIYYTNKIRGREREKGIHNKMLVKLSAKLLVIAWTLMKKKEKFDPTYLNVG

SEQ ID NO: 484564 - protein, 324 aa, unidentified
MTDAVLGIDVSKNTFDTNLGVGTKARSKSFANSPAGWHHLIAWLGEHKIGQVHACLEATGRHGLGIALALHEAGHVVSIVNPAQIRDFARTKLGRNKTDQVDAVHIREYAELFKPRPWTPPSPAMRRLCELQTIRAGTVAGLTEWKNRRGSGIVDDLALSLAKTTIQHFTSQLEAVDRAIAETIDNDVELSAKRDLLVSINGVGEALAGIVLAELPGPDVLGSSAAVTAYAGLNPQQRQSGISVNRPVRISKIGNAVLRTALYMPALSAMRYNPAVAALVDRLKAQGRLKGKQIVIAAMRKLLVLCFGVLKTGKEFDPAMAMGK

SEQ ID NO: 484565 - protein, 350 aa, unidentified
MLAELVDHVVGVDPDRDWITLAVLDAPSAGVVAEGRFPATKDGYDEAIAFVDGHSVDSERAWVIEGSAGYGRGLAVALERHGDWVIEFDRPTRKTKDGAKSDALDAVRAAREMLGRKRLSVPRAHEGVREAIRVHAVTRAAAVRARTGAINELKAMIVTADESLRAQLRGLRTAGQVAACARFRDRSCGAVHERATRSAMRFLARRIQLLDTEIDEHDRALKQLLDQAAPQLIAERGIGYITAAQFYVAWSHPGRCHSEAAFARLGGTSPVPATSGQNQTRHRLNRGGDRQLNRALYLVAVTKQRCDPVTKAYIVRRVAEGKTEREAIRCIKRFIARRVWRLLEHPPINT

SEQ ID NO: 484566 - protein, 459 aa, unidentified
MGKRGEKRERRSAILEPDAAGIDIGAEEIYVAVPPDRDEQATRRFSSFTCDLYALAEWLECCRIRTVAMESTGVYWIPLFQILEERGFKVYLVNAHSLKTVPGRKSDVSDCEWIQYLHSVGLLKASFRPAEDICAVRTLWRHRGSLLQMAAEHTQHIQKSLSLMNLQIHHVLSDITGASGLAILDAILAGNRDPLCLAHLCNIRVKSPHETVAQALVGDYRPEHLFTLKQSLDGYRYYQKLIAELDDEIARLMHTLPNAKEHPAPIPKRTKRTAYQRMGNDPLFDLRSELYRIAGVDLTDIPGVSAIAAQVVLTEVGPDVSRFRNASAFASWLGLCPDKRISGGKVLSTKTRKVKNRVAIVLRLGAKSLSRAKDYFGAFFRRMRARLGTAQAITATAHKLARVVYHVLHSKEPYTETVFHRCDEQEQQRAEMRLRKHAAQLGFQLLPISTNPAASQISS

SEQ ID NO: 484567 - protein, 411 aa, unidentified
MDVVYARCCGVDVHKESIAVCVLIREPGQGEQKHKAHFSTVTAELLRCGDWLASLGVTHVGMESTGVYWKPIWNLWEGQFQLLLANASHLKRVPGRKTDDTDCEWIAQLLQHGLLPTSFVPGSELRELRELTRHRSQLVGDHGRVVNRIQKVLEDANIKLASVASDVVGKSGRLMLEAIITGQTDAVQLAGLARGLLRRKKAKLEQALEGRVRPTHRFLLQQYWQQLQFLEQQLASVEQQIDSQMPGFREAAALLDTIPGIDSVAAWGIIGEIGVDMRQFPSAQDLTSWAGVCPGNNKSAGKRLSGKTRKGSRWLRQKLCQAAWAASRTKNSYLSVHFHRLAARRGRRRAIVAVAHTLLVICYHVLQRGCLYRDLGADYFLRANADNLRKYHVKRLQQLGYEVQLTGPAAA

SEQ ID NO: 484568 - protein, 343 aa, unidentified
MSIYVGMDVHRKRSQVAIVDDLGVQQRNRNLSNDPAKLVPILGTLPPGTPVAFEAASGWGWLVELLEELELEPHLVHPSRCKAIAAARLKNDKVDAATLAQLLRADLLPEAWIAPQGTRDLRALLRHRASLVRLSTCLKNRVHAVLADRGIGEDRILWTGPGRAWLASLELPAIPRAIVEDCCGLLDALAAPIARLERQIAALAKPDPRVQALMALPGVGRLTAMTLVAEIGDIDRFPTARKLCAWAGLTPAVRNSDRKVRHGHITKQGSVWVRWILQEAAQTAKKSPMLAGAYAQLARRRGKQIATVAIARRLLARCFHILKEVQTATTTGEGQTGRARNTA

SEQ ID NO: 484569 - protein, 414 aa, unidentified
MEVVHTHCAGLDVHKKTVVASIIVSDPKASLRKETRTFGTMTSDLLTLSDWLMSNGVTHVAMESTGEYWKPVFNILETNFEVLLVNAQHIKAVPGHKTDVKDSEWLAELLRHGLLKASFVPPLGQRELRELTRYRSTFVRERATLVNRVQKVLESANIKLASVATDVMGVSGRAMLEALIEGQASPAEMAELAQKRMREKRDLLAKALEGRVKPHHRFVLTELLCQIDSLDETIERFNQQVEAYCRPFEEAVVSLDSIPGVGRQVAEIVVSEIGTDMDRFPTADHLASWAGVAPGNNESAGKRRSGKTSKGNKALSTALNQAAHAAARTKNTYLSAQYRRLAARRGKKKAIVALEHTILVISYHLIKRHELYCELGGDYFDKRRPEATAKRLVKRLEQLGYSVSLQQPALCAAA

SEQ ID NO: 484570 - protein, 320 aa, unidentified
MSKKKSKAFIGIDVSKTLLEVAAHESDYQFRCANKAKAFGELIGELIALRPALIVLEATGGLEIPVVAALHAAGLPVVVVNPRQVRDFAKALGQLAKTDRLDARVLAHFAAAIKPPLRPIKSADELELDALVGRRGQLVEMLTAEKNRSGSAATDTVREEIKEHIDWLEERIAELNKQLKAQLKHSTLWQGKDDILQSVPGIGPVVSFSLIADLPELGTLNRQKISKLVGVAPLNNDSGQQRGTRHIYGGRTRVRSMLYMAALTATRFNPVIKEFYQRLLANKKLFKVAITACMRKLISIINVMVRDSTLWKTKLDPVSA

SEQ ID NO: 484571 - protein, 352 aa, unidentified
MNITTVGADLAKDVITVCGQDRAGKTVERRDLRRVAFLAWLERLPKGCIVAMEACSSSHFWAREAVRLGLEPRIIAAEFVQPFRKSRAGKNDRNDAEAIAVAAREANMRFVTVKSTEQQGRLAVHRLREGWKEERTALMNRIRGVLAEFGVSFALSSTALRKGLAEAFHDEQLPAPVRELIASVREDLERLDHRIAGCDRTISLACRADPAAKRLQEVTGVGPTTADAMIATAGNARAFRNGRQFAAWIGLTPRQFSSGGKTKLGGITRRGDAYLRTLLVQGARSSLQQALRCSPESANRLQQWIVNVHARAGYHKTLVAIANKNARMLWALMAREESFNPEAWKRSRPTPT

SEQ ID NO: 484572 - protein, 412 aa, unidentified
MEVVAERCAGIDVGKREVQASIRVPDGQGGRRKETRTYSTFTSSVEAMAQWLGDEGVTEVVMESTGSFWKPIWYVLEDRGFELKLVNSRHVKMVPGRKTDVKDAEWLAELLEHGLLRGSFVPPPAIRKLRDLTRYRKRLIQTRADECQRIQKTLEDAGIKLASVATDILGVSGTAMLKALVAGERDPEVLAELAQRRMRAKIPELRQALRGRFSEHHALLIRISLDLVEHLDEAIATLDGEVEALMAPFAKAAARIDTVTGVGQRAAQCVIAEIGVDMSVFPTASHLASWAGCCPGNNITGGKRRSGRTTKGDPWLNEVLNQCAWAAAHSRDTYLSAQFWRLARRIGKKKAAVAVAHSILVIIWHLLTNECDYKDLGGDYFVKRDAVRERDRAVNQLLSLGYKVTLEEAYVA

SEQ ID NO: 484573 - protein, 360 aa, unidentified
MAKAKTLVGLDVHATKIVAAVLDAETGQLQTFAMSGENAAAAGFCAGLPGPVRVAYEAGPTGYGLARELAKRGVECVVAAPSKIPRASGDRVKTDRRDAEHLVRLLLAGKLHPVRVPGDEEEALRDLVRARDAVRMDLMRCRHRLSKLLLRHGIRFDDGQAWTQRHRDWLATVTLDWPAAQATLLDARGAIDALAHRRDGLEREIVALLSSSPWVVQVGRLRCLRGIDTLSAVGLCAEIGDFERFARAEQLMSYVGLVPCESTTGQQRRLGSITKTGSGHARRLLVEASWHYRARPSVGRALTDRQESQPPEAIAIAWSAQRRLHRTWTRLEARAKRRTIIAVAAARELAGFVWAITQIE

SEQ ID NO: 484574 - protein, 369 aa, unidentified
MNRVFVGMDVHKEKIVAVGLPEEGNHPVMREEFGGNDLSRLVKRLRQLAKSHRVEACYEAGPCGYGLTRTLLQAGVECRVAAPSLIPRRPGDRIKTDGRDARELALAFRANTLSFVRIPSREEEEVRGLIRCREDIAKEVRRIKHVIAHWLLIHEQRPPKGVKGWTQAHWRWMRDLELSPLDRTVLDHYLDVLHLLAERLKQIEQQVVALAETAPYRERVTRLRAFKGFSPLAAMRVIAEVMDFRRFPRAAAFMKFTGLVPSEYSSSDRIRRGRITKAGNSHLRCVLVEAVQRGTRNAHMGRDLLKRMACVSGPLREVALRCLTRLHHKFWKLTRRGVAGGKVKVALARELAGFVWAMMTLPETADAAA

SEQ ID NO: 484575 - protein, 446 aa, unidentified
MQKFYLGCDVSKGYSDFVIIDEDLNCVEENFQLDDTALGHAELRHRIDKLFEKYPSAVLYAAVESTGGYENNWYGFLLKQQEKYDLHAARVNPNGIAHDNKAGMVRNLTDKISARSVAEYQVRHPEKVPYGQTNPYASLKKVWVHLRMLKRQRGDHLNELESLLYSGNPEILQYCRNKMPQWVLKLLMKYPTADLLSRARLKSVASIPFLKRQLAPELIKNAKASTAEESDETTAFLITSTVRQLVHMDKSIELYEKRLEKMCDWPEVDLLMTIDGVGRMTAIVLMLYIEDIRRFDSAKKLAAFLGVHPEYRLSGDSTKKGSFRMSKKGQKAPRAMLYMAVLAGLSKKSRNPIVRRLYDDKKAQGMVAKAAIGVCIHKLVRIAYGVLASKKPFNPTIDELNRQKSSPAEQNTAIGRDRRYQGYDAKAPISRRQSKKRMEQIKSQDR

SEQ ID NO: 484576 - protein, 337 aa, unidentified
MSLYIGVDGSRDTLAVALFRAGQDSSPQYLGSFPNRPEKFETLFRQVQQQSRGEEVIWVIEPCGGYERPLMYWLYEHRQCILYPNPRQVRQWQQGRGYRAKTDPLDSQMLALYGAEHRQDLHPWKPWPEPAGHLLRLAERWRELEVERQREQNRLEAYLSQGISPDAPEVRDLQEHLQFLEGLIRRTKKHIGRLYQDFPDLDGLRRRLLSVPGVGEKTVHALVALLIRWAQLGRRDAKGLVAYLGLDPRIRQSGKRPPRGRISKQGDTRWRSLLVAAARGGLKGTSSPLARFYGRLRQRGKPHMVALVAAARKIVVWAWAVYCCGEPFDLRRHIARV

SEQ ID NO: 484577 - protein, 402 aa, unidentified
MKFLKHGLGIDMAMEKFDACLSIIDEQQRVTVISQRSFKNNKKGFEIFLAWVLKKTKQFALPAVYLMEATGIYYEQLAWFLHRQQCTVSVMLPNKAKKYKDALGLKSKTDRIDAKGLAQMACEQNNTIWKPLSDSLYLLRLITRQIQSIAEQSTVLKNQLHALHYGMYRDKDIEKMYARQIGLLQKNKKGLELRIKKIVEEDTILKKKFADICKIKGLGLQSLAVIIAETNGFAAFENVSQLVSYAGYDVVENQSGKRSGKTRISKKGNSHIRRCLHFPAFNTIKYEVEPFKNLYERIYERSKIKMKGYTAVQKKLLIVIYTLWKKDEAFDRNYRDKISGEVQLEPSFASVPKELAKAFDEKGKAKIGKQKITPDKTRVTQDKHPSKHRRMPSFASHKFIKI

SEQ ID NO: 484578 - protein, 338 aa, unidentified
MTILMGFDQHRAQITAEWVDTSTGEISRGRVTPADRAGVRRFVERFRDQELEVALEATTGWRFVVEELRAIGAQVHLAEPAETAARRGTKRRPKSDRADARHLRELLMIGRLPESWIPPDHILDLRARVRLRHTLSAQRGEWQQRIQSVLYHHGCPQRGDLMNTDGLAWLAAQPLPACARDQVTIALAVIDALDTQLAPLDNELRAYARRQPGCKALLAHYGVGPLTAVTILAELGDPNRFSSSREAVRYSGLDITVHQSDQRRAPGHLSRQGPPALRWALFEAAQCARRRTSPDHQYYLEAAARLGGNRACLAVARKLLKRSYHTLRDLGEEALQPA

SEQ ID NO: 484579 - protein, 331 aa, unidentified
MFPVGVDVSKSTLDLCMLYDGIKGRIKTRNIRNDRSATDNIIRWLRLQHCGPQDVHLVMEATGVYHERLATDLYDAGFCVSLANPHRSREFARGMGIMTKTDKVDAYMLACYALLKKPHRWKPPAPEIRHLSALLRRRDVLLGDAVREENRLEKYLSTYTPADVISSCMRMAHLLREEVDSIERQIKAHIQACPDLKRDFSLLTSIKSVGPQLGMHMLVVLRSYNIESAEQAAAFLGVVPVEKRSGTSVRNRSRMSKIGPLQLRAKLYMSALCGKIHNKRMRNMYNELCLRGKPKMVAIGALMRKLVHWCYGVLKTGTAFCDEISNSLVHT

SEQ ID NO: 484580 - protein, 348 aa, unidentified
MTIVAEQFAYVIGIDTHAQTHTYAVIETSTGARIACEAFPVNKSGINRAIAWIQRNCSGNVLAAIEGTNSYGSSIRRALNEQSILVTEVKPPRRKARNGVGKSDQIDAISAAMSVLGHEIDTLVSPRQDGTRAAISVLLTARRRVILQRTSNRNALNALLRQIDLGIDARKALSDRVIGEISAWRIRDLDTIDQRVARAEAVELAQAILKAKRRTQGIDLEMAVLDEQLAPGMQAQPGMGPVTLAIILASYSHAGRFRSEASFAALAGVSPLQASSGNTVRHRLNRGGDRQLNMALDVIAKSRMRFDERTQKYVERRTAEGRTYREIKRCVKRFLARSIFRQLEQIMC

SEQ ID NO: 484581 - protein, 309 aa, unidentified
MEVMYSRCAGMDVHQETIVVCVLTPGEEDQVEKETRTFGTMTKHLFELLKWLEHKAVTHIAMESTGVYWKPVYNILEGYFDVTVANAQRIKNVPGRKTDVCDAEWIAKLLRVGLIERSFIPSEDVRELRDLCRLRKKRLGQLTAEKNRIQKYLECSNVKLGTVVSDVFGVSGRNLLETLITKGYVDAEDVEESVKGKLRSKKEAIRDSMLGTITRHQMDLIRDCWDHIEYLEKSLSQLEEKIDAHLEPYREEYELLQTIPGVSEATAAVLIAEIGVNMDQFPSSDHLSSWAGLAPGNHESAGKKKVQRV

SEQ ID NO: 484582 - protein, 402 aa, unidentified
MNAVGIDVSKGKSMVAIMRPFGEIVSAPFEIKHTASGINSLVELINSVEGESRIVMEHTGRYYEVLAHQLSEANLFVSAINPKLIKDFDNDSLRKVKSDKADAVKIARYALDKWQNLKQYNVMDELRNQLKTMNRQFGFYMKHKTAMKNNLIGILDQTYPGVNTYFDSPARSDGSQKWVDFASTYWHVDCVRKMSLNSFIDHYQNWCKRKKYNFSQSKAEEIYGKAKELVPVLSKDAITKLIIKQAVDQLNSASTTVESLRTLMNETASKLPEYPVVMAMKGVGTSLGPQLMAEIGNVSRFTHKSAITAFAGVDPGVNESGSYEQKSVPTSKRGSSDLRKTLFQVMDVLIKTHPQDDPVYQFLDKKRAQGKPYYVYMTAGANKFLRIYYGRVKEYLASLPES

SEQ ID NO: 484583 - protein, 338 aa, unidentified
MTWYSGIDLHSTNSMVAVIDEADRVVYRRRLPNDLGMIVAGLEPYRSELAGVVVESTYNWYWLVDGLQAAGYPVRLANTTAIKRYAGLKHSDDETDAVHLAHLLRLGILPTGYIDPTAERALRDLARKRLQLVRTRNTHVLAVENIVARQTGGHISANAVKRLQAETVGTPGLPEDVTRALAANVAVIGTLSAEIGKLEARLREQVRLRAAFRMITTAPGIGEVLGTTIMLETGSIARFAAVGNFASYARCVDSKRLSNGKKKGEGNVKNGNKYLAWAFIEAANFARRYCPEAKRFYERKRAQSNGIVATKALAHKLARACYHIMKQEQPFDVKRCFA

SEQ ID NO: 484584 - protein, 391 aa, unidentified
MIYVGIDVAKDKHDCFITNSDGEVLFKAFTITNNLDGFNDLYQKIETVMKDITKVKVGLEATGHYSYNLLGYLIDKGLPTYVINPLHTNLYRKSLSLRQTKTDKVDARTIASILMSDVNLKSYSDISYHNEELKSLTRYRFDKVKERAKLKSSVSRLICILFPELEKLVPTLHMASVYALLSEFPGAKQVANAHLTRLTNLLSEASKGRYSKDTAITFRDAARTSIGSNMPAKSLELKHTIKLIKELDSEIDEIENEIKIIMDEINSPILSIPGINYRMGAMIIAEIGDFSRFDSPDKILAYAGFSPSTYQSGHLYGAYAHMEKRGSRYLRYALYNAAKYVCHWDPTFTAYLAKKRAEGKHYNVAISHAVKKLIRVIYHLEKTNQQYIKAS

SEQ ID NO: 484585 - protein, 414 aa, unidentified
MEVLYRRCAGIDVHSKTLAVCVRCVGEGSRVQQQVRTFGTMTRDLLALHDWLEAEGVTHVAMESTGVFWKPVYNLLEGAFQILLVNARHVKTVPGRKTDVRDCEWLAQLLQCGLLRASFIPPRPQRELRDLTRMRMQLKHELGSVTNRIHKVLEDANIKLGVVATDILGVSGRRMIEALIAGETDVVKMADLSCRRLREKIPQLQLALEGKVTEHHRFLLQALLDHVEYLEKQIEHFNERIETACRPFQTAITALLPIPGFDRVSAAAVIAEIGADMKPFPTHAHLCAWAKVSPGNHETGGKRKSGKTGPGNRWLRATLVQVAWAASHKKDSYFQGQYRRLAGRRGKKRALVAVAHSVLTDVYCILKTGQSYRELGASHLDLLQRDRIRRYHVKRLQALGYKVELVEENEGLAA

SEQ ID NO: 484586 - protein, 323 aa, unidentified
MIKKDFNIVIGVDIAKKKFDVACLLEGKFKHKVFTNNAVGFAGFAAWFLSLCGDANPLICMEATGSYSLPLADYLVNHGFSVSLVNPAKIHAFAKSELSRAKTDKADAKLIARYALMTQPPLWTPPPANIRELQALVRRVEHLLEMIQMEQNRLETADASTHLSITNVLNTLETELKSTRKAIKDHIDSNPDLKQRSDLLETIPGIGEACIAHLLLALSEHHGFTHAKQVVAFAGLAPVLRESGQWRGNTHISKTGDAALRKVLYMPALCAKRYNPVIQVFWNRLQANGKNGKAITCAAMRKLIHIAFGVIKSGKPFDPNYAI

SEQ ID NO: 484587 - protein, 344 aa, unidentified
MITIGIDPHKSSHTAVALDEAGRVLGELRVAATKPMLERLLRWAERWPDRVWAVEGAAGLGHFLAQQLVARQETVLDVPATLAARVRLLARGHGRKTDGIDAGSVARVAQSQSDLRRVGPEDHSGVLRLLSDRRDELAQERRTVVNRLHRLLRDLHPGGAPTELSAETAARLLGRIRPAAVVDLERKSMARALVTDLRRIDRALVENRTRCAAGVMASGTTLTSVFGISDVLAAKILGHAGDISRFASSDHFASYTGTAPIEISSGEVTRHRLSRSGNRSLNNALHLAARVQTMHPGAGRDHYERKLAEHKSSREALRSLKRQLAKVVYRHLVADREHDLALAV

SEQ ID NO: 484588 - protein, 349 aa, unidentified
MILVGCDLHTRKQQVALLNTDTGELRDQELSHVGDDVERFYAALSPPVTVGIESTGYSLWFHALLQRLGHTLLVGEAAKIRAMVVRKIKTDRRDARHLRDLLKDNRFPVVWIPDPTTRDLRALIKHRLRLVRIRTMVKNGLHAIALNQRLALGPSLWSRQGLAQLQALVLLPHTRRRRDDSLELLHWLNRHIDELDLHVATAAAADPAARRLMTHPGVGPLTALATVLVLGPVGRFPGSKHVVSYIGLAPAINASADKYRLGHISKQGSALLRWVLGQAAPLATRGDAALKRIYFAVLRRRGRPKAKVALARRLLIRLYVMLRDQIDYDEFCRRGPTRREGPELARTPV

SEQ ID NO: 484589 - protein, 343 aa, unidentified
MDHFAGLDVSVKETSLCIVDDAGRIVREVKVASEPEALLQALKKPCYHLKRIGLEAGPLSQWLFNALAEAGLPVICVETRHMRAVLKAQINKTDRNDARGISQMMRAGLYRPVHVKTLRSQKLRMLLTHRKLLQSKAIAIENDLRATLRNFGLKVGVVGTVKFEARIKELVESTPDLVVLVEPLLIVRRVLREQIGILHRRLLAIVRNDAVCRRLMTVPGVGPVVALTYRATVDVPSRFRNSKAVGAVFGLTPSKHQSGESDRTGGISRCGDEMMRMMLYEAAHIMLVRSAKWSWLKAWAMKIARHRGLKKAIVALARRLAVIMHRIWVDGTEFRWTREVAAA

SEQ ID NO: 484590 - protein, 322 aa, unidentified
MTDAVLGIDVSKTTLDTSLLAGAKPRSRSFANSPDGWRQLIAWLAKEKVRQVHACLEATGRYSLGIALALHEAGHVVSLVNPAQIRDFARTKLGRNKTDQVDAAHIREYAELFKPRPWTPPSPAVRRLCELQTIRAATVAGLTEWKNRGASGMADDRALALAKATIKHFTLEAVDQAIAETIDNDPELCAKRTLLVSISGVGETLAGIVLAELPGPEVLGSSGAAAAYAGLNPRQHQSGTSINRPARISKIGNAVLRSALYMPALSAMRYNPAIAALVDRLKAQGRLKGKQIVVAAMRKLLVICFGVLKSGKDFDPAVAMGQ

SEQ ID NO: 484591 - protein, 340 aa, unidentified
MKFSIVGMDIAKHVFQLHGIDVEGQVVLRRQVRRGQVLGVFGKMDPTVVALEACATAHHWGRELTALGHEVRLIPPQHVKPFVRRGHKNDAADAEAICEAARRPDLGRVPVKSRESQSLLMLHRSRELLVKQRTMLINAVRGHLAEFGIVAAQGPGRMGELLRLIGDDGDDRLPAVARQALRPLAGQLVRLGEEIAVLDKAILAAHRACAESRRLAEVPGIGPLTASAIVASLANPAAFASGRQFAAWLGLVPRQNSTGGKPRLGRITRQGNVYLRRLLITGAQAVLRWAGKGRTDPWIAALLARRPKKVAAVALANKMARVVWAMLVSGQDYRRPVITA

SEQ ID NO: 484592 - protein, 356 aa, unidentified
MQNNFQSPESVILGVDTHLDIHVGAVISQAGKLLGTRIIQTNQIGYQELFDWAKSFGVLERAGIEGTGTYGAALTRFLIKNSIYVVEVNRPDRSKRRLEGKSDPLDAENAARTVLSGSSKAIPKMQSGACEALRIISVARRSAVKARTQPINQLRSLLVSAPQDVRDKLWKSKPHECVAACINCEVSEYSPLRIALYSTLRSLAKRWGALTEELNELDESLDKLTRKYASNLRSQFGVGPQTAATLLAVAGDNPERLKNEAALASLCGVNPLPASSGKTVRHRLNRGGSREANNALWTIALVRMRSDPRTRIYVDRRTGEGLSTKEILRCLKRYIVRELYPLILSDLTYANRPLLT

SEQ ID NO: 484593 - protein, 334 aa, unidentified
MKKRYFMGIDVAKATFDFCLLSSTESCLWRGQFSNDAHGIARFLAQLPAPSRKPAQIHFALEATGVYGKALVAALHQAGLAVSVLNPAQVKYFAFSVLRRTKNDTVDAEIIARFCRERKPLATRPLRPIEEQLKVLVHERESRVGEQTRERNRAKKDPFQIALPTLISRQRRQRLKQLDKEIAQLDAAIDSLIASDESLSNQSQLLCSIPGIAAVTAAKLLSELAGKEFQSARQLAAYAGLTPAEFRSGYFLYGKTHLSKIGNAFLRKALYLPAAVARRWCKPLKPWIAILESRKLHHLAIRGAIMRKLLHIAFGVLKHQKPFNPLLVFIPKTL

SEQ ID NO: 484594 - protein, 344 aa, unidentified
MDNHTQYLGFAGVDLAKKVMQIHFVTEDGEITDRQVKRAEFLDFFRNRSKCLIGMEACGASQDWARKLEAMGHEVHLMSPKAVKPFVSGQKNDHNDAIGIYKAMFNGVRRVPVKSTEIRDLQTLRRIRSQVAKDRIKEINHVRGLLAEYGIVMGRSVAAFNKGISSALVNLKERGGVSPLVAEELRTTVESIKTKTERQKRLDREIEQLARGCKNYENFLKTPGVGPFTAAMLCVLLCDPDIFANGRQFAAYIGLAPRSRGSGGKNYVTGIPSKFNCDSESRAVFVECAQALTRYKNKSPWIEGILRRKPKKVAVIAIANKLARQVWAMANKGESFKQMTILTA

SEQ ID NO: 484595 - protein, 365 aa, unidentified
MPSVTSPAEAIHLGMDTSKNTIVVGVLMPGEEIPAVDRIFNDEDPVRRLVGRFPDPGLLRACYEAGPGGYDLHRLLASMGVACDVVAPSLIPKGGSDRVKTDKRDAVRLARLHRAGELTPIRVPSPAEEAVRDLTRVRAAVLADRKRAQQRLTAMLMRHGRVWRNTYWTQAHRTWIAAQSFGEPALTTALAHYRATLDTRETELACIESELAPWARREPLAPAVARLCCYRGIADLTALTLAAEVVDWRRFPSARAFMGYTGLVPSEYSSGARTWRGHITKAGSGPVRTALIEAAWAYRFQPAIGVTLRRRQEGAAPDTIARSWKAQRRLHGKYRRMVNGGKAAPEAATAIARELAGFIWAEMTS

SEQ ID NO: 484596 - protein, 368 aa, unidentified
MKKIAYVGVDYHVKSITAAVYLSEERSFLETTHLNNDDKVISRYMKKLSQQFDLRICYEASGSGYTFQRKMRALGLHCDVIAPSLTPCKPGERRKNDFRDAKKLAQHYAHGLLTIIRPPTEQEESVRSLVRCRFAFKETIKRVKQQINALLLSQDHFWKRSKWTYQHRQWLRSITLSTAHLQLVQQELMAHLDYLESRLHYLEEQIAQLAGSEIYAPSVKKLRALRGIGTLTAMVLIAEITDFRRFSSPRALMAFLGLIPGEDSSAGRRTPGAITKTGNRRCRTLLVEAAQHYARKPCVSYALKKNLSQVTAPVSALAVNCMQRLHKRYWFLVCKGKLRQKAIVAVARELVGFIWALMQEPVEVAAAA

SEQ ID NO: 484597 - protein, 355 aa, unidentified
MKTIQSDFSSLQLYIGIDVHKKQWSVSIYTDAAHHRTFSQPAIPQALKSYLDHNFPGAKVVCAYEACKFGYWIQRQLTSYGYQCLVVNPADIPTSNKESSEKTDPNDSRKIGKSLRAGLLTSIHIPDQHTEGDRQLFRYRKRLMADLTRVKNRIKDKFLFTGTSIPPEFDNSNWSKAFLNWIKLAALPDTNTRLTVDLLLEQYHFLYRHFLRASIEVRKLQREGRYKNVSKLLRSIPGIGPLTTVELLTEIEDINRFPSFKKFNSFIGFKPRSHSSGEHDWKGRMAYRQHKGLRSSLIECAWTTIGKDPVMLQRYEELTKRHTGKRAIVIIARKLVSRIYYVMKNEKPYELGLVK

SEQ ID NO: 484598 - protein, 312 aa, unidentified
MNRVICGVDVSKDWLDAHIRPSGTFKRFGNDAAGIGALAGLCRAENVELVVMEASGGYERQAFLLLWEFGIACALANPRHVRRFAEAMGFLEKTDRIDAAMIAHYAETKRLSALSPPKAAQLRLSALMTRLSQVTRDLIVQKQRRSAAGDGAIVESLDEVIALLMRQGSRLEGEIASMIDDDPLWACLNRAFRSVKGVADRTVARLMGELPEIGRISNKAIVKLAGLAPIANDSGKRSGPRPVRGGRSGPRGILFLVAAVAARHDPHLAAFRQRLQSAGKPKMVVRIALARKLLVILNAKARDARREFECAT

SEQ ID NO: 484599 - protein, 345 aa, unidentified
MQIKSIGIDLGKTTFHLVALGAHSQVVIRKKFSRQQLLTYAANLPSCLMGMEAGVGSHFLGRALREQGHEVRLIPAQFVRPFVKSNKNDYSDAEAIAEAVERENMRFVPIKTEDQLDLQALHRVRERLVSRRTSVINQIRAFLLERGISFRKGPASLRRQMPEILENADERLTARMRRLLDFLWQEWKHLQLQIESLSEDLEKIANSDAACVRLQQIPGVGPLVATAVVSAIGNGTAFHKGRQFAAWLGLVPRQWSTGGKPKLLGISKRGNPYLRKMFIHGARAAVLRVKREGSCLGQWMSGLETRAARNVVIVATANKLARISWAVLSSGNDYRPMHRALRCSS

SEQ ID NO: 484600 - protein, 538 aa, unidentified
MATFRRSQQAGSLQVQSANGSRRRSRTRNKDLLHKPHGLIHPRVQKVGPEHFGIVAVDCAKARSKWMFADYYGNVLVAPVEVEHNQLAFAAAFARLRDATARHHIEDLVVAIERTGRYHHVPQRAFRDAGFETRVVHPYTSKQFRQPADPDNKTDDTDLAAIGRAAAGGFALTEPEWDEAERELQLVVRQRRDLVEKCAALQCQVREHLDAALPGYAACFDKLWESPVALPLARHAASADAMRTLGHDAIARWLRERKLRCFDRTIDRVLAWAARAAAPDQAAHRHRAIAWALDDDRVRKTLEIQALERDVAARLARTPYILLLSLPGVNVVSAADCAGEFGPIRFYANGRAITGRAGLYPSRYQSDRVDRADGPLVRRGNRALRAVLLGVADNLLKCNRYFRTRAAAWKAAGHDPRLMHTRVAMRFARIAYHLVAGRQVFQHPSTRERGYILQKLIAFHREHDTPLPVPSTADRHEPSTRGPRRRRHAIAGERAGGRSGAAGPRTGSHSLRSPPRPATAGRHSARGTGPAGSDDGTI

SEQ ID NO: 484601 - protein, 344 aa, unidentified
MEIRSVGIDLGKTSFHLVALGEKGKVLLKKKFTQKQLIAFTANMQTCLIGMESCSGAHFLGRALREQGHDARLMPAQFVKPYVKSHKNDFVDAEAIAEAVERENMRFVPIKTDDQLDLQALHRVRERLMTRRTALINQIRGFLLERGIVFAKSPSRLREAIPEVLENANENLTPRLRNLIAMLWSEWKDLELQIVEMNDEVERIASSDDACRRLQQVPGIGPLVATAIVASIGNGAAFSKGREFAAWLGLLPNQRSTGGKTKLGAISKRGNCYLRKILIHGARAVVLRSKRDRLAMGAWMTSLETRAPRNVLIVATAHKLARIAWAVLSTGQDYRAAVPEALAA

SEQ ID NO: 484602 - protein, 390 aa, unidentified
MDVLYQSCAGIDVHQANIVVCILHGPLTSTRPKREMATFDTTTKGLRACHDFLSQFHVEAVGMESTGVYWRPVWHALCDDFELILAQPAHMKAIPGQKTDKKDAHWIAKLTRIGLLPRSFVPDETIQELRELTRQRKHYVESRNRETNRIHKILQSGGIKLTTYIEDIMGLSGRNLLQLLVDGTPITPRIVHQSVYTSLKKKVPQLLEALDGYFSDHHRFMLKQSLEIYNFYQKQIELLEERMNVYLSQYENHVEILDSIPGIDVITASVIISEVGVDMSQFPTAGHLASWAGLCPGNNESAGKKRSTKIRHGNSYLKKCLCQAAFAIKKQKGSPLADRFYQIQSRRGSQKATIALAHQLLKIAYILLKEQITYPEFLAQKKTTRDELVA

SEQ ID NO: 484603 - protein, 418 aa, unidentified
MNEEGNTRGTRRYVALDIHKHYCVIAAVDREGRIVLPGVRVEHADLEGWLKKNLYPTDHVVIESTTNAWHVYDLLEPWVERVVVANPIKVKQIATARVKTDLRDTLILARLLAANLVPDVWVPPAHVREMRQLLSQRRQLVETHTQIVNRMHSVAHRHHLQHERGKRFNEKNTLWQKNKRLSKTEQFQLELEMENRAYIEKQISRIGKEVAKMSHQKPWAESMTYLMQLPGFGVITAMTVLAAIGEIQRFGSAKHLASYSGLTGGVDQSGTHLVQKGITKEGRKELRWAMVEVAQRAVKSDPRWTRKFQELHKRMHRNQAIVAIARQLLELVWYVLTRRQPYRHFSQERIAYKYLTWAWQMDEAARDGLTRQQFARYYMMRLGIGHDLTRIALNPKYPRRLASETELLALRPELNQTE

SEQ ID NO: 484604 - protein, 414 aa, unidentified
MQVLYPRCAGLDVHKDTVVACVRLAGEGQATTEVRTFATTTAGLCALAEWLVESSVTHVAMEATGIYWKPVWHILSDNPLELILANAAHVKNVPGRKTDVNDATWLADLLAHGLIRSSFVPPREVAELRTLLRTRKQLVREHASHVQRIQKTLEDANIKIASALSDIMGKSGRAMIEAMIAGETDPQKLAALADRRVQAPRAKLVEALTGRLNAQHRFLLRLHLGQIDALDRATAEVDAEIEGHLGPFADAVKLLDTIDGVDVLAAEVILSEIGLDMTRFPTDGHLVSWACICPRNDESAGRRRSTRTRKGARWLKATLIQCARSAARMKGRYLSALYQRVRGRRGDKKAILAVASSILVAAYHMLKTGTPYRDLGPNHFEPAKRTALTRNLVKRLEGLGFTVDLKPLAAAQPI

SEQ ID NO: 484605 - protein, 349 aa, unidentified
MPAPTQIAVSVIGIDIGKNSFHIVGHDERGAIVLRQKWSRGQVEARFANLPPCLIGMEACVGAHHLSRKLNGLGHDARLMPAKYVRPYSKGQKNDFRDAEAIAEAVQRPTMKFVATKTADQLDLQALHRVRERLVSQRTGIINQIRAFLLERGIAVRQGQRFLRAELPRILATPPDVLSPRMARVIEDLAGDWRRLDERIESLSSEIEAVARQDAGCERLMSVPGIGPIISSAMVAAIGAGDAFTKGRDFAAWLGLVPRQMSTGDRTILGKISKRGNRYLRVLFVQAAWAVLIKPKSWERHGLKPWIEAAKKRLHHNVLAIALANKLARIAWSVLAHGRNFEVSKIQTA

SEQ ID NO: 484606 - protein, 412 aa, unidentified
MLKIVYPVCCGMDVHKSFIVACIATTNDHGVTTYRFKRFSTFTGDLRRLAAWLCACSCTDVCMESTGKYWIPVYNILEPSCKITLAHPKYVKAIRGKKTDKKDAKWIADIFKHGLVSGSFIPPADIRQLRDLMRYRSKLTGFSSGEKNRAQNCLTVSNIKLDDVFSDVFGKTASAITSRLLEANAPFDVRPFLSKKLKASAEQIQAAVDGSICTHQAGKLRVIRSHMENLAACKKSLESLILGLAEKHLPTLDLILTVPGIHVFAAVGILSEIGADMSVFPSSKHLCSWAGLTPQNNESAGKKKTTRISGAGAYIKPLLVQCALAAIRKKSNPEIRSRYLSLKKRRGHKKAIIAIARMLLTAIYNMIKRNEKYNAALYRKADVPPRNREVSVNEAIYILQRQGYLVTAPQSA

SEQ ID NO: 484607 - protein, 372 aa, unidentified
MNYNTVYVGMDVHKESFSLCAYTIEAEKASHYQRTEADYKKVLNYLEFLRTIYGDDANFICGYEAGCLGYTLYHQLTANNVKCIILAPTTMLEQRRKKRIKTDKRDAEIIAKCLAQHNYSPVHIPTAKDEETKEFLRMRDDHKLALKKVKQQILAFCLRHNYRYDGNSHWTAAHLKWLKALTPEALYKEILDEYLLTYHTLSDKLERLDKRIEELSTQDEYKEAVKKLCCFIGVKTHTALSVLVEVGDFNRFASAQHFASYLGLVPGEDSSGNDQNRLGITKAGNRHVRLLLTEASQCYARGQVGFKSKELKARQSGNTPAVIAYADKANERLRRRYYKMVLNKCKKHNVAKTAIARELACFMWGMMTDNIA

SEQ ID NO: 484608 - protein, 366 aa, unidentified
MLIHVPNHVPVLAMDVHKSTISTGVLEPDSTSPLVDKISTDDESVRRLIARFPEPGRVWACYEAGPTGYELARVLRSAGMHCEVIAPSLIPSRPGDRVKTDARDARHLALLFRAGQLTSVRVPTVAEEAVRDLCRARADMVIDRTRARHRLGKFLLRHGRVWREGTNWTLKHQVWIRAQRFEDPALTATFGHYQATLTAREAAVDAIDADLTQWFARTPFADPVARLAAYRGITELGALTLAAEVCDWHRFPTAAMFMGFCGLVPSEHSSGQRTQRGGITHAGNTHVRTQLVESAWAYKSRPAAGAVLTKRHEGLDPAVVARAWAAQLRLCGKFRRLDERKTNRKTVVTAIARELAGFVWAEMTAA

SEQ ID NO: 484609 - protein, 343 aa, unidentified
MAYFAGLDVSVKETSICIVDDTGKIVRQARVASEPEALLQVLTNNNYRFKRIGLEAGPLSQWLFSALAEAGLPVICVETRHMRAVLKAQINKTDRNDARGIAQMMRVGLYRAVHVKTLRSQKLRMLLTHRKLLQSKAIAIENDLRGTLRNFGLKVGMIGAVKFEERIRELVENLPDLAVLVEPLLIVRRVVREQLGILQRRVLAVVRDDEVCRRLMTIPGVGPVVALTYRATVDVPARFRNSKAVGAVFGLTPAKYKSGETDRTGAISRCGDEMMRMMLYEAAQSMLVRSTKWSWLRAWAMKIARHRGMKKAIVALARRLAVIMHRIWVDGTEFRWTREVTAA

SEQ ID NO: 484610 - protein, 322 aa, unidentified
MSGTNQHCAGIDVSKNTLDIAFSGMTNQSTMPNDLEGFTKVVSELKRNCTRLILMEATGGLESGATCYLQSEGFDVVIINPRQARDFARAMGYLAKTDRIDAKVLLQMAEVINQHPEREKYIRPLPDVHRQLLAAMVVRRRQLTVMLTAERNRLHPSHPMSHRSIRLIITALKDELARIEDEMADHISKNFRDLSELLSAVKGVGAATVAVLLAEVPELGSLSRREISALIGVAPVNRDSGTMRGRRTVFGGRASVRTALYMSALVGTRHNPVIKEFYERLVAAGKPKKVALTACIRKLLTILNAMLKKNEAWDPLYHHHAS

SEQ ID NO: 484611 - protein, 391 aa, unidentified
METIVERPGALDVHKAQVTACVRVPTEGGGREQHVAEFQTTVRGLLTLRDWLAAHRVTQVTMEATGVFWKPVWAVLEDDFELLLVYARHVKQVPGRKTDVADAAWLCQLAEAGLLRSSFVPPKPIRALRNLTRYRKTQIQERAREANRLHKALEDTGIKLDCVASDILGASGRAMLAALIDGTTDPEVLADLAKGRMRSKIPALREALEGRFDHLHAVWVGAILAHVDFLDEQIDSLSEAIEEQIAPFAKAVELLSTIPGVQRRTAEVIVSEIGTDMSVFPTPKQLASWAGQCPGNDQSAGKRRSGRTRNGSKWLDWALEEAALAAVNAKDVYLAAQYRRLRPGAATRRRSAPSSTRSSAPAGTCFRPASSTQTSAASTSSAAIPSAPPSA

SEQ ID NO: 484612 - protein, 347 aa, unidentified
MDQVIRVGMDTSKSVFQLHGVNAAEQVLLHRQLRRRQVLEFFARLEATKIGIEACGGAHYWARELQALVHEVVLLPPQYVKPYVKRGKNDRIDAEAICEAMSRPTMRFVAVKTQAEQAALMLAGLREQTVRRRTQLSNTIRGYAAEFGLVAAKGLSKIEPLLARIATDPRVPEIAREIFAAYGQQYAELEPQIARVEARLMAWHRQNEPSRRLAQIPGIGPIIASMLVMKAPDPAAFGSARHFAAWLGLTPKDHSTAGKTRLGVITRAGDETLRSLLVTGAMSVIQQAQRGRGAPAPWLLGLIERKEPKLAAVALANKMARIAWKLMVSGQSYDPRRANSKRVAKAA

SEQ ID NO: 484613 - protein, 352 aa, unidentified
MEVTTIGLDLAKSIFRVHGVDTTGQVVVRRPLRRAQMLPFFARLPSCLVGMEACGTSHYWARELIKLGHEVRLMPPAYVKPYVKRGKTDAADAEAVCEAVRRPTMRFVPVKSPEQQAVLSMHRARDLLVKQRTQLVNMIRSLLAEFGLNIPKGLERALLMARRIVDGKAPDVPMEAAKIVSTLSQQALDIHVRLRQIDRDLLVWQRGNDVARRLMTIPGIGPVGATALAASVTDPHQFHSGRQFAAWLGLTPLQKSSGGKERLGRITKMGDKYLRKLLIVGMTSLVCRAKHNPETIEPRLANLLARKPVRVATVAMANKTARTIWAIMTRGETYRAGHQPALAHNNNVTRIS

SEQ ID NO: 484614 - protein, 366 aa, unidentified
MREQDEGNRITIGLDLGDRRHRFCALDGKGQVVEEGTLSNKRESLSELSRRYRRALVVMEAGCHSPWISRHLEGAGCEVVVSNPRKTRAIYQHERKSDRRDALMLARIARMEPALLYPVQHGSAQAQQDLLRIKLRDSLVRARVGVINSLRFTLKSLGYAIANPSTERFHKVIQEQVPESVGSVIAPSVQALKELSLRIKLLDREIITLARSKYPETTWLEQIPGVGPITALYFVLKIQDPGRFERVRDVGAFIGLCPRRDQSGENDPQLRISKRGDAYLRRLLVSAAQYILGPFGPPSALRQYGLALASGGTPRAKKRAIVAVARKLAVLLLTLWKNKSLYQAFPLSRDGEKMRTSDPERLRCSA

SEQ ID NO: 484615 - protein, 335 aa, unidentified
MVRLLINRWEWLVLWQVLSKEDHRHADSFSWHRSWQDDLSSGGTWRRRQGAVAKDVHQKQLLTFTANLQTSLIGLEACSGAHFLGRALRKQGHDVKLIPAQFVKPFVKSNKNDFLDAEAIAEAVDRQNMRFVPIKTDDQLDLQAIHRVRDRLISRRTAVINQLRAFLLERGMVFAKSPAKLRRELPDVLENADQNLTPRMRDLLALLWGEWKELEQQVEGLNREVEQIACTDAACQRLRQIPGIGPLIATAIVAAIGNGAAFRKEREFAAWMGLVPRQYSTGGKAKLFGISKRGNRYLRKILIHGARAAVIRLKRERAPMGSWMTALEARAPRTC

SEQ ID NO: 484616 - protein, 342 aa, unidentified
MGLYMINNFLGIDISKDRFDVFLSFISKKGRRETRKRSFKNEDSGFQGLLSFLQKHNVEEVKACMEATGCYSEALAEFLHNAGHFVSVINPYCIKSYARSKLVRQKNDQTDAEIIADYCQRQEPTRWTPPSPELKKLKHLYRCSAALKDELTLINNHLEKKERLPKEVANAWEDLAMNVEQKIERIKNSIHELLKQHKELLENFQLLLTIPGIGEESAIAILAEVPDIKAFRDARQLAAYVGVIPRNMTSGSSVYGKPRLSKSGSRTLRKAMYFPAIVAKNHNPIIISFCQRLKGKHNMAIVGAAMRKLLHIIFGILRSKSAFNPDHIKNYRARRLTEALVI

SEQ ID NO: 484617 - protein, 347 aa, unidentified
MRFYTKQHKFYCGIDLHAKKMYLCILDETGQIRLHRNINTNRDILLNIIEPFREDVVIAVECMFTWYWIADLCAKEAIPFVLGHALYMKAIHGGKAKNDKIDSHKIAVLLRGGMIPQAYVYPQKMRATRDLLRRRNHLMRKRAELYAHIQNTRSQYNLCEPLGCIAKPQNREGIIERFEDISVQHMLASDMAVIEAYDPIIAKMERDIISMAKHHDPVAHALLNTVPGIGKILSLVILYEIEDIKRFPTVQDFASYSRLVKSAKESNGKKYGSNGKKIGNAHLKWAFSEAAVLFLKGNEPGKRYLDRLANKHGKGKALSILAHKLGRAVYFMLKNKKPFDQDTFLGL

SEQ ID NO: 484618 - protein, 315 aa, unidentified
MTNTPVCVGIDVSKQHLDIALRPGRRYSVPNNEAGVASILADLKTVSLTLVVLEATGGLELPLTSALALAGLPVVVVNPRQVRDFAKATGQLAKTDAIDAQVLARFAEVIRPEPRSLPDEQTQALAALVTRRQQLIEMLTAEKNRLASARRTIRKNLRSHIAWLERALEQADTDLAEAIRQSPVWCEKEALLRSVPGIGPVLTTTLLANLPELGTLTHKQIAALVGVAPLNRDSGTLRGRRTVWGGRARVRTALYMAAIVAARFNPIIRGFYQRLCAAGKAKKVALVACMRKLLVIVNSMLKHQTPWNPALVNHA

SEQ ID NO: 484619 - protein, 413 aa, unidentified
MLLFIGDDWAEDHHDIEIEDETGRRLAKARVPEGLEGITTVHGLIAEHAPVAWADLPSEEVAARVFVGIETDRGPWVTALRAAGYQVFAINPLSSARYRERYSTSGAKSDAGDAHVLAEIVRLDRDHHRQIAGDTDLVDAVKLLARAHQTAIWERTRQVLRLRSTLREYFPAAIEVFEDLAAKDSLLLLARAPSPQRAAKLTRSQVVSALRAARRHHAEAKADALLAVLRAPGLRQPATVDAAYPAVVIGQVGIITALNEQIAQLQEVVAEHFGRHPDADIYFSQPGFGVVLAARALGEFGDDKKRFGDSRARKNYSGQSPITRASGKKTVVLARYATNRRLGDALHRQAFSALVGSPGARAYYDALRARKIGHHAALRQLANRLVGILHGCLKTRTKYDETTAWQHQIVTAA

SEQ ID NO: 484620 - protein, 313 aa, unidentified
MEVLNTPLEEPSKSEVTTIGLDIAKNVFHAHGSDASGRALFRRKISRTTLLEFFARQPRCLVALEACGGAHHWARELTLLGHEVKLIPPAYVKPFVKRNKNDGVDAEAICEAAQRPSMRFVAIKSEAQQASALVLRTRDLLVRQRTQLINAIRGHLTEYGWVAPKGPSHVAVLGDMIEGAMGSSLPEAAKPMFRTMLDLLDQLNTRSANWTRRSRVGPARTRSPDGSRRYRAWARSRPPRLRPLPPPAETFAKGRDFAAWLGLAPRQLSTGGKQKLGSITKMGERTLRRLLISGCSAVVLQASKRGASAGSLA

SEQ ID NO: 484621 - protein, 345 aa, unidentified
MPIVGGLDIHRKQLTFDYLDTVTGEVKRGQIAPADRVHLRAWLARFAGWDDVAFALEGCTGWRYVAEELAGAGVAAHVAEPADTAFARGRKRHAKTDKTDSRHLRELLAEGRLPECWVPPSHILECRALLETYHDLRAEHTAWVQRIHAVFFHQGAPALGDGALRTDRDLQALRAAAAVHLSPAGQLQVATALDMLAALEARLDVLRHRLLAAARSLTGARVLAERLYGVGPVTALAMTCWLGGAGRFSSSRKAVRFAGLDVTVWSSDRKGPPGRLSRQGPPVLRWAVYEAGKTHARASAPDHDYYAQVKDRKGGKRAALSEARKILRQACHILAELGDDALTAA

SEQ ID NO: 484622 - protein, 369 aa, unidentified
MNDITYVGLDVHKTTVCVAVAESGRRGEVREVGVFENRPDVLRKMVARLGKHRRRLNFCYEAGPCGYGLHRLLTGLGHECVVVAPSLIPMKVGDRVKTDRRDALMLAKLHRAGELTPIWIPDAAHEAMRDLVRARATAVRALSKARQHLQGFLLRHDRIYHGARAWTLAYQRWLTTVRFDHPAQQIVLQDYIHAVEDAESRRDRLTRQIEELMPSWSMAPVAASLQAMRGVALVAAVTVVAEIGDFRRFTNARQLMAYLGLVPSEHSSGSTVRRAGITKAGNALARRVLIEGAWTYRMSARVSRKLHDRLEPLSAAIRDIAWKAQVRLCARYRRLAAIGKPKVVVTTAIAREMVGFIWAIARVAQPELI

SEQ ID NO: 484623 - protein, 346 aa, unidentified
MTIVETRAITGGVDTHADVHVAAALDPIGGLLGVEEFPVSPAGYARLLGWLGGFGAVALVGIEGTGSYGAGLARHLACAGVRVVEVDRSDRQDRRRQGKSDPLDAVSAARAAQSGRARGAPKGRDGAVEAIRALMVAKRSAAGERTRTINQARALLLTGPDDLRARFANHAPAALVTGIAALRPRPGAAAGYATRIALRELGRRAVFLDGQLERLDELIVPLVTARAPGLLAVYGVGPNTAALLLIAAGDHPGRLRSEAAWAHLCAAAPIPASSGKVTRHRLNPGGDRQANHALWRIVFTRMGSDPATRAYVERRTKEGKSKAEIIRCLKRYVARQVYPHLRPAGD

SEQ ID NO: 484624 - protein, 343 aa, unidentified
MQSITTIGLDIAKSVFQVHGVDAEGNVVLRRQLKRRFVLAFFERMPPCLVGIEACASSHHWSRELKALGHTVRLMPPAYVKPYVKRQKNDATDAEAICEAVGRPNMRFVATKTPEQQSGLMLHRTRHLFIRQQTAVINAIRAHLAEFGIVAPVGRSGVEQLLGVVADSNDKRLPEVARACVAALGAQLRMLKTQILEFDRRIMAWHRSNETSQRLDKIPGVGPALATALVASVADPKAFRSGRDFSAWIGLVPKQHSSGGKDKLGSISKQGDRYLRSLFTAGALAVIRYAKIHGTKHRPWLTSLLARRPTKVAAIALANKIARMAWAMMAKGERYKEPVALAA

SEQ ID NO: 484625 - protein, 401 aa, unidentified
MIDTGDIDVFLGLDVGKGEHHATVVTPAGKKAFDKRLPNTEPKLRELFAKLQAKHGTVLVVVDQPASIGALPLAVARDMGCPVAYLPGLTMRRIADLYPGEAKTDAKDAFIIADAARAMPHTLRAIDGEDETIAELEMIVGFDDDLAGEATRVANRLHGLLTQIHPSLERVLGPRLQHPAVLTLLERFGSPAQIRKAGRRRLVTLLRPKAPRMAERLVDEIFAALDEQTVTVPGTEAAVLIVPSLAASLAAVLDQRKLLAGRIEELLEAHPLSKVLTSMPGVGVRTGARILIEVGDGSTFPTAGHLAAYAGLAPATRSSGSSIRGEQPSRRGNKQLKQAFFLSAFAALGDPASRTYYDKKIAQGKHHTQALLCLARRRADVLFAMLRDGTFYEPQPSAPIT

SEQ ID NO: 484626 - protein, 350 aa, unidentified
MLIIGCDYHPGFQQIAFMDSESGEWKERRLGHREEAEQFYRDLKVRGVKVCVGMEASGHAHWFEHLLAELQFELHIGDGAEIRTKRVRKQKTDRQDAQLLLTLLVEGRFPRIWVPNGENRDLRQLLWHRHRMVQMRTRIMNQLHVVALNEGVRLKKALWRPAGRAHLESLLLAPWASRRRQDLLELLDQLTPKIQELTRALEQEVEKRPVTRQLMTHPGVGPLTALAFELVIGTPQRFGSGKQIASYVGLVPCEESSGDRRRLGHISKQGNSLLRFLLVEAAQITVRCDPDWRRQFLHLAMRRERRIAKVAMARKLAVRLYWMWRKGWDYERLKKLGAHAGEPGNRQGVQ

SEQ ID NO: 484627 - protein, 389 aa, unidentified
MQAYRGLRRVFWRGASCIGRRVLGKAITYVGLDVHKDTIAVALAEAGVRGDVREYGKVANTPAAVKALATKLSRVGNALRFCYEAGPCGYGIQRQLTLAGHDCVVVAPSLIPRKPGDRIKTDRRDAINLAKLHRAGELTAVWVPDPAHEAIRDLVRARLAAVRSLRQARQQLSGFLLRHGRHYNRPAWTLMHRRWMAGLRFEQAAHHIVLEDCIAAVEAATARRDRLEAHIAAALPDWSLAPVVRALQAMRGMALVAAATVIAELGDITRFANPRQLMAYLGLVPSEHSSGATRRQGGITKAGNGAARRMLIEAAWSYRFPARISREQLLRQEGLAKPIRDTAWKAQERLCRRYRKLARAGKSPTVVTTAIARELAGFCLGDRQTRSNR

SEQ ID NO: 484628 - protein, 387 aa, unidentified
MAKQNDLSRCLVTLEQDATVIAVIEIGQSSWLVAGIVPGLEGNPLKKLNPDQDALLQLLHRWRKEAVQAGRTIKRIAVAYEAGRDGFWLARWLRAREIDAYVIHPSSVPVSREHRRAKTDRLDTELLKRAFLGWLRGEPKHCSMAAIPTLDDEDAKRPGRERQSLVGQRTRIINRLKANLARLGIRDFRPNLARASSQLEALRTPEGAAVPANTLAELRRDMDHLRFVKQQIKEIETTRAKRLAGAPNEQHHAMVRLLARVIGVGIESADMLVQEVFSRNIRDRKALARYAGLTGAPDESGKRRRERGLAKAGNARVRRGMIELAWGHLVHQKASALTAWYRKRTSDARGGTRKTMIVALARKLLIALWRLVTTGETPTGLLLRPAA

SEQ ID NO: 484629 - protein, 319 aa, unidentified
MTDVFVGIDVSKDQLDVAARPSGESWQVANTELGIATLVKRLEKLQPTLVVLEATGRLESAAVSALAVAGVPLAIVNPRQVRDFARSTGKLAKTDKLDAQMLARFADAVRPEPRPLPDETQQRIDALLVRRRQLLGMITAERNRRRRAPTMTRAEIDEHVAWLQVRVEAIEDELNKTIRSSPLWREKVALLRSVPGVGPMLAATIVAQLPELGVITHKEIASLVGVAPLNRDSGHWRGKRTIWGGRPQVRAALYMSALVATQFNPRIRPFYQRLLATGKPKKLALTACMRKLLIILNAIAHRGMPWRSPASAVVNAAAI

SEQ ID NO: 484630 - protein, 605 aa, unidentified
MSTSASLDRIGVGIDTARYGHRVSFLRPDRRPAAKPLTVMESRAGYQSLQERLNQLHEQYPYAHFHVRIDAAGQYAVNLELFLRELDLPMTISVGEPKRNKDYQKAHFPKRTTDDTESQAMARFAVVELPAATPAPSQPMLLLREVASRLQSKVKQTTQAINRLHNQLARVFPELASLTDDIAVGWVLRLLQMYPTAERIAGAHIASLEKIPHVSSEQAQAIHQAAKQSVASLRGVLAEALVRDLVSQLRQCQRAEHQLRRLLMTAFADLPASPHVQVLTIPGIGEATAAALVAKIGDIDRFATADHLVSYFGVFPEESTSGVDKRGNPLPAGTLVMSRKGNDLVRFYLWNAARSGTQCNPAIRALYRRLRSRGKRGDVAMGHCMCKLLRLVYAVWKTNRPFDETHFPWEGASDNRSSPSTPPAEGAAPSTDEKAVGHKRDLPAEQVVTTATPTVDPPPAPVKPVPHQATGRRVKVDFAYLRNQLTMQQVLERLAIFTAMRGRGQQRRGPCPIHSQPGSVERTFSVHLDKHIFQCFNAECALKGNVLDLWAAVHRLPLYEAALSLAETFQLALNREEEPVSARSSPRAPTESLSGQAKAEGPRRT

SEQ ID NO: 484631 - protein, 383 aa, unidentified
MEALLYCCCGLDVHKDLIEACILRGEGLEPEAVRESFGTTKPELKRLTLWLSKNDCYSVAMESTGVYWKPIFEALELCSEYLENIWVVNANHMRNLPGRKTDVGDAEWIATLLRHGLLEKSFIPPAAIRDLRECSRLHRSFVQERCRYVNRLEKFLQAHGFKFSSVMKDILSISGRKLLDILRDTGTLTELDVIENCRRLRRSPEEISAAVCGNLTAAEQRLLKHLLHKLDSCQEDISSILEDMRLLSQQFQEQLAIIDSVPGFDEESAMEIIAEISAAPQEHFSSGEKLCRWAGVTPRNDESAGKVKSRKTLHGNPYVKAILCQAAWAAVKVRNSPFHVWFWTHQHMLGQKKAIVAVSRKLLMLIFLLLQTGQLYRPPNQAA

SEQ ID NO: 484632 - protein, 341 aa, unidentified
MDTVSLIGIDLGKHCFHLHAQDAMGRMVFRKKLTRSQMFTLLGNFPRCTVVMEACAGAHWIARRLQALGHDAKLISPQFVKPFRQGNKNDFADAQAICEAASRPSMRFVSPHNETQQVISALHRVRESLVRDRTATINQIHAFLLEFGVSLPKGMAVIRRLPAVLAAESLPSRLVAVLERLQAHFKYLDEQIGQIEHELLSQLHEDERSERLLEIPGIGPMTASVLMSELGDAHQYGSARQFAASIGLVPRQYSTGGKPTLLGISKRGDKNLRRLLVQCARVIMQRVEHRTDPLGAWVRSLLARRHSNVVACALANKLARIAWAILAKGTHYRSVPAALPV

SEQ ID NO: 484633 - protein, 391 aa, unidentified
MICVGIDVAKDKHDCCILDSEGTTLADCFTIPNNLDGFKRLLQTIKDCTQKSDKIKVGLEATGHYSCNILGFLLDNDLPVYVMNPLHTNLYRKSLSLRKTKTDCVDAKTIATMLLSDVDLKSYTDTAYHNEELKSLTRYRFDKVQERAKLKQSVSRLVTILFPELEQLVSSIHGTSIYALLSEYPGAKQISEAHLTRLANILVTTSRGHYRKDRATHIRDAARTSIGSVMPAKSLELKHTIKLIQELTSEINEIEDAIRKIMDELKPPILSIPGMGFYSAAMILAEVGDFSNFNSPDKVLAYAGCSPSTYQSGKLTNCYAHMEKRGSRYLRYALYTATKYVCYWNPVFTEYLTKKQAEGKHYNVALSHATKKLVRLIYALQKSGKAYLAVT

SEQ ID NO: 484634 - protein, 433 aa, unidentified
MRWMKRANVRLRIYHKVVTLIGKGGYAPTQIQHTGDYVNYLGIDIGKNNHAACLLGENGKPIVKSFAFSNTKEGGESLLGMLARQGISAGALEVGLEATGHYWLSVYSFLYDQGYRLHVINPIQTDGWRKGMEIRKRKTDTIDAQLIAELVRYGDFMEARLPNEALLSLKQLTRFRSYLVDSISDLKRKVICVLDQVFPEYQRLFSDVFGITSKEILLEFTNPEAVESVPAEKLAEFIADCSKRRLGAEKALELRRAAESSFGVTFCRDSFSFQLRMLVEQVKYIEQQVLQTEAEVKRIMDKIASPIQSVPGIGAVTGAVILGEIGDIRRFERPAQLVAFAGLDATVRQSGEFEGTQNRISKRGSPHLRRALFQASLVAACGVNPDPELHAFYEKKRAEGKHHLAVLGAVSRKLCNIIFAVLSENRPFEKRQP

SEQ ID NO: 484635 - protein, 357 aa, unidentified
MKYIGCDFHPSFQQIAMLDKETGELVERRLLHTEEARAFYEGLQGPVVIGIEASGNMDWFESLLVGLGQEMWIGDAAAIARQEGRKQKHDRRSAALILRLMVENRFPRIWVPTVAERDLRQLLIHRHHLVRMRARIKNQLQHIALNQGWQKKSKLWSRAGLELLGNLKLEPWAGQRRDTLLAMLKDLEEKIKPLDQAVAREAERNQMARLLATHPGVGPVTSLATVLTMGDVNRFADSRSWVSYVGLNPSEESSGQRRRLGSISKQGNPFLRQLLVEAALTAARGDKDLGRMNARLKARKHHGVAKVAVARKLAVRLYWMARTEKSYPEVVRTQGSQSHPVAEVMAVNLNRPPASRQ

SEQ ID NO: 484636 - protein, 400 aa, unidentified
MNIIGIDVSQGESHATLITKEAEEIAFKFKHNKSGFQILNSYIKPGTIIIFETTGVYSAQLTTYLKNKKVKFYELNPLEAKLRMASLRRNKTDKNDSFKLALLGKTQLAEIKNHCNKQSNSLYESLRILSLRYKQLIKCRTRILNFLRSSLELTFPELNQIFKNAYAVLALQVFRMYCHPDFLVGLTLKEMTTRVYQSVSRRIHKDVIQSYCAQVWLAAKDSYPAVPANSLEIEIISEYCDEIESYNKEITYIQNKLIKTAVGLDDFKVISSIPGAGQLNSALLLGFTGDIARFDNYKQLNAFLGLDLNRYQSGKYIKGDTINRRGSNQGRAVETDMIRSMLRNQGKIQNHLIDYYYKLKKPPFNKHDKVALIACANHLNRTIINLVHTHQLYNYSKAIN

SEQ ID NO: 484637 - protein, 350 aa, unidentified
MMIIGCDYHPGFQQIAFMDSESGEWNERRLGHREEAEQFYRDLRVRGVKVCVGMEASGHARWFERLLGELQFELRIGDAAEIRSKRVRKQKTDRQDAQLLLTLLVEDRFPSIWVPNWENRDLRQLLWHRHRMVQMRTRIMNQLHVVALNEGVRLKKALWRPAGRAQLESLLLAAWASRRRQDLLELLDQLTPKIQELTRALEQEVEKRPVTRQLMTHPGVGPLTALAFELVIGTPERFGSGKQIASYVGLVPCEESSGDRRRLGHISKQGNSLLRFLLVEAAQITVRCDPDWRRQFLHLAMRRERRIAKVAMARKLAVRLYWMWRKGWDYEQLKKLGAHAGEPGNRQGVQ

SEQ ID NO: 484638 - protein, 342 aa, unidentified
MSVYVGIDVHRKRSQVAVIDAKGKVIANRNVSNAVEPILKVIGGLPLGTPAAFEAAYGTSWLVELLEDYGFAPHLVHPSRCKAIASARLKNDKVDAAILAQLLRADLLPEAWIAPPPVRQLRALLRHRVALVRLRTLLRNRIHAIVADHGHDRPAGGYWTGPGRAWLAALDLPAISRELIEDDLGLIDALQDRIDRLDWEIRQRGRADPRVKVLTQLPGVGPFTALVILAEIGDVNRFASARKLASWAGLTPTVRGSDRAAHYGHISKQGSVWLRWALCEAAQTAKRSPEFAPALQRIAQRRGKKIATTAIARKLATRAWHLLTDAGHAAAPHPAAPPTAAR

SEQ ID NO: 484639 - protein, 323 aa, unidentified
MQGKVSFQEDAMPVVYAGVDVSKEWLDVHLHPLGESRRFSNDKTGIRQLKRLLARHQPKSIVMEATGKFHRPAHRSLWLDGFAVAVVDPLRARMFARACGYLAKTDRLDARFLALLAESLRPPADTPPSPHVEALRELVNARSAAKCDITALQNRSKTATTALLRGELNRLVRRLEQHVERLDKEIERRVGEDPQLYRKAEILTSIPGIGRVTALALMAGMGELGTCSGKQAAMLAGLAPIANDSGARTGRRSIRAGRPAPRRALYMAALSACRYNPALARFADTLKAAGKPAKVILVAVMRKLLVLANCLLSQDRLWTPTPP

SEQ ID NO: 484640 - protein, 319 aa, unidentified
MTQNDLVVVGIDIAKEKVDACIRKVSLRETFPNTAQGHRKLVAWLRKYQVGKAVMEASGGYERTWRDLIHKAGIEVRIVDPRRVRSFAQSAGRLAKNDPIDAEMIAWFAETFSQAPGQVPDATREELAALVKARKALVDLKTRLQAQDEHAAPKPARQAFARVLKSIVAEVDELEITISAKVKATPEFAERAEIIESVPGLARTTSAALIAGIAELGQVSDEVAGALIGAAPYDDDSGKRRGERHIKGGRRWVRNAIYIPVLGAATRHNPVLKAYYQRLVAKGKPKKVALIACMRKLIVILNTMLARGERWDPSRYVPR

SEQ ID NO: 484641 - protein, 364 aa, unidentified
MIVIGVDVHKRTHTLVAIDGITARELAVREVKATDAGHLDALRFAAGLGDEVVWGVEDCRHVSQRFEQALLAAGQHVLRVPPAMTGQARKGQRQPGKSDPIDALAVARTVVREGVDRFAVAFLDEPSMDIRVLHDHREQLIAERTRMINRLRFHLVVLDPDLEAELASRTLDRASILTRVRRQLSRLPRSAQARVALSELTHIAALTKEIDGLLGELDRLTAAQNPGLRAETGCGPVTAAILIGQTAGAQRFTTDAKFARQAGTAPIPASSGNTNRYRLHRGGNRQLNKALHVIAITRARLDPQTRAYLERKRAEGKTSREALRCLKRHLARRFWKLLFTANTSPQPARPSVTVGAPAMMPCSR

SEQ ID NO: 484642 - protein, 407 aa, unidentified
MNTRFAVVVGLDVGKTAHHACALDPEGNKLFDKPLPQDETKLRELFTQLQNHGEVLMVVDQPNTIGTLPIAVARDTGCTVAYLAGLAMRKAADLYPGRSKTDARDAFIIADTARTMPHTLRQVDRDNEILSALKVLAGFDEDLAHETTRALNRIRSLLTQIHPALERVFVGGSFSTTLVLDLLEKFGGPTGLKTAGRGKVLRFARSHSRRSPEALVDQIFTALGEQTVIVPATAAVELVIPRVAGQVKELKEQRATVAREVEGMLEDFPLASVLMSMPGIGIKTAAQILLNIGDGSAFETPGHLAAYAGIAPVTRRSGTSIRGEFPARSGNKRLKNALVYSAWVASNHDPISKAYYDRKRAQGKRHNAAVICLARRRCNVIFAMLRDGTYYQPPTNAPTPEPAALAA

SEQ ID NO: 484643 - protein, 347 aa, unidentified
MNFYNNTHPYYCGIDLHARSLYVCIIEQDGKTLVHKEISANPEKLHSLLQPYLGNVIVGVECMHCWYWVADFCESLNIDFILGHALYMKAIHGGKAKNDRIDSYKIANLIRGGNFPLAYTYPKEMRATRDLLRRRTKIVRHGAHLKAHVVNTTSQYNLPPNAINLKNACAREQLRSTFPDVVVQKNIDLDMAILDAYSKELSKVEWFIEQQAKQHNPHHLNLLKTVNGIGRILALTIIYEIGDIDRFDSVQKFASYCRLVKCKAESAGKSYGTQGNKIGNANLKWAFSEAAVLYLRGNDAGKNYLMKLQKRMSKAKALSVLAHRLGRCVYYMLKNGTVFDADRFIKS

SEQ ID NO: 484644 - protein, 362 aa, unidentified
MSSIALERTDVIVGVDTHKDEHVAVVIDGLGGRLGEYYLSVTNSGYAELLAWAKTLGRVHAFGVEGTGSYGMGLARFLRRHEQTVIEVSRPPRAGLRRLDGKSDPIDAEHAARQVLAGQATATPKVTDGAVEAIRLTRIARNTAVKAHTQAIVTLKATLVTAADELRAKLEPLTDYKLMTACVGLDSDGDPSDPEVAMRHVLCSLARRWLDLHEEIKTHTKRLKKLTTATAPRLLDAFGIGPDIAGELLVAAGDNTDRIRSEAAFAKLCGVCPIPAGSGKTGGRHRLNRGGNRQANAALFRVVIVRMRWHAPTIAYVERRSTEGLSKKEIIRCLKRYVAREVYNLLPPPRDNEESLSPACDL

SEQ ID NO: 484645 - protein, 450 aa, unidentified
MNEPEEIPDADHEQLIERVAAIDVAKESGKVCVRLPDPARSGRRISRVWDTDATTNAVLALACRLLDLDVQKVTVESTSDYWRIWFYLLESQGLDVQLVNARDVKNVPGRPKTDKLDAVWLAKLTEKGLLRPSFVPPAPVRALRDYTRMRIDFTREATRHWQRLEKLLEDALIKISSVACKLDTLSTRDMIEALIAGERDPHVLAELARGRMRGKRAALVEALTGRFDEHHGELARMLLDQIDALDRQVDQLTTRIEAVIAAIPAAGAADGDRDTPRTDTDHATSRAALAAIDRLDEIPGISRLTAQVILAEVGLDMSRFPTANHLTAWAKLTPRTIQSGAKHRAGKTGKGNPYLKGVLGEAAAAAAKTNTFLGDRYRRIVKRRGKLKALVAVARSILTIVWHLLADPTTRFHELGADYHMTRINKGRKIRHLVQQLEALGQTVTLQPTA

SEQ ID NO: 484646 - protein, 336 aa, unidentified
MIKYIGLDAHSSTCTFNVTDERGMEVDNTTIESNGRLLVKYLRGIEGVKKLTFEECELSSWLYEILRPEVDELIVCNPVANKDYKKVKTDKMDARKLSKLLRGGFLISVYHDGSKRERFRSLMSGYQDLIEEGVRLKNRYKSLFRKSGNKVKGESLYSDESFLEGLERSDFKFIGVQIYQLLEKMEGSRQEYLKEILRCSKGFKEIKYLKSIPGIGSIQAAKIVSQVIDPERFSSKYKYYSYCGLVRHKRISDGRGYGSEKIWGNRILKCVYKMAGHSVLKGKSGLRKHYDSLRVKGISHDNAYNAVCRKIAAISLSVWRKSEKYNDRLITGNLIK

SEQ ID NO: 484647 - protein, 408 aa, unidentified
MDSTFRFFAGIDWGSEKHRVCLMNRDGQILAERWIEHNGDSLAELTAWLRRETSDAPSLLAAAIEIPRGAIVETLLEHGFAVFSINPKQLDRFRDRYSPAGAKDDRRDALVLADALRTDMHCFRPVRLDDPAVIRLRQLSRLDDELAQEQNRAVNRLREQFHRFFPQLLQLCECADEPWLWTLFELAPSPLRAARLTEARITRLLQQYRIRRITATEVRTMLKTKPLTLASGAAEAAAEHALLLLPRLRLLHQQRTDLARRISALLDELAAPTEGRKEHRDAAILLSLPGLGRKIAATMLSEASQAIADRDYHALRCYSGAAPITRQSGKKKTVVMRRGINERLRNALYHWARVSVVYHPQSKKRYAAMRACGHSHGRALRGLADRWLKVLTSMLTTGTLYDPQRSAT

SEQ ID NO: 484648 - protein, 351 aa, unidentified
MRHASQAQSVSVYGIDIGKSLFHVAGLDGSGHVVLRTKFRRKALLQFFSNVPVAIIAMEACPGSQWLARKLAGYGHTTRIVPAQFVKPYVKSNKNDTVDAEAIAEAATRPTMRFVAPKRPDQTDLQALHRARDGLVYQRTAMISQMRGFLLEYGIACRKGVGAFKLDLAIALGDAENDLTPAFRKLLAYLRAYLAELEEHIEQFSQEIEAIADRDDVARRLMTIPGIGPLAATALMAAVGDGRQFKRGRDLSAWLGLVPAQYSTGGKSTLLGISKRGNSYVRRLLIHGARSCVMHTNRARHRWGAWLDSLAERVHVNKLTVALANKIARMAWVILTKPGASYQRQDPRFAA

SEQ ID NO: 484649 - protein, 405 aa, unidentified
METLHQRVAGIDVHRMKHVVTVLIEDDSGQTSKHQREFGGFKRDLKALATWLREQGVELAIPESTGIYWKSVYAHLEHAGVPAWVVNAHHVKHVPGRKTDVADSEWLAQLGRFGLVRGSFIPPRDLRELRLVSRYRKKLVALLAAEKNRLHKLLDDAGIKLGGLVADINGKAAQAIVDGLIDGQPASELIKLSGRLRAPKEDILASLDGDLSPRHTMVLRELRSHIGELEARLRRLDAYLIEAMQPYAWAFELLQTIPGIDVMAAAAILIEIGDDMTRFGSAPRLASWAALCPGNNESAGKRKSGKTRKGNTLLRALLCEAANAARCTLSVFKAKYQGLVVRRGHKKTIVALAHKLIRTIYFMLTRRQAYHDSGFDYAAANVAKNAPRWLKALKRFGYWPETAAA

SEQ ID NO: 484650 - protein, 391 aa, unidentified
MIYVGIDVAKDKHDCFIVNSDGTVLFKVFTIANNLDGFNNLYQKIESVMKDITKVKVGLEATGHYSYNLLGYLIDKGLTTFVINPLHTNLYRKSLSLRQTKTDKVDARTIASMLMSDVNLKSYSNISYHNEELKSLTRYRFNKVEERSKLKSSVSRLVCILFPELEKLVPKLHMASVYAMLSEFPSAKHLADAHLTRLTGLLSGSSMGRYGKEKAITFREAARISIGSNMPAKSLELKHTIKLIQELTTEIDEIEKEIKIIMDKINPSILSIPGINYRMGAMIIAEIGDFSRFDSPDKILAYSGFSPSTYQSGQLDGACSHIEKRGSRYLRYALYNAAKYVCHWDPTFAEYLAKKRAEGKHYNVAISHAVKKLVRVIYYLEKTKQRYVKAA

SEQ ID NO: 484651 - protein, 316 aa, unidentified
MPTAEAFIGIDVARDKLDLAVRPAGQQWQVANTAAGISALVPQLRALAPTLIVLEATGGLELPLLAELGSAGLPAVAVNPRQVRDFAKAVGKLAKTDAIDAQVLAHFADAVRPVVRPLPDAATQALGALVTRRRQLVEMLTAEVNRLKTATPAIRADIQEHIAWLRKRLKGVDKELSQAVRTSSLWREQEGLLRSVPGIGPVVSVTLLADLPELGTLGRKQITALVGLAPLNRDSGTMRGKRTIWGGRATVRAALYMGALVGSRCNPVLRGLYTRLVAAGKTRKLALTACMRKLLIILNAMLKHSTTWATAAPATA

SEQ ID NO: 484652 - protein, 363 aa, unidentified
MSKLLYVGMDVDKEKIVAAKLTSSAKVSDECVIANAPQAVEKYFAALTKEGEVMAAYEAGCFGFGLYHQLTDLGVAAVVAAPGLIPRKPSDRLKTDRRDARTLAFTLRAGQLTAVHVPTKQDESVRDYLRMCEDMRDDLRKCKQRILHLLLRRGIRYEQGGPWTVKHKDWLATLDLGSELDRQTLDSYLARLQELESTCSQLAAEVESIAQGDRYREPVRTLSAFKGIKTLIALSFITEIGDFRRFSSAAQFMAFLGLVPSEHSSGPKHRQGGITKAGNSHLRRLLVEAAWHYRSYHPTSRVLVERRRGVDPRIISYVNRAGRRLNRKYLHLLLRGKRSQLAVTAVSRELAGFIWGAMVGQVA

SEQ ID NO: 484653 - protein, 359 aa, unidentified
MQTQNNKLSFKNQDLYVGIDVHKKQWTISITHMNRTIHKKTVIDPLAKTLLTFLNRRYPEGNYHAVYEAGFCGFQAARDLNELGVNCIVTHPADIPTKQKERLNKNDRVDARKLSRSLSSHDLEGIYIPDKISEEYRYLSRYRYSLIKDQTRMKNRIKSALYQFGIKMPLEYEDRRWSGQFIDWLSGIRFETEYAQYAFDDQISQLIQMRLRLTQTLMKMKTMVSTVAPMSPVYRYLLSVPGIGPITAVALLTEIIDIHRFKKTDQLVSFVGLAPCVRSSDEKEKMHGITPRHNKHLRSMLIEAAWKAAGVDPVLTMKFGQLCRRMPKNKAIVRIAKMLISRIHYVWKNQTAYVEGVLK

SEQ ID NO: 484654 - protein, 392 aa, unidentified
MNRIVYIGMDVHTSNYTLCSLDPGYGVEKDNYFAEVQFTNDFIKNVVNYVSNLKKKLKDCEFVCGYEAGCLGYSTYKDLTKVGIKCVLMAPSTMAVQKGGKKVKNDRRDARVIAQCLAYQTYKEVYVLSEHDEAVRGYLRMRDSHNKALKRIKQQIIAFCTGHGLFSPTKSNWTVAHLKWLKDLKFNDPVEQEILNEYLSSLTFLSDKIKAMDVRIEELASEKQYCENVKKLRCIKGIETNVALTLLAEIGDFNRFSKPTDFASYLGLIPGEQSSGDKVRGTGITKAGNSTLRRKLTESAKGYWRGRIGIKSATFKKLEKELPKEVTEYALKANTRLQRKFFNMTHVKGKNMNVAASACAREMACFVWGLITNHYEKAPAVPKTDEELLNLN

SEQ ID NO: 484655 - protein, 408 aa, unidentified
MEVVYRCCCGIDVHKNLIVACLREGGRQELREFGTMTGEIKALANWLTESGCEMAAMESTGPYWKPLYNLFELLGLDTMIVNAAHMKAVPGRKTDSKDAEWIAELLQHGLLRASFVPSREQRELRELTRYRKSIIEERSRELNRLQKVLEGANIKLGSVVADIHSKSAQRLLERLAAGDAMDDSGEISKLLHKSLLPKLDEIVASLDGIVTPLQRALLAHILDHISDLDKRIKELDRMAEAYMAEFQPAIAEVCQMPGIARRSAEVILAETGIDMSRFPSAAHLCSWAGVCPGNHQSAGKRYHGKTRKGNKTLKSMLVQCAKVASRVKGSYFAAQYQRIAARRGKNRATMAVAHSMLIAIYHVLKEGVPFRDLGADYYDGFRREHKIRSYLKRLQALGWEPELSPTTA

SEQ ID NO: 484656 - protein, 421 aa, unidentified
MQRLTALGPHQQLRGGELTPLNVAEGSTAGTPGFDRLARDLPFAVARGSADKHLAPEVSLRSRVYRLVATQPTEPTKEADMELYGGIDLHSNNCVVTVLDEQDRTVYAKRLANDLGTVLAALRGCAGTMRGVAVESTYNWYWLVEGLQAAGFTLHLVNTAAVKQYDGLKHGGDFSDARHLAHLLRLGILPVGYIYPREDRAVRDLLRKRSQLVRQRSSQILSIENLIARNLGVRASCKQVKAFEPEHIDALELLEEQKQALKANLAVMNCIDKQVDQLERRVVANVKLREDYKALKTVSGVGVVLAVTIALETGDIGRFASPGNFASYARMVNSRRESNGKKKGEGNAKCGNKYLAWAFIEAAHFAVRFDPTIKRWYQKKCASSLSVVAIKAVAHELGRACYYVIKDGTPFDVAKAFGSNG

SEQ ID NO: 484657 - protein, 336 aa, unidentified
MKKKWFIGIDISKKTLDVAIYESAKKKTDEENSIHIDNDERGYKSLLKWFRGKRMPLSTIVICMECTGIYSFDLCVFLEKKKIDYCMENPLNIKRSMGFVRGKSDKVDASRIAYFCYLHREDLRYSHMSSRMYHLQALQAERKRYVNQAAGYKSLINEKKDKDHDNSYKRAEDMLKCLKIEIDDINNEMKDIIEKDEALFTNYKLLTSIKGVADVNAINTIIFTNNFKNFQTARQYACYIGIAPFEHTSGTSIKGKTMVSKMGNKQLKADLSQAACCAIKFDPEMQHYFNRKEKEGKAYGVILNAVKFKLVERMFAIVKRGTPYVNIMQYRNVVES

SEQ ID NO: 484658 - protein, 321 aa, unidentified
MTAVLGIDVAKNKFDVALLRNGKYKNKSFENKPSGFESLAVWLKQHDVVNFHACLEATGSYGDALARFLFDARHVVSVVNPARIKAFGESELLRTKNDKTDAKLIARFCEAMKPVAWQPDPPEIEHLRMLGRRRDALVSMRTQEVNRLGVAAASVNESIRKVITFLDEEIEQISKLIREHINNHPGLRKKHDLLKTIPGVGDVTIEAILSEANAFEGFDTVEKVVAYMGLSPKEKTSGTSVRGKSSLCKIGSARLRKILYMPSLSAIQHNPLINALYNRLKAKSKNGMIIACACMKKLVHIIYGVIKNGKPFDPAYNVKAA

SEQ ID NO: 484659 - protein, 321 aa, unidentified
MAIPLAPFLIGVDVGKATLSLCAGPDAVVEELPNQPRAIARWLKTLPGGPVCLAVEATSTYHVELVSQAHRQGHAVYLIDGYRLSRYRDSIGGRAKTDASDARLLHRYLAHEREDLRPWCPPPAGCVSLQRLLRRRATLVKARVALRQSLAGLPELRATAEALFRQIARLEDRLQERILKAIDDLQWGGDRRRCQAIEGVGPLTSAALTTAYHRAPFANSDAFIAFLGLDVRARDSGQWHGRRKLSKRGDPEPRRLLYLAAMRARCSPTWALFYQRCLDRGLAPIQALVVLARKLARVAFALLKTQSKYQPRPNKEACATT

SEQ ID NO: 484660 - protein, 345 aa, unidentified
MFADGLDVVVGVDTHKRAHAAAVVSATGAVLERVSVPADPAGYRRLAALGAGYGRRVWAIEGTGSYGAGLTTLLLSLGEKVVEVDRPARPPRRAGVKTDDVDAVRAARQALSQEGISEPRCRGHREAIRVLLTTRAQVIGFRTQAIASLHALVTTAPDSIRERLRHLPVGALVHACSALRGSGRQSAEEFATTMALRATARRITSFDGEARQLEAQLRGLVAQLAPSLLRAAGVGPVVAGQVIVSWSHCGRVRSEAAFAKLAGAAPIEASSGSIVRHRLSRSGDRQLNRALHTIVLTRARQDPATRAYVARRTAEGKTMREIKRCLKRYIARQLYRELERTAAGS

SEQ ID NO: 484661 - protein, 382 aa, unidentified
MLDTTTFIGLDVHARSIKAVSLDVMTGEVRAATFGYDAGAVAEWVRSVDPGARCVYESGVTGFDLQKRLTGLGVDCVVGAVSKMIKSSADRRRKNDRNDAEFLARMLSVGNVVEVWVPDDECEAARDLTRALEDARDDLSRSKQRLSKFLLRHGLVFDERTPTGRRKGNWTRAHWSWIESIRFAEGADNDVLAYYVDAVRRAAEEKARLEGLVEAEARKPRWRKRVDSLRCLKGVDTASAADLVFEAGEFSRFRNARSFAAWVGLTPSEHSSGESDRRGAITKAGNKHLRKTLVALPDVLGAAEGPRQGPGPGPGRPEACRQGRAEACREAGGAARARGPRQQGERGHGARARLLGVGGRPHGRGGVGGRSPAHKPITPEAV

SEQ ID NO: 484662 - protein, 352 aa, unidentified
MNIVGAFDVHRKQITFDYVEMESGEVHCGEICPADREHLRSWLEEFTERFCGREAAFAVEATTGWRYVVEELGRAGCDAHLAEPADTKALQGRKKRAKTDRIDARHLRELLLIERLPKSWVPPEHVQQIRTLMRMRHTMVEERTAYLQRIHAQLFHNGCPQENNLLSVGGRERLGQMELPRAARKVVDLCLKMIEHINEELSPIEAELRSYARAQAGCRALMSHYGVGELTSVALFSELGDTRRFSSSKKAVHFAGLDVTVHSSDEKRAAGKLSRQGSPVLRWAAYEAAKGAYRKGSPDHEYYLQTRERIGTNRAALSIARKLIRRAHHTLRELGEEAMSEPLLAVSSSSSV

SEQ ID NO: 484663 - protein, 484 aa, unidentified
MAKRKKSTFERLTKGPLNRKQRRELERRLVSDDPGLRIVHPNAGGIDVGNESHFAAVPADRDAQPVQEFGSWTADLHRMGKWLQSCRIDTVAVQATGVYWIPLYDILREHGIRVVLVNAQHTKNVPGRKSDVQESQWLMKLHTYGLLRDSFRLAENMEGVRTIWRLRDRHVKEAGRAVQHMQKALTKMNIQLANVISDISGVSGQAIIEAILKGEQDPYRLADLKHERIQASREEVARSLEGNWRKDVLFELQQAVDSYQFAHRQMQECDGKLETYLAMLPTRVIEVADQPNLQPTAVARKAQKPKKPRGNAPAIDLAAELKRISGVDLTSIDGIDVMGAQTILSELGTDLTAFATEHQFASWLGLTPSKDISGGKVIGRSRRKVQNRVAMSLRMSASTLLNSKSYLGARYRHLRKHLPTAAAAVKAMAHYLALLVYRMLTKGQAWVDRGAAKFEQKRIDWELSSLQSKALANGFKLVPIAEAQ

SEQ ID NO: 484664 - protein, 417 aa, unidentified
MIWPGTGRCYGAGGDDVATSSLELNRWSAAMPQPNDLSRSLVALDQNSTIIAVVELSQSSWLIGGVVPGIERQPRKKLEPSPERLLAVLHRWRDEAVRAGRAITRIALAFEAGRDGFWLARWLAPRGVEAHVIHPSSVAVSREHRRAKTDRLDTELLRRGFLGWLRGERGHCSMVRVPTLAEEDAKRPNRERDCLVGERTRIINRIKATLARLGVRNFRLTLRQAAEHLAALYTPEGSPLPPNVSAELERDIARLGLVIGQIKQIEQARRQRLEEEPESGRHAMVRRLARVVGIGIETADMLVNEVLSRPMRDRRAVARYAGLTGAPDESGAKRREQGLAKSGNARVRRGMIQLAWRFQRFQKNSALARWYQARTADRRGATRKTMIVALARKLLIALWRFVTTGETLDGVVLRPAG

SEQ ID NO: 484665 - protein, 371 aa, unidentified
MKKSIMFVGLDVHKNSIEIAFAEGGRDDEVRSFGKVSGNLEALDKVIRKLVSKGCELNFAYEAGPCGYEIYRHLNSKGFDCTVVAPSMIPKQSGNRIKNDRRDAQMLARLHRAGELTKAYVPNVEDEAMRDLTRAREDAKGLEKRAKQRILAFLLRQGYRYSGRSPWSRAHFRWIATLKMPHPAQQIVLQEYLETLSECRQRVAHLTEQIQALLPQWRLSPVVRALQSLRGVSLIVAATTVAEVGDLTRFDSPVELMSYLGLVPSEHSSGGKTRRGSITKTGNGHVRRVLIEAAWAYRLPARVSLKLQQRQEGLSQNICAISWKAQLRLCARYKRLLAKGKATQLITTAIARELCAFMWAIAMAVKAPETV

SEQ ID NO: 484666 - protein, 368 aa, unidentified
MKNYKLNAAPTAISKEQKGQKGSKAKRILIGVDAHLESYQAASKIDNGAVGVAQSFGSKEALLLRVEKQLQQAEEVVVVYEAGPLGYSLYRDLSARGIKCLVCAPKSDEQKRKRRKNNSIDARSLVSHLFNYLNGNEQALQLVRVPTPAQEQARLASRQHDALVQERKRLGAMGNSLLLSQGYGSWKNWWRRKSFERLSQVLSSWVVELLNTWVDLLRALDEKIQQAKVSLAKQCQGPRPKGVGAPSLVQLGAEVLDWKLYSSGRKIGCLAGMVPSEWSTGNGQRLGSITKVGVPAIRRIITEMVWRMILFQPQYKAVQKWRAVLEGSNRGLKKKAVVAIGRQLMVDLWRLQTGRISAQELNLIMVEG

SEQ ID NO: 484667 - protein, 396 aa, unidentified
MRNRYGSVAYGGMDVHRKFSTVTLRDAEGRVVSREQLNHEDRQKMREHLGRWPAGTPLVMEASFGWPWVSDEVEAAGHRPMLSNCYKLEQMRKARGQVKTNAKDADLLSLLPAEPTRWWEVWRASPEVRDLREWMRHRADLVLLQTEVKNRVHALLARHGVFHPFTDLFGSQGRAFLHRVCQDGRYAEGVLPPGTLEAIRSDVRVLLTLRAELATITWRLRGRLVQDPLVRRLKTIPGIGLILAHVLASEVGVIERFRSHRHLASYACLAPRSDDTGEADPKRTPLGRHLGDRGNRTLKWAFVQAAHGAVRHGGRWRAMYDRHTAGGTKNRGRGYVKVARQLVKVAFVVWSRNVDYTETPPARPGSRATRRKKDSRPGTGQPLVAMVQAKGLKTSL

SEQ ID NO: 484668 - protein, 435 aa, unidentified
MNCIDDTRLEQFFQLKKEIRGSETHLIVGIDAAKEKHNAFFGTARGKTLVKNLVFDNTLGGFQKLLAYVERIKVQYSLTAVVFGIEPTANYHKPLAEHLIKCGNMVVLVGGVAVKNNRQLLDGRWDKHDIKDAANVADLITQGKCLFYEYPLMTLRNVRVLIALKRRLKRREHGMSVCIRNHIIAQYFPELDQHYGPSETLAVVRECLDPSEIAGMEYDAFYRTVAPGRTTMAKDRRVGAIWRAAVGSIGCTMGEAASFEAQVMVDSLKQIRQTIKSVEEKLEDACMEFPEYTYLLSIPGFGPDVSAKVLGAIGNPHRFASGKQVLKMAGLDLCADRSGKKSNSAIPVISKQGKADLRYGLYQAAFIASLKNKDFIAYFTNKLKGRAKEKGIVTKMRVKLAAKLLVIAWTLMKKKECFDPKYLKQEDQDAQKKAA

SEQ ID NO: 484669 - protein, 337 aa, unidentified
MVYVGVDLHRKRSHVVALDPAGEVVLSRRIGNAPTEFWRIFGELEPQPIEVVFEATYGWSWFADLLADVGIPAHMAHPLATKAISAARVKNDAVDAKTLAHLLRTNLLAEAWIAPPDAREARRLVRTRAGLVRMRSRIQSQLHALLADLGVIPELTTLFGPAGRRWLAELPMPASARGRLDAGLRLIDAITVEVAHADADLRACFAGDHRVRRLLPIPGVGLVTAATVVAEVWDIGRFPSPERLCSWAGLTPGERTSDAHTRRGHITKQGSRWLRWMLVEAATTAVRDPQLGRFAAQIAQRRGPKIARVALARRLLTLCYYALRDDGGCRAYPAKAR

SEQ ID NO: 484670 - protein, 419 aa, unidentified
MQIIYRRCAGLDVHEKSVSLCARIVKGKEVETIEATYPTFTEDLEQLRDWLVKNRIQRVAMESTGVYWRPVWNILEQPAKLDLVLLNPQHVKALPGHKTDRVDAARIAELLQYGLVRPSFVPPAEIRELRDLVRRRVHLQQDRSRVSSRIHRLLELYNIKLSSVLKKMTSQTARSILEGLATAKTIKPEALALLATNKRVRDKRERLKKALRCHPTDHFRFLLRELLEELDRLTGKMKLLEEKIAERMAPYDELTGRLCRIPGVEKLTAWTLIAEIGVDMSRFPSAAHLASWCGLCPGNAESAGKRRSGRTSKGNRYVRRALVQAAWAAARISGRRTFFTAFFHRVSGKAGRKKAAVAVAHKILALVYVMIRDGSEYREQGADYFDRVHPERTKNKLTQRLERLGFEVRLTPKKVPETS

SEQ ID NO: 484671 - protein, 345 aa, unidentified
MEPMYYIGLDVHKRKISYCVKDSSGKVFAEGLLPATRLDLDLWMKTLPQPWSAAMEATMFTGWIYDHLKPHAAVLKVAHPLMLRAIAAAKKKNDRIDAGKICDCLRCDFLPECYMASTAIRERRRTLRYRNLLVRQMVQMKIKISALLMEAGVSYNKQRLHKAGYFRELLARNPDIDEGLGSLLRLCRETVVRLQKTESALVRALERDPLLLDRVERLMTIPAVGPITALTWALEVGDVQRFSSIKKAISYCGLCGAEKRSGNTVQRTPLSKQRNKHLQTTLIEATKMAPRNSPELAMLYDKEKQKGNANRATLAVARKLVAYLVAVDRRQKEFLTVERENRTAA

SEQ ID NO: 484672 - protein, 341 aa, unidentified
MKETPTYPKAILGIDVSKKKLDLCLIPDESMVSHKHGQRSMSQPKSYRRTVANTMKGVTMIAKWLVSKGVVTAHVTIEPTSVYHELAVETLLSCGHWVSVVNARQVRQYAAAMGIDTKTDTIDALVLAEFCRARRPAASKPLSEAERQLRDLTRRRTVLVREEQKELLRLQTTRSKSCIASIKRVVKTISKERGKIEAEIEQIIEEHEELRTVGKNYRSIKGVGAVTSATVMAELPDLASFASVQQAVSFVGLAPRRKQSGSSINRYGGITKRGNSRVREALFMSAIVGMKYDPVLHAFAQRLRLANKKKKVVIVAVMRKMMHLLYGIAKSGQPRRLPSSI

SEQ ID NO: 484673 - protein, 343 aa, unidentified
MNTNAAVIGLDIAKNVFVAVGLTEHGKVVLKKKLSRAEVLPFFANLPGTAVGIEACAGAHYWARELNTLGHAAKLIAAQHVKAYVTGNKNDARDAQAIADIRARAQTKYVPINTPANQDLQMLHRARQGLMQERKALICRLRAFAHEYGRIFPMGVAKFRKAFGAWLAGDHGLSGMAHATLTELFSSLHDKETRLAQYDARLDQAARADARAQRLMAVPGIGKLTATAMLAAVADAHHFASGRDMSANVGLVPHQHSSGGKERLLGISKRGDVYLRTLLIHGARSALRVGANKPDRLLRWATALAKRKGMNVASVALANKLARVAWALLAHDRDYDPAYAATR

SEQ ID NO: 484674 - protein, 340 aa, unidentified
METTATFYVGIDVSKPYFDASIMQVIDHKKGELQTEQFPNSKEGLLLFQKWCKNAGAKKMQQLFVVIENTGLYHRPIWQFCSKQNIALHIGNAAQIKWSLGITRGKNDKIDSKRLCNYAFKNHDDLQATAALNPVFLQLKDLMTARTNLLCHYTATKSYLKELSPSNAKATQALLEQAHKAALEGLKKSIEKIEAAIAQIINEEASIKNNYDLIKTIPGIGHITAVYIICCTNNFAGKISGKQLASYAGVVPFEHTSGISVKGKNRVHKMANKDLKKLLHLCALAAIKYDTEMKAYYDRKKAEGKNGMLVLNAIRNKLILRVAAVVNNQTPFVSNYKHAC

SEQ ID NO: 484675 - protein, 391 aa, unidentified
MSMYFIGIDISKYKHDCCIISAADQKVVSKVTIKNNKAGFDELLTIINSLSNPEDIRIGFESTAHYALNLELFLENSLLTFMEVNPVLISEYKKSKTLRRTKTDSVDCESIARWLMTVEYKPHSKGFYHAYSLKSLTRLRDRLIRQRSFYLVKITNVLDHTFPEFKPFFNERLSKTALYLLENYGSADKMARMNSASYEKLRSLSRGKFSPQQFLQLKELAANTVGVNNSIFDVELNSLLSLYKSLVKEIDTIEKEIHKLIEEVHPHYMSIPGIGPLSAAVIYSEYGDISNFSNPGQMLAFAGIEPGINESGTESHGGRMVKRGSSQLRYTLINCCLPLIHFDMTFATYYAKKRGEGKPHRVAITHVAKKLIRVIYALERQDIDFNTQKLH

SEQ ID NO: 484676 - protein, 429 aa, unidentified
MDEVDDVELLVERVAALDLGKAVLEACVRVPHPQRPGRRMQELRGYGTTTAQLLAMVAWLRHWQVQRVVMESTSTYWKGVYYLLEAEGFDCWLVNAREVKNVPGRAKTDRADAVWLAKVAERGMCRPSLVQPPEIRRLRDLTRYRRALVQDRTREQQRVEKLLEDAQIKISSVLSELHGVSGRAMMHALIAGERDPRTLAGLAKSGARKKTDQLEEALRGFFTDHHATILKMMLDNSDRIGDQIAALDALIEDAINPFSREATRLADIVGVNTVAAAELIAETGVDMTRFPSAAHLVSWAKFCPQTHQSAGKSMSKGRGKGNPWLAGTLGRIAFANSRADTFLGTRYRRLARRRGKQKAIVATGNSVLTVVYHLLSDPDATFCDLGPGYYESRINKHRRARDLATQLQTLTGQHIAIRDGKAVITDTAA

SEQ ID NO: 484677 - protein, 354 aa, unidentified
MLAELVDHVIGVDPDRDWITVAALDSRTSGVIATDRFPATRDGYRDAIVWADAHTIPTERAWVIEGTASYGRGLMMALQHHEEFVVEFDRPMCKATKDGAKSDALDAIRAAREALGRDKLNQPRAHDGIREAIRVHTVARAAAVRARTAAVNELKAFIVTADEQLRAEFRGLRTAKIVTRCSRFRNSDTRPVVERCTRNAMRALARRVHHLEAEIAEHDAALKQLLDRAAPQLIAERGIGYVTAAAFYLAWSHPGRCHSEAAYARLGGTAPVEVTSGQNQDRHRLCRGGDRQLNRALYLVAITRQRCDPITQDYMARRTSQGKTQREATRCLKRFIARRIWRLLEHPEIHLDNT

SEQ ID NO: 484678 - protein, 354 aa, unidentified
MTTVAISILPASRSYTRTGAWAFARMQSGVWTKSQTMEEFAVPDKLFVGIDVAKDWIDIAIYDSGPTRRIANTRQAIEAWVNGLDHERIGLIAFEPTGGYERVLRLGLRQAGLPFARVHPNQLTAFRTRRGIKAKTDRLDAGLLAAFAAVELATRGLAPIVETDDVLREMVARRRQLVDTLQAERCRAAMAQVPAVKQTLARVIKALEASLDGLEAGIAGHIAANAELAAAARRMQTVIGVGPVTVHTALGELPELGRLSGKEIAALVGLAPRNRESGRSHARATTGHGRPGVRRVLFNAARAAIRWNPVMRAFYHRLTTVNRRPGKVALTAVMRKILVTLNAIVRDRQDWKHA

SEQ ID NO: 484679 - protein, 301 aa, unidentified
MYVLFRALTGIRYLALSVPNDEQSIASLLKRLARYRLERIVVEATGRLEHAFVSAAIAKGLPVVVVPPLKVRRFAEAAGQLAKTDAIDARLIARFAAALKPTTRLVTDANSKLIKDLVVRRRQLTSLRTTEKNRRGVMPEALKPSIDRIIASLDREISSLEQLIQDAVEQHAAWRHKRDLLTSMPGIGPSVASTLIGDLPELGSLSRRQIAALTGVAPFNRDSGTFRGKRRIRGGRAHSRTALFLSAMVAIRYNPDIKRFYERLLQTGKHKKVALTACIRKIVTALNAMLRDDKPWHSSSA

SEQ ID NO: 484680 - protein, 356 aa, unidentified
MSEGSWVGLDVHARSVVAGVIDQASGEVRSLRLQPGVDGTVAWLQTLPAPVRVVYEAGPTGYRLARACADAGISCVVAAPSRIRPAADRVKTDRRDAERLARLLRLGEITPIRIPTLEEEAARDLVRAREDARGDLMRSRHRLSKLLLRHGLVYDATAWTRTHDAWLRRQRFEGGPLAIVFDECYGRMLDAKSRRDALDKAIGELAATPPYVDVVSRLVCLRGASTLTAFALTVELGDWHRFRPESLGPFLGLTPSEHSSGERRRQGGITKTGNSHVRRLLIEAAWHQRGPSRRSVTLERRRDGKPLAVQAQAERSGRRLHGRWHALEGRGKPRSIVVVAVARELAGHCWALATME

SEQ ID NO: 484681 - protein, 335 aa, unidentified
MNIASIGIDLGKTTFHLVALDDHGNIIIRKKFSRKQLLAYTANLPSSLVGIEACSGAHFIGARLRDQDHQVRLIPAQFVKPFVKSNKNDFIDAEAIAEAVSRQNMRFVPIKTDDQLDLQALHRVRDRLVHRRTAVINQIRGFLLERGITFAKGPANLRNRMPDIVEDADANLTPRMRTLLDRLWQEWKQLESGIETASDEIEQIASEDEACQRLRQIPGVGPLVSTATVAAIGNGAAFRKGREFAAWLGLVPRQYSTGGKTRLYGISKRGNTYLRRMFIHGARAVLMRVKYDTAGLGQWVHQLEARTTRNKVIVAAANKLARIAWAVLFKAEGDC

SEQ ID NO: 484682 - protein, 343 aa, unidentified
MVHYIGLDVSLKKTSICVVNQAGSVVREGVVDSEPEAIAAFVRSKAPGAVRVGLETGPTATWLWSELKQLGLPVICIDARHARAVLKMQINKSDRNDAAGIARIMQTGWFKEVRVKGLDSHSVRALLASRALLVKIKRDLENQVRGLLKNVGLVIGRAKFNVFAVRAEELIEDRPELIAVVGPLLKARKAIEQQTDDLDRKVLKLARYDAQVRRFMTVPGVGPITALCFKATIDDPTRFKRSRSVGAYVGLTTRRHASGEIDWTGRISKCGDAMLRSYLFEAAGVLLTRVPKWSALKAWGMRLAKRNGLRKAKVAVARKLAVILHRMWIDGTEFNWSKKEVAA

SEQ ID NO: 484683 - protein, 331 aa, unidentified
MSQQVHAGIEVSAESFAVAYEIPGQALQEACLDNSAAGHRKLCRLLTRGGRPARVCLEATGISSLDLALALHRTPGIEVMVVNPRVTTDVMRARMHRTKTDATDAVAILEFVQRMPFTPWQPPAPEILALRAITRRITALTLMGGQERNRRHAADRCREFPGVLEAESTAHLEFLKTSIQRLTHEALAIIQAHPRLRRWAAHLVSVKGIATTSAIRLLAELAVLPDELAARQWVAHAGLDPRHFESGTSVKKPTRISKTGNKYLRAALYMPALVAIQHEPHVKAFYETLVARAKKPMQAIVAVMRKLLHAIYGMFRHGRDFEGDKFYALTT

SEQ ID NO: 484684 - protein, 383 aa, unidentified
MEYDTTIGVDVSDRTSKICVMRKIPGGERKILVETTCATTAEGFAEAFARFDRSWPVVFETGTHCRWMDTCFRKLGFKDIIANPGKIPSITKSNTKNDRNDARELARLAIADPEMLHPVKLRDEIFQQMLRYHRARNVLVSQRTQIVSQIRGFAKSMGFRIESVAAESFHRLNRTEWPVELEDGVWPLLGVLKVLSVKIKAYDSLIARMAERPEFKEMVDRARCVYGIGIIGSTVIVAAIGGDPDKFKHSRDIGPYLGLTPKQDQSGDVDKQLHITKAGADIVRKALTECANVAMKSDAKDTDVKLKGLRVAMGGGPIARKKAKIAVARSLAVTVIALLKDPKAEYIPLSERGKEGFERYRNEMEFLAMKKRTGRSSKTAKAA

SEQ ID NO: 484685 - protein, 452 aa, unidentified
MAKAKKRKHRKLDRSLPVMRPNAGGIDIGATEVFVAVPADRDTESVRSFPTFTQDLYELADWLQRCRVDTVAMESTSVYWIPLFQILEARGIEVHLVNAQHVHHVPGRKSDVLDCQWLQYLHSVGLLGASFRPEQAVCEIRSLMRHRENLVQMACVHVQHMHKSLDQMNLQIHHVISDITGVTGLAIVDAIVAGETDPDTLAKLRDHRIKASMETVRKSLVGDYRPEHIFTLKQSQTAYRYYQQLITDCDREIQQRIERFHNQDADPSAPAECSSESAPSMGSAFDLRCHLERIFGIDLTVIPGLDVLRIQTIFSELGADLSSKFSTEDAFSSWLNLSPKDGTSAGRRIRGPRIKTKNRVTQVFRMAAQSLHNSQSYLGDYYRSQRARHGAPKAIKNTAHKLDRIFYHLVTTRQHYDETVFAKLETRNQQRQLRRLQSLANQMGYSLVQTTA

SEQ ID NO: 484686 - protein, 391 aa, unidentified
MTMYFVGIDISKYKHDCCIISAANQKVVSKFTFKNDKSGFEQLNLILNSLSTPEDIKIGFESTAHYALNLELFLENANHSFMEVNPVLIKEYKKSTTLRRTKTDSVDCESIARWLMTVEYKPHSKGFYHAYSLKSLTRLRDRLVRQRSFYLVKITNVLDHTFPEFKPFFHERLSKTALYLLENYGSAEKIARMNSASYEKLRSISRGKFSPQQFIRLKELAANTVGVNNSIFDVELNSLLTLYKSLVDEIKTLESEINRLVDEVHPHYMSIPGIGPISAAIIYAEYGDISNFSSPNQMLAFAGIEPSVHESGTEAYNGKMVKHGSSQLRYVLINCCLPLIRFDVTFATYYARKRSENKPHRVAITHVAKKLVRVIYALESQDIDFDPKKLR

SEQ ID NO: 484687 - protein, 364 aa, unidentified
MSACYEGQQFVGIDLHRRRTVLVRMTSAGERLGGMVRFPSNPEALRREMVPALSPAGPAPQVVLEATYGWYWAVETLQQLGARVHLAHPLGIKGFTTRRVKNDERDAADLADLLRMGRLPEAHIAPEPVRALRELVRHRAKLARWRSAVKNSVHAVLAKCGVAVPMSDLFGVGGTRLLDCLQLPSPYAARIASLRRVMDLLDFESDVFDKLARGRLAKDPGYRAVQTIPGIGPVLGAVLVAEIGDIGRFTSADKLTCWAGMTPLHRESDTKVRRGRITKQGSRLVRWAAVESVQRLPTRSHLGVFRAQVAARRGKGIAVVAAARRQLEYVYYALRDHHVRALEPTRAATVNRRTARTDGSAQVA

SEQ ID NO: 484688 - protein, 409 aa, unidentified
MEVLIKRCAGLDVHKETVVACARLVAKGRVQCVTEQFGTTTSELLRLAAWLLAQGCTHAAMEATGVYWKPVWHILEDQIELILANAMEVRNVPGRKSDVSDAAWLADLLAHGLIRGSFVPPRPIQELRDLTRTRKQLSRQVSQTTQRLQKVLEDANIKITGVISDLLGVSGRAILRALIEGETDPERLLARTNGRLKAPRERLIEGLRGAVTDHHRFQLRLHLSQINSFERLLEDLDAEIARHLEPFRSQLERLSTIPGVSGFVASVLIAEIGTDMTRFPSAGHLISWAGLCPRMDESAGKRRNTRIRQGARWLRSTLVHAAWPAARSKGTYLQAQFLRLKGRRGPKKAAVAVAASVLTAAYHILKDDGVVYLDLGGDYFDRRDKDRAAKRLVKRLQDLGYTVTLQEAA

SEQ ID NO: 484689 - protein, 412 aa, unidentified
MNNPQNYLFVGVDTHKAQHTAVVINCFHQKIGYAQTPNNPADFDSFLTRLKNLAHNDEQLVFGLEDTQGLGHSLAKWLIQRDYTVKEVNPVQTKREREQSTSPDKSDKIDAKAIASVLFNKYDELPVIKNEANFKAIRQLNNQRKSLVKEQTKVKNRLHNLIHQQYPEYKKFFSDTFGKTALAFWQKYPHPGELKHIGEKRLNNFLKKQAKSISNDKASNILALVDKDKPQDISTKTRESLIPMLIEQLKLIKQNLEEINQLLKKAVDNSQYKLTTMPGIDFRLAAHFISNIKIIDRFDSADQLARYAGIAPVEYSSGKSRNTTSKIYGCRDLNHAFYILALQQIGSYKNGKIKNPVAYNYYQKKLKEGKSKKTALTCLQRRLVDIIYAMMRDRSAYELPEIPNYEILNRAI

SEQ ID NO: 484690 - protein, 348 aa, unidentified
MNHYAGIDVSLECSSICVVDGAGKIVREAEVASEPEALIGWFRSIDIPIERIGLEAGPLSQWLCAAMREAGLAVELLETRHVRDAFKAMSVKTDRNDARNIAQLMRLGWFRPVHCKSVEAQETRAVLGARKLLQSKLRDVENSLRGILRGFGLKVGKTTEPTFAARINELVAGHPGLEVVAKALLAAHATLLREFNVLEKLVGKMARAHPQAKLLMTTPAVGPVVSLTYASAIDDPKRFKSSKAVGPHFGLTPKKYQSGQTDVSGRITKVGDASVREALYQAAHVMLTRPIKNCTALKSWAMRIAKRAGMRKAKVALARRLAVILHRMLADGQPFNPRARAATPATAS

SEQ ID NO: 484691 - protein, 443 aa, unidentified
MKALPLLDPKAAAIDVGSEKLHVSIAGDTPKVFGTFTGELESLCLWFKERGVTSVALEATGVYWLYLYEVLEAAGLTLVVVNGRHVQNLPGRKTDMADCQWLATLHAHGLLRGGFVPPADIRQLQDYQRLRSDHLIGAAGQVQKMQQALERMNLKFHDVISDLTGVSGLKVVRAILAGERRPGELLALCDVQIQKKKADRVKESLRGCWKKEQLFALRQALELWETYQQKIADCDRELAALLHQLAGSPPPGAGAGGGELQLAPAKSPGKNAPVIERFQELLARVCGGRDATQIPGLSPYLVLQLISEVGTDMHRWPTEKHFCSWLGLAGGRKQSGKRKGSVKAHRNRAGRMFCAAARALAQSVDKALGGFYRRLRGRLGGLAANVALARKLALLFYRLLRHGLEYVEKGLKTYEAKVLETETRLLAKLAKKQGFTLVPSPAS

SEQ ID NO: 484692 - protein, 410 aa, unidentified
MAYKVAGIDVHKKVLMVVVLDIDDPESEPQRRRFGATTSELRNLSDWLRQQGVRQAVMESTAQYWRPVWYELEPSMKLSLAQAFSNRAPRGRKHDFRDAERLIRRLVAGELTLSFVPEPKQRTWRMMTRARVQITEDKSRLHSQLECLLEEMRIKLSSVVSDLLGVSGYRMLRALADGETDPRKLAALADDRLQCSEKQLIDALSGSPEPAHRRVLTLYLNRHRVMVEQIAELDGLIAEALKPHQEAVARLALAPGLGVDSAQQIIAEVGVDAGTFPTAGHLSAWVGTCPGRDESAEENHSSRSAKGNKYLRRVLNQAAHAAVKKKGSHFQAVFHRLLPRLGYKAAIWAVAHRLCRLVWKMLHGAVPYVERGSEPDARTKHRRARQLLRRLRKLGYQVDFRAINPTPATP

SEQ ID NO: 484693 - protein, 377 aa, unidentified
MIIDTKPKKIKPMIYSLRTDISKQEFTACLQRYNLSEQTHQVLARKSFANTPSGFKACMRWVARHTDDPAPLRVTMEATGVYYEALALYIHEHHRQVHLAVVLPSTSKKYIKSRGLRSKTDKIDAYGLALMGAERKLSAWGGIDPFWRRLRAMTRTRTELMDERTALRNRLHALRHSGVEAKKAIQALEYCIQALTQQIDALYRRICKALRAREKVAEMVDYLRTIPGVGLLTIAVVLAETAGFERFQSISQLISYSGYDVKIRESGTWVGQPKISKQGSKYIRRAMYMPASTAIRSGAGPLWEFYQRLRAKHDNQVNMKAHVAVQKKLLRYMYVLWNKQQAFDPQHIRRLQAHHNNVAPSRTHSEEATVDPSQAAA

SEQ ID NO: 484694 - protein, 415 aa, unidentified
MKVHRNCCGLDVHKQTIAACLIYEDGIGNTCKEKRLFGTMTRDLRELAQWLRRAEVSAVAMEATGVYWVPVWNVLEREGLHLLLINPEHYKAVRGKKTDLKDGERIAELLQDGRLEGSFVPSTPLRVLRDLTRYRVKLVEHQSSVACRIQKLLEQCNIKLGSVASNVLGVSGTAMLQALASGETNAERLADLAKKQLRKKIPTLRLALDGHLMPHHRFLLRDMLDELAHIEGQLARLEAEIEVQMQPFQKALQAWMSIPGIKHRVAWTLVAEIGTDMQVFPSPAHIASWVGVCPGNNESAGKRKSGKTRKGNRWARRALCEAAWVAAKAKKSYLAAQFRRFAATRGSKRAIIAVAHTILTIGYHMLQRGTIYQDLGANYFDQRHILRTTKRLVKRLEALGHRVILESPFPNAGIA

SEQ ID NO: 484695 - protein, 408 aa, unidentified
MQVEHPVCCGIDVHKDTLTACLRRVDANGHVSKEGREFATTYTSLLALSDWLVEQHCPVVAMESTGVYWKPVYHVLAGTVEVFIGNAHELRSRPGKKTDKRDAAWIAELLAHGLIRPSFVPPPDICALRDVTRTRVALVQTRSQSKNRVHKLLEDTNLKLGSVVSDLFGVTGRRMLAALVAGERDPQVLASLALGTLKHKRPQLEVALTGQFTAHHGTLLALLLELIAMLDRQIATLDQQIGELVAPLHVQIAQLDSIPGVDITAARDILAEIGTDMSRFGDAARLASWAGVCPGNHESAGKRYRGKTCKGNRYLRRVLVQCAWGARKTPTFLGRTFRRLEVRIGKKKAARAIAHKILVIVYHLLALGTCYEEARYDQWNPRQEARERQRAIKALERLGYTVTVERTA

SEQ ID NO: 484696 - protein, 351 aa, unidentified
MTIRSVGIDFHQGQHRVRCLDDRAQSCDSFSFQTSPEGLATLEEHIFSDSSNPVVVFEPAGIPWLTVAAYLRSQHPGCRLVKAKMQKVAALRKYLRGPVKSDRIDALTLAKMPFIDPEQMEEVYLPPAAIHALQRLTRQRKRLQQEIAGRKVRIETVIDGYLPGLRKALASPWSTQVRAFLKSRFNPFGVVRDGEKALYIFLNKATYREKESRVESHEIFQICQAMVNICEASAIATTINEEFFIELQDEVARELRLMETAETESESLERRIAEIYHKLHPSNNLCTIPGVGERTAPIFLATIGNPARFHNQSAFANWTGAVPRSRQSSNMEAKGLRMTKAGPSIMRMALF

SEQ ID NO: 484697 - protein, 430 aa, unidentified
MDVEDRIRLEEFRQLKREIRGSERHLIVGIDVAKDRHHAFFGTATGKALLKRLVFENDRDGFEKLLAYVDAEKTKNVLDKEVFGLEPTGNYHKPLGEYLIERAFTVVLTAPKAVKNNREMLDGRWDKNDTKDPANVADLISQGKFMYYDHPVMPLRDLRNLLSLKSRLKKQEHGIKVRIRNHLIAQYFPEMDSYYARSGSIGLSIVKWCLAPCVMANFEFERFVQVVAGGKRLTIGQQKRLREIWQKAPCSIGCEPGEALGFEAKLMVEGLQQVRDAIEVTDGKILQVCLNFPEYSYLLTIPGFGPDVSSKVLAAIGNPFRFDSQKQVVKMAGMDLSAKRSGKKSETVIPRLSKKGKASLRYALYQAAHIASCRNQYFVTYFTNKLRGRQKEKGITTKMKVKLAAKLLVIAWTLMKKEEPFNPDYLNLDE

SEQ ID NO: 484698 - protein, 351 aa, unidentified
MERYIGGDVHAASVTLSVRSEAGKIVRRDVVETNGSALVGYLSQQPGNLHLCIEESEWSGWLYEILSPHVAEFVVYRPKWRPGPKSDKHDADDLSERMRTGKVGVPVYKDRKQFARLREASRSHSMLTRDQVRVKTRIKSFYRSRAIACAGDAVYRPGKRDAYVKELPKVMQTTALLLGRELDALVALQEEAGKALLRESHRHPISRILETAPGFGPKRAAQLIPIVVTPWRFRSKKQFWSYCGFGIITHTTSDWEKGDHGWQRAHVPQTRGLSRSYNHQLKWIFKGAATTVIAHSSGGPLRDHYDALLENGTKPNLAKLTIARRIAAIVLAMWKAEEKYDPEKTHVSVSC

SEQ ID NO: 484699 - protein, 340 aa, unidentified
MLYVGLDIHKSHITVCVLDANGKVKDRWQVRDVEQLMRRLGQLPPFEVCFEASTGYGWFYELLKTVAARVAVAHPGLLRLIFRSKQKNDRADALKLAKLLYIGEVPEVHVPPADVRAWRELITFRKRLIEKRTQAKNGLRCLLRSLRIEPPKGFGLWTRRGIAWLAALEFAQPLHAVKRNMLIDELQAHSKNIRQVEQELLKFSQDNPAIALLRTIPGVGLRTAEAVVAFIDDPHRFPNSKRIGSYFGLVPSQDQSANTNRLGHITKEGAPVVRAMLVEAVWQAVRRSPTVRAFQERIERGDRDRRKISVVATAHYLVRVMWSMLKNGTVWKEDMRAVAA

SEQ ID NO: 484700 - protein, 372 aa, unidentified
MQQDSAVFVGLDASKMKISVALAEEGRQGEVRFLGDIDHTPEAVRRLVTKLVGRYGRLLFCYEAGPTGYGLQRQISALGHDCAVIAPSLIPKRPGERVKTNRRDAITLARLHRAGELTRIWVPDPGHEAVRELVRAREAAMADLRTKRQHLQSFLLRHGRIYSGSRPWTQVHARWLSNLSFEHPAQYLVLREYRQAIDDAETRLERLTQQVAEVVCSWSMAPVVEAYQALRGVAFLTAVTFVAEIGDVRRFETPRQLMAYLGLVPSERSTGEQVWRGSITKAGNPRARRVLVEGAWTYRYPARLSRTLQVRQERLSTVVRAIAWKAQLRLCARYRRLMAAGKRQTVVTTAIAREMAAFLWAIGHTVEPRPAA

SEQ ID NO: 484701 - protein, 461 aa, unidentified
MDRRPASPPTPQTPAEIDSLPVHHPHAAGIDVGDRTHWVCVAATPDGSPTTREFPAHTPGLRELVAWLRRCGVTTVALEASGVYGHVLYLTLVEAGFATVMTSPAFTRQIKGRPKTDRLDCQWIHRLHSHGLLPPVFQPDDATQTLRAYVRQRGNLVRLSGQYVQRVQKSLLLMNLKLTAVVGDVTGVTGLKIIRAILAGERDPQTLAKLRDRRCKSGESEIATALDGRYRAEHLSELRSSVTMWDKHVEVIGELDAEIAAHLRVTKRKSELPPLPAKPRVRGKKPHDPKFDVRTALYYVTGVDLTAIEGIDEIHALTLISELGTDMTKWPTVKQFASWLGLCPQFQKTGGKVKSSRTRLGKNRAATALRLAAWGLMRSKSYLGAYLRRQRSRLGAPKAITATAHKLARILYNLLRYGLAYTKRDEQAYAEQVRDRLEKSLHRRAKELGYELVKKPEPATG

SEQ ID NO: 484702 - protein, 355 aa, unidentified
MDNAKYIGMDVHKETISIAVLDSSGKLVMESVVETKGITIVQFLRGLRGELHVTLEEGTWAAWLYDLLKPYVHEVLVCDPRKNALLKAGNKNDQIDARKLAELLYLDRLTAVYHGEQGVRALKELSRSYLTISGDTVRVMTRLKAVYRSWAIPCAGKQVYAPRYRDEWLGKIREAGVRRRAEFYYQQLDELRALRQQVRRELLAESAKHQASKLLCQIPAIGPIRAAQLIAILQTPNRFRTKRQLWAYGGLAIQTHSSADHRYVDGQLRASKRPVSLRGLNRNHNHELKNIFKGAAIIAATKAGPFQEFYAALVAKGIRPEMARLTLARKIAAITLIVWKKGVSFDAQYLKPQTA

SEQ ID NO: 484703 - protein, 371 aa, unidentified
MKKVSTVTGKQLRNFAQGQTTQARFTIGLDLGDRHSWYCVLDEAGQVRQEQRVRTNAKTLCEVFGALPGSRIALETGTHSPWISRLLSELGHEVIVANARKVRLIGESRKKDDRLDAQTLARLARIDPELLSPVKHRSAQAQADLTVIRARAALVRARTGLVNAARSLAKSYGERLRGCNVRNLNPEKAEGLSPALQRALEPLLTAIESVSQQIAEYNQRIEQLAVESYPQVTLLKQVKGVGTLVALTYMLTLEDPHRFRKSRDAGCYAGLQPGRRNSGQSAPQMHISKEGDPYLRTLLVQSAHHILGPFGADSDLRRWGLRLAERGGKNGKKRAIIATARKLAVLLHRLWVSGEVYEPFHNNRQAMLATA

SEQ ID NO: 484704 - protein, 355 aa, unidentified
MDSVKYIGMDVHKESISIAVRNGAGKIVMESLIETKASMILQFIDGLRGDVHVTFEEGTSAAWLYDLLKPQVTKLVVCDPRKNASRREGNQNDKIDARRLAELLRLNHLSPVYHGEHGLRSLKELVRSYLTITKDLVRVMTRVKAIYRSWAIPCTGKQVYAPRHRAEWLGKIGEPGVRRRAEFYYQQLDALRTVRQEVRRELLAEAKKHKAWKLLCQIPSIGPIRAAVLLGILQTPHRFRSKRQLWTYSGFGIETQSSADHRSVDGQLQRVKKQISIRGLNRNCNHDLKNLFKGAAIVASSKPGPFQEFYTALLTKGIRPEMARLTLARKIATIVLIVWKRGVSFDAQYLKPQTA

SEQ ID NO: 484705 - protein, 442 aa, unidentified
MTAAMEQETFRWFVGIDWGTAEHVVNLADATGRLVEERTIKHTADGVAQLLDWLTAVSGDRLAEVAVAIEIPRGALVEGLLERGAAVFAVNPKQLDRFRDRFSVAGAKDDRLDARVLGSAVRTDRALFRRLALDEPLVIRVRELTRASEVLQGEFQALTNRLRELVHRIAPEWLSLSPNADDPWFWTVVEWAATPALGASLRRRKVQTLLTTARIRRVSVDDVLTAFEHPALTVAPGTVEAVTGHIQLLLPRMRLVQEQRDACEQALASVLTELRTTETPPPPPGGSPDIQSSSDASTRTPGDVAILESLPGVGLVVTSSFIADAMPLLRLRDYASLRAMTGVAPVRRQTGKNKRGMIAMRYACNVRLRNACYHFARVSTQVDVAARHYYATLRARGHSHGRALRSVADRWLRILISMLTHGTLYDPTRFANVGGTPSADAH

SEQ ID NO: 484706 - protein, 347 aa, unidentified
MDVSLIASVGIDLGKTTFHLVALDCHAKVIVRKKLSRTQLLAYTANLPWSIIGMEACSGAHFFAAKLRNQGHEVKLIPGQFVKPFVKTNKNDFNDAEAIAEAVTRQNMRFVPIKTDDQLDLQALHRVRDRLVHRRTALINQIRGFLLERGIAFPKGPANLRKQMPVILEDAERNITARMRRLLDDLWQEWKQLEANITKISEEIEHISHEDQGCRRLRQIPGVGPLVSTAMVAAIGNGAAFRNGRDFAAWLGLVPRQHSTGGKPRLFGISKRGNTYLRRMFVHGARAVLLRVKYDTGGLGQWVHQLEARTARNKVIVAIANKLARIAWAVLFNQQDYRATAAAAVAA

SEQ ID NO: 484707 - protein, 412 aa, unidentified
MDVYCGIDWAEGHHDIALVNRDGTLLARRRISDDAAGLTALLNLLAEHGDTPENRIPVAIETPRGLLVACLRAAGRTVYPINPMAVARYRDRHSVSGGKSDLGDSLVLASVLRTDMDMHRPLPADSELAQAIAVLARAQQDAVWDRTQAHNKLRSHLREYYPGFLAAFADVRGGILRPEARTILAAAPAPAPAGQLTTAQLRGLLKKAGRSRGIDTEATRLREALHAPQMRQLPLVEQAMGKQTLALLGQLNAACTAADDLEQAVTQSFNLHPDAGIITSFPGLGILTGARVLAEIGDDRSRFQDAKGLKAYAGAAPITRASGKTRSVTRRRIKNNRLNAVGYIWAFSALSRSPGARTHYDRRRDASDRHAAAQRNLFARLLGCLHHCLATGQHYDENTAFPNQAEKLPHAA

SEQ ID NO: 484708 - protein, 308 aa, unidentified
MKPILKTCCGIDVHKKEVVACLLKQDEHGNYQSTICKFATTRNELFALKEWLLSENCRQVAMESTGVYWKPLYNILEDSMEITLTNAKHMKNVPGRKTDIKDCEWIAELLCCGLLSGSFIPPKPIRELRDLLRYYRKLEGERSREKNRVEKLLEDTGIKISGVLSDLYGVSGRAILKSLIAGKTPDQDLLATIIKGRAVHKLPELQEALEGDITDHHRFILKTALEHIEYLESIMETIWQQVEKKLKPYQDEYQRLQTIPGVKELNAACIIAEMGTDMNAFPTSAHLASWAGLSPGNNESAGKKKVQK

SEQ ID NO: 484709 - protein, 366 aa, unidentified
MKKISTMQVFGNEVFKEQKLTIGLDLGDRWSFYCILDEAGKIILEQKLPTTPEAMKQTFGKIPRSLIAMETGTHSPWVSRLLTELGHEVLVAHAQKVELITKSNRKDDRHDARTLARLARIDPELLGPVRHRSAKAQIHLTVIRARAELVSARTALVNAARGLVKSFGQRLPKCGTQQVSGKLAEGLSAELREVLEPLLREVESLNERIQEYDARMEKIAKEVYPEASLLKQVKGVGTQIALTYVLTIEDPYRFPKSRAVGCFLGLRPGRRNSGESEPQKKISKEGDRYLRTMMVQGAHYILGPFGEDSDLRRWGRKLAERGGKNAKKRAVVAVARKLAVLLHRLWVSGEVYEPLRNSQKAMRAVA

SEQ ID NO: 484710 - protein, 338 aa, unidentified
MKLYAGIDLHSSNNYISIIDEEDQRLFQKRLPNNLEIILPALEPFKESLEGVVVESTFNWYWLVDGLQDHGYKVHLANPAAIKQYEGMKVIDDKYDAFWLAHLKRLDLLPEGYIYPKEERQVRDLLRRRLLFVRHRTSHILSLKSSISRNLGVSMSVREIKKLECKDTEKLFDDAYLALAAKNSISLIRFLTGRVKEIEKEVLFHVKVRPEFRSLLTMPGIGKILGLTIMLEVGDIKRFPTVGDYSSYCRCVKSERSSNKKKKGEGNRKNGNKYLAWAYVEAANFAVRSYSEFQSFYNRKKSKRNGIVAIKALSNKLARGSYYVMRDKVPYEASKMFR

SEQ ID NO: 484711 - protein, 350 aa, unidentified
MIIIGCDYHPGLQQIAYGNPDTGELREVRLGHKEEAEQFYRGLKTHGVPVRIGMEASGHARWFERLLTELQFELWIGDAAAIRTKRVRKQKTDRQDAQLLLRLLLEDRFPRIWVPDAENRDLRQLLWHRHRLVQMRTRVMNQLHVVALNEGLRRKKALWRPAGRAELESLALAPWASRRRQDLLDLLDQLTPKIHELNGKLEQIVEQRPVTRQLSTHPGVGPLTALAYELVIGTPERFACAKQIASYVGLVPSEESSGDRRRLGHISKQGNVLLRFLLVEAAQVTVRSQPQWRSQFFHLAMRRGRKIAKVAMARKLAVELYWMWRRGWNYDEMQQLGSHAGEPGNRHGVQ

SEQ ID NO: 484712 - protein, 373 aa, unidentified
MKKRSSSQKSPKPTVKNKGTKERVTIGMDLGDKTSRYCMLSHEGEILREGQVTTTKAGMVEAFGALGPARIAIEVGTHSPWVSRLLRSLGHEIIVANPRQVKLITESTRKDDRLDAQTLARLARIDPALLRPIQHRSEKAQTALMVIRVRAALLSAWTSLVNTARGLAKALGERLPKCDADQMGVPQTESLPPNVRQVLEPLLKEVESLTEKIQESDHEIEQIARRDYPETALLEQVSGVGPLIALTFVLTVEDKDRFQKSRDIGCYVGLRPRRCDSGQSQPQLRITKEGDPYLRTMLVEGAHYIISRRGPDTDLKRWGLHLAESGGKRGKKKAVVAVARKLGILLHRLWVTGEVYEPLRNHNLRQERKKIAA

SEQ ID NO: 484713 - protein, 408 aa, unidentified
MNPLFVGIDVSSKNNVAYLMKPDGSKYSSFSVQNNLGGAKILSEKIVSALRSMQLSDVVIGLEATSIYGDSLVYALREDGSLGRFQRKIHVLNPKQVKKFKEAYPDLPKNDWVDAFVIADHLRFGRIAKEVYMDDYRYRALRTLTRARFDVIQNLTREKQRFANYLFLKCSGMAQDKGIQNTSATTIALMERFETVDNLANADLDDLTAFVAETGRGRFADPESTAKAVQAAARGSYRLPKTVNDTVNQAMSVSIASMRALKEQVKVLDKAIEQQFEIIPNTLTSIPGIGKVYSAGIIAEIGDIHRFNSQASVAKFAGLVWTQHQSGEFEAEHSQMIKSGNRYLRYYLLEAANSVRRCDSEFRRYYDLKFKEVNKYQHKRALALTARKLVRLVFRLLKDNRLYIPPEG

SEQ ID NO: 484714 - protein, 340 aa, unidentified
MTVIIGIDPHKASHTAVAIGGDEQQLAETKVRATCQQTTKLLAWAEPLGPRTWAVESAGGMGYLLSQQLVSAGEEVLDVPATLASRIRVLGTGRSNKNDPNDALSVAIAALRSPGLRSVEPANHSEVLRLLAKRNHEIGRLRNIVVSRLHAALANLSPGGISKELNASDAIRLLNDLEPITAVEQIRYDLAHELLDYVERLDVQLKESHRRIKTAVKASGTSLTELYGVGPILACELVGYTGDVRRFTTRDQFASYAGVAPVEFSSGGRTVHRLSRRGNRQLNHAIHMVAICQIRQKDSEGRIYFEKKVAEGKTKREAIRSLKRHVSNAVYRQLLIDAQK

SEQ ID NO: 484715 - protein, 343 aa, unidentified
MDTYIGLDVSLREISVCMVDEAGAIQLERTVAADPDAIAALVHAQASSVRRVGMESGPTSVWLWRELAQRGLPVICIDARHAKAALSMQINKSDRNDAAGIARIMQTGWYREVQVKSPHSHAIRGLLNSRSLLVKVQRDLENQVRGLLKSAGLIVGRAKDGVFSARTKQLLAAHIDLAAIALPLLEAREAIHQQLVHLERRVRQLAKEHRQTSAFMTVPGVGPMTALAFMATVDDPTRFRRARSVGAYVGLTPRRYASGEVDWTGRISKCGDTILRTYLFEAAGVLLTRVQKWCALKAWGLRLAKRSGMKKARTAVARKLAIILLRMWRDGTQFHWTAAPAGS

SEQ ID NO: 484716 - protein, 363 aa, unidentified
MTVYIGVDFHPYEQTVAYASDEDGEIGYRRFLHSDKQSIRAFYRKCGAEAVIGVEATGCLWRFEKMLADGGHQLKIGDPRMIRRAALSRHKNDFRDAETILDLLMRGAFPSIVPRSEESREVLDLLHYRQTLVQKRTSIANQLQAFARGKGLARFRMPAVKGRRKLVDAPVTEIETLLLRSRLVLFDELTAQMKALESRLEQLAAADERARLLMTHPGIGVINALALVHTLGEVRRFRRKEEVVAFVGLDPLEKSSGQTKRIGQISKHGSRLARHLLGQAAQACRDHRIRKFYLEVSRRRGRPKAKVAAARKLLINCYVMLRDGIGYEEFQRRGEVGLCEGSGEVRAKASVSGGLRARPAISI

SEQ ID NO: 484717 - protein, 413 aa, unidentified
MELLHRRCCGLDVHKETVVACLRLVSKGKVTNEVRTFQTTTGDLLHLSEWLTANDCTRVAMEATGVYWKPVWHILDDGAFELVLANAAHVKNVPGRKTDVNDAMWLAELLAHGLIRASFVPDTQTQEMRNLLRTRKQLVREQSSHVLRVQKTLEDANIKLDSVLTDLMGKSGRAMIDALIAGETNPAKLASLARRGVKASHEEFREALRGRVTEHHRFLLRLHLHQIDALDAAMATIDAQVAANLGPFRTAVELLMSIPGIKSLSAHVIISEIGTDMSRFPSAAHLISWAGICPRNDESAGKRRSNRLRKGATWLKTTLTQCSWAAAKKKDSYLQAQFYRIKARRGPKKAIMAVAASILTAIYHMLKDGTMYKDLGRNHFDRSSTDQQKKRLVKRLADLGYTVEIKPIAAVSC

SEQ ID NO: 484718 - protein, 393 aa, unidentified
MRFYTTPHRYYCGIDLHARRMYICVLDAEGQIRVHRNGPTTPEHFLTTIAAYREDLVVAVECIFTWYWLADLCAQEGIAFVLGHALYMKAIHGGKAKNDKIDAHKIAVLVRGGMLPMAYVYPREMRATRDLLRRRCHFTRKRAELLTHIQNTASQYLLPTLGKIAYHGNRVGVAEHFRDPEVRKSVETNLALIDEYDRLLTELELHLTQTAKVHDVNAFYRLRSVPGIGKILALVLLYEIHDIHRFPRVQDFVSYCRLVKCAKQSDGKHYGYSGTKIGNAHLKWAFSEAAVLCLRKNPPAQRYVARLAHKHGKGKALTILAHKLARAVYYMLRRGQAFEVTKFFSGTAGGDRPPRAPRMAATPAGNDLDGGAILTLPKSSGAGRPGAATNATA

SEQ ID NO: 484719 - protein, 331 aa, unidentified
MVETKRYVGIDVAKAQLDVALGPNGERFTVANDERGITALLKRLEPADLVIIEATGGLEVPAASALATAGIGVAGVNPPPARDFARATGQLAKTDALDAQVLVRFGATVKPQARALPDAQAQALEALVNRRRKLVEMLTAEKNRRANSPKVIHKSIDEHIRWLEKRLAGFDDELAALVRETPIWRERDELLRSVPGVGKVLSTTLLAHLPELGALNRKQIAALAGLAPFNRDSGSLRGSRCIWGGRAQVRRVLYMAVVSAVRSNPVIKNFYAQLRARGKYPKSALTACMRKLLVILNAMLHNKTHWHATALTSSTSTLYPLGGAVSEHGCC

SEQ ID NO: 484720 - protein, 471 aa, unidentified
MKKQGKTKTKSEASKPLHEPEPDAAGIDVGANEIWIAVAPDRTEEPIRRFGAFTGELKAIAQWLRDCGIVTVAMESTGVYWIPLYQLLADAGLKVCLVNARHVKNVPGRKSDVRDCQWLQYLHSVGLLRASYRPDQAICAARSIYRYRQNLLTQAAQHVQHMQAALDQMNIKLHHVIDDVTGMTGLAIVEAILNGERDARQLAKHRDPRIKASAATIVKALEGDWRSEHLFVLRVAWENWQQAQQQIQKCDQQLLQYTRQLEACTIVAKPIKTVRLSAELAGSQPIPAWSKRRRKKTSKNEPPGPWREELSRFFGVDLTAIPSVSVLTGITLMTELGNDLGAFKTAHHFSSWLCLCPDNETSASKVLRRATRRSQNRVRQALRMAASTLHHDKSYLGDKYRRLRAKLGAPKAITAMAHQLARIIWHLIVHRVPFDLTIFAAHENANQTRRLKRLSSAARQMGYQLTPIAAA

SEQ ID NO: 484721 - protein, 325 aa, unidentified
MKYIGIDISKATFVAAFPVKRGYRTETFQNDIKGIRRFISKLSNDTHHCVMEATGNYCFLLLYLLDKVGIRASLVNPKKIKNYARVMLSVTKTDAKDACLIADFGERFKPEPYKFPSEQIMLLKQKKTVIRQLQKQLTATKNLYTSLEPLPVKDKKCIQSLKQTMAFLEKQIKYMQQEMEEVVSEVFAGQLKALTSIKGIGVTLASALIIATGGFTYFDNAKQLSRFAGICPTIERSGTSINIRGHINRNGDENLRSMLYVAAWSASRHNKACRECYQRLRSNGKSGKLAMIAVANKLIRQAFAVVTSNSSYIDGYISTKPNADI

SEQ ID NO: 484722 - protein, 412 aa, unidentified
MQDILTCAMGLDVHRDIIVACLVKGAVDAEPEAETRTFSTLIPEMQKLRDWVIESECRNIAMESTGIYWQPIYEMLESCFDGEISILVVNARHMKNVPGRKTDMKDAQWIATLLRAGLLKGSFIPDKAFRELRHLTRYRKSVVHDITAQKNRIDKFLQSSGFRFTAFLSDAFGASGRNIIRHLIEHGSIDREALDKCLKTKTRNRIDEILVALNGSLSEHQCRFLNMVFRHLEDLEAHKHTVEDEITEEVLKHTDTLNLLCSIPGIDVTAAAAIIAEIGTDMSSFPDSQHICSWAGLSPGNNESAGKRKSVHINKGNPYLKSMLCEVAWIMASHRKLYLSGWYWKVKQRKGAKRATIALARKILSIIYTMLKTGTPYNEECFEQRRLRCERKRANRLVNELQKLGYVVVAPD

SEQ ID NO: 484723 - protein, 343 aa, unidentified
MGEVSTIGLDIAKSVFQVHGVDVDGAVVIRKRISRAKLLEFFATLPTCLVGIEACPTAHYWSRRLQGLGHTVRLMPPSYVKAYVKRSKNDANDAAAICEAVTRPSMRFVATKSEEQQSGLMLHRSRQLLVCQRTMLSNAIRGHMAELGIISAKGRNGTAELLKIIADEQDDRIPAAARFSLNVLARQYAAIREETVAIERRIHAWHRSSEESRRLEEIPGVGPIVATALMAEVGDWKTFSSGRSLAAWIGLVPRQHSTGGKERLGRISKQGNRHLRWLLVAGAMAVIRYARQHGTKRPWLARLMDRRPIKVAAVALANKIARMAWAMMVRGKRFREPKLLPAA

SEQ ID NO: 484724 - protein, 367 aa, unidentified
MDKTKALRKPDFNLIRSNAAGIDIASEVHYVAVPEDRDLQCVRKFGSFTEDLHQMAQWLKQCNIDTVAMESTGIYWVQPYLILEEYGFDVYLVNARHVKNVSGRKSDVQDCQWIQQLHSYGLLNRSFQPESLIRELRAYMRHRKHLTQSTSNQVLHMQKAFEQMNIKLHNVISDITGKSGTKMVQAILGGERDAIKLAQLAHGRIVATQEQIAKSLTGVWREEYLFELKQAFELYQYLGIKIAECDVQINKVLSRLASDGHNQGTQRHKRPNKNSFHFDGTRFLAQILGIDVTKIYGINELSAAEIISETGTNMSKWPTEKHFVSWLNLAPNNRTSGGKTLKPRKSNKKNINKFNKKIKSFVKQKYS

SEQ ID NO: 484725 - protein, 333 aa, unidentified
MQYYAGLDIHKKTCQAIICTDKGDSVKQGKIPTEKDKIQEFFSGFKNITIAIEACNTWEHIYNLLEMDGHKVVLAHPMKTRIIAESKIKTDKIDAKILMHLLRTGFLPTSYIPSKEIRELRHLVRQRIFLGRYTTKLKNKIYAELLRRGIQYETGGVIFTSKGRKWLRSLHISALDTYLSLLESLLDETSEIEKNIRMQSRKYSEINLLTTIPGIGIYSAMIILSEIGDIHRFTSEEKLYSYAGVTPSVHQSGENTYYGHITKRGSKHLRWILTEAVRVHLIWTKKHTMETKISRYYYRLSKKKPENVAAIAAARKLLQIIYHMLKNKNEFKG

SEQ ID NO: 484726 - protein, 366 aa, unidentified
MKKISTVATNRNKIFKEPKLTIGLDLGDRASHYCILDEAGNVILEHSLPTTPKGIHQVFSRIPRSRIALETGTHSPWVSRQLTPLGHEVIVAHARNVRLIGESSRKDDQLDARTLARLARIDPELLGPVRHRSAKAQIHLTVIRARAALVSTRTALVNAARGLTKSYGQRLRKCGTGQMNREIAKGLSQELRDALEPLLGEIESLNERIAEYDRRIEQIAKEVYPEVALLQQVKGVGTLIALTYVLTLDDPHRFRRSRDAGCFLGLRPGRRNSGMSEPQMHISKEGDRYLRTLLVQGAHYILGPFGQDSDLRRWGLKLAERGGKNAKKRAVVAVARKLAVLLHKLWVSGEVYEPLRNNRQVVSAVA

SEQ ID NO: 484727 - protein, 341 aa, unidentified
MGEYIGLDVSLKETAISVRRDGKRIWRGKCPSDPSLIAEVVRKHAPEPKRVVFETGPLSVWFYHALSAEGLPAICIDARHAKAALDMAPNKTDANDADGLAHLAEVGFYREVRVKGYDSMLVRTLVAARSRLVQITTELSNQIRGLMKTFGLVVPRSKGGTFEAEVQRLLVGQDELARIILPVLEAWRSVRTRASALGRQLLACARQSAACQQLMSIPGVGAITATSFTAAIEDPANFKTSRSVGAWLGLTTRRYQSGEVDYDGHISRRGDAHLRGLLYEAATVILTRTHADSDLRRWGLMLRERIGFKRAAVAVARKLAVIMHAMLKSGEVFNRAVSAPA

SEQ ID NO: 484728 - protein, 288 aa, unidentified
MNKITRVGADLAKQVIQVHAVDAAGQRITSRALVPGKFMAWCAQLPPGCLVAMEASSSAHHWARRLIALGLDARIIAAHLVAPYRLQGKSGKNDANDAAAICEAASRPQMHFVPVKSVEQQSMLCIHRLREGFKEERTACINRIRGLLAEFGLVFPQQPAALRLALPDVMEDASNKLGAQARLALQRALMQWQELDGHLAWCDERIAAHLKDSAQARQAGQLLGVGPVTASAVVASVGDFKQFRNGAQFGAWLGLVPRQNSSGGKNHLGAITLDPGRQVGGDDRAQAR

SEQ ID NO: 484729 - protein, 369 aa, unidentified
MDKDTTYVALDDSKRKIVAGILRPSDTQPELREIANDARQIRRLFERLKREGPVAACYEAGVSGYDLHRQITGLGVACAVIAPALTPRRPGQRIKTDRRDAAKLVRLFRAGELTAIHVLDESEEAVRDLVRCRDDIRRDVLRWRHRVLKLLARHGHAYLTGKNWSHAHWRWIREQRFELPPLQRAFEATVFALEQALARQAELDKELEALAATAPYREPVGWLRCFRGIDTLSAIILLAEVVDFQRFRRPRELMAYLGLVPSEYSSGETQRRGALTKAGNSHARRVLVEAAWHYRHRPTIGRALANRSQGQPDEIVSHAWRAQQRLHRRYRHLLGHGKRTPVAVAAVARELVGFIWAAMTRHESRRQAA

SEQ ID NO: 484730 - protein, 354 aa, unidentified
MSRILAIDLGKFKSVTCLLDTTTNETEFWTMSTDQPYLKAVLKRYKPDLVVIESCTIAGWVHDVCTAKGHELLICNPNQEAWKWKHIKRKTDRDDALKIAKLAALDQLIPVYMPSERQREYRRLVKYRTVVRARGVRIKNNIRAIFQRRGLAMVSGRTAWSLKRLDQIEKYRKPLCDCRPNELWRGELDLELSELMRLRTQHDEVEKKLRELATEDKRVQLLETIPGVGRRTAEVVVACLDDPRRFKNARQVSSYAGLVPRRYQSGLMDRQGRIHKRGPRLLRTALVEAAWIMQRYNPWAKAVYQRICANQKNRKKKAIIAVARKLLVRCWAMLLHETPWNGATTTTLSEAAPA

SEQ ID NO: 484731 - protein, 337 aa, unidentified
MNKVTIGLDIAKNIFHLVWLSHLGKVLKKRKLKRANIKEYFANLEPSIVVMEACGSTNYWAHAIESYGHEVKVIAPQYVVPYRKGNKNDFNDAEAIAEASQRANMRFVPVKNTEQQDIQLLHRIRERRIKFRTAIINQTRGLLAEYGIIIARGANQVRKAVPDILEDADNKLTVLSRRHIASLYDELTELDKQVNALDKEISELSNTKEVCQRLKTMTGIGAIIATAFYSAIGDGKDFKNGRHVSAWLGLVAKQHTTGDNPKLKGISKRGNTYLRTQLINGARAALVKAENKTDKVSEWANNLRKQLPFNKAVVALANKMARMAWAMVVKKEDYKFA

SEQ ID NO: 484732 - protein, 354 aa, unidentified
MLYIGADIHKKTTTMAVKNSQGDVVLHKKLPNDKIVLRQFIKSIDDEKKLVVEATFNWYWFVDLMEKYVDEVMLANSQKAKILMEVNKKAKTDKLDAEGLAELLRRDMVPKVFIPPKEIRDIRELLRCRISLVRIRTSVKNRVHGILHKNGVNSPFSDLFGKGGRVYIASLSLHPCYTHILTGYLALVEFLDELISNVEKEIYKKPLVKTKDIQLLLALPGVGELSAFVIKYETIDIKRFASDKKYVSYCGLAPSTSESADVKRHGKLIPQANHYLKWVFIESAHHARWHWWFKPTYQRALKNHGKNIAKIAVARELARITYFMLSRGEPFRGSESKKAPPKQVSPRGHDPKRS

SEQ ID NO: 484733 - protein, 383 aa, unidentified
MRKTQETLRIKDSIKEAILYIAFELSSSKWKLAFSDGSKIRYKTITAGNLAQLQVEMELAKQKFKITEDIRVVSCYEAGRDGFWIHRYLESQGIENLVVDSASLEVNRRKRRAKTDRIDAGKLLRMLLRYWGGEKQVWSVVRVPSEQDEDARHLHRSLENLKSERTRHRNRIKGLLVQQGIKVSNPSQKKFLEVLEKVRTWNGQAVAPGLKSQVVREYERLQVVEDQIKAWEKEKKERLKNPDTVSLQKVAKLASLYGIGSVSSWTFVMEFFGWRQFQNRREVGALAGLTPTPYDSGKSLREQGISKAGNQRVRALAVEIAWAWLRFQPQSKLSQWYMKRFGGGGKRMRRIGIVAVARRLLIDLWRYLEYDKIPEGARLKSSA

SEQ ID NO: 484734 - protein, 420 aa, unidentified
MARLKIVYPICCGMDVHRDFVIACIASTNQQGVTDYCTKRFSTYSGGLRDLRDWLAAHNCRDVCMESTGKYWFPVHNLLETSCHVVVSHPKFVKAIKGKKTDKKDAMWIADLFKHDLVRGSFIPPQDIRQLRDLCRYWVKLTQYNSGEKNRAQNCLTVSNFKLDSVFSNVFGKSASAIVSHMLEHPGELFDVAPFVDGRCKTPIADIQAAVDGSFNPFQAEKLKIIRAHMDDLGNLKSLLETQIFALALPYARYVELLLTVPGISDPMTAIRIIAEIGADMSVFESSKHLCSWAGLTPQNNESAGKKKTTRIGKAGQYIKPLLIQCALAAGNPRSSKYPEVRSKFLQLKRRRGTKKARVAIARRLLTAIYQMLMKDEPYTPFTVPDAPAAPEVRTLTPKQAIALLRSKGYVITEDLPSSA

SEQ ID NO: 484735 - protein, 332 aa, unidentified
MDIVYLSIIHQNKNAMSRVSFEQVILRGCGLDVHKDVVVATISGEGLSTETRSYKTFSSSLTELKEWLLSNGITHAAMESTGVYWKPVYKVLECPRMKVWVVNARHIKYVPGHKTDKKDSAWICKLLLAGLLKPSYIPEREQRELRDLTRYRNKLIQHVSSDKNRIVRILEDCNIKLSSVMSHLDGVVATKLIDILIDKGHVTMDDIACVYHKRLEASPELLYQACEGFIEPHHTYMLQTIRQDIEQTESIISNLTSRIKEVLSPYENVIDLLRKIPGLDRKTVEDLIAEIGVDMEVFPTEKHLASWAGICPGNNESAGKKKVEEPLMATNS

SEQ ID NO: 484736 - protein, 320 aa, unidentified
MHKITDYFGIDISKSTFDVYNDVQGHHQFKNDRSGYKLFSKLLRDNAHCIMEATGYYHFPLACYLMENKIAVTVENPLKIKRFVQMKLSKIKTDKADSKFIWEYAQTNDLKLWKVPNMEAKQLLSLIDTYQKQSTQIKNKIHGEGAMGSPSKLVIQSLKRSLKSIQKEIEKIEGALEEIVKLEDCDALARLQTIPGMGKKTALMLIVLTDGFRDFESASQLCSFAGLTPIIKTSGSSIRGRERISKMGNPKLRNLLFMCSFNACKCNSECKKLYERIVAKGKSKKLALIAVCNKLLKQAFGIMKSGLCYDPNFKSVLARN

SEQ ID NO: 484737 - protein, 385 aa, unidentified
MRSEATREGETIVGGQVLYMALELSDRTWKVLFASPAGRRRERSVAARDLGRLMEEIAAAKRRLGLSAQARVVSCYEAGRDGFWLDRALRANGIDNLVVDSSSIEVARRARRAKTDRVDLFKLMGLLLRWVGGEKKVWSVVRVPDAAAEDIRQLSRSIERLKGEHGRHVTRIKALLATQGLKLARIGGRDWGKRVGELRRWDGSALGAWLQRDLVLEGERLAVVAEQLAALKAERDRLVAEGREAAAVKARELARLGAIASESSFVFATELFGWRTFSNRRQLAGSVGLTGTPYNSGDSAREQGISKAGNKRMRTMLVEIAWCWLRYQPASALSRWWQERFANSGGRARKIAIVALARKLLVALWRFLEHGVVPAGAVLKTRVAA

SEQ ID NO: 484738 - protein, 418 aa, unidentified
MQTELSQYTAVIGIDWADKKHDVCIQDMATGRRRASQVRHRAEDLDEWARSLHRRFGGPIAIAVELSKGPIINVLQKYDFFVILPIEPAGLASYRRTFTLSGAKDDPTDAEFALKLLLSHAEHFKPLQPQSVEMRTLMTLVEHRRQLMNDRVRITNRLRNALKQYYPQPLEWFDHIDTALFCDFIRRWPSLPQARRARRATLEKFFREHNMNRKPLLERRIKAIKSAMPLTEDPAVVVPHRLRALTLVEQLEVTLECIKQYDAEIARLAPQHPDYELFDPLPGAGPVFTPRLMVAFGEQRERFNNAAEVQRCGGIAPVTQRSGQSTWIHWRWQCSTFLRQTFVEWAAQTINKSYWAGLYYHQQRAKGCSHQAAVRALAFKWLRILYRCWKTRTPYDEARYLKALQDRGSPLLKTAEAA

SEQ ID NO: 484739 - protein, 392 aa, unidentified
MRGLQEKLQRITATTIIVGVDVAKEIHYARITDYRGLDLAKPIKVHNSIEGFEALLSRVEKLRIKHSCDQVVIGMEPSGHYWRALGWYLKLHESEPVLVGVNPYHTKQAKELNDNSQTKSDPKDAQVIAHLIRDGRYFDTYLPEDEYAELRQLNSERQRLMKQINRANNVLIALLDEFFPEYSTVWSKVTCPTSLELLKRYAFPSDIMAATREMLLSDIKKASGGTEGLKLMEKLILAAGRSVGVREGRKSTRIRILSLGPIISAAFIGEVGDISRFSNWKQVRSLAGLNLVENSSGKHKSKTKVSKRGRPYLRHMLYMAGECACRCNPEMRAFYRYFRDRKNNPLNGHQAFVATGLKIMRILFHLAKTGENYDPNKALGTVRLQQIASLGS

SEQ ID NO: 484740 - protein, 363 aa, unidentified
MIVIGADTHKDTHTAVAVADGTGQLVDELTAPARKAGFAQHLDWARGLDPERVWAVEDCRHVSGGLERFLVASGERVIRVPPKLMGKSRKGSRERGKSDPIDAANVARAALQEGVESLPAAYLDEEAMEIKLLLDHRENLVRARTDDQRRLRWHLHQLFCELEIPAGALDRTLWLDRIAGKLSRAPQGSRVRVARELLRSIRSQVRRAAELEREIATLVKAKAPGLLALPGCGALSAAKILAETAGAERFASDAKLARLAGIAPIPASSGRRDRHRLDRGGNRQLNCALHRIAVTQGRVHPPARAYLARKQAEGKSRMEALRCLKRHLARRVWQLLPQSEIDRSMPTVDSQRDAPTPQIAVAA

SEQ ID NO: 484741 - protein, 353 aa, unidentified
MTTAIKYVGIDVHQSTLVIAVQGESGALLFESTVATREDAIKQVLGGLSGRVRAAFEEGAQAQWLYDVVQPLVDQVVVCNPREARQGNKSDEIDAKDLATKLRLNALKPVYHQVAEIGVLKEFVRLYECLVRDGTRSKLRLKAIFRGRAIPTPGEGIYDAEKAEESIKLLTNKGATFRARSLLAQIAKNEELRAESMAAMVREGGRHRAYKLLKSLPFFGPVRSAQLLAVMVTPHRFRTKRQVWTMAGLSVISHSTSDKKFVDGKLIRSKRAPMTRGLNRNHNRTLKEVFVSAAQDASRREGPLKDFYEAMLQRGLAPEMAKLTLARKIAAYTLRLWKKGEPFDPAKLTMSTS

SEQ ID NO: 484742 - protein, 349 aa, unidentified
MLIIGCDYHPSFQQIAFMDTGTGEYGERGLEHMEGAGQFYRDLRARGVEARIGMEASGYTQWFEQLLAVSFELWIGDAAAISRKRVRKQKTDKQDAELLLQLLIEDRFPRIWVPSREERDLRQLLWHRHRLVQMQTRLRNQLHAVALNEGVRLKKRLWRRKGRAQLESLALMPWANRRRHDLLELLDQVDATIAQLSASIEQEAEKRPQVVRLMTHPGVGALTALAFVLILGTPERFARSKQVSSYLGLVPTEESSGERRHLGHISKQGSTLLRFLLVAAAQITVRSDPDWRRYYLHLAMRRERAIAKVAMARKLAVRLYWMWRNGWEYAQLPKLGSHAGQPGNRLGRQ

SEQ ID NO: 484743 - protein, 386 aa, unidentified
MPQLNDLSRSLVTLEQDATLIAVIEMGQSSWLVAGIVPGVERQPLKKLAVDESALLKLLHRWREEAEQAGHKIKRIAVAFEAGRDGFWLARWLRARDIEVHVIHASSVAVSREHRRAKTDRLDTELLKRAFLGWLRGERDHCKMVAIPTIKDEDAKRPNRERESLVGEQSRIINRIKATLVRLGIRGFNPKLKKAAERLEGLRTPEGEPIPPNTLSELHRDMERRRLVRDQIRQIESARLDHLEHEPGEGAHAMVRLLARVMGIGIETADMLVQEVLSRNLRDRRAVARYAGLTGSPDESGKKRREKGLARSGNPRVRRGMIQLAWRFLMFQKDSALAQWFRARTENARGTRKTMIVALARKLLIALWRLVRDGVVPDGVILRPAQ

SEQ ID NO: 484744 - protein, 365 aa, unidentified
MTKVRTWAGLDVHAAATVACVVDVPSGEMTVERLAGRTAEVAAFCARLPAPVRVAYEAGPTGFGLARALEAAGIGCVVAAPGKIERPAHDRIKTDRRDAERLVRLLMIGGLHPVRVPSGEEEALRDLVRAREDIRGDLMRSRHRLSKLLLRHDIRYEDTASAWNATHRAWLSRIELGDRAAQATLLDYVGAIDALVVRRGTIEKTISELVPLSPWARPVGRLRCLRGIDTLSAVGLCAEIGDFARFERPGQLMSYLGLVPSERSSGQTRRQGVITKSGSRHARRLLVEAAWHYRRPPRKGTTLQRRHEGQPAQALAISWKAQQRLHQLWRRLDRERGKRKTIVAVAVARHLAGFCWAITNTDPDA

SEQ ID NO: 484745 - protein, 333 aa, unidentified
MSLVPIRSVVQTSLGPAFVGIDVSKARLDVSDSPEAKPFSVDNTPRGRSVLLRRLRRIPVERVVVESSGGYERDLLLDLMGAGVAVAQVNPRIVRDFARSYNLLAKTDAIDAALLARFGRERKPRTLGPVDTIRLMLQELIAARRQIVEQCTRLRNQLEHARQKVVVASIRRSMRQTREELELIEAEIQRLIDENPSLSIRQKNLLEVEGVGPAVSRVLVSELPELGQLDRRKLAALVGIAPFNDDSGTHQGRRSIRGGRGTVRTALYMATLTAVRRNEVLKAHYQQLLARGKPKKVALTACMRKLLTYLNVRLMYLKADDPQQSPPPGGGAK

SEQ ID NO: 484746 - protein, 465 aa, unidentified
MMNLYMGIDVSKGYADFILLDQDRNTIEPVFQLDDTAEGHHKLDKILKGIFQRWPQAVLYCGLESTGAYEVHWYDHLQALSRSWPIKVAYVDPAAIKAHKKALRMQTVTDPVAARAIALYLIAYPEKVRYDQNPPLLALRRLAKLIVCLNKHKSQYVNQLEKLVYQYNPTILMWWNSPLANWLLELMRRYPTQLHLSRASAKELAQIPYLTLEKAKEILEIAQNREVSRSSPIEEQIIQALAEQIQLLKKQINRLKARFVEEVQQQPYLVRLFKLWITFPGCSDYTAASLAVYFVHSERFPTAKSTSAYFGLHPVYRQSGDGRRIPHMSSKGNRVVKSLLYMISRSAINYNPVIRVVYNSALKRGKSKLAALGICMNKTMRILYGMAKNNQPFNPELALNHMGNDRKETESKRKEVEHKRRYQKFDNNAPISSRQRKKREQAESQPAFEQDPLLGNRDHQACSPN

SEQ ID NO: 484747 - protein, 369 aa, unidentified
MGEYSEAFVAFDVAKMKHAVAIAEGGRTGEVRFLGEVENRPAVIERTIKKLGKRYKRLHVCFEAGPTGYGLYRQVRDLGHDCTVIAPALIPKRSGERVKTNRRDAITLARLHRAGELTGVWVPDVVHEAVRDLVRAREAGADDLRRKRQQLLSFLLRHGRIYEGRSHWTMAHRRWLTRESFEHAAQQIVFQEKIDAIEDASQRLFRLHEQLRAVVPTWSMAPVVEAYQAMRGVSFLVAVTFAAEIGDVRRFDTPPKLMAFLGLVPGERSTGDTVRRSSVTLAGNRRARRALVEAAWTYRYPARVSETLRLRLEGLPKAVRDIAWKAQVRLCARYRRLSTTGKKPPVVVVAIAREMAAFLWAIGREIAPS

SEQ ID NO: 484748 - protein, 412 aa, unidentified
MEVVYRRCAGLDVHKKTVVACVLTSTNTGKPTQEVRTFGTMTRDLEALSAWLVAQQVEQVALESTGVFWFPVFNLLEEAGLPVTLVNPRHTKQVPGRKTDVGDAAWLADLLRHGLVRASFIPPAEIRALRELTRYRATQVRARATEVNHLLKTLESANLKLAAVATDPMGVSGRAMLAAVAAGEDDPEALAQLAKAGLRKKLDELEQAFIGRVKPHHRVLIQASLDLLRFLERSIEQLDQEVERALDPFAAQRAALDAVPGIDSVAAAAIIAEIGVDMDRFPSAAHLASWAGVCPGNKQSGGKRLSSATTKGNVWLRRILGEVAWAAIHDRHSIFRARYYRLKPRLGAQQAVVAIMHQLLKVIYHILNTGEVYRELGADYYEVADPARTARRLTKRLERLGYTVTLSPAAAA

SEQ ID NO: 484749 - protein, 355 aa, unidentified
MQTLNANSIVVGVDVHKYSHTAVAMNAWGEEKGKLDFSNNNLETYTEWLNHLGFKENIVIGLEDVNSYGIHLVERLRREDYHIRYVPAILTERERKSSTKRHKSDEVDAKRVGKVILTKYEDTLPAKESIADEKELETAKSLDLLLMERRDLTRNKTIIKNQLHCLIHQYYTESYRLHCPRSFSKKAIKWFLDDLKDNKTILATSIVRRLERLLFVEDQIYTISKEVAVIGETSKEVMSLTTIHGCGMVTACSIVSEVITIKRFKDKHHFSMYAGIAPTPHSSGRKNKMRTNPFGNRQLNRAIHSIALSQIAIKGDPTGKEYYQKKLKEGKTKLWALRCLKHQLAKVVFQKLKYC

SEQ ID NO: 484750 - protein, 355 aa, unidentified
MYGLKHQKEKRSMDHFAGLDVSVKETSVCIVDDTGKIVREVKVASEPEALLQVLKNPTYRFKRIGLEAGPLSQWLYTALAEAGLPVICVETRHMRAVLKAQINKTDRNDARGMAQMMRVGLYRPVHVKTLRSQKLRMLLTHRKLLQSKAIAIDNDLRGTLRNFGLKVGMVGTARFEARVKELIENLPDLAMLVEPLLIVRRVVREQLGILHRRLLAVVRDDDVCRRLMTVPGVGPVVALTYRATVDVPARFRKSKSVGAVFGLTCAKYQSGESERTGAISRCGDEMMRTMLYEAAQSMLFRSTKWSWLKAWAMKIARHRGMKKAIVALARRLAVIMHRIWIDGTEFRWTREAVTA

SEQ ID NO: 484751 - protein, 332 aa, unidentified
MGEVIRVGLDTSKHVFQVHGVDRSERVVLSRQLSRGQVEKFFAALAPTVVGLEACGASHYWARVLYELGHEVRLVPPQYVKAYVKRGKNDRIDAEAICEAMSRPGMRFVPVKSADEQGAAMLLSVRDMLVKQRTMLVNAIRGHAAEFGVIGAKGVARVMDVLERARESLPKLAWDLLAVLAGQLEVLEIQLCKIEKQLRTWHQENDCSRRLATMPGIGPVGAMTMVLRVPDPTVFRSGRHFASWIGLTPREHSTAGRQRLGKISREGDEALRRLLVVGATSVIKQAQRGRGPAWLLALLKRRPAKVVAVALANKMARIAWAMMVSGEVYRAR

SEQ ID NO: 484752 - protein, 354 aa, unidentified
MDNIKYIGLDVHRDTISAAVLNGSGRLIQQSVLMTRAAAILDFIGGVRGTLHVTFEEGTHSAWLYDLLSRRVEKLVVCNPRRNALLKSGNKGDAIDARKLAELLRAGLLSAVYHGETSALEVQQLARSYTMLTEDTTRVMGRLKAVFRGQAIACTGRKLYGRHRNEYLAALGVCALRRRAERLYLQLDALQLLRRQARHDLVVECRKHTAAKWLQTVPFLGPLRAAVLIARVQTPHRFRTKRQFWNYCGLALETRDSAEYRVIDGQLERKKRPALIRGLNWNYNHELKNVFKGAANAASVGQGEFRKFYLRLLKKGMRPEMARLTLARKIAAIALKIWKKGEPFDAEHLKSQAA

SEQ ID NO: 484753 - protein, 344 aa, unidentified
MLMVRTVIGGVDTHADVHVAAAVDGNGGVLGIEAFPADAAGYQDLLRWLVDFGDVSLVGVEGTGSYGVGLARFLHDQQIAVVEVDRPNRQTRRKVGKSDSTDAVAAARATLSGAAAVVPKTRNGPMEQMRVLLVARRSARQQRIQTLNQLRQLVFTAPEPIRVRFKDRYQRGLITEAAKMRPRKGSDPVTFTTNSVIRNLAKRIQGLTAEMRTIDRALVELIDHTAPSLLELYGVGPDTAASLLVTAGDNPARLRSERSWAHLCGVTPIPASSGKTIRHRLNRGGDRNANAALHRIVLTRMSSHHETRAYVARRRTEGLNTPEIMRCLKRYVARQTFKHLPQIP

SEQ ID NO: 484754 - protein, 422 aa, unidentified
MLAVGVDWAESFHDVALGVPGRGVIEQFRVDHSPAGVGRLVARCLELEPDPAEVRVVLETRHGLLVEAMVDAGFTVLPVNPDLVARRRGPAKKKDDAEDARICCLLALDSYLDLRKLIPHGEIGTELRAIARDDERAARDERRIGNRLRADLLAVFPAAIDIAGADLGAAVFLGLIQRWPSSEALAAAGRDEVEAFARSARHGWPGRFADRVTDAMSVPRLRVRPELARAKAGTIALAAGQLLLLRDQRRAWERRMGELLLGAPRTGRDKTPKDPDPGKAFPGGEIYLSMPGLGDRLAARVAGEIGEHYEQFTTPNALQCYAGRAPVTRRSGRSEFTIARRLACNRHLGEAVQQWAFCSLTRSGWAREFYDAKIAVGDRHHAALRKLGNRWLEVLWHCLDKGACYDESVHAANRNRFMSRAA

SEQ ID NO: 484755 - protein, 433 aa, unidentified
MVAVMIGAGPHKASHTAVAIGAAEESLAELRIRACQSQAGQLLAWAQAWPQRTWAVEGAGGVGHLLAQQLLAAGERVLDVPPKLAARVRLLQAGDTNKNDPNDAFSVAVAALRSPGVREASRDDHATVLKIWSKRYKDLGRIRTQVACRLHQVLCELIPGGVPGQITAGQAAHILKSITPSGAVEAARCQLAAAFTEDLRGIDAAIRDTRKQLAIAVQAAGTSLTGLFGVGPVIAAAVIGDVRAVSRFPNRDHFAAYNGTAPIEVSSGGRKIWRLSRRGNRRLNHAIHMAAVTQIRYRHSPGRAYYDKKLAEGKTPKEALRCLKRQISDAIYACLQADARRAAGAKGPGGQRGNDSVTSAAGSHPQHQLFGQATPGPATHPTTPADTAADPLPAAFPAQLPARASGRPGPGPGKARPRSGARRASLTRPSASR

SEQ ID NO: 484756 - protein, 339 aa, unidentified
MQVTTIGLDLAKNVFQVHGIDEHGEVAFNRALRRAQVLAFFERLEPCLVGIEACGTSHHWARELIKLGHNVKLIPPAYVKPYVKRGKSDAVDAAAICEAVTRPTMRFVEVKTPEQQAILSVHRTRDLIVRQRTQTINMLRAQLAEFGVVLPQGVYHALKFAKNSEDGEPLNLPQDAQEIVFDLCEQLLFLHAKILRHSRHMTQIAKSEKRVALLRTIPGVGPITASAIVATVGSGKQFNNGREFAAWLGLTPLNRSSGGKERLGHISKMGDQYIRRLLVLGMTSRIRSIRLEPEKFDPWFADILSRKPSRVAAVAMANKTARMIWAVLTQNEPYKVRTI

SEQ ID NO: 484757 - protein, 369 aa, unidentified
MKTNTDKSRNTSEVRAEQVTNGQYEAIYLGVDLHKKSISFTRIIDHSTPQAAQRLTWEDFWRFAQKQTRLAKKVYVVYEAGAFGFWVYRKLQEMGIHCFVVHPEKLDPHNKRVQTDKLDSRHLADKLQRYVLGNKKAMVAVYVPTLEEEQQRIESRHRRSLSKQLQRLRARGRGLLLSQGIFATCGWWTQKNWAELKPTLCAELSAALEDERELILELEKRLKKVEKKLEDAAPQELPQRFGRLTFVLLLREICNYQRFHNRRNLGGFTGLGGAVSSSGPYHLDLSINKAGSPYVRTLLIELAWRMVYWQPNYQALRRWKRLRDSGGLAHKSQRKRAVVALARQLAVDIWKWQTGQVTPEQLGWQMSRS

SEQ ID NO: 484758 - protein, 344 aa, unidentified
MHIASIGIDLGKTTFHLVALGERNKILLRRKFSRSQLLTYTANLPASLIGLEACAGSHFIGTVLREQGHQVRLIPAQFVKPYRKTNKNDFIDAEAIAEAVAKQNMRFVQIKTQEQLDWQAMHRVRDRRVQRRTALINEMRGFLLERGLVFAARPIQLRKNLPTVIEDAEQNLSPRLRWLLDRLWQEWKQTEIDIKTITDELERISNEDARCRRLRQIPGFGPLVSTATVAAIGNGSAFRRGRDFAAWLGVVPRQYSTGGKQKLFGMSKRGNVYLRRMLIHGARAVLFRVKYDSGGFGQWVHRLAQRAPRNKVVVAIANKLARIAWAVLSSGKDYRHQPLQLTAA

SEQ ID NO: 484759 - protein, 391 aa, unidentified
MIYIGIDVAKDKHDCFITNSDGEVLFKAFTITNNLDGFNDLYQKIETVMKDITKVKVGLEATGHYSYNLLGYLIDKGLPTYVINPLHTNLYRKSLSLRQTKTDKVDARTIASMLMSDVNLKSYSDTSYHNEELKSLTRYRFNKVKERAKLKTSVSRLVCILFPELEKLVPTLHMASVYALLSEFSDAKHIATTHLTRLTNLLSESSKGHYGKETAITFREAARASIGSNMPAKSLELKHTIKLIQELDSEIDEIENEIKILMDEINSPILSIPGINYRMGAMIIAEIGDFSRFDSPDKILAYAGFSPSTYQSGQLDGAYAHMEKRGSRYLRYALYNAAKYVCHWDPTFAGYLAKKRAEGKHYNVALSHAVKKLVRVIYHLEKSKQQYIKAA

SEQ ID NO: 484760 - protein, 449 aa, unidentified
MSYVGVDLHKKVIRICVIRLEGNKRKVVCSRRFLCQDVAGIMAFFRGWGAFQVVVEATASYEWFVKLVEPLAERIVLAHPKKLRIIAESTHKTDKVDARILAELLALEMIPQAYRPTPRQREYRVLVRYRYYAQRRTVSLRGKIRRILANYNADCRNLFTAAGLAYLEKVEVSRADRFVLGELAQQWKESVRRLRAAEKQLEAFAEDPQMPIGEREGREILASFPCMGPVTIDVILSELAEASRFRSQKKGVSYAGLAPGVRESAGKVRELHITKEGSRLLRWALVQLAWRLVNKVAYWKNLFERLRQRAGKKKAVIAVARRAFTVILAMLQSGQKYQFGGPGSASGQESGLGLPHKSPKVECSSQAARSEGTKPPKPGRNAAPVGKSRRPTTRPGVERKRRKADTGSALPPPSGPAPALGSHPCVALSSGQATCNQAHKKGKVKRLRR

SEQ ID NO: 484761 - protein, 363 aa, unidentified
MSRKTRTPGNAKRISVEEGERIYVGVDVHKKSYHVALWSRDRECLVTVWSQPSQGQVLADRLDPIRSAVVRVFYEAGPTGFGLARDLRERGYEVEVVSPAHTKRPAVRQAKTDSLDCRELARQGAKSELHPVYVPTIEEEQDRQLVRLRQQRRDRCKEIKMQIKSFLLYHGIAEPPGLKTWSAKAVKQLRGLRLSERLRRCLDLLLDDLERAEEALKEVTREVKALSAGPRFKEGTALCVTVPGIAEVTAMGIQTEMLAPGRFHRAADVSSYQGLAPGIRASGETVRLQGLMKTGNPRLKTILVEAAWCWVRYDAGARKLYHRLLGRLRLKQKAIVAMARRLGIILWRMLTRKEPYRGATAAA

SEQ ID NO: 484762 - protein, 363 aa, unidentified
MKRKVYVGMDVHKETIQIAYLTSNSKEILKEQQIKHNEVQIKKFIKKLKLEWNEIHCYEAGVTGYPLYRYLKSLGVNCILVAPGKIPRQSTNKIKTDKRDAIKLARLMRSGELESIHVPSEEDEAVRDYLRSRDSLRLDLGRNRQRLMKFLLRKDIKYSTTKYWTVSHYKWLNNLHFNNEILQETFNDYYSRVRVQEENLKSMDKKIQEIAESEPYREKVGILRCFRGVDYLTAMFLLCEVNDFKRFKTAGSFMSFLGLVPGEYSSGSKRKQTGITKTGSPRLRRILTEAAWQHRFPGTGSKIITARRSGQPALVVALAEKASLRLHKKFRNLQLRGKTPQVMITAVSRELSGFLWAAMNLVA

SEQ ID NO: 484763 - protein, 345 aa, unidentified
MEPMYYIGLDVHKRKISYCVKDSAGKVYSEGSLAATRLDLDVWMKTLPQPWSAAMEATMFTGWIYDHLKPHAAALKVAHPLMLRAIAAAKKKNDRIDAGKICDCLRCDFLPECYMAPTAIRERRRTLRYRNLLVRQMVQMKIKISSLLMEAGVSYNKQRLHKAGYFRELLATNPDINEGLKPLLQLCRETVVRLQKTESAMVRSLERDSLLMDRVERLMTIPAVGPITALTWTLEVGDVQRFSSIKKAISYCGLCGAEKSSGSMVQRTPLSKQRNKHLQTTLIEAAKMAPRNSPELAMLYDKEKQKGNANGATLAVARKLVAYLVAVDRRQKEFLTVQRENRTAA

SEQ ID NO: 484764 - protein, 411 aa, unidentified
MSYKIAGIDVHKKVLMVVVLDATTPEEKPERRRFATMPSDLHRLLIWLREQGVEEAVMESTAQYWRSVWLELEPDMRLHLAQAFSNRAPRGRKHDFKDAERLVRRLIAKELILSFVPGGEQRTGRNMTRMKLQLTRDRVRLQNQIECLLEEMRIKLSIVVSNLLGASGLRILRALAKGETDSKQLAQLGDERLQCTEEQLVDALTGRAQPLHREMLALQLERLQLIDTQIAKLNGMIAQAMKPHQEAVMRLAEVPGLGVDSAQQIIAEVGQQASTFPSAAELTSWVGTCPGKDESAEQNHSSRSAKGNKYLRRVLNQAAHAAVKRKGSYFQVVFRRLLPRLGYQSAIWAVAHRLCRVVWKILHEGVRFIEHGIEPDPKAKMRPARRLAQALRKLGYQVTITPTNLASGMQM

SEQ ID NO: 484765 - protein, 339 aa, unidentified
MELCCGMDLHSSNTVIGIIDAKRKHIVDRKLPNDPELIRSFLKPYKSDLKGIVVESTYNWYWLADLLQEDGYRVHLSHPVANEQYKGLKHSNDKHEAFWLAELLSLGILREGYIYPKQVRSVRDVLRKRAHLVRVRTALIVSLQHMISRNCAVKVKTGDIKRVTADVISPCLEKEEALLLAGKSSKEVIDCLTRQIDKIERWALKRLRREGVFLRLVTLPGVGDILGMTILLETGPISRFREVGNYASYCRKVSSQWTSNGKVKGRGNIRNGNRYLAWSFSEAAAHASRTNEACRRFYDRKLRQTNTKVAHNALAHKLARAAYYIMKDHVSYQEEKMFA

SEQ ID NO: 484766 - protein, 344 aa, unidentified
MKITTIGIDVAKNVFQVHGVDERGKTVLRKQVKRDQMAAFFAKLPGCLIGMEACGSAHHWARKLQGFGHTVRLMAPQFVKPYVKTNKNDVADAEAICEAVARPNMRFVPVKSVEQQAVLALHRVRQGLVKARTAQANQIRSLLGEFGLVMPKGITNIRKRVPELVENASGELPAAFRQLVERMLDHLKDLHRQVGELEAQIKAWHRSSELSQKLEKIPGIGPLGASALVASIADARSFANGRQMSAWIGVVPRQHSSDGKPTLLGISKRGDVYLRTLLIHGACSAIVAAQRRASVNPWLAGLVQRRNPNVAAIALANKNARTVWALLAHDREFQPHYVPTRPAA

SEQ ID NO: 484767 - protein, 337 aa, unidentified
MNYCGIDLHSNNCVVIVSDEADRLLYQKRLPNDLAQILAALDPFCGELAGVVVESTYNWYWMVDGLMDAGYRVHLAHPAAIKKYEGLKHSGDFADAAYLAQLLRLQLLPEGYVCPREERGARDLARKRMQMVRYRTAQILSIEGIMVRQTGSRMKSQAIKQLTAEQVNELAFAPDVALAMEANRAVSETLGRQIESLEKRLHERVSLRPEYRLLKTVPGIGETLATTIMLETGSISRFAQVGNFSSYCRCVDSRRESNGKKKGEGNTRNGNKYLAWAFVEAANFAIRYSPQARSFYDRKKSTTNRALATKALAHKLARACYYMLRDQKPFDAHLCFG

SEQ ID NO: 484768 - protein, 337 aa, unidentified
MINKLIVGIDIGKRTHVATIIDEKGRVVTRPFSFANTTAGGEILVTRISAINTDASVVVFGLEATGHYWLALYSFLIGKGFPVSVINPYQSDAFRKVHLSTTKTDKEDSFLIADLMRFGSFQETKMASETMVSLRNLSRFRVTMSQQITDTKRRIVTIMDQVFPEFETLFSDSFGKTAKALLEEYPTPDSLEQITLRKLTNLVTKLSQGHFKKEKATEIKEKATTSFGIDFALDSFKLELSLLLKQLDFLVVQIAVVEKEIGQIMKTIPTTLMTLPGIDTILAAAILSEIGDVKRFNTSAQLVSFAGINPTVHQSGQFMGNKNHMSKKGSPYLRLAL

SEQ ID NO: 484769 - protein, 364 aa, unidentified
MDVHLRSTTVCALDAETGEAVARRFRGNPWGEVAEWMSGFPGPSLAAYESGYLGFAPQRELSALGVDCVVAAVSRVPRSAADLSSKNDRNDAARMAKAILSHDVTPVWVPSPEIEGLRDLAGAHDAATARLAAAKQRLLAFLARRGYAYGGTTPAGNPRRYWTYDFLRWLDKVRPADDGGIRALAALRNEVEAAAETRDDLLAEYRAAVAAGPLSAEVEALQSIKGCGFALAAAFASEVGDFSRFRSGRQVTSYFGLAPKQRSSADSVRLGGISGAGNALVRRLAVEGSWRYAQAGHQPKLMPKGSGVPLEIRMHGRKGSERLLRRREEMIARGMPQAKANAATAAELVRWLWALGAMCREAGE

SEQ ID NO: 484770 - protein, 398 aa, unidentified
MTESSDYESVQVFIGVDVGKDTHHAVAINRSGKRLFDKALPNDENKLRSLISDLKQHGQILLVVDQPATIGALPVAVARSEGILVGYLPGLAMRRIADLHAGEAKTDARDAAIIAEAARTLPHALRTLKLADEQIAELSMLCGFDDDLAAQTTQASNRIRGLLTQIHPALERVLGPRLDHPAVLDLLQRYPSPEKLASLGEKKLAAQLCKLAPRLGKRLAADIAQALAEQTVVVPGTNAAAVVLPRLALQLITLRKQRDEVALAVEQRVLAHPLYPVLTSMPGVGVRTAARLLTEVACRAFASVAHLAAYAGLAPVTRRSGSSIRGEHPSRRGNKALKRALFLSAFAALRDPLSRAYYTRKMSQGKRHNQALIALARRRCDVLFAMMHDETFYTPQAS

SEQ ID NO: 484771 - protein, 348 aa, unidentified
MKRTTIGLDLAKRVFQVHSVDEQTGEITRGKLKREQVLEYFANRESSLVAMEACGSAHYWARQLVQLGHEVRLVSAQFVRPFVKANKTDAADAEAIWEAAQRPGMRYVALKSEEQQAVLGLHRVREVRVRMRVRLVNQLHGVMGEFGIALPKGWRVMLKRAGELLSEVEECPVPGMLREALLDQLQQIRSLSEQIKVLERQIGAWQRRAEECQRLAEIPGVGLLTATAAVATMGKASSFKSGREFAAFLGLVPRQSGTGGRVKLLGISKRGDRYLRTLLIHGARTVLSWQCRPGHELDPWLKGLLSRRAPNVGAVALANKMARTIWALLAHGRTYQRGYVGRMAPSAA

SEQ ID NO: 484772 - protein, 459 aa, unidentified
MYRMTTPPLRVRACATQAEKLVAWAAAWPERTWAVEGAGGLGRLLAQQLVAAGQRVLDVQPKLASRVRLLQAGDTNKNDPNDALPVAVAALRSRACRQVTADDYPAVLKVWSKRHRDLGRTRNQAACRLHAVLCDLVPGGHSKEISAVQAAKILEQVTPSGAVARARAELAAEFLADLRSLDAQLRDTRKKLAAAVKDSGTTLTQVFGVGPVVAGTITGDVGDVARFPGRDHFAAYNGTAPVEVSSGNRKVYRLSLRGNRRINHAIHMAAITQIRHRHSDGRAYYEKKLAEGKTHKEALRSLKRRISDAIFARLQADARQAAEASVTGPGGQPGNDPASSAAGSHPARQLFGQATPGPATTIRPGASAGIPSGPRSSRAESRGRTGYSPVAATLPPAKPQVQVEFPERSQDERPGGGSAATAIPGREEGPVRPEPVHDQARQDHEAMGKLTRTRARTRS

SEQ ID NO: 484773 - protein, 341 aa, unidentified
MLYVGLDIHTKQISICVLNQDGKVHERCQVRRADQLRPFLEKLPDRFEICFEASTGYGRFFELLTTVASRVVVAHPGLLRLIFRSKQKNDRRDAEQLAKLLYLGEVPVVHVPSADVRAWRELITFRRKLIENRTRAKNGLRALLRGVGVVAPRRPGLWTRQGLAWLKELQFEQPLHALKRDLLVQEIESLSRQRARVERALAGYSRDNTAVWQLRSIPGVGLRTAEAMVAFLDDPQRFAHSKKVGSYFGLVPSQDQSGGTNRLGHITKEGSATVRHLLIEAAWQALRRSPTVRAYFERLRRNDPDRRKIAVVATAHYLARVMWAMLKNGTLWRERGNHKAA

SEQ ID NO: 484774 - protein, 412 aa, unidentified
MRLFAGDDWAEDHHDIEVMDQAGKVLAKKRLPEGAAGMAQLHALIGQFVPEDDMDSTEVVIGIETDRGPWVAALVAAGYTVFPVNPLQASRYRERHGVSGAKSDAGDAHMLADMVRTDSHQLRAAAGDSPEAAGIKVLARTHKTLIWERTRATQRLRHQLREYFPAALEAFEDLDAADTLELLGKAPEPARAAKLTRAQVSAALKRARRRNIPDKATAILAALRSEQLGQPEALTAAYAATVRSLLAVITVLNQQVKALQGQVGEHFGRHPDAEIYLSQPGTGKILGARVLGEFGDDPRRYRDGKARRNYAATSPLTRASGKKKVVSARFIHNDRLVDALNAQAFAALSASPGARTLYDELRTRGIEHNDALRRLANRLVGILHGCLKTRTLYDEATAWGHRQNLPQSSVAA

SEQ ID NO: 484775 - protein, 428 aa, unidentified
MSILNSLFVGVDVSKNTNQICACNFNSDYFFNQNFDNSVFETETVINMINDVMLQNKLTHIIIALESTSVYFFHIANAFSSSDILNKFHLEVYAINAKVIHNYSKSFVSHSKNDPKDAKLIADFARVGRCKDHKPWRGAQLVALQRVTRHRYHLAQQLTREKNYALNNIFLKFNKLENKNGPGDEVNPFSDIFGATSTSVLLDFLSPEDIVQMPLEDLVEYVNTKGKRRFSNPENTAKLLKQCALDSYRLDRVSYDAINIALASSLRMISMLKRELKDIEKQITSFVKALDNNAYLSLTSIPGVGPVSAAGIIAEIGSIDAFSSNDKLAKFAGLTWTDNSSGKIVSENNELTRTGNKYLRYYITQAANSCRKHDSIYSNYYSKKFNESLTHKHKRALALTSRKFVKLIYSLLRNNQLYSIKRDNDQHK

SEQ ID NO: 484776 - protein, 411 aa, unidentified
METLVDRAGGLDVHKASITACVRLPGANGRRSKSTRRFGTTTSQILALVDWLASQGVSHVAMESTGVYWKPVYYLLEEHFELLLVNAAHMKNVPGRKTDVNDAEWIAQLLEHGLLRASFVPPPAIRELRDLTRYRKAQCNERTRAAQRLEKVLQDAGVKLSSVASNILGVSGRAMIEALIAGTRDPDALAQLAKGKLRPKVAELREALRANFRPHHGLIAAEILGHVDYLDGCIDRLTVEIGRVVEPFAQVIEVLDTIPGINRRNAEIILAEIGADMSRFPTAGHLASWAGMCPGNNESAGKHRAGTTRVGSSWLRTALVEAANAAARSKNTFLSARYRRLEARRGHNRAAVAVGHSILVIAYHLILNGEPYTDLGADHYVRHHTTEQEQRRLVRRLEALGQRVTLEPMVA

SEQ ID NO: 484777 - protein, 337 aa, unidentified
MSKITLIGIDTAKSVFHLVGIGQGNKYVWRRRLSRMKLLPALAQIEPCVVVLEACAASHHWARQIAACGHQARLIAPQHVKPYRRGQKNDYRDAEAIISAAVSPGMHFVGVKGVEQQAEQALHRVRSRLLSHRNAAANELRGLLGEYGCAFAKGHKALRQGAVDFIDRGEAEALGLSELIRDLLDEIDQIQQRMDHYERQIVHRVQQDETSSRLHDELAGVGPLSASALRVKVADARDFHNGRNFAAYIGLAPGHRGTGGEVTIGKLPRGRDRYVRQLLIHGARSVVNNLGDKTDPRSCWLRGIVERRSYNTACVALAHKNARQAWAILAREQVLAA

SEQ ID NO: 484778 - protein, 451 aa, unidentified
MSRRHPAPPRAAAQPCVNPNAAGLDIGSEEIWACVPEDRDPQPVRVFDTFTPDLYALADWLAACRIETVAMESTGVYWIPVYEVLEARGFRVHLVNARHLKHVPGRKSDLKDCQWLQYLHTCGLLRGSFRPEAELCALRAYLRHRATLLEHRAAHIQHMQKALQQMNVQLTQVLSDITGATGLAMLRAIVAGERDPVTLARFRDPRCARSPAEIRKALTGHYQPEHVFALKQALALYECYTTQLRECDAAIEQQFQALKPAWEDELPPLDPTDKRDSHSKNAPTYDARSLLYEVTGVDLVAIPGLNTGTVQTIVAEVGTDMTPWPSEKQFCSWLTLAPHHDISGGKVLRRYTLKTGNRAGQAFRLAAQSLSRSHSALGAYYRRMRARLGPKAAIVATAHKLARIVYHMLKHRTPYRDLSAEAYEQRARAREIATLRKKAAKLGLTLVESPA

SEQ ID NO: 484779 - protein, 368 aa, unidentified
MNSITYIGLDVHTTNYTICAYTIENDKIFAETNIKPDIKELDKYLKRLKELLGADISFVCGYEAGCLGYSLYHQLKEKGYECVILAPTTMPSTVNEIKTDKRDARKIAKCLAYGTYSKVFVPSDEDNAMKEYIRMRDDAKTMLKQIKQQIIALCTRHDKRFEGKSNWTQRHIKWLHDIDLGNAVLNETLAEYLVTLSQLTDKIERFDKRIEEIASQESYAENAKKLQCFRGIKTHTALSFLVEIGDFKRFPTAQQFTAFLGLVPGEHSSGENQNRMGITKAGNSHLRRLLVEAANCYSRGVAEKKSKTIKQRQQGNSPEVIAYADKANERLRRKYMKLALKRNPNIAKTAVARELACFIWGMMNDRIN

SEQ ID NO: 484780 - protein, 349 aa, unidentified
MSAKFNSEIAVIGIDIGKNSFHIVGLDRRGAIVLRQKWSRGQLETRLSNLPPCLIGMEACVGAHHLSRKVTSLGHHARLMPAKYVRPYSKGQKNDFRDAEAIAEAVQRPTMKFVATKTAEQLDLQALHRVRERLVSQRTGIINQIRAFLLERGIAVRQGLRFLRAELPRILATPHDVLSPRMVQVIEDLAGDWRRLDERIGRLSSDIEALAREDVSCERLMRVPGIGPIISSAMVAAIGGGDAFSKGRDFAAWLGLVPKQISTGDRTILGKISKRGNRYLRVLFVQAAWAVLIRPKSWDRHGLKPWLEAAKTRLHHNVLAIALANKLARIAWSVLAHGRAFEAIRIQAV

SEQ ID NO: 484781 - protein, 423 aa, unidentified
MSYRIAGIDVHKKMLAVVVSDVEVDGEYQFERVRYSSSPEHLRLLAEWLIAQQVEEVVMESTAQYWKPVWGALERYWKPSCQEREGAGPTSGTLHLAQAQSNRGRRGRKKDFPDAERLVKRLVADELVLSFVPDTEQRLWRTVTRRKYQLTRNHVRMQNQLEGLLEECHIKLSSLVSDLLGASARRMLKSLAEGETNPVALAVMADKNLRATQAQLCDALGACTELKPIYRRLLKMFLEELQFIDQQISKLDQELANLLSRHHDAVVHLAEIPGLGVDSAQQIIAEVGAGAATFSSAKQLSSWVGACPGEEESAEVSKSHRSPKGNRHMRRILNQAANAAAKSKGTIFEIVYRRLVSRLGHNQTIGAIAHRLCRLIWIILHRGVRYEERGPSVNAKTRRHRTNRMIRELRNLGYRVEPLVTTV

SEQ ID NO: 484782 - protein, 418 aa, unidentified
MTKSKSQKSKSVNNETMIVTLDIGKGSHYGYFRAPDGQEVEPFVFYQSYDSFHSFWKKLSRFKKAHGCRQVIVGFESTGPYAEPITHFLKQRPVTLVQINPMHSKRIRELTGNSPNKTDRKDPRVIADVIMLGHALRVVIPQGSSAHLRRLTQARERAIKDRTAMLNQVQHLVFVIFPEFLQVIKNISCKTGLYLLRHYPTRQAIAALGEEKLTTIIKQVSRGRMGQGHARELFHSAQTSVGINEGQDSIVEEIGHLIDKIARENDFIDRLQCQMRAHLEQIPYSSCLLSLPGVGLITVAGLIGEVGDFRQYRTVAEITKLAGLDLFEVSSGKHQGRRRISKRGRPLMRKLLYFAAINAVKSTGIMHQPYTQMVERGMPKIKALVAISRKLLRVMYALARDQSMYVEKSNNHRYQFAA

SEQ ID NO: 484783 - protein, 360 aa, unidentified
MINVGIDVHKRRCQTCLKDEKGRLIEELSIPNTTQGAEQLARILTTYGEAKIVLESTGNLWTRLYDTLNQHAPTFKVVLANPNKTRIIAEAKIKNDRMDARVLADLVRADLVAESYVPNQEIREQRALLRQRRSLVNDTVAVKNRIHNQLDKYDLRCEYSDVFGKQGLEWLRNLQLPPIERTILDVNLKQLQNLEESIHALTVKIAQEAINRPDVKLLMGFTGIDYYSAMLLLSEIGPITRFPSAKKLVSYAGLAPGIRQSADHTIHGRITRDGNRYIRWILIEAAQNASRFDPKLRPFYLRVAARRGHQKAITAVARKMLVSIYHVLKRQETYHGQRDELLERKINRLQRTVDTSLQAE

SEQ ID NO: 484784 - protein, 427 aa, unidentified
MRKNAYRATAVKSVQVTEVISQLSEGAAVMGLDIGKHAVFAVIRDAAGNFQRPWKVRHPQDVHELVKRAEAISRERPLLIAMESTGTYGDPLRQALTNAGLQVHRVGSKATSDYKEIFDGVPSAHDGKDAAVVAELAAIGKSSPWPMREASPEDAEMASQVAWLDTQQDILMLWIGRLEGVLARFWPELTKLLELNSGTLLRLLAHYGSPEALAADPEAASQLARWGGHLLRAAKIAAVIDSARTTIGVPMQPSAVALVQKCAQEALNARQQIREAKKKLETLSKANKVIESMAEVVGTTTACVLRVTVGNPQDFHCGEAYRKAMGLNLKELSSGKHRGKLRITKRGPSLARRWLFFAALRIVQKSPVRRWYEAKKAKDQDRGIGAVVAVMRKLALALYSVAVRGEAFSLDRLFPGSPPRRVALLSG

SEQ ID NO: 484785 - protein, 387 aa, unidentified
MYAGKDIIVVLDYHAENIEYRWFDAQSGEERTGRYPTTAAALEAQAQEALRQAGAERGVVWIMESTTGWARVKELLGPRVKFVLSNVLQMPLPPKAHRRKTDKIDTARLLREYLHGALPTSFQPDSWWRQVRRVVDGRQDLVERQTALKNWISSLLHHETWQERANLWTARGLQRLRALELAATDRMLLEVKLEQLRHLAQLQEQIEAQMRQIYDTWPEAQWLDEIRGIGMVTAVSVLAHIGPIARFPTAEDLISYAGLAPGVRESDQTCHRGRIGGGGTDEHLRYLLIEATTWLRQIPRYRPAYERVSKRRGPKVARIVLARMVLRSIYKMLRERVRFHPLATAEGRRRPAAAVPTDVRPVGPARRRSPAPPRAIVRGQRSHTKTR

SEQ ID NO: 484786 - protein, 376 aa, unidentified
MITCFIGSDAHTTNYTLSTAIDAEDKPFNTCKYAPKLTYILKYANALCKKYNLKKEDILLGYEAGCLGFKLQRDLNENGFNCVVMAPSTIPGTAINRRKKTKNDIRDAEAIAKALRNDDYSSVATPDEEDEAIREFIRAREDVRMELKRCKQHIMAFCNRHGQHYEETGWTQKHMKWLNNLAFSQPVLKETLNSLLLEYEYLTEKLEEKDRRIEEFAQMDKYRESVHKLTCFKGIKTLTALAVIVEIGDFARFMKPKNFVAYLGLSVGEQSSGNDHNQTGITKQGNRFIRKLLTEAAQCFSRATSKKSKELKKRQEGNVEEVIAYADKANERLRKRYHHLVIHNMKSPNKAKCAITRELACFIWGMMTDNIHTVLV

SEQ ID NO: 484787 - protein, 349 aa, unidentified
MEQNEVILGVDTHLDTHVGAVISDTGRLLGTLSVSTDTAGYLDLLSWANSFGPLRRAGVEGTGTYGAGLARLLRDHEIEVLEVNRPDRAMRRSRGKSDPTDAENAARAVLSGRATAIPKEQSGAAEAMRAVSVARRSAVKAKTQAINQLRALLVSAPQEIRERLLKAKTAECVEGCARLRSLGKTPMLQTLTTTLRLLAKRWLTLAEELKALDSMLESLTSRHARRLRERFGVGPQTAAVLVAVAGDNPERLKSEAALAALCGTSPLQASSGKTVRHRLNRGGDRSANNALWTIAMVRMRSDPRTRAYVERRTKDGMSNKEIHRCLKRYIVRELHPLILADLADSTLAT

SEQ ID NO: 484788 - protein, 341 aa, unidentified
MKQEMNVLGIDIAKRVFHAVGMDNTGNVVYRKRLSRHDLMPFIAKLSPVRIGIEACGGAHYWARRFRAYGHEVKLMAPQFVKPYVKSNKNDSRDAEAIAEAVTRPTMRFVPIKDVDQQDIQALHRVRERLIGERTALVNEVHGLLHEYGIVMPKGVAKFRQAVVGKLESEKDKLTPLSQEMFWKLVEEFAALEAQLAYYQEKLEALAQTHPECQRLMTIPGIGPLTATALVAAVSDASAFKNGRQFAAWLGLVPRQYSTGGKERLLGISKRGDSYLRKLLVHGARTTIRWVGRKTDRRSQWIRQLVERRGKNRTAVAVANKNARIVWALLTSHQAYELAKG

SEQ ID NO: 484789 - protein, 350 aa, unidentified
MTTLTANDVVVTGGVDTHQDLHVAAALDQLGRVLGTHAFPTTVAGYRQLLAWLGRHGRLDKVGVEGTGSYGAALARHLTGAGVEVMEVARPNRQVRRRYGKTDVVDAIAAARAVLSGEATGTPKSHDGPVEALRTLTAVQRSGNKARTQALNQIHQLLVTAPEELRARLRPLTRKDLLATCAGFRIAADDDSLQAMTRLALRELAQRVLHLDEQLAVVTKRLHRITADVAPKLVATTGVGPAVASALLMTAGDNPHRMASEAAFAALCGSNPIPASSGKTNRHRLNRGGDRNANAALWRIVIVRLACDERTRQYLARRQAQGKTKTEAIRCLKRYVAREIFNAMPSPVAI

SEQ ID NO: 484790 - protein, 342 aa, unidentified
MYYIGLDVHKKTISYCVKDESGRICQEGKVGATRWELDIWIKTLPQPWTVAMEATIFTGWIYDHLKPHAAAAKVAHPLMLRAIAAAKKKNDSIDAAKIADCLRCDFLPECYMAPTEIRERRRMLRYRHLLVRQLVQMKNRVSGLLMETGVSHNKQRLHKVGYFPELLANADAVSASIRPLLLLSRESITRLQRTEGAIIRSLQRDPLLAERVRRLQTIPAVGKVTALSWALEMGDISRFRSIRQAISYCGLCGDEKRSADKVARTPISKQRNKHIQRVLVEAAKLAPRRNPDLALVYENARQKGNANCATLAVARKLVAYLMVVDREQRDFEPVRGLAGIAA

SEQ ID NO: 484791 - protein, 424 aa, unidentified
MKLVYPICCGVDVHKKVIVATIVSTDNVGVSTYQQKSFSTINCDIEKFHKWLIESNCYHVCMESTGKYWIPIFNYLENDIDVCLTHPKYVKAIKGKKTDKKDSKWIADLYKFDLVKNSFIPPKEIRELREISRYRFKLVCMKSSEKNRIQNSMTVSNIGIANILSDPFGKTATEIISYLLNHTSESFDEKACRKLIKKGAKAKSDEIINAINGYTIEPDQRLKFELARGHLDYLDEMITKTEVELYIRIKPYWKLVELIAAMPGMTEISATLILAEIGADMSVFEDAKHLTSWAGLAPSNNESAGKKKSIRIAKAGQYIKPLLVQCSLAAVRCKKEPYFAIKYQHIKKRRGHKKAVIAIARMMLVCIYHIISEEKSFNPTDYAELMDPHSHVDKVTLNEANVFAYLQEHGYDISLIMKNCNDNY

SEQ ID NO: 484792 - protein, 346 aa, unidentified
MRNSNTIGVDLAKNVIQVSVVTPANKELSNKELTRTKFAEFLAKQKPGLVAFEACATAHHWARLATTYGHQVKIIPAMAVAPFRQGHKTDKNDALAVAEAANRPNIKIAPMKSIDHQAMQSIQRSRELIIQERTATSNHIRGLLLEFGIAIPKGLVYLRKHVPLILEDAENGLPMSYRPTLHRMFMRFHATEEDLAFMDEQIKQIVKSNDGCQRLTALEGVGPIGAILLFATLGSGEAFKNGREFSAYIGLTPKQYSSGGKTNVIGISRHVANRRLRAVLIQGARSYVHKRKQAASAKDEWLLDLVARGGTGKAAVALANKNVRTAWAMLTQGTQYNCKPCLGNSA

SEQ ID NO: 484793 - protein, 409 aa, unidentified
MQVVHPRCAALDLGKDVLVAAVRLQDATGISRECRTYGTTGHQLVALSSWLESEGVTHVVMEATGSYWKAVWHVLESRFELTLANPAHIKNLPGHKSDVNDATWMVDLHAHGLIRGSFVPPPEIGALRELTRTRKQFVREINRHTQRIQKTLDIAGIKLTGAISQVLGVSGRAILAALVAGETDPKKLATLGQPRLKASRDRLQEALEGRLTTQQRRLLGMHLKLIQTLETSIAELDAEIAKAVTPFQGIVERLHEVPGLSEINVPALLGEIGIDMSRFATHGHLLSWARVCPRLDESAGKVHSTRTMKGAVWIKELIIQAAWAAIRTKDSYLRAQFLRLRARRGGKKAIVAVAASILTIVYYIIRDGTPYRDLGINHFATRDRARAARTLVARLKQLGYNVSVTAEVA

SEQ ID NO: 484794 - protein, 408 aa, unidentified
MNTLYVGIDVSSKSNVVYLMLPNGDKHSNFSVANSHEGSTLLVKKIYSALTSHSLDTVLIGLEATSVYGVNLVYFLREDATLAPFNRKIHVLNPKQVKKFHDTYNDLPKNDYVDSFVIADCLRFGRINKEVYMGEYRYKALQNLTRARFFAVQNLVKEKQRFMNVLFKKYSTMTQEKVFSDAFSTTALAVYDEFESAEALANMDLHELTDFIIEKGKNRFPDPDAVAKAIQKAARSSYRLPKTVNDSVNQVLSISITSMKALESQIKEFDKAIKALMELLPNVLISIPGIGPVYSAGIMAEIGDINRFDNQASLTKYAGLAWKQHQSGGFEAEVTRLIPSGNRFLKYYLCEAAFSLVRCDKEYSDFYHLKYKEVNRCQHKRALALTARKFVRLVFRLLKDNRLYCPAK

SEQ ID NO: 484795 - protein, 478 aa, unidentified
MALQWLCGVDCGGQEHLACFSDLSGKPLLRKTLRHATGELYHFAQELSKQGEGLVVIEGRRGLSAALERALEEAGVNCVQADPARLRRFRDEVLAQANKTDLDDAQAALEYGRMLADRLRLLPCQGEDEVVLRALSRQRDQLEAQRITALHHLRECLRQYAPEVLSDRVFFHLDCQSALALWERYPLPQQWRRLGEKRLRAFLARYAAKGAEARARKLVGLARQHRPGLADEALASSVSLWAAQVTLLQRQVAEIEIKMEQVEAHHSPAQLLRQIPGVSTVTIAALLGEMGEVVRHGERAVAAYSGLGGQVHQTGTTLNTQRRRRRVNRRLKRAFMDLAWHLVQNQAEAAAFYARRRAKGRTHWQALRSLARQLIRIVVRMLNQGESFRRTEGGPYLPEELKYLRGKQERERYLADGFGKLTIKEKTSAEGLTRSGRVHRDPGGDSLSRLRQSSREGARILVYVQPEATVPGLRSLQH

SEQ ID NO: 484796 - protein, 339 aa, unidentified
MKNTKYYVGLDVHKEKTSYCVRDKLGNILTEAEVATLYSELEPRLKTYLAASMIGLEASTSYYTLYQNFLRNNYHIKVANTIQLRQLIAKNDKLDAQRLSEMLRLGTFPCSYIPEEKIQHLRSMVKMRHALMQEKVRCNNRIQAFLDRNGVVMPPVKAFCKKWKHALMQYIGSGKASMELRYEYDHYVYLEKKNEQADQEIIGYTKTYWPQEYNLLRSITGFGTLFPCYIIAFVHPIERFLSNRKLRRYAGVIPVAKESGDTVSRGHIPKTSSNALLRWVLVQAANTVGKTNTSLGRYYQRKKNQKKNTGVAKIAVASTLVDIIYKVLTTKKPYKSSAC

SEQ ID NO: 484797 - protein, 370 aa, unidentified
MHNSTTLYVGLDVHKDSIAVAYVAQEHGAEVTYLGTIGTRHIDIDQLVRTLQSKAKHLVVVYEAGPCGSWLYRYLTQKGYDCWVVAPSLIPKKAGDRVKTDRRDAVQLARLMRSGDLTPVDVPKVEDEAIRDLCRAREDALHDLKAAKLRLKAFLLRHDIRSTGQATWNPAHLRWLSAVVCPTPAQQIVFQAYVRAGNEHTERLQRLEQELHEQVTSWRVHPVVEAFQARRGVQCTVAVTMVAERGDLTRGDHPRQLMKFLGLLPSEYASGERRQQGSITTAGHTHARRALVEGAWAYRYPANVSRHLQRRLEQQPKAIQDISWKAHVRRCQRYRRLMARGTHAHQVVMAMARELVGFMWAMAHQVPVTP

SEQ ID NO: 484798 - protein, 372 aa, unidentified
MNANGITWVGMDAHQNSIKVAALFPDRPEVVQWSEAATPEAVRRLARKLRREAPGEVRCCYEAGPTGYALHRQLEAAGVICEVIAPSLTPIKPGSRIKTDRRDARKLAELLRAGLLTEVHPPSESEEALRDLCRCRDDARTDLLRARHRLSKFLLRRHCIYRQTKHHWGTRHVAWLEELRFDDAVSQSTFDSYFLSVQQLEERLRQLDARLAEYGGQEPYREPVAWLRCFKGIDTVTAVCLVAELHDFRRFRSARELMSYVGLVPSEHSSGERERRGSITKTGNRHVRRLLVEAAWHHRHRPALSAPLRRRREGQPARVLAIADRSQERLCARFRRMTSRGTCQPKTIVAMARELVGYLWAVLHPATAAVHN

SEQ ID NO: 484799 - protein, 339 aa, unidentified
MEKFAGIDLGKEALNFHVVDGTGASVRHGRTSATPQAVVSALSGLSLTRVGVEAGPYGTWLVEGLCRSGLPGMLIETRRMKQLSKHSKVKTDARDAEAIALAMRCGMYTPVHLKSASSRQVRTLLQARTTLVRSRQALQNSVRGLLKDYGVKLKRQSSRLLEEAVRQVLLELDEPVRLAIEPLLVSIATLRHQQAELDRRVRRLAKADPVVRLLMTVPGVGPVVGLAYRATIDDPQRFQDSSHVAAYLGLTPSQYSSGQTDRTGAITGQGDKLARAYLYEAATVILGRLRRPCALRDWGLAVVERRGARRARVAVARKLAGLLHRIWVTGKPFDWRPAA

SEQ ID NO: 484800 - protein, 386 aa, unidentified
MQKLNDLSRSPSPLDPDGTLIAVIELSLSSWLVAGIVPGVERQPLKKLAVDESALLKLLHRWREEAAKAGHRIKRIAVAFEAGRDGFWLARWLSAHDIEVHVIHASSVAVSREHRRAKTDRLDTSLLKRSFLGWLRGERDHCKMVAIPTIKDEDAKRPNREHENLVGEQSRIVNRMKAALIRLGIRGFNPKLKKAAGRLEDLRTPEGEPIPPNILAELRRDMERRRLISDQIRQIEAARLERIEQAPGDGPNAMVRLLARVIGVGIETADMLVQEVLARNMRDRRAVARYAGLTGSPDESGIKRREKGLARSGNARVRRGMIQLAWRFLMFQKESALAQWFRARTESARGTRKTMIVALARKLMIALWRLVREGVVPDGVVLRPAQ

SEQ ID NO: 484801 - protein, 342 aa, unidentified
MVTPVRIGMDTAKSVFQLHGVDENEVVVLRRQLRRADMIRYFENLPPALVAIESCGSSHHWARLLESFGHEVKLIPPQYVKPYVKRGKNDAADAEALCEAVTRPTMRFVPVKSKDRQAACMLMTVRERLVMVKSQLSNAFRSYAAEFGIVGPSGRQNVSGLIARVLEDDTLPELARELFQFQAKEYAAVEARLAEIDAKLMKWHRADELSRRIATIPGVGPIGSTLLSMKAPPAQTFGSGRDFAAWLGLTPRDHSTGGRSRLGGITKAGDPSIRSTLIVGATALLRHVRLGHTKPSPWLARLMERKPPKLVAVALANKFARIAWRLMVSGGVYIRPAALNPT

SEQ ID NO: 484802 - protein, 327 aa, unidentified
MMRQPVSHTPKIKTQVALDVSSKVLDVYFKTDGKAFSVPNSEEGLSRILKSFKDYDVSLVLMESTGGYEDLAASFFQSNGFDVAVVNARHARNFARAMGKLAKTDRIDAAILADMAFMIDASNDRDRYIKPLTDEQRKRLSVMTVRRRQVVGLISTEKQRLTRADDWTRASIKKTIKALTTELRHIEHQISDHVKKNFVDLSKMLLSIPGIGEQAMAILIGEVPELGKADRRTISALIGVAPFNHDSGNFRGRRRIWGGRQSVRNVLYMGIISATRFNPVIRSFYNRLVSAGKPKKVALIACMRKLLTIINAMMRTGQPFDVALHGV

SEQ ID NO: 484803 - protein, 369 aa, unidentified
MQENTNVATLVDLRKRKPVGRMTIGIDLGDRRSHFCVLNEQAQVIARGFLPTTITAFRREFESLPPCLVAIEAGAHSLWANQVLKVCGHDVLVANPRKIRLITESDRKSDRVDAESLARLARADRLLLAPIQHRTQEKQVQLSVIRARHVLVRSRTALINCARGLVKPMGLRLPACSPEAFPKRTATTSLPEILRVALAPLLKQVEAVNQAIRDYDRQIEQIATTQYPETYLLKQIKGVGTLIALTYVLTLEDPHRFSKSRDVGAFLGFLPREKQSGERAPRLGISRAGNEYLRTLLVEGAHYILGPLGPDTDLRRWGLQLAARGGGGAKKRAVTAVARKLSVLLHHFWKTGEVYEPIRKTPLAEIPAA

SEQ ID NO: 484804 - protein, 374 aa, unidentified
MEEVSTVFVGLDVHAETTAIAVAHVGREAPRFVGTVGARLGELLKALGKLGEPSTLLIVYEAGPCGYALVRELRVKGYRCEVVAPSLIARKPGERIKTDRRDALKLAAQARSGDLTTVSVPDECDEAIRDLCRARVDAVRARLKARQQLKAMLLRHGRRYTGKTSWTAAHERYLADLGFAHPAQDIAFTEYRLAVSEADARVQRLTQALAQQIESWRMLALVHALMTLRGLDLVAAATVVAELGDMRRFAHPRDLMGYLGLVPSEHSSGTTRRLGAITKTGNGHARRVLVEAAWNYRFPARISRILQVRQEDQPAAVRAIAWRAQLRLCQRYRRLSARGMQPNKVCVAIARELAGFVWDLGRQVPPQAPVIPQH

SEQ ID NO: 484805 - protein, 320 aa, unidentified
MTILTSPTVIGVDVAKAEIVVYREDLKIIQAINNDRTSVGHWLKTLPAQSSIALEATNLYHLDTAELAHGMGHRVYIVDPYRVSHYRESIGQRAKTDPCDARLLARYLTSEQHRLRVWNPPPRHYTVLKSLLNKRAQLMKVRVSIKLSWSTEPLLEDLLADGLKHFKQLDQAIQELLRKVSQEAGISENIRRCKAIEGVGELTATGLATTYMRGEFASADAFIAFLGMDLKAKDSGKKHSPRHLSKKGDGELRRLAHNAAMAACRSPVWKPFYESYLARGLARTQALVILARKLCRVAFALMKNQSEYQPNLRLQGSPAT

SEQ ID NO: 484806 - protein, 375 aa, unidentified
MIKLRFVGLDVHADTIAVAVAEPGGEVRSIGTIPNRLESIRKMIGKLGPVKDLRACYEAGPTGYVLYWQLTQLGVECQVVAPTLVPVKAGDRVKTDRRDAEKLARCHRGGDLTAVWVPDEAHEALRDLVRAREAAKKDQHRARHRLSKFLLRHGRRQPDGMTAWSKKHLEWIQAHVHFDQPALEAALQDYFHEVEHAAARVARLEKSLDEAIRQAPEQIRAVMEALQALRGIAQLTAATIVSEIGSFSRFEPRKLMGYSGLVASEHSSGNRLKRGAITKTGNAHLRRVIVEAAWSYQRRPWIGGYLLRRQRDLKLTEEVREIAWKAQYRLHKRYAKLTSGGKNKNQTVTAVGRELLGFIWDIAVRTERQYQQRAA

SEQ ID NO: 484807 - protein, 350 aa, unidentified
MLIIGCDYHPGFQQIAWVDDETGEFSEQRLAHREEAEQFYQQLGQRRVAVRVGMESSGHSRWFERLLHDLGFELWIGDPAEIRTKRVRKQKTDRQDAQLLLRLLMEDRFPRIWVPDAENRDLRQLLWHRHRLVQMRTRVMNQLHVVPLNEGLRRKKALWRPAGRKELESIALAPWASRRRQDLLELLDQLTPKIQELTGALEEEVGKRPVTRQLMTHPGVGPLTALAYELVIGTPERFGCGKQVASYVGLVPTEASSGERRRLGHISKQGNVLLRFLLVEAAQVTVRSQPEWRSKFFHLAMRRGRKIAKVAMARKLAVHLYWMWRHGWDYGQFHKLGSHAGVPGNPDGEQ

SEQ ID NO: 484808 - protein, 313 aa, unidentified
MKPLTTIGIDLGKNTFHLVGLDRNGAIVLRQKLSRRQVEARLANMPPCLIGMEPCVGAHHLSRQLKAYGHDARLMPARYVRPYSKGQKNDFRDAEAIAEAVLRPTMKFVAIKTVEQLDLQALHRVRERLVCQRTSVINQIRAFLLERGIAVRQGLRALRRMLFVQAARAVLLRPQTIISTATVAAIGRGDAFSKGRDFSAWLGLVPRQMSTGGRTILGPISKRHQDGASPYIEPRSRGSCHGLKSWIDAAARRLNRANARHGHEALGSVILFGQRFDLIAIALANKIARIVWGVLHGGRNFDIGPMKLASQAA

SEQ ID NO: 484809 - protein, 411 aa, unidentified
MTKTLLVGIDVDSKHNECCFLDQEGNSTEKIFSVSNNLPGAQELEDKVVATMKKHGFEQLKIAAEATSFLDLPLVDYLATSETLRTYNPTIYQLNPRIVRGLKKAYADMDKVDPVDAFAVAERLRFGRLPEPYEEHQPYLPLRRLTRFRFHIVKDITREKNYFLIHLFLKFSSYKSVKPFSDTFGATSQAVITEFLSLDEIASMSMDDLVSFLMKHGKNKFSDPTEVADKLKKVARESYRLRPALASSVNLILAMSLKNIRALEKVRREVDKVIEKEFAAFPNTLQSVKGIGPVYSAGIYAEIGDIGRFRTQSKLAKFAGLTWRKRSSGEFEAEFTPMTKTGNEFLRYYFIEAANMLRIHNEEYKAYYRTKYAEVTRHRHKRALALTARKLVRLVFALLKNNQLYQRSQEL

SEQ ID NO: 484810 - protein, 341 aa, unidentified
MKNLFIGVDFSKEKVDVAIIFADGLTETAARVFNEFKTTVSGYKQLVKWVEQNSCGIDSSLWLFCGENTGDYSKGLCNFLYGKGYDMWLENAKSIKDASGLRRLKSDRADASMIAEYAMRNYDKAIMYEPLSESLAQLRELFLYRQMVVRHRCSFQVRRGEKRLTMEKSPIKTMISQSGRHIVSELNKEVEKIDKRIAELIKSDEELTEVFTIVTSVPGIGTQNAVCLMVYTDNFRRFNYDSRKIACYYGIAPFGNDSGTSVHSDPRVHYMANRQIKAMLTQAALAAVNFNPVMARYYMRLVERGKKKQVALNNVKNKLVHLITAMVRNRQLFSPEYKISA

SEQ ID NO: 484811 - protein, 341 aa, unidentified
MQTIKYFIGFDISADDFSASCITSPDNLVFSTQKFSNSIDGANELLSLLSKHNIKQSESIVCMEATGVYSESISYFLASKGFAISIEAPHKIKNKTKDSPRKNDFIDALAIAEYAYRYFDKLPIWKPGNEILQQIQVLLTTREHLSVQMIANISALKTLKHKHYQTPLANRIYEQTINKLKEHIKLIDLEIKTLIDKDDSFKNKISLAKSVPGVGLLLAANLLVLTNGFTEHLNYKHIAAYSGICPYEQVSGTSLHKPPRSKMCGPAKIRKLLYLAALSVRTHNQNFKKYFLRKLAEGKNKRLILNNIENKLLKIICAVVNSGTAYTENYKTINPELIKTA

SEQ ID NO: 484812 - protein, 341 aa, unidentified
MNTAPNQWFVGIDVSKLHFDAALMVIINYQKGPILTQRFENNTRGLKSFGKWIKSHGAKAGPETLIVMENTGIYHRQLWGFCSREGLAVHIGNAAHIKWSLGITRGKDDVTDSIRLCRYAAKEAESLKAAPALNPALIRLKDMQTSRTRLLSQVNANLKYLRELKNISDKSAQNVLEGAYKTAIAGLRKSIKALEGEIKAILKTHEDLNRNYRLLLSVPGIGHITAVYLLCCTCNFISRPSGKQLASYAGLAPFIRSSGSSIRGKAKVHKMANKELKALLHMGARSVIQNNAEMRAYYERKTGEGKAELSVVNAVKNKIILRAVAVVNNQRPYVKKASIAA

SEQ ID NO: 484813 - protein, 360 aa, unidentified
MAKINLSRIASFVLGFEKTKFWIGVDVHKNSYSIALRRTDNDHLTWTSPASPKLVVDQIKRFNIRVGAVAFEAGPTGFTFARALQSAGINVIVAAPSRIPRPVTAGAKCDRLDCIKLSDYAARGMLKSIAVPSIEDEARRALLRRRHAVVDSIRRCKQRIKSQLLYLGLKAPKEISRWSKGTATALRKVPMEPCSRLTLDSLLRELDFLTTELRQLERELLAAVKDRVSHSRMSYLKSVPGVGPVVAASFALELFRPERFKKADQVSSYLGLAPMVRQSGLKRSSSRLVPVGQSRLRSLLVEAAWAWKSKDPYAAALYNRLVGRTGIAQKAICAVARKLAIILWRLIIEQRAYRPQQVAA

SEQ ID NO: 484814 - protein, 430 aa, unidentified
MKFNTQNAKIKAITETTLVLGIDVGSETHYARAFDYRGIEYSKKPFKFSNDEAGFVTFKAWILDIKEKHGKDKVVPGMEPTGHYWFNLGKFLQDNEMKPVLVNPHHVKKSKELDDNNPTKNDRKDPKVIAGLVREGRYMIPYLPEGVYADLRTASNMRFQLQAELTRIQNRISRWFNIYFPEYKTVYGQPDAKSGMLILKVAPLPEDIMMLGIDGVNQIWRDAKVRAVGKARAKTLIEAAEHSVGSKEGEISARMEIRMLLEDYESRNTRLQEVVALIEELVKKIPMAEKLLEIKGVGIKTVSGFLAEVGDISRFNNPKELQKLAGLALVENSSGKHKGEITISRRGRKRLRYLLFEVAMSLVSKNPEFRELHSYYTTRKLNPLKKMQSLMAVAAKLLRVFFAMLTKGVDYDPKKLVGDIKRPAVYLQVA

SEQ ID NO: 484815 - protein, 406 aa, unidentified
MLFVGDDWAEDHHDVEVQDEQGRAVKRARLPEGAAGVARFHEVVASFLPEDAEPVEVLVCIETDRGPWVRALVAAGYQVFGVNPRQAARHREVMGNSGAKSDKADAHALADMVRTRRHQLRQIAADSDEAEAVKVVARAHQTMIWERTRHMLRLRSALRDYFPAALAAYQPLGLTSTAALALLAKAATPRAAARLTVTQITTALKGYRDKSAKAAAIQAELRAEHLAQSDLVASAYAATVAATVAVLQTLNTQIATLEGQVEAHFGRHPDAEILLSQPGIGAILGARVLAEFGDAKDRYASAKARKNYAGTSPITRQSGKSKTVHARFIHNDRLIDALHMQASAAILHDPAVRAYYDQLKARDVSHNAALRQVGNRLVGILHGCLRTHTRYDQATAWPHRQNDLAA

SEQ ID NO: 484816 - protein, 367 aa, unidentified
MKRPTVHHDGATSPEAAITRVNNVRSTIKLGLDIHARLYVVAAQYDGSLPKPPRRFAPEDFLPWVRTLLAQGHTVHVVYEACGFGFGLYRELVKAGAHCYVIAPQKLDEQRTGVKTDNRDANTLCQRLSRYVDGNTRELAVIRVPSEEEERRRHLSRQREQLVRHRQKLQAQGRGLLVNHGLPAPAHWWMAQTWSRLHSHLPPWMAVLLETYRPALLALHAQVLKLSKILEEMTPQPAPRGLGKLTTTVLTHEVCDWRRFKNRRQVSSYTGLCPGEYSSGSKRVQGSVTKHGNPRIRSALVECAWRMVRFQPQYPPVKKRLWLLAKGARATGAQRKKAIVAVARHLAVDLWRLHTGQASAPKLGLEL

SEQ ID NO: 484817 - protein, 343 aa, unidentified
MDQYIGLDVSLKETAISIRQDGKRIWRGKCASDPKLVAEMIRKHAPHARRVVFETGPLSTWFYHELTKEGVPAICIEARHAQKVLNETLNKTDANDADGLGQLAETGFYKAVRVKAFDSMLTRTLVAARNQLLNISTQLSNQIRGLMKTFGLIVPKGTGRVFDGNVRQLLNGNDGLAKIILPLLEGWRDIRMRAADLDRQLVAVARESQATKRLMTIPGIGAVTAVSYVAAIEDPDNFKTSRSVGAWLGLTARRYQSGEVDYDGHISRRGDPHLRGLLYEAATVILTRTSAGNESRLKSWGLKLRERLGFKRAAVAVARKLAVIMHSMLKTGDVFNRSAGAPA

SEQ ID NO: 484818 - protein, 334 aa, unidentified
MENIALIGIDLGKNSFHIHCQDHRGKAVYRKKFTRPKLIEFLATCPATTIAMEACGGSHFMARKLAELGHFPKLISPQFVRPFVKSNKNDFVDAEAICEAASRPSMRFVQPRTESQQAMRALHRVRESLVQDKVKTTNQMHAFLLEFGISVPRGAAVISRLSTLLEDSSLPLYLSQLLLKLQQHYHYLVEQIKDLESQLKRKLDEDEVGQRLLSIPCVGTLTASTISTEIGDGKQYASSRDFAAATGLVPRQYSTGGRTTLSGISKRGNKKIRTLLVQCARVFIQKLEHQSGKLADWVRELLCRKSNFVVTCALANKLARIAWALTARQQTYEA

SEQ ID NO: 484819 - protein, 338 aa, unidentified
MDHVAIDLGARKSQICVRNGAGEIVEERRWDTWDLKRYLAERPKSRVIVETCAEAFGVAALAKELGHETRIVPATLVRTLGVGARRTKTDQRDARALSEVSCRVDLPSVHVPKAESRERKSFCGMRDALVGARTKVINTVRGWLRGQGRRLGKGSRATFTARVRAVCGAELPGYVERQLRVVEMLTVDIDEADKELEAQAEQDEICRRLMTVPGAGPLTALRFVAGIDDVSRFPNAHQVESFLGLVPGESSSSERQQRLSITKAGPPALRWVLVQAAWALRRSRQPTAVPLQLWAHRIELRRGKRIATVALARKLAGILYAIWRDGTEYDGARGAKTI

SEQ ID NO: 484820 - protein, 309 aa, unidentified
MEIVVGIDVSKDRLDVHVWPSGEAFAVPRHHAGLLELQARLDGLGPARIGVEATGGYETVVAASLAGQGHPVVVVNPAQVRAFAVALGQRAKTDPIDAAVIARFVAATRPEIRPLPDAATQLLADLVARRSQIVAMIGAEQQRRKRTGERRLLRSLDRLVAALEKELSHVETAIDDAVRGSPAWREKEDLLASVPGVGPQTARRLIADMPELGALDRRQVAALAGLAPFTRQSGRWRGRSVIGGGRASVRSALFVAAMVAARHNPVLKAFADRLKAAGKPRIVALVAVARKLLTILNAVLRDKTPWRTT

SEQ ID NO: 484821 - protein, 352 aa, unidentified
MTVTNLPRSITGGVDTHLDVHVAAALDDRGTLLGVESFATTESGYKKLLSWLSDFGSVELVGVEGTGSYGAGLTRYLQGERVRVVEVDRPNRQRRRLKGKSDPQDAISAARAALSGEAAGEAKTRDGNVESMRVLRVARASARKGRTQALNQMRNLVSTAPDPLRAELRGLSVFNLLERASAYRPGVKRDIVSLTKLSLRILARRALTLEEEITEIDAILKPLVKETAPELVATLGIGTDAASALLVAAGDNPERLHNEAAFAHLCGASPLDASSGKNQRHRLNRSGDRQANSALWHIVLTRMVYDPRTTKYINRRRTEGLTKKEAVRCLKRYVAREVFSLLPHDKLGLDSP

SEQ ID NO: 484822 - protein, 364 aa, unidentified
MSSVSHRSLTHLGMDVHKDSISVAILRPDDSMDVEKLFHDEDSVRRFIARMGDPRQLTACYEAGPTGYELSRQLERLGVRCRVVAPSLIPKASGDRVKTDRRDCRRLARLDRAGELVAIRVPSPAEEAVRDLCRARGDMVIDLDRARRRLGAFMLRHDRVWRGGSNWSLKHEQWLLAQRFDDPALTATFSQYRSVVEERRLRLVAIESDLLAYCDQDPYTEAVQRLCCYRGVDRLGALTLVSEVCDWRRFAKASSFMSFVGLVASEHSSGQHVHRGHITKAGNEHLRTQLIESAWAYQRGPYVGTRIAKAQEHCGTETRERAWKAQVRLCGRFRRLAARKNVKSVVATAIARELAGFLWGEMTA

SEQ ID NO: 484823 - protein, 386 aa, unidentified
MQKLNDLSRSLTALEPDGTLIAVIEMSLSSWLVAGIVPSVERQPLKKLAVDESALLKLLHRWREEAEKAGRRIERIVVAFEAGRDGFWLARWLKARSIEAHVIHAASVAVSREHRRAKTDRLDSELLKRAFLGWLRGERDHCKMVAIPSIEDEDAKRPNRERESLVGEQSRIVNRMKAALIRLGIRGFNPKLKKAAGRLEDLRTPEDEPIPPNTLAELRRDMERRRLVRDQIRQIEEARLVRLDHAPSDGPHAMTRLLARVIGIGIETADMLVHEVLSRNMRDRRAVARYAGLTGSPDESGRKRREKGLARSGNGRVRRGMIQLAWRFLMHQKNSALAQWFRARTENARGTRKPMIVALARKLLIALWRLVRQGVVPDGVVLRPAQ

SEQ ID NO: 484824 - protein, 314 aa, unidentified
MSDLMNVGIDVSKDTLDVCTSANEVFTCANDPEGIESLVKRLKARPIERVVLEATGGYEAPVVAGLAAAALPVIVINPRQVRDFAKASARLAKTDRIDAAVLVAFAHAIRPEVRPLKDTQTRALEAVLTRRRQLVGMLTMERQRLPMASALVRKELRTHIAWLIKRIKDSDRDLTGLLRASPLWRERENLLGTVKGVGQQTILSLCASLPELGRLNRRQLAALVGVAPFNCDSGALRGKRRCWGGRAHLRAVLYMATLSAAHRNPVIRAFYQRLLGAGKPKKLALIACMRKLLTILNAMVRDNAAWAPDLHNSA

SEQ ID NO: 484825 - protein, 307 aa, unidentified
MGVCVGIDVAKHSLEWSVGSEGQIEHTRNEPRPIAGLVRRLAALDPERIVVESTGGYERRLVAKLAEAGLPVVVVNPCRVRRFGQGMGVLAKTDALDARLLAQFGEKVEPPIRPILQGRDRLLADLVARRRQRVALIVAEKNRRETACEAVLRSIRTVLGMLASELAALDQRIEKELLADAERAELHELLQTVPGVGPGVARTLLVDLPELGRLGRREIASLVGVAPFARDSGTFRGVRRVRGGRASVRTALYLAAMTASRFNPVLRDLYERLRRTGKPPKLAFIAVARKLLTILNAIARERTAWQA

SEQ ID NO: 484826 - protein, 321 aa, unidentified
MRVYTGLDLSRKRLDWHACRVDGTLVDAGAVPPDLDGLAQLVHRLGDGEVVAVVETMNGARFVHDQLELAGWDVRIADAQRARALAPLACKTDRIDAQVLAELARRDLVPEVWLPDPRVRGERERARFRLHLVKHRTMLKNRINQTLVAHGLGRPTRHLFGPKGRVVLERLPLPEPWQGTLRASLVLIDSLDEQIDELERELRALGADHPYVPLLRTAPGIAWILAYTIASEIGDINRFPTARKLIGSTGLCPRVYQSGETDRRGPLAKNGPNYLRWALIEAAHTAGRTSHYRPIVTRMRDRHGRRRGSSTLCSGRRPVSV

SEQ ID NO: 484827 - protein, 351 aa, unidentified
MKSINKQIQSEELFAGIDLHKHRWHVTIRTADVEIFSNSIAGRWQELKKVLNRYKGCRIHAVYEAGFLGFWLFDHLTQYGVDCIVTPPSLIPQEHGNRVKTDRLDSRKLARLLAKGLLKGIWVPSAKERFHRQVIRRRRQLVGDRVRTQNRIKSELCFYGIDLPTPRSKWSQVYFANLQRIKFKNHWMQKSFNQLLEQYEFLSAQIDKQTQLLKQLSQLPLYRDRVKILCSIPGIGILTAMEILLELQDFSRFRRAEQLAAYVGLTPSQYSSADKIRMGRITGAGKNTVRSALVESCWQLIRKDKAMRKKYEQIKARAGGKRAIVAISRKLILCIRRLLIDNRPYEYEPIS

SEQ ID NO: 484828 - protein, 452 aa, unidentified
MAKKSKRRCDTLPVLHPDAAGIDVGASELYVAVSADRDARPVRSFPTFTRDLHALADWLEQCGIHSVAMESTSVYWIPIYQILEARGLEVYLVNAQHVRNVPGRKTDVSDCQWLQYLHSVGLLRASFRPPGFICAIRSLWRHRSSLIQMAAEHVLHMQKALDQMNLQIHRVLNDITGVSGLKILDAILAGERDPLTLARLCHGGVKNSEDTIAKSLEGDYRPEHLFALRQSLAAYHYYQKLVLEVDQEIKLQLGELQTAPTAERTTPARTKASAYQRRRYEPKTFDLRGELYRIFGVDLTNVPGISAITAQTILCEIGTDVSRFRNASAFASWLGLCPEKKVSGGKVLFTKSRRVRSRVATALRMGAQSLHHAKDYLGEFFRRITRKLGRPQAITATAHKLARIVYHLLSTKEAYTESVFHKSEEETLRRAQYRLRRQAAQLGFQVIPAENG

SEQ ID NO: 484829 - protein, 345 aa, unidentified
MEHYVGLDVSLKLTSICIVDRAGKIEREGVVASDPEAIATFIKLHAPHVVRMGLETGATSTWLWTELNKLGLPVICIDARHAKAVLKMQINKSDRNDAVGIARIMQCGWYKEVCVKDLDSHAIKALLVSRALLVKIKRDIENQIRGLLKNLGLVIGKAKMNIFAVRAAQLAEDRSELFAAVDPLLKAREAVEQQILDLDRKVLRLARNNAQVRRFMTAAGIGPVTALCFLATIDDPARFKKSRSVGAYAGLTTRRYASGEIDWTGRISKCGDKMLRSYLYEAANVLLTRVAKWSALKAWGIRLAKRSGLRKAKVAVARKLAVILHRMWIDGTEFKWSKEAADQPA

SEQ ID NO: 484830 - protein, 339 aa, unidentified
MQLYAGLDLHSRNTYIGIMDKEFKRVFNKRIANKLPLILATLKPFQNQLKGIVVESTFNWYWLIDGLMDAGYDCLHLANPSAMKQYEGIKHTDDQHDSFFLAQMLILGILPQGYIYPKEDRPVRDLARKRLFLVRHKTAHILSLQSLIARCCGKRVSANEIRKFTVEDLQQLLQQEYIVLSAQANLDTIVFLKQQILQMEKAIKNKVKLSKQFQQLLTVPGIGLILAMTIMLEVGDIGRFPQVGNFASYSRCVSSQRLSDGKKKGQGNRKNGNRYLSWAFTEAAHLSRRYNEDFRSYYNRKVAQANTSLATKALSNKLARICYYIMRDQVPFREEQQSH

SEQ ID NO: 484831 - protein, 350 aa, unidentified
MPMVADVVDAVIGGDTHKDTHTLEMATPSGVPMASIVVGNDAAGGAAALAWITDHALGPRIVVGLEGTRSYGIGLARALRAAGLTVVEVERPKRETRRGRGKSDPIDAHLAVLAVLRMHTDRLPTPRADGDREALRILLTARAELTDTYTRQINQLRALLLTGDDTDRAISRGRVTHDWLDRLIRRRGPGTETREQATRRAETRRLAQAIRDAHRDLTHNRDQLAAIITDLAPGLLDRPGVGPVSAAQTIVSWSHPGRCRSEAAFAALAGVNPIPASSGKTIRHRLNRGGDRHLNHALHTIALTRMRSCPRTHAYLTRRRAEGKTDRDIRRILKRYIARELYRTLNTNAA

SEQ ID NO: 484832 - protein, 381 aa, unidentified
MTTAVTHKTNAHTTEATLFVAFELSEKTWKLGFTVGHGQKPRERNVTARHQERVLDEISLAKHRLGLPETAPVVSCYEAGREGFWLHRFLLAHGITNHVVDSSAIEVSRRQRRAKSDGLDVRKLLSMLIRYEQGEHQVWQVVKVPSVEAEDQRHLHRDLETLKRERASTTTRIQGLLSSQGIQVSTLAKLPEQLDTLRLWDGTPIPPGLRRRVLRVYAHHTFLNEQIAAIEAERRAQLQASSEASIDQIRQLMMLKGIGINGSWLLVMEFFGWRAFKNRREVGGLAGLTPTPYQSGESAREQGITKSGNPHVRWMITELAWSWLRFQPESALSVWFRERFGDGGKRLRRMGIVAVSRKLLIALWRFLETGVLPEGAVLKEG

SEQ ID NO: 484833 - protein, 401 aa, unidentified
MEGPIVSIDVSNGNSHYMCFIKNNKRFGKVKKIDHDIEGFKRLLEDIQKLEAETNEKVCAVFEATGVYTKPLERFLSKNSIKTYMINPLESARKRKEEIHNKKTDKLDPISISKVYYDKEEMMELKKKDETYNWLRKKNRLYEDQLNHLRKYKVTFQNQLSICFPGYLDLFKDGYSDIPMTILKKYPHPDLLKNKKAETVARYLEKNTCHTHKVSLEYALKIIEFAKKTYPGCEKDDVEVEIFKILLDKVIETQRECEKTLNEMITVASTLEEYRYILSIDGIGPNLAARIIAEIGDIEEFKSREALVAYAGLDPHIYQSGDQDGKHLKISKKGNKYLRCLLFLAVGCSIRGAKDNPVNRFYQKKKQQSNPLNSKAAKTACTAKLLKIIYGICKNKTTYER

SEQ ID NO: 484834 - protein, 327 aa, unidentified
MEHFAGIDVSLEHSSVCVVDGVGKIVREAKVASEPEALVRFFRGLETGVTRIGLEAGPLSQWLHAGLVAAGFEVVLLETRHVKAALSAMVIKTDRKDARGIAQLLRMGWFRPVHAKSPGSQEVRALLVARKLLQAKLLDVEFSIRGILRGFGLKMGEVSKGRFAARVRELAAGHAMLERITEPMLRAREALRTEYDRLHGEMLAIVKPDPVCRRLMTVPGVGALVAITFKSAVDDPGRFARSRVVGAHFGLTPRKYQSGETDVTGAISRVGDGMVRMALYEAAHIMLGRVTRFSSLKRWALDVAKRRGLKRAKVALARKLATVLHRM

SEQ ID NO: 484835 - protein, 338 aa, unidentified
MQTYAGIDLHSSNCYLAVIDEQQRRLFSKRLPNSLDHILSALQPFKGELSGVVVESTYNWYWLVDGLQEQGYRMHLANPSAIRQYEGLKHTDDKWDAFWLAQLLMLGILPQGYIYPKAERPARDLLRRRLLFVRHRTAHILSLQSMLQRCCGRRISVNEIKKMTPQEAAALFSDPQLGLTARFQVETIGFLTQQIRSIEKVVLPQVKVRPEFEILLTIPGIGKILTLTIMLEVGDIRRFAKAGNFASYCRCVKSQKLSDTKKKGEGNRKNGNRYLAWAYVEAANFAVRYSPRAKVFHQRKCAKTKKVVAIKALANKLARASFYILRDQSAFDEKRLYG

SEQ ID NO: 484836 - protein, 410 aa, unidentified
MEVLHPRCAGLDVHRDSVVACARLVRPGDVERHVETFGTTTSELERLARWLDGHAITHVAMEATGVYWKPVWAVLAETFEPVLANAAHVKNVPGRKTDVSDAMWLADLLAHGLIRSSFVPPLAIQALRDLTRTRKQLTREKASHVQRIDKLLQAANLKLGSVLSDIMGESGRAILDALAGGESDPERLAGLVRARLRASRADLVEALRGRLAAHQRLLLGLHLGQVDAIDAAIARIDAELGDRLEPFRDAVARLTSIPGVGALSAAVIVAEIGLDMGRFPTAAHLISWAGLCPRHDESAGKRRSTRLRPGDPWLKTLLVQVAWCATRAKDTYLRALFGRLRARRGPRKAIVAVAASILTAIYWMLRRGVAYQDLGADHFERRDRARLAARLTRKLRELGFDVTLAEPAPA

SEQ ID NO: 484837 - protein, 371 aa, unidentified
MDAPTRTGTNVPKWKCHQPLEPKGASTMKITTVGIDLAKNVFQVHGIDERGKAVLKKQLRRAQMATFFVNLPPCLIGMEACGSAHHWARKLQSMGHTVRLMAPQFVKPYVKTNKNDAADAEAICEAVGRPNMRFVPIKNIEQQAVLALHRVRQGFVRARTAQANQIRGLLSEFGLIIPQGIGYIATRVPELIEDGANELPGEFRILVQRLLDHLKELDRQVEELEVKIQAWHRSNDLSRKLAQVPGIGPITASALVASIGDAKNFDNGRQVAAWLGLVPRQHSSGGKANLLGMSKRGDTYLRTLLIHGARSVIYRVSQKADACNWISAVVNRRNKNVAAVALANKNARIVWALLALDRQFEAGYVRKAVSA

SEQ ID NO: 484838 - protein, 339 aa, unidentified
MIGLDTSKSVFQIHGVNETGKAELKRKVRRSELIAFFEKQESCTVVMEACGAAHHWARILTGLGHTVKLIAPEAVKPFVKKGKKNDAADAAAICEAASRPDAQFVPAKTVAQQGILALHTVRSLLVKQQTMLANAIRGLATEFGHVVPKGLHNLEPLVALVDADEAMPAQARQAIAELHERFGELAKGIQSCEAGIVKHARNDATARRLATIPGIGPITASLIAATVVDISRFKTARQFAAWLGLVPRQHSTAGKTRLGRITKAGNKEIRKLLVLGATSMLGRAEGWHSALGAWLRDILQRRPVRLVTVALANKMARIAWAVMTRNEVYRAQGGVAAKA

SEQ ID NO: 484839 - protein, 424 aa, unidentified
MKVTYQTCCGVDAHKSFLVATIIKTTAGIEPSYQKKRFSTFNNSILDFKSWLLENECHDVCMESTGKYWVPVFNLLEDQINVTIANPKWVKAVKGNKDDTKDSKWIGDLFRLGLVKSSYIPCRLIRILREYTRYRYKLVSCRSSEKNRYQNALTVCNIALDSVVSDIFGKSSSSIIDYLLEQSGTTINHEEIASKLLKSLKSKEDAVIESIEGYQMTDAQKYRMRLIRAHMDYITAEINDIDKQIESLISSDPDYDKAIRLLTTIPGVKRDSAITIISEIGIDMSQFCNSKRLCCWAGLTPGNNESAGKKKSVRITRAGVYLKPALVQCAHAAVKSDKSPYYKTKYESLVKRRGKKRAVIAIARMILTAIYRMLSTGEVWNPSDLYKIDMPAPLAEKQKAKAIKQAKKLLQKEGLLPPDEPLAS

SEQ ID NO: 484840 - protein, 351 aa, unidentified
MMIIGVDYHPSFQTIAFLMEETGECGERELHHSDGQAEKFYRDLKQRGICVRVGMEATGYSRWFERLLAELGFEVWMGDPAEIKAKRVKKQKFDREDARLLLRLMRENNFPQIWVPGPENRDLRQLLWHRHRLVQMRTRIMNQLQALAMNEGYRWKKKLFSEQGRAQLEKLSLATWASRRRQELLELLDRMNPTIEELTAAAEQEVKKRPEALRLMTHPGVGPLTALAYVLIIGTPERFHCGKQIGTYVGMIPSEDSSARKQRLGHISKQGNSLLRFLLVEAAQAAARSNPQWRRRYIHLAMRRHKSIAKVAMGRKLGVRLYWMWRNGCAYSPSFEFGSYVGQLGTGHGVK

SEQ ID NO: 484841 - protein, 406 aa, unidentified
MEIEAINRRVIGLDIHQAQITACALVEDERGGLRKEHRQFGAFKRDRRALADWCAAIDPAEIVMESTGIYWKSPYAALEKVGIRAKVVNARHVKNVPGRKTDIGDAEWLAMLSRAGLLRGSFVPEADHRELRLVSRQRQKLVGILASEKNRLHKVLTDSGIRLGVVVSDLHGQSARAMVKALIEGKPPEEVIQLASRRLKASRDEMMDALHGELTPTHRFVLDELMQHIEDIEERIRRFDQKLLEGLSGAGDALMVLQTIPGVDLIGAAMLLVEIGTDMSVWENEERLSSWVGICPGNNESAGKRKSGRMRKGNPYVRRLLCEFAHAASRTESTFKAKFQGLLVRRGRKRAIVAIAHKLLRTIFFMLKRGQHYRDTTVNYEEMSVKRNAARWIKKLTEFGFLPKPA

SEQ ID NO: 484842 - protein, 309 aa, unidentified
MDATYVGIDVSKDRLDVHVLPEGLAFAVTRDGKGLAELIERLQPLGCTAVAVEATGGFETVVAAGLGGAGLPVVIVNPAQVRAFAKAMGKRAKTDPIDAAVIARFVESIRPQIRPLPDTETRMLADLVARRRQIIDMIGAERQRQKRASAHAAKSIARLLKALEKELASVDQDIDGKVRTSPAWAATQDLLTSVPCVGDITARTMLAELPELGTLDRRQIAALVGLAPWTRQSGQWRGKSFIGGGRASVRSTLFVCAMVAARYNPALRDFYQRLIGRGKAKKTALIAVARKLLTILNAIVRDQKPWISA

SEQ ID NO: 484843 - protein, 312 aa, unidentified
MSSLPLSILSIDISKDHFDTQAWPKGWRRRLPNSEQGVACIVAEAQKRQAMVIFEATSIYDRRLIRALDEAGLAYHRANPRKARDYARSAGFLAKTDCVDADMLTHYAAHVPLPLTEPVSKVQQELRTLLDRRHQLVEMRKAEEIRLKQVEAPVIAAEIEQHILSLHRKIAIYDAKVAELLEKPGLAGPARHLKSAPGIGQTTAAALLALLPELGRRSAKTIAALAGLAPLARESGRFRGKRRIYGGRPAVRRLLFLAARHAAKHTAFEDFAKRLETAGKAKKLILIAVARKLLISLNAMIKENRPFSCANA

SEQ ID NO: 484844 - protein, 346 aa, unidentified
MKYYVGLDVSMKNTSICIVNEQGKIVHESTALTDPHALADAIEKTGFKIELVGFESGSLGHYLAQGFKERALPAVCMDARKLSPVLELRINKTDKNDARGIADVLRTGMFTRVHDKPQEAIDRSAILTMRRCIVNQRTDIKNHIRGILKTYGIRLGSVSPAKFSQAVKARLDNVDRLVRVSIEGLLEVFDLLSQKIFAMDEELLTASQKDKEVRLLMTIPGIGPVTALTYKAEIFDPSRFKNSRTVGAYIGMTPTQYSSGETQKQGRISGRGSSELRSLLTEAGVVLLTKSQKWSKLKAWGLKLMRKKGIKKASLAVGRKLAVVMHRMLLDQKEFVYGEPPQVKIA

SEQ ID NO: 484845 - protein, 362 aa, unidentified
MVETRFVCSGLKHQKEKRNMDHFAGLDVSVKETSICIVDDTGKIVREVKVASEPEALLQVLMNPAYHFKRVGLEAGPLSQWLFSALAEAGLPVICVETRHMRGVLKAQVNKTDRNDARGIAQMMRAGLYRPVHVKTLRSQKLRMLLTHRKLLQAKAIAVENDLRATLRNFGFKVGMVGKAKFEARIKELVENLPDLTVLVEPLLIVRRVLREQIYILHRRLLAVVREDDVCRRLMTIPGVGPVVALTYRVTVDVPARFKNSKAVGAAFGLTPTRYQSGDIDRTGGISRCGDEMMRAMLYEAAQVMLIRTTKWSWLKAWAMKIAKNRGMKKAIVALARRLAVIMHRIWIDGTEFRWTKEVAAA

SEQ ID NO: 484846 - protein, 341 aa, unidentified
MPAAANTPEPAPRFAVQAAVQPDTASAASPIPTRFLGCDVGKAGIVVFDSRDASLRTLPNQPDSLATFAAGLDPTCLVVCEATGGYEDALLAALLTAGCPAHRADARKVKAFIRSFGTLAKSDTLDARALAHYAQERHARLARWQAPDPDRERLQTLVLTRADLVAQRTACTNRLAAPGAEPVRTCLEALRTCLDTQIQALDAAIAALVRAAAELVRAERVLRAIPGIGATTAAALIGLMPELGRIDRRQAAALAGVAPHPNQSGATDAYRRTRGGRPEVKRTLFMAAMAASRHNPILRDAYRRLRDAGKKPIVAITALMRRLIVIANARLRDAYAQAAAN

SEQ ID NO: 484847 - protein, 391 aa, unidentified
MEILMAQVDDLSRSLVTFDQQSTLVVIVEMSQTRWLIAGTVPGLDRRPLKKLEPNAPTLLHLVKRWADEATKAGRTITRIVLAYEAGRDGFWLARWLRARGIEAYIIHSTSVAVSREHRRAKTDRLDTEMLMRVFLGWLRGERRHCSMVAIPTLEEEDAKRPSRERESLVGERTRIINRMKATLARLGIRGFKPDLRQAPQRLDALRTPEGVPIPPNTCDEIRRDMARLAWIREQISAIEVARVKRLEQAPAQGPDAMVRLLARVIGVGIETADMLVREVLLRNLRDRRAIARYAGLTGSPNESGSKRRERGLAKTGNARVRRGLIQLAWRFLRFQKDSALVQWYRAHTQAPEGARKTTMITALARKVLIALWRMVITGTVPEGIVLRSAA

SEQ ID NO: 484848 - protein, 302 aa, unidentified
MALYCGIDLHSTNCWITIVDKERKVIRETKVGNDLEAILRFLAPDRAEIEGIAVESTFNWYWLVDGLMDEGYQLHLTNTWAVKQYEGLKYTDDRHDARWLAHLLSLGILPEGFIYPKQERVVRDLLRRRTFLVHKRASFLLSMRGAFECRTGMRTTSDDIKKWTPAEVEQHIDDPLAALGITCLLEPMAVLSDQIKILEKEALKRAKVRNEFRRLQSVWGIGKILGLTIMYEVGDIGRFAKVGNFASYCRLVKSERFSNGKRKGSGNSKNGNPYLSWAFSEAAHFAVRYYFYFVTANILFSQ

SEQ ID NO: 484849 - protein, 338 aa, unidentified
MALYAGIDLHSNNSMVVVQDDQDNVVGRQRLPNDLRTVSEWLEPYRKDLAGVVVESTYNWYWLVDGLMEQGHRLHLANTVAIEQYDGLKYRDDASDARWLATLLRLGKLPEGYIYPRTERAIRDLLRKRSQLVRQATMNLLSIQNLFARNRGKGISANHVKQLTPEAVDATFEDPNLALAIQSGLKVLDCLWEQICVLEEAVHGQVRLRKSYKRLLTVAGIGKILALTIMLETGDISRFHEVGHYVSYARLVGSSHWTNGKRKGSGNTKNGNAFLCWAFMEAANFAIRYNPTIRQYYQRKQARTKRIVALKAVAHKLARACYHMIQEDVAFDVTRAFG

SEQ ID NO: 484850 - protein, 454 aa, unidentified
MRPHVEEFDAEDNEEIVERVAAIDVAKASGKVCTRVPHASIPKRRVTRVWGVPATTNAILTLADELIAAGVERVVVESTSDYWRAFVYLFESAGLTTWLVNAHDVKQVPGRPKTDRVDAVWLAKLNERGMLRPSFIPPGEIRRLRDYTRLRSDLTEERSRHKQRVEKLLEDALIKLSTVATDIFGVSGRAMMDALIDGERDAVTLAKLAKGRLRPKHPELVQALNGRFDDHHAELARVLLDQVDSLTAKIDVLTSRIDDLIAKIPAAALPTTATPITDNPQDPASPSDPATPLPAIARLDEIPGVGLRAAQTIIAEIGLDMRQFPTANHLVSWAKLSPRTIQSGPKSRGGKTGKGNRYLKAVLGEVAVAAAKTDTFLGARYRRLVRRSGKQKALVAVARSILVVVWHLLNDPTTRFTDLGSSYYDERLNTDRKTRQLVQQLRALGHDVALTPAA

SEQ ID NO: 484851 - protein, 346 aa, unidentified
MQNDTLVAVDIAKEVFELGGSERPGRVAWRRRLDRCRFLEFFAQLPPATVVMEACGSAHYWARRIEELGHVVVLLPPQYVRPYVVRNKTDRTDVEGLLEAFRNQQIRPVPIKTVTQQVIGTLHRLRSGWLADRTRAINSLRGLLRELGFFIPEGRKHVLPDAWEIIHDPTRGLPEALKPSLSSLCQEIVSLSTRIEEIEAQLEALAKQIPAVARLRTVPGVGLLTATALYAFVGDISRFPSGRHMASFIGLTPREYSSGLRRRLGRISKRGDVYLRMLLIHGARSVLWHAKRMKNRDRLRAWALRLERKLGHNKAAVALANKLARITWAVWKNDRSFEPVPELQAA

SEQ ID NO: 484852 - protein, 358 aa, unidentified
MKTQGTKINFTGQNVYAGIDIHLKSWKVTIMVNEREHKTFSQDSSAELLFNYLKKNFPGATYYSAYEAGFCGFSAHRELKDFGIHNIVVNPADIPTTDKEKKQKEDKRDSRKIVKSLKNGDLIGIYVPSKEMEELRGLVRYRKTLVKEITRHKCRIKSFLYLNGIKIPLEKEVASQHWSGRFTQWLKDIDLSTMEGKMVLHDTIDTVDFLRKKLLNINKHLRQIGKEGKYAMRLRLLQSIPGIGLINAITLLSEMEDVLRFKNFDRLCSFIGLVPSTNSSGDKEIVGRITRRSNRNLRSVLIEAAWVASRKDPSLMYSYGQLCTRMDPNEAIIRIAKKLLNRIRYVMKNEKEYVLSVI

SEQ ID NO: 484853 - protein, 357 aa, unidentified
MTVTVAIPFYKVVILMMKLKYPICCGLDVHKNVIVATIVITNRDGVSEYRQKSFSTINSDIQKFHNWLIENNCYHVCMESTGKYWIPIFNYLEKDIEVCLTHPKYVKAIKGKKTDKKDSKWIADLYKFDLVRCSFIPPKDFRQLRELARYRFKLVCMKSSEKNRIQNCMTVSNVGIASVLSDPFGKTATEIMSYLLEHTADSIDEKAVRKLIKKGAKAKSDEIIEAIRGCNIETDQAKKLELALGHLEYLDGMITQTEVELYVRIKPYYEFVEFVSTMPGMTELSSTIVLAETGVDMNIFDDAKHLCSWCGLSPSNNESAGKKKSVRIAKAGAYLKPMMVQCALCLIYTSPRPRDRG

SEQ ID NO: 484854 - protein, 306 aa, unidentified
MLSARPARVPSPPRHREETAIISIPHPTAPQLTIGVDTHLDVHVAHAADQLGRRVATVQVPTTPTGYQHLLAWARGLGQPVAWGVEGTGSYGAALARFLAANHQVVVEVNRPDRTARRRHGKTDPVDAQAAAKAVQAGDATVVPKAGTGQVEMIRSLRVARQTAMRARTQTINALKALLVTAPATLREQLRGLSVTRLVRAAADLEPGPITSPLAAAMLALRTLAGRHQALSAEIDSLTSERDRLTATAAPSLVALFGVGQDSAAALLVAAGDNPGRLRSDAAFAALCGACPVQASSGKTVRHRLM

SEQ ID NO: 484855 - protein, 421 aa, unidentified
MRKADTGKVKVVKDDALIVAVDIGMEMNRGYCTTPDGRSTKVFKFENTRAGFDTLWSMIVTSKDRFKCNEVIVGYESTGPYGEPMVHYLMKKPVRLVQVNPMHTKRVKEINDNSPLKTDEKDPRVIADIIRWGRALSIVIPEGDAAYLRRLNNSRERHVRERTALVNQLQQLVFLLFPEFRKVIKDIKCRTPRYLLKKYPTPEALSVLDKQVLGEEMRKQSRGKFREGHADMLINLAKDTVGIREGAAGLSMDIRHILVQLEMLTNLIAEIESEMEITLGRIPYSAKLLSIKGFGVVSVAGIIGEIGDFKNFKTRSEIMKLAGLDLYEISSGKMKGQRRISKRGRSLLRKILYYAAIQTIRKNGILHDYYTRLTDRGMKRMMALVAVSRKLLGIIYAIVRDDSEYSVNFESMKRQVIKKAA

SEQ ID NO: 484856 - protein, 412 aa, unidentified
MLKIVYPICCGMDVHKGFIVACIASTNEQGVTTYQSKRFSTFTNDLRRCAVWLAKNHCKDVCMESTGKYWIPVYNILEATCTIVLAHPKYVKAIRGKKTDKKDAKWIADIFKHDLVSGSFIPSADIRQLRDLMRYYWKLTSFTVGEKNRAQNCLTVSNIKLDDVFSDVFGKAASAITTRLLESSEPFDVTPYLTKNIKTPVEKIQAAVDGEMCAEQAEKLRIIRSHMDALELCKLNLQSLILTTAEKYLPQLNIVATAPGIQAFSAIGIVSEIGVDMSVFPSSKHLCSWAGLTPQNNESAGKKKTTRISRAGTYIKPLLVQCALCAIRAKQFPEVRRRYLALKKRRGHKKAIIAIARMLLTAIYNMFKKNEPYNPELYCKDDRPPAHREVSVEEAVYILQRQGYLVTAPSSP

SEQ ID NO: 484857 - protein, 399 aa, unidentified
MTAFITPKELNIGIDVGSVNHAIAISDDQGNILQEFEISHTSQGFTSFFKTIEKISHSHRATVSIAMEGYNGWARPLDGLIQERGYRLYNVNNVKLARFKEIFPGAAKTDQIDARKIVELFALQKHLPASKKVLQEIMPFDDINTKLKKLTRRRKQLVQEKVALISRFSTELQGVAPDLKLMTTAVDNLWFLRFVTLREDIRDLIRVHSSTILKIKHLGPMKIALIQAWKEQATFSPDLEYTAPMLYEDASRILALKEKINQLQDDVAKLIPLSHIAKTIETIPGFAAISAGELAGEIGTLDRFNNEASLALYLGMTNLDNSSGKYRGSKRSISTNRHAKMAMITATMKHIQHVEESKKYLEKKISEGKRYQQGIRSIGRHLVRVIWNMIQQDRAYIVK

SEQ ID NO: 484858 - protein, 312 aa, unidentified
MAMLSFCGIDVSKDRLDVVVLPEGWFFSVSNDTTGWAELVVRLRPLAVSAIGLEPSGGYERGIIRALLAAGLSVRRINPSKLRQFARARGVLAKNDRLDARLIAEYVAIMPTRVVQRDAAVERLAEIVTMRRQLCDEHVAAENQAAHLEDAMLRRLSKRRQMRLEADIRLLDKRLADMVAANVALAQRYELLTSMPGVGPVLAVTLIALLPELGKMSRKQIAALVGLAPYDFDSGKLKGHRSIYGGRMSVRNVLYMAALSASRYSPALKAFHKRLAAADKKSKVIIVAVMRKMITTLNAMLRDNAAWQPRSA

SEQ ID NO: 484859 - protein, 358 aa, unidentified
MITIGVDAHKHVHMAVAVNERGQVANQWQGENSTDGWDAVARWAQGLDEERRWGIEGGGGYGRGLAQFLVDAGDRVYDINPRLTATERRRSRRLDKNDARDAQAIALVTQREEEKLPRVTVEDETVALDLLVAERDDAQAEATRLRNRLHHLLLQLDPAYQAHLPALTSVAGVQAATAYTTTSVSLVQQERAAVVRRLASRLRLALEQIAELGGRIEALAQAHYAPLTRLCGVSLLTAGSLAGILGPGRRFASEAKLAAYAGVAPLETSSAGRVRHRLNRGGNRRLNAILYRIALVQSRWSPEARAYLARRVAEGKTKREAFRALKRHLIRSIWRLWNECMPDQAAAHPAAHAPTAAP

SEQ ID NO: 484860 - protein, 343 aa, unidentified
MQTITTVGVDIAKSVFQVHGVDADGNIVIRRQVKRRYVLAFFQKLPPCLVGIEACASSHYWSRELQALGHTVRLMPPAYVKPYVKRHKNDSTDAEAICEAVTRPNMRFVATKTPEQQSCLTLHRTRHLFIRQQTSVINAIRAHLAEFGIVAPIGRHGVEQLLGVVSDAGDTRLPEVARACLAALGAQLRTLKAQILQFDRMITAWHRSSEASRRLDDIPGVGPVLATALVASVADPKAFRSGRDFSAWIGLVPKQNSSGGKGRPGKISKRGDRYLRSLFTTGALAVIRYAKIHGTRHRPWLTALLARRPTKVTAIALANKIARMAWARMAKGERYKEPVALAG

SEQ ID NO: 484861 - protein, 419 aa, unidentified
MTIQQSTPPQAALVAIDIAKNRHEILIEPGPGMRRRRLSVLNSRAEHDRLVATLHALGKPVVVGFEPTGNYHRVLAHRLITEGFQTRLISSMALARTREALHNGWDKNDPKDAQVILHMLQIGASTVYNDPGCDRLNDLQELSKTHDMVSRAKTELWHRLLTHYLPLYFPEIEKFHGNSRSDWFLALLEQFPTPGSVTALSKEAFATAAWDLVGRKVSKTRLLADIYETARSSTALPVQLDSPAIAMFRMVLAEGRSLLRQRDQIEAQAEVLLANDPDAARLRQLPGIGPINALTILAEAGDLRRFGHHRQFLKFCGFDLATHQSGMFRGQTKLSKFGNARLRRSFWLAAQVAIRQRDNSFRERYGRYIARDPENKNLRRKALTAVAAKMARVAHAIVRSGADYRPFFDRPVPGGRTSL

SEQ ID NO: 484862 - protein, 344 aa, unidentified
MIVIGIDAHKRTHTAVVADQNGSQLSTRTIRTTSKDHLALLRWGAEQCDDRMWAVEDCRHLSRRLERDLLAAGERVVRVPPKLMANVRDGARTYGKSDPIDALAVARAALREPNLPEARLDGMEREVRLLVDHRDDLVAERTRIIGRLRWHLHELDPGWTPPKRLDRASAYDKIEAFLSELSGLVSDLATRLVDHLRRLTVEIKELATEITTRITVLAPSLLAIPGCAPLTAAKLIGETAGVDRFRSKDAFARHNGTAPLPVWSSNRARHRLSRTGNRRLNAAIHIIALTQAHCHDDARALMSRRKANGDGGMEALRILKRRLSDVVYRAMLADRPLMGSATAA

SEQ ID NO: 484863 - protein, 334 aa, unidentified
MQNITLIGIDLGKHSFHIHCQDKSGKALLRKKFTRTKLMQFLATCPPSVVVMEACAGAHFMARCISDFGHETKLISPQFVRPFVKSNKNDFVDAEAICEAASRPSMRFVQPRTETQQAMRALHRVRESLIRDKVKTTNQIHGFLLEFGISLPIGDVVIKRLSLVLAEHEIPEYLSRLLVRLHTHYFYLVEQIAELESELSQSINADDTAQRIMTIPGVGPITASLLSSQLGDGKQFSCSRDFAASTGLVPRQYSTGGKSTLLGISKRGDKNLRRLLVQCARSFIMRLERKHGKLAEWVREQLNKKHSNVVTCALANKLARIAWAITTQKKEYQA

SEQ ID NO: 484864 - protein, 328 aa, unidentified
MSYVGVDISKDSFVVAFSSASKSKTITYQNDDKGIEKFINTLDKEQHHCVMEATGNYGVNLLYHLCEQEIKVSLINPKQSNFLSKMKLSTAKTDNKDARLLVEYGEKMNPEVYKMPSDKIILLKQKQTVLTHLIKQRTASKNQLKSLELLNKKDNLAIDMLKNNIDNLDKLINNLEKDIVSITEEEFEKQVQLLTSIKGIGKKVATTLVIITNGFSFFENPKQLSRYIGICPIYQQSGKSLNYNGHINRNGHSTLRGQLFIASWSAAKYNSSCKALFERLREEGKPWKLAQIAVCNKLIRQAFAVIKSGVAYIDGHVPTLSVPMQTAI

SEQ ID NO: 484865 - protein, 406 aa, unidentified
MIFVGVDWAEAHHDVYVEDEDGKRLGGGRLPEGVEGIARFHELVGDHVEEPGEVVVGIETDRGLFVTALVAAGYEVFAVNPMSTSRYRDRHSTSGAKSDPGDAKVLADMVRTDRHNHRPVAADTETVQVVKVLARTHQTMVWSRARQTNLLRSTLREFYPAALAAFADLASGDALEVLRMAPTPELGRTLSLSKIAAALRRGGRQRRIDDRAAEIQSALRSEQLAAPASVSRAMGASVTASVTVIASMVASIDTLAEELEAAFEQHPDAEVVRSLPGLGTILGARVLGEFGDEPNRYCTAKSRKNYAGTSPITRASGTKRVVLARYARNRRLADAIYMWAFAASNASPGARALYDTRRAAGDTHHAALRALGNRLVGILHGCLESHTTYDETIAWGHRTAPLAEVA

SEQ ID NO: 484866 - protein, 337 aa, unidentified
MFYIGCDVSEKSSYVYVTDGKGSKIESQEIPTDKDGYRQYFKRWINKPVKVAVEAGGHSRWIHDTLKKLGISVYIVNPNKVKLIAKNKKKTDKVDAIFLAKLLRIDELPERVYVAEGDSRELRDLLRSRHQLLKSSTCLKNHLRGMLRQEGIKLKTKAFDDESIFTRLQENKSVPQHLNPIVESYGKAIAELRKQKDELDDVIADYQNKDVVPGVGEVSSKTYYAAISTIKRFKRAKKLTSYCGLVPSVFSSGERADYGHITREGRSEVRHVAVQSAHAILRSTNSESKPLRKWYERIARRRGNKTAVVALARKLTEIIFYVLRDRKPYDASLLRTN

SEQ ID NO: 484867 - protein, 343 aa, unidentified
MTQYVGLDVSLKETKVHVLDEAGNRIWRGRCATEPTAIAAAVRRYAPTAVRIGLETGPLTTWLWTALTAEGLPMVCLDARHAKKALDMKVNKTDANDAEGLAHLVRAGWYREVRVKSRSAMLAKALLGARSQLLGMSLALENQIRGILKTFGRIVPKGGGGLFEKNVRALITDDTEIAAVIMPLLQARQVARGKCAALDRRLIRSVQGDASCRMLMTMPGVGPITAVAYVAALEKADNFKQSRAVAAWIGLTPRRFQSGEVDYDGHISRRGDSQLRALLYEAAAVLLTRVRRESALRRWGLMLWKRLGFKRAATALARKMAVVLHSMWKSGTAFNPTLSAVTP

SEQ ID NO: 484868 - protein, 453 aa, unidentified
MAKRREKRERRSVVVELDAAGIDIGAEEIYVAVPPDRDDESTRRFSSFTGDLHVLADWLGRCRIRTVAMESTGVFWIPLFQILEERGFEVYLVNAHYLKSVPGRKSDVSDCEWIQYLHSVGLLRASFRPPDAICALRTLWRHRGSLLEMAAEHIQHMQKALSQMNLQLHHVLSDITGTSGQAILDAILAGKRDPVELAQLCHSWVKSPRDKVAQALVGDYRPEHLFTLKQSLEGYRYYQKLIVELDQETAHFMRALPTATEQPMPPRTKATAYHRQGNDPQFDLRSELYRIAGVDLTDIPGVSAATAQVILTEIGTDVSRFRHASAFASWLGLCPEKRVSGGKVLSCKTRKVKHRAATALRMGANSLCRAKGYFGEFFRRMRAKLGTAQAITATAHKIARILYHVLSTKEPYTETVFHLYDEQARQRAEIASANRQPDSASNSCPSRQRENNN

SEQ ID NO: 484869 - protein, 348 aa, unidentified
MTTVTDEYDYVVGVDTHAKTHTYAVLAADTGRVIDSAMFPTSSTGISRALAWMHRRADGRLLVAIEGAGSYGAVIARVFQGAGLTVCDVRPPKRASRAGHGKSDEIDAVAAARTALATDVERLAEPRSDGIRAALRVLLTARQAMDGRRTADRNALTALLRSFQLGMDVRKPLTDGQVREIAGWRRRPAEDAPMTTIRQEARRLAVSVIQLTEQLEANRDALADYVEQLAPGLQSIRGVGPVTGAQVIAAYSHKGRIRSEAAFANLAGAAPLQASSGNTTRHRLNRQGDRQLNRALDTIVRVRLTCDRSTQDYMERRTSEGKSRREVRRSLKRYLARQLFRQLNTAMA

SEQ ID NO: 484870 - protein, 314 aa, unidentified
MNSHNEINVGIDTGKQQLDIYVRPLGEAFSVDNTPSGVRKAVTRLKQFRPTRIVIEATGRLEIAFVIAAQRAKLPVTVANPIHIRRFAGATGQLAKSDQLDAQMIARFGEALQPEPTRLKPAKARQISDLLVRRSQLLEMRTMEKNRLSILPKALHVSLNRHLKQLTTEIERVEKQIDKLIAQLPEWQNKMDQLMSVKGVGKVLAYTLMTDLPELGQLNRKQIAALVGVAPMNRDSGSYQGKRHIRGGRHRVRTVLFMAVMSAVRSNPRLKAKYEQLKAAGKPPKVALVACMRKLITILNTMVKNGEHWNPELT

SEQ ID NO: 484871 - protein, 373 aa, unidentified
MPLHAQRVHGVLPKGAPQFLEGKGNDMDVYIGLDVSLASTTICVIAEKGKIVTEAQVASTPEALVAFMGKLEHEIAAIGLEAGPLSHWLHKGLTDAGFETVLMETRRVKAALKAMPIKTDRRDAEGIARLLQMGWFRPVHCKSVSSQEMRALLTSRRSVKDALTDMELSVRGVLRNFGLKLGQVSKGRWEARVRELIAGNAMLEAAAEPILRARVALRRELAGLEKLVRDLAREDPVCRLLMTMPGVGPVVALTFKSAIDDPERFRRSKDVGPWVGLTPGRDQSGERDIVGGITKCGDAGLRAALYQAATSMLNRTAGPNWLKAWTLRLAKLRGKKRATVALARRIGVVLHRMWRDGTEFRFTREEAMALLTA

SEQ ID NO: 484872 - protein, 367 aa, unidentified
MIVNEVAKNVEKIISIDTAKNSFQVLVVNQKTGKKKNTKVQRSKFVEYILKQGPCLIFMESCSASQHWARLFEGHGFTVKLIAAQHVKAFLRNRRVKNDERDAEAIYTCGIQPDTKFVRIKTVEEQTVALLHTLRKAAVSQRVELSNRIRGILAEFGIVVARGKGSFNSEIEALFNECEKIHDVNLRVAISSLFEDYHRLEQREKELSEKIEALNKDNELVKIALTCPGVGSLTASAIVAEVGDASQFRNGREMAAWNGVVPSQHSTGGRSTLGGITKTGNRYLRALLAQCACTIIQNASRHIEQGKATHLDRFALRLKLNGKPAKKIMIAVANKIIRILWAMLTQRKAFENKAEETSDTSAELQLA

SEQ ID NO: 484873 - protein, 344 aa, unidentified
MTQPAVYQLFVGVDIAARSFTAAWGLADQAPVRPVRYEQTPAGFTAFQQALAATEVPAAQTRVVMEATSTYWMQLASALHSVGYAVSVVNPKQAHDFAKAVLQHAKTDPLDAKMLVQLGRKLQPARWTPPPAIYQQLQQRLAWRDSLIHLRTQVQNQHHALLHEAVVVDAVVARQTALIADLTAQIAVVENELTALLASADEWARSIVRLQSIPGVGLITAAWLVVATANFTACPSVEAATAYLGLAPHPWQSGSSVRGKPHIGHSGNARVRQALYMAAVSAVRCNPILRTFYARLKAAGKPAKVALCAVARKLLHLAWALVTKQQTFDPAYGHAPAQVETVAA

SEQ ID NO: 484874 - protein, 526 aa, unidentified
MPNRRRQDPKLEALRERGTLNPKPEGVLDQLFRESEFFDARDLVQVKYEMIRRVDVEGAPVAQAAHAFGFSRPSFYEAQAAFSGGGLPALLPKKRGPRGAHKLGQEVLAFIEELRAGDSTVAAPNIVQLLKERFGLTVHRRSVERALVRGQRWDEAAGRHRAWWPKPHSGARGRVPQRWRPAMEHLGIDVHKVESQICILTESGEVVERRIRTQRERFAAVLGERPRAKVLIEASTESEWVARCLEELGHEVVVADPNFAAMYATRSRKVKTDLRDARTLAEACKLGAYRAAHRTSDRQRHVRTQLSVREALVQTRARYISLIGAVLRREGLRVASGSAASFVRRVAKLALPGQLKSEIAPLLAVFVSVDRQLVWIDTRLEHLARTDETVERLCTAPSVGPVTAAAFSSTVDDPRRFKSAHQVEAYLGLTPSEWSSGEKQSKGHITKAGNTRMRKLLVQVAVSILRLRSPRTEALRKWATGIAVRRGKKIAIVALARRMAGVLFAMMRDRTCYLQPALLAPAAQVA

SEQ ID NO: 484875 - protein, 402 aa, unidentified
MNAVGIDVSKSKSMVAIMRPFGEIVSTPFEIKHTASDIRSLVELINSVEGESRIVMEHTGRYYEVLAHQLSEANLFVSAINPKLIKDFDNDSLRKVKSDKADSVKIARYALDKWQNLKQYNVMDELRNQLKTMNRQFGFYMKHKTAMKNNLIGILDQTYPGVNTYFDSPARNDGSQKWVDFASTYWHVDCVRKMSLNAFIDHYQNWCKRKKYNFSQSKAEEIYGKAKELVPVLPKDALTKLIIKQAVDQLNSASTTVESLRTLMNETASKLPEYPVVMAMKGVGTSLGPQLMAEIGDVSRFTHKSAITAFAGVDPGVNESGTYERKSVPTSKRGSADLRKALFQVMDVLIKTHPQDDPVYQFLDKKRTQGKPYYVYMTAGANKFLRIYYGRVKEYLSSLSES

SEQ ID NO: 484876 - protein, 342 aa, unidentified
MNDTMVGVDLAKNVFQLHGASTSGQVRFRKKLSRQNFSKFMAEHPPALVVMEACGSAHYWAREMVRLGHEVKLIAAQYVRPFVKRRKNDATDAEAIVIAAQRPEMRFVEPKSADQQSRAILFRARERLVHQRTELINALRACLYEYGHVVPHGRNHFKRIEEILDGLNSDLPALMLEECRDLLKQIGEKTARIDERTAKIKALSAEADTARRLQTIPGVGPLTALAIEAFAPQMENFRRGRDFAAWLGLVPRQFSSGGKQRLGRISKSGQSDIRRLLIIGAMTRLNWLGRKSIPEGSWLARMLARKPRMLVAIALANKMARTVWALLTRHEDYRVPAQAPAT

SEQ ID NO: 484877 - protein, 414 aa, unidentified
MEVLHERCAGLDISKRDAKVCIRVPGGRGGRYRNEVTTFGSMTGQILELRAFLLEQQVTLVVMESTGDYWKPFYYVLENAPFELLLVNPRHVRGLPGRKTDVSDAQWLADLGAHGLVRGSLVPPPPIRELRDLTRTHADLTRDRTREYNRLQSVLEDAGIKLTSVASKINGVSCRLMLDALVAGERNPKVLAGLAKASLREKRDQLTLAMTGRFTDHHAFLVALHLQVIDQLTAAIDQLTTKIQVVTEPFHAQVALLETIPGVSQQIAQVIIAETGGDMTKFPTAGHLASWAGICPGHNQSAEITKKAKTRPGNSYLKGALGTAAMSSMQVHDTFLQDRHHRLKPRIGGLKTIVALEHSILRSVWHMLSTNQPYRELGAGYHQRRHPQNALRSITRQANRLGYTVRFDPITQTA

SEQ ID NO: 484878 - protein, 446 aa, unidentified
MKKSSRMSVIHPHAAGVDIGAEFHVVAVPPDADAAPVRTFQRFTGDLHRMSDWLKTCHITTIAMESTGVYWLPAFEIPEAAGFNVILVNARDAKNVPGRKTDVNDAQWLQKLHSFGLLRASFRPEHDISVLRSYLRQRERLTEYRAAHIQHMQKALMQMNVQLHHAVSDITGVTGLSIVRAIVSGERDPSVLIQYRDVRCKKTPEVLQQALTGNWQPEHLFAPEQSVAFFDFYQEKIRECDDQIETSLLQLSTGTEEPEGVLPSARHRTKQPNQLSFDVRPLLWKITGADLTQIYGFGPYLALKFVAECGTDMNRWPDASHFTSWLCLSPGNKISGGKVLSPKTRRSSSRIAAALRLAATTIGRSDTALGAFYRRLSSRIGKAKAVTATARKLAILFYNALKYGQKYVDPGADYYEERYRNRVLDGLKRRAKSLGYSLQQDPELCV

SEQ ID NO: 484879 - protein, 296 aa, unidentified
MNGPCVAGVDVSMLELEVAVLPHGLRFTVTNDASGWAELVQKLRPVPIAAIGLEPSGGYERGLIRALLAAGFSVRRINPNKLRQFARARGVLAKNDRLDARLIAEYVAIMPTRAMQRDPAAERLAELVTMRRQLCDEHVTVSNQAGHLEDAMLRRMAKRRLTRLEADIALLDKRLAQMVAGDAELSRRYRRLVTMPGVGPTLAYTLLALLPELGALSRKQIAALVGLAPYDFDSGKFKGLRRIYGGRMAVRNVLYMAALAAFRFNPALNAFHCRSSPPANDLRSLWSPSCARSSQS

SEQ ID NO: 484880 - protein, 431 aa, unidentified
MSTPKNICEGPLAFAAYVGLDWGDEQHAVSLCTAGADQIERTTLKHTPEALAAWANGLRTRFGDGKIAVCLEQARGPLLYALLQYEHLVLYPINPKSLARFREALHPSHAKDDPVDADLALDMVHKHRDRLRPWQPDTVETRQLGLLVEARRGFVDLNTQLSLQLQAHLKAIFPQALELVGQDLSSRMATDFLEKWATLQEVQKAKPATLRKFYYGHNSRREEMIQRRLELIQNAVALTNDPALLPAYALAIRTLARQLAALRPQIGQYDQQIAAVFSAHPDAALFDSLPGAGSVMAPRLLVSLGTDRGRYPSSVGVSCYSGIAPVTEKSGRTEYWVHMRWSCPKFLRQTWHEFAASSIQFSEWARCCYQDLKGRMGHHEAVRKLAYKWQRIVWRMWKERQPYDEARYIRRLQQRGLKAYAGLVVESAEHG

SEQ ID NO: 484881 - protein, 430 aa, unidentified
MGLIMPSAVHPQQDDQPMPYEWFVGIDWGSQQHQVCVLDRDRHRVGERAVDHDGTSLARLAAWLWTVSAGQPQCVAVAIEVPRGAIVEGLLERGFHVFALNPKQLDRFRDRHSVAGAKDDRRDAFVLADSVRTDQPSFRRLHLEEPQLLVLRELSRAEETLLEEFRRNANRLRDQLYRFYPQMLQLCPAADEPWLWDLIDLAPSPAHAALLSEEQVQRVLKVHRIRRVKAHEVLTCLQTPALPVAPGAAEAAQAHCGFLSPCLRVLAEQRQACGQQVSALLHTLAEQPDDGEGPSDVAIVLSLPGVGRKITAWFFAEGAQPLAERDYQMLRTHGGVAPVTKQSGKRRLVVMRRGCNPRLRHALYHMARVAMQRDAHFSSVYAALRAKGQRHGQALRNIGDRLLRILMAMLRHRTCYDASRIRREPVVQRG

SEQ ID NO: 484882 - protein, 384 aa, unidentified
MLYVGVDVSTSKFDVAVMTQEFKFIASKSFSFNSDGFAEFITFLKKFNEPLTIAMEASGSFTFNLFDFLNEHNFNVFILHPYFVRKLSTSKSKTDPIDAKQIADTCARFFDKLSDWSYLDEDTLALRDLVRFRYSLVESSANLQKRFKDILRSYLPELLNFFSQLDSKVLLELLSNFPSKQAIIKNEQQVIQLLTSFKNWNEQKAKAFVNAIKRSIGRKDKHQVAQTIILSITQQLKQIKEQIQSIDNQIKQMMEQFDQTNFPDIPGIGDTTKATIISEVGDIEKFESKEKFVSYIGLDPVIHQSGKSTKHKGISKKGNKVLRRIFYNLAIRAIRLIDKYKKKYQELLSRGKKPKQAIIAIARKLAELVWILWTRKESFDISKA

SEQ ID NO: 484883 - protein, 329 aa, unidentified
MSNLLKKVIGVDVGSKFLTLSFLDDEKGEQVLNLPNNERSILSFLSKISPSDYCFVIEATGNYSSRLLHLSIGKGFESSLINCMSVKHFARMKNIITKTDAEDAKLIRNYGEMFRPEFYIPKTQDIEYLDQEIKLLNDLEEEKRRYAVKLKALRFHPVVNPSTEKHYEKRLKQLEKEIKEVEARLPQLQDEEFTETKNLLQSVSGIGEKTSLQLMTATSGFKNFHSSKSLVKYFGLAPRIYQSGKKSYSPGKCRTSKTYIRSILYVCSWTAIKHNQKCKELYLRLLEKGKAKKLALIAVCNKLLRICFSVVKNKTPFQQDFQNKLKIST

SEQ ID NO: 484884 - protein, 457 aa, unidentified
MGDRRPRKGEKDVPHFQHLNPHAAGIDVGSQSHFVAVPEGADENPVREFSCFTGDLNRMADWLRDCGVKTVAMESTGIYWIPVFEILEQRGFEVKLVNAHHVKNVPGRKTDVSDCQWLQRLHSYGLLEGSFRPPDQVCVLRCYIRQRMNLVRYAASHIQHMQKALSQMNLLLHNVVSDITGVTGMRIIKAILAGERNPLVLAGFRDPRCKNSVATIARSLEGHYKAEHLFSLRQAVELYEFYQAKIADCDHEIERQLAVFDDRSDGGQTPAPRKGKPAGNGLDFDVLGYLYRMTGVDLTRIEGIDAYTALKVIAEVGTDMSRWKSSKQFASWMGLCPGNKVSGGKKLSGKTNRVANRAAIALRMAASTLYRSKSALGAYFRRQRARLGAPKAITATAHKLARLIYSMLKYGTQYVDAGQDYYEQRYRTRVVENLKKRAIELGFELVETTIPCPKTCS

SEQ ID NO: 484885 - protein, 320 aa, unidentified
MSGFIGIDVAQADFVVAREGVAGSRSYPNTEGGHRDLIKDLSREGGNAERIVLESTGGYERKLVAALGGAGLPVVVINPRQVRDFARGTGQLAKTDQIDAHVLADFAAKIRPEIRPLPSEDQQELREFLTRYEQLMQMLVAEKSRLLQAEGQSRHALRKKIKNHIKFLEREITLLDSDLDDTLKKTEVWRESDDLLQSVPGIGKGTSRVLLGLVPELGTVTGAEVAKLVGLAPFNRDSGKFRGSRHIAGGRGRVRAVLYMATLAALRCNPVVKAWYQRLLAAGKPKKVAIVACMRKILVVLNQMMKTKTRWQAHTTPATA

SEQ ID NO: 484886 - protein, 346 aa, unidentified
MSYSTTVGVDLAKNVIQVSVVSGRGKELCNRSLTRKKFAEFLCKQKPSLVAFESCATSHYWARAAKRHGHEARIIPAKAVAPFRQGHKTDSNDALAVAEAARRPKIKEAPMKTVEQQGLQAIHRSRELLIQECTALSNHLRGLLMEFGIVIPKGFASLMKAVPEILEDGENELPDLYRPTLHRMYTRLLELREDIEAMTKEVARLARAHPICSKLMALEGIGPIGALLLYATMGSGAAFSSGREFAAYLGLAPKQYSSGGKTNIVGLSKKIGNSRLRSVLILGARAYTYKLKEPKSSKDKWLKAIIDRNGESRAAIALANKNVRTAWAMVTQGTEYQRREQLPMAA

SEQ ID NO: 484887 - protein, 450 aa, unidentified
MRMQPEEIPDDDHELVIERVCAIDVAKASGKVCVRTPHPNRPDRRTSRVWDVSATSRAVTELAEHLIGEGIERVTVESTSDYWRIWFYLLEAAGLDVQLVNAREVKNVPGRPKTDKLDAVWLAKLTEKGMLRPSFVPPVEVRQLRDYTRLRVDLTRERTRYWQRMEKLLEDALIKVSSVVSRLDSMSVRDMLEALIAGERDPRRLAELARGKMRPKRAALIEALTGRFDDHHAELARLLLSQIDALSSHIDTLTRRIDELLAILTDPRRGPDDGYRIGDDGAAPFVNGLQAAERLAEITGIGPVSAPVILAEIGMDMTRFPTAAHLVSWAKLSPRTIQSGATQRGGKTGKGNPYLKGVLGEAAAVAARTDTFLGERYRRIVKRRGKLKALVAVARSILVVVWNLLADPTARFHDLGADYHTRRADTDRRLRNHLAQLAALGYRVTVEPAA

SEQ ID NO: 484888 - protein, 338 aa, unidentified
MKAYAGIDLHSSTNYTAVIDDQDQRLFGKRLPNKMDAVVSALEPYKEHLKGVVVESTFNWYWLVDGLKEHGYKLHLANTSAIKQYEGLKHTDDKWDSFWLAHMLRLNILPEGYIYPKDKRPVRDLLRRRLLFVRHRTAQILSLQSSITRNLGYTMSSRDIKKLDQPDADTLFKDPFLILAAGNTIATIRFLKTRIAEIEKAVKAHIQLTPQFRYLLTTPGIGEVLGLTIMLEVGDIRRFPKVGNYSSYCRCVKSERFSNSKKKGEGNRKNGNKYLAWAYVEAANFAIRHYPEIQSFYQRKKVKTNGIVAIKALSNKLARASYYIMRDKVPYDEGKFFR

SEQ ID NO: 484889 - protein, 450 aa, unidentified
MGNGSGVSRGDRNRNARLARLRVLVPATNAIVGIDLADKKQMVVVTDHDSKVLARKTFRCRAWDLGAALDWAAERAAVKGWAGVTVACEPTGHRWRVLGQLAADRAMPFVCVQPMLTSWARRSEDLTSDKTDEKDAVLIARLTAQLRCYVPEPVDETWGRLRHLGARREQLVIEMVSQIQQIRALLECVWPAALDTAKQPFRSRTWAAAMTVICDRDGGDLARTRRLGAARFEQAVRREITRRGGCKPSLRILRHLFTALTDPTGVTAHRPGALERVAFLLQDWQAAADKLADTETRMTDVLDELKLTELVTSIPGLSAVGAAAILAETGDPNRFATARALVKHAGLAPREKLSGTFVGRTKLTGQGRPALRLAAWRAVWGAQRGNAVYAARYHHLTTRETNRLTATQAQTVIAAAILRQLHAVITTGQAWDPHIATHGANGRRQLALAA

SEQ ID NO: 484890 - protein, 354 aa, unidentified
MNSVRYVGMDVHRDTISVAVLDESGRLMMQSVLATRAGAILDFIHGVRGTLHVTFEEGTHSAWLYDVLVRRVAKLVVCNPRKNALMKSGSKSDAIDARKLAELLRAGMLSPVYHGETSALEVQQVARSYSQLTEDTTRVMARLKAVFRGQAVSCAGKKLYGKRHRGEYLAQLGGGLRRRAEHLYEELDALQPLRHEVRRELIVECRKHAAARWLQSVPFLGPIRAALLIGRVQTPHRFRTKRQFWTYCGLGLETRDSGQYRMVNGQVERRRRPVLIRGLNWNHNHAMKNLFKSTATAASVREGVWREFYLGLLDKGMRPEMARLTLARKIAAITLKIWKKGETFDAEHLKLQAA

SEQ ID NO: 484891 - protein, 418 aa, unidentified
MGGGKVLLFLGDDWSEEHHDVELQDAAGTVLARAKLAEGVAGMVRLHAMVGEHVGEHGGDGEDPTVLVGIETERGPWVRALVAAGYLVYAVNPLQVARYRQRRGVSGAKSDRSDAHVLADMVRTDHSQLRPVAGDSELAEAVKVLTRTHKTLIWERTRHTLRLRQALLDFFPAAVAAFEDLTGPDALQLLTIAPDPRSAAGLSIEQITAALTLAQRRNRAVKAQQIAAVLQADHLEQPAQVVAAYAATVRAQAAILSVLNIQIKALDKQVRTHFLRHPDAQIYLSQPGLGFVLGARVLAEFGDDPWRYANAKARKNYAGTSPITRQSGKRKAVIARWVHNNRLIDALGQQAFCALCDSPGARGYYDRLRARGAGHRAALRQLGNRLVGILHGCLKTGTFYDETTAWSHQPETNLANVA

SEQ ID NO: 484892 - protein, 412 aa, unidentified
MNVVYECCAGLDVHKASVVACALWVDDAGKRHEQTETFGTMTGDLLRLADWLAARRVTHVAMESTGVYWKPIFNILESAFEVLLVNARHIKQVPGRKTDVKDCQWIAQLLQHGLLRGSFVPDRPQRDFRDLTRHRAQLVSEHTRVTNRMEKVLEDANIKLASVATKALGVSGRAMLQALLADTHSPAEMADLARGRLRSKIDQLTAALEGHVTEHHRFMLRTLWDHMMYLEEAIASLDRKIESQMRPFADELVRLDTIPGVDVVVAQALIAEIGVDMTRFPTADHLASWAGLSPGSNESAGKRKSGKTTKGNRWLKRCLSQAAWGASHTKDTYLSAQFRQIAKRRGRKRATIAVARTILVIAYHILAEGCVYRELGGDYFDKLRPERLRRYYVKRLQKLGYEVNIQAVEHAA

SEQ ID NO: 484893 - protein, 352 aa, unidentified
MTRITTIGVDLAKKVFQIHGVDAEGKVVVARKLRRKEVLAFFAKLAPCLVGMEACGSAHYWGREIAKLGHTVKLMPPKYVKAYVKRGKTDAGDAAAICEAVTRPSMSFVPVKGIEQQGLSMLHSARTQLIGQRTQLINGVRGHLSEFGIIAARGLLGLAELAAIVRDKSNRRLPATARAALMILVRQIGAVSAEIAELDTALRKDNNASELGPRLETIPSVGPVIASALRARVTDARLFENGRHLSAWIGLVPENDSTGGKIRQNGLSKKGDRYLRSLLVNGAMAVVQQALKRPDKNPWVTKLLGRMTAKQAAIAIANKTARIAWAIMVHGGVYEAGHRAPAYRDAALSAVA

SEQ ID NO: 484894 - protein, 428 aa, unidentified
MNQNDTTNSNDNTDPSAQPPAAWIGWDWGDQKHSLALQTPGGKIEMTTLDHSAENLHRWLKELEQRFGARPVRLGIETSRGAVMAALLHYPWLEIHPINPVTSARYRSAFSPSGAKDDLPDARVCLELVRDHAAKLRRLQPQDPQTLKLAGLVEARRNLVDRRTTLLNQLTSLLKSYYPQALELLENLNTPMAVAFLRRWPDVISLKAARSATLKHFFYQHNVRSEGVVKKRLALIAAAVALTTEEARVSVAVLQLNALVDQLEVFQKHVACLDAQIKRAFAVHPDACLFRDLPGAGAQLAPRLCVAFGAERAVWSEPARLQKYAGLAPVREKSGNQLWTHWRWNAPRFLRQSFVEWAGQTVRYSQWARVYYQRMVKKGKKHAVILRALAFKWIRILWKCWQERRAYDEARYLKQLIHRKSPNAVTSQ

SEQ ID NO: 484895 - protein, 403 aa, unidentified
MAAVMIGVDPHKGSHTAVVISPAEEPLGELRVHASAGQAGKLIGWAAAWPERTWAVEGAAGLGRLLAQQLVAAGERVLDVQPKLASRVRLLQAGDTNKNDPNDALSVAVAALRSTACREVIADDYPAVLKVRAERHRDLARTRNQVACRLHAVLCDLVPGGHQKEISAAHAARILAQATPSGAVALARAELAAEFLADLRHLDVQLRETRKKLAAAVRASGTSLTQVFGVGPVIAGTVIGDVGDVARFPGRDHFASYNGTAPVEVSSGNRKIHRLSLRGNRRINHAIHMAAITQLRHKHSEGRAYYDKKVAEGKTCKEALRSLKRKVSDAIFARLQADARQAREKGPGGQPGNGSDPSAASSHPERQLFGPATPGPDTTIRPGITAGTPPPSKPASKKTRPAT

SEQ ID NO: 484896 - protein, 415 aa, unidentified
MDILVERCAALDVHKDTVVACVRIPGPDEGRQQELRTFKTTTAGLLVLADWLDSYQVTLVGMESTGCYWKPVWQVLEDRFECWLLNARHARNLPGRKTDMADAAWLCQLVEHGMVRPSFVPPQPIRELRDLTRYRKAQIQERTRETQRLDKVLQDAGIKLSSVASKTLGVSVRLMLEAMIGGTHDPEVLAQLAKGRLRAKLPALREALAGRFRTEHHGLLVGQILAHIDYLDETIAFLSQRIEQVIAPFSEQVALLQTIPGVDQRTAEVLIAEVGADMAQFPSAAHLASWAGVCPGNDESAGKRGSGRTRKGSKWLRAALVESAKAAARAKGSYFSAQYHRLKGRRGPGRATLAVGHSIMVTAYHLLDRGVTYHDLGEDYFQQRQQEAADRYAKRLVRQLEQLGHKVTLEAADAA

SEQ ID NO: 484897 - protein, 371 aa, unidentified
MDSPFANGIECAKLEESKTSNQHKGGVIMKGTTMGIDLAKNVFEVYVEAESGAVIERKRLSRKKLLPWLANRPPSLIGMEACGGAHYWARELTKLGHEVRLIAPQYVKPWVQTNKSDQADARAICRAVQEPGMRFVGIASEAQQTVQALHRVRSRYLDNRTALVNQTRGILLEYGVTIPKGVASVRKMLPLLLTEDRWSALVRQFLADHRAELEEWDAKIQAVTAQIKRENAQQPICQRLEQARGIGPLGASALWAKAAGQSYQNGRHVAAALGLVPKHTGTGGKGRLGGISKRGDRYLRQLLIHGARAVVRQVGEKPDPLSCWIRRVVARRGVNKAVVALANKNARVAFAIISHDQTYDVTKMCGAVSCK

SEQ ID NO: 484898 - protein, 348 aa, unidentified
MLYVGLDLSRKRLDWHALAAGGERVGEGACPPDRDGLAHLVHGVDRERGEPVLAAIESMTGARFVHDQLELAGWDVRIADAQRAKGIAPLACKTDRIDAWVLAELARRDLIPEIWLPTPEVRGERERARFRLHLVHKRTSLKNRVHAILFQHGLRAPVADLFGVGGRRFLDRCELAEPWRSSVAASLYLVDVLEAQIDAIEGELRRSGPEHRYLQLLMSAPGIGWVLGYTIAAEIGEIERFPTPAKLVSYTGLCPRVRQSGDVDRRGALSKHGPPYLRWALIEAAHNGIRCYPPYRELAERQRARLGRNRGGSVAAITIARKLTEASWWMLTRNRTFAPAGARVPLTA

SEQ ID NO: 484899 - protein, 385 aa, unidentified
MYFVGIDISKYKHDCFICTETGEVIEENLSFTNTNEGFAQLLNLLKSLDNSQEVRIGFEATGHYGMNLKLFLEKNNYSFMEFNPALVKRFISTQTLRRTKTDKKDAMLITKYLISVDYKPHPKQFYHKYSLKSLSRMREKLVKQRSYYEIQITNTLDIIFPEYKPFFNNDFSKTSLYILNKYKTPDKIKNMKDFDSIRKISRGKFTSANFIKLKELAKNTIGISNDIFETELESLLILHSGIEVEINKLENKIESIIKELNPPILSIRGIGIISCAGIISEFGDISRFKSADACVAFAGIEPSISQSGTESHTGHMVKHGSGHLRYFLMNAADYVFLHESIFTEFYYKKRSEGKSHRVALTHVAKKLVRIIYKLESENIKFQSNL

SEQ ID NO: 484900 - protein, 376 aa, unidentified
MKKIVICGADVHDNSITARIAVNKDAPETRVFRYTAKGRNSLFKYLKFVARNNGTELIVMAYEASSLGFGLCDEARDAGIECYVLAPTKMPQSEEQGKRKTDARDALKILEQLRGYLLAGNELAKVWIPDPQTRDDREVVRMRLEVADKLTSVRTQVRTLLKRNKVEKSKEIGKAGTVSDRQWLQRLTEPGHELALGGRVALASLLRQIAALEAEIQKLDEAVKTLAATDRYRAAVEVLDTQLTGVAVLTATVFLTELGDMRRFKNRKKVGAFLGLVPSSHESGERNDRKGHITRQGPARVRKVLCQAAWARIAFDKEEHKVHARIVEKNPKKKKIATVACMRRLGVRMWHLALEAQLQAGVYLDKELPQAQLRAG

SEQ ID NO: 484901 - protein, 315 aa, unidentified
MTKPRPSVNVGVDVSKAKLDIYLLERDRMFCIPNEPGAIAAFLSRLSRYRLERIVLEATGRFEQAFVRAALAKGLPVVVVSPMKVRRFAGAIGQLAKTDEIDARLIAQFAATLKPAVRTIVDPKSQIIKDLVVRRRQLTSLRTMEKNRRPVMPENVRPSIDRLIETLDREIEAIEQLIQNAVDQHAAWRHKRDLLTSMPGIGDAVASTLIGDLPELGLLSRRQIAALTGVAPMNRDSGTSRGKRRIRGGRAHSRTALYLSAMVAIRYNPDIKRFYERLLQTGKHKKVALTACIRKIVTALNAMLRDNKPWQPTFA

SEQ ID NO: 484902 - protein, 339 aa, unidentified
MKLTPVWIDIAKSVFQVHYVDQETGEIVNKPIKRAKFLEYFANRAPCLIGMEACGGSHHWARQLTNMGHEVKLMPAKFVKAFNIRNKNDAADARAIWMAVQQPGKPVAVKTEIQQAMLALHRMRQQLIKFRTMQINNLRGLLTEYGEVMSKGRNKLNKEIPVVLERIAERLPAVLIDTFREQWNGLAKLDEQVAEIERRMREWKKEDKAVKAVSEICGVGLLTATAAVSMMGDPKAFSSGREFAAWVGIVPKQTGSGGKVNLHGISKRGDTYLRTLLIHGARSVIENAKEPGEWVEQMMKRRPKNVVVVALANKMARTIWAVLAHDRPYQKAYVSVKPA

SEQ ID NO: 484903 - protein, 344 aa, unidentified
MNKKWFIGIDVSKKTLDASVFVAGEVINKFPHVQMGNDKKGFKELLKWAKEQGVKPKNTLFGLEFTGYYSDALEQFLTGKQLSYTMLPTTVVKHYQRGQHDKNDKIDSAKIADYLFRFNGTECIKLRVLPSKAMQELKELKSKRKFLVQQRVACECRLQVAKSKSEEKDLQDIIDLYDKKIEKVEKEILDVVTSDEEIYTTYKLLNSIPGIGFVNAINTIANTQNFTAFETARQYAKYVAVAPSEHSSGTSVHWRRRPSPHADLQAKADLSMAALHAIELSREMRQLYERKLGNKPKDKDMQKKALNAVKFKLIREMFSVARQARNFELRGLDKVQAEAHSTEE

SEQ ID NO: 484904 - protein, 391 aa, unidentified
MVCVGIDVAKDKHDCCILDSEGTTLVDCFTIPNNMDGFKSLLQTIQDCSQKSDKIKVGLEATGHYSYNILGFLLDNDLPIYVMNPLHTNLYRKSLSLRKTKTDRVDAKTIATMLLSDVDLKSYTDTAYHNEELKSLTRYRFDKVQERAKLKQSVSRLVTILFPELEQLVSSIHGTSIYALLSEYPGAKQISEAHLTRLANILVKTSRGHYRKDKATHIRDAARTSIGSVMPAKSLELKHTIKLIQELTSEINEIEDAIRKIMDELKPPILSIPGMGFHSAAMILAEVGDFSNFNSPDKVLAYAGCSPSTYQSGKLTNCYAHMEKRGSRYLRYALYTATKYVCYWNPVFTEYLTKKQAEGKHYNVALSHATKKLVRLIYALQKSGKAYLAVT

SEQ ID NO: 484905 - protein, 316 aa, unidentified
MKTQVFVGLDVSKQHLDVAVRPHQRHFVTANNDCGIKQLVTHLAALKPQLIVLEASGGYELLVTAALAEAQLPVTLINPQVVRKFAGATGKLAKTDKIDAQVLAHFAEALKPEARTLPDQAQQLLKAVLQRRQQVVKMIGQEENRLEKTFIPIVRQDIEVHLTWLRQRLKELNRDLDEQIRQSPLWQGRDRLFQGIPGIGPVVSRAIIAQLPEVGTLPGKKAVALAGLAPYNRDSGRFRGKRMIRGGRSYLRRMLYMAAVSAVRCNPVIRAFYQRLLAAGKPKKLALTACMRKLVLILNAMVKNNQPWNQFLTQVP

SEQ ID NO: 484906 - protein, 469 aa, unidentified
MKENHRRCCGIDVHKNNVMVCVLPLRGEAQQGIKTRKFRTFTRDLKQLRAWLKHCRVTEIALESTGQYWRPLWNLLEGEFPKLLLVNPQHIKGLNGYKTDPKDARWIADLLEGGKLRGSWVPPRAIRELRDLTRQRVHVLEDLNRGKNRIEQLCQSGNIKVSSVATDLFGVSGRKMLQAIVAGKYDAGWMADYAQGALRGKRRELTLALEGSFTDEQRWLLKRELQQVEWLEQQVEAMEHEIARRVAQYEEPIRRLLTIPGVDLKTAWTIVAEIGVDMSVFADARHLASWAGLCPGNRESGGKRFSGRARKANRYVKRALCQAAWAASHTKNTYLSAFYRRKLHKGAPKAVMALAHHLIVVIYQVLSRGEEYVEMGGDYYDRQNKPKVVARLVKRLAQLGYWVQLQEVPELPEPEGTPTPELTQTATLAPKRKRGRPCKCAERGIICKHQTSESVNSLKKQSSSPASFS

SEQ ID NO: 484907 - protein, 321 aa, unidentified
MTHYIGIDVSKNKLDIAWLKDTDKLKFKTKVFKNDHSDYAALINWLIANITDDLNNIHITLEATGVYHENIAYYLFDKKLNVSIINPAYVKSYAASLGSRNKTDKKDSMLLARYTYSAKPKLWTPPPAEARHLKSLLSRLDALQEDLQRELNRLEKTEATDTAPIVKASIEQMIVSLQAAIVKLNGDIDDHIDGHPNLKQDQYLLQTIKGVGPVVSKQFSQASQMAAFLGLVPKHSESGLFKGKSRLAKNGSSAVRAKLYMPALVAIKHNPDIKAQYERLLANGKCKMQAVCAAMRKLVHICFGVVKHQQPYQARVELIST

SEQ ID NO: 484908 - protein, 411 aa, unidentified
MSLPPAQFFVGLDWAAETHAVCLINTEGRTLAQFTVEHSAAGIAGLIARLARFGEPIDVQVGIERPDGRLVDLLLEAGYPVVPVSPNAIKTWREGEVVSGAKSDTGDALVIAEYLRLRAHRLRVVPGYSAETKALRTVVRTRDDLVEMRVAATNQLAALLDAHWPGGKAIFADIESPIALAFLTRYPTAAAARHLGEKRLAGFVIKHGYSGRRTPAQLLTRLRTAPPGTLDDTLTEAVRDAVLALVAVLTALGGALKALDRSVAAHLGEHPDGPIFTSLPRSGQINAAQVLAEWGDVREAYDAPDAVAALAGVTPVTNQSGKHKAVHFRWACNKRFRRAITTFADNSRHASPWAAAIYHQARAAGKDHPHAIRVLARAWIRIIWRCWQDREPYNPARHGAATKINNPPIAA

SEQ ID NO: 484909 - protein, 396 aa, unidentified
MRNDVTIYVGIDFSKEKFNACLLMEQGVMGESEFPNSKTGYLKLTKWVKNTSELGRSFASSLVLFCGEHTGTCSIGLCEYLYAKGMKIWLESALKIKYGSGLKRIKDDKADAEMIAYYAKRFYEPGSCALFEPDSADLKTLRTLYQFRNRVVCDRVAIGNRISSGAFDCSTLVRNRMVKHHKEAQKDEKDIEKEMVKLMETSEELASNYQILISFKGIGPITAAALIIYTSNFKKFDNSRKFACYCGIAPFGKQSGTSINTKPHVSRFAHIGIKAAIVQACKSAMQHNAVIKAYAQRLYAKGKHEGIVMNNVKNKVMHIIFKMIQTQTLWEQEYQQKHMKECKAIPGKNGIGATEAAPIINATLKTSSSVVECTFLEEHSFQKNSKKTSSFSCVET

SEQ ID NO: 484910 - protein, 337 aa, unidentified
MKQYGGIDLHSNNSVIAIKDDTGKVLVCKKLPNDWELIQRFLEPYKQVLIGLVIESIYNWYWLVDALIGAKFCVHLANTAAIQQYSGLKYADDNSDAQWLAEMLRLNILPEGYIYPEEERAVRDLMRKRMSLVQQSTANLLSIQGIYMRHLSYRLSNNKIKQLTCEQIAQDHTANTAQAVTATLNVMNCLKNEIKQIESALLVQVKLRAEFKSLSSIDGIGNILALTIMLETGDIKRFNKPGNYAFYCRCIGGARYSNGKKKGGSNSKNGNKYLAWAFVEAANFAIRHNKIVKSYYQRKAAKTNQIIAIKTVAHKLARACFYVLRDQVEFDANKAFC

SEQ ID NO: 484911 - protein, 466 aa, unidentified
MKPFYMGIDVSKGYADFMIINAQKKPVIQSFQLDDTFEGHQTLYNIVGRFLAKHPNSMLFAGMESTGGYENNWYNSLVAFQGSLNIQTSRLNPLGVKRNSQADLKKNTTDKISAQNIAEYLVAHPEKVAYQQQDQLAGLRKQWGFIQMLTKQRTQFLNQFKGLLYTSNPELLGYCQSETPAWVLKLAIKYPSAARLKRANVKSVAKIPFVSKEKAQQLATDAKRSVASATDTETEQLIIATARQIIHLNQTIDTQSQRMINTCKLPEVELLKTFDGISDKSAIGLIIEIQTVKRFATAKKLASFFGAHPVYKISGDGVGGIKMSKQGRKQPRHILYMITLAAIKCNPLIKQIYEKHQRNGKHNMAAMGICMHKILRIIYGMLKHNKPFDPRIDIANRQLSAQAKEAVPKKNTSRRFQEYDTKAPVSRRQKKKRLERGRSHSVPDTKSGITAPVPLRNIIANILPEL

SEQ ID NO: 484912 - protein, 349 aa, unidentified
MTVTIVEQARPITGGVDIHADTHVAAALDPVGGLPGVREFPATAAGYAGLLAWLGGFGSVCLAGIEGTGSYGAGLARHITAAGIRVVEVDRSGRQDRRRQGKPDPLDAVSAARAAQSGRARGAPKGRDGAVEAIRTLVAARRSAAGERTRTINQARALVLTGPGDLRTRFAGHKPAALITGLASLRPRTGDVAGHATRIALRELGRRAQFPDGQLERLDELIISLVTARAPGLLALYGAGPRTAALLLIAAGDHPGRLRSEAAWARLCGVAPIPASSGKVTRHRLNPGGDRQASHALWRIVFTRLRSHPATRAYAKRRAAEGKSRAEIIRCLKRYVAREVYPRLRPAGG

SEQ ID NO: 484913 - protein, 312 aa, unidentified
MADMVRLAGIDVSKQTLEVYVMPSGESRTVSNDRCGLGELRRWLVGQGVAIAAVEASGGYEREVSDVLEEAGVVIHRLNPLRVRRFAQLRGRLAKTDRLDARTIAEFARTYPQDRQLPRDARRDGLAEHLLVRRHTQDAIVDCINQLEHLRDGRLRRLLAARKAALETTLGALDRRLAGLVAEHDDLVALSEQLRSVPAVGPVLATTLIALLPELGSLTRRQIAALVGVAPFDRSSGRQIGAKSIHAGRVLVRNVLYMAAMVAMRRNPAIKAFALRLAAKPGKVRIVACMRKLLVTLNAMVRDGAQWQPRVA

SEQ ID NO: 484914 - protein, 366 aa, unidentified
MLGRGTIKRSTAMSNKSNATIATMGIDIGKNSFHVVGLDQRGAIVLRQKWSRGQVEARLANMPPCLIGMEACVGAHHLSRKLQSLGHDARLMPARYVRAYRKGQKNDFRDGEGIAEAVQRPTMKFVATKTAEQLDLQALHRVRARLVGQRTGIVNQIRAFLLDRGVAVRKGPRFLRTELARILATRCDVLSPRMVHVIEELAGDWHRLDERIKSVSSEIEALADQDPACERLMTVPGIGPIISSATVAAIGNGAAFSKGRDFGAWLGLVPRQISTGDRTILGKISKQGNRYLRVLFVQAARVVLLKPNSWERYGLKSWIEAAKKRLHHNVLAIALANKLARIAWAVLNKERKFECVRTSAMAPRSA

SEQ ID NO: 484915 - protein, 370 aa, unidentified
MKKRITFVGLDTHKNSIEVALADEGANSEVRLYGSIGGDLDSLDKMIRKLRIPGAELRFVYEAGPCGYEIYRHLRAQGLHCDVVAPSMVPRRSGDRIKNDRRDACNLARLYRAGELTAVYVPHEDDEAMRDLVRGRQDAINAQRKARQQLGGFLLRHGVRYPGKCLWSLAHGRWLAGIKMPHPAQQIMMQEYIHTVEECTQRVIRLNEQIQQLLPDWRMHPLVTALQALRGVAPVVATTVVVEIGPMGRFKNPRQLMAYLGLVPSERSSGGSVRRGAITKTGNGHARRALIEAAHSYRHPARISRTILKRQETLTEPVRQIAWKAQLRLCARFRRLIARGKSRNRVMAAVARELSGFMWAIAKQVPVPQG

SEQ ID NO: 484916 - protein, 345 aa, unidentified
MPIVGGLDIHRKQITFDYLDTVTGQVCRGQVCLADREHLRAWLARFAGCDDVAFAVEGCTGWRYVAEELAAAGIAVHLAEPADTAFARGRKRHAKTDKTDCRHLRMLLAEGRLPECWVPPGHILECRALLETYHDLRAEHTAWVQRIHAVLFHHGAPALGAGTLRTEQGVAALRAVTAEWLSPAGQLQVATALEILEALEARMHELRHQLTDAARHLAGAKVLAERLYGVGPVTALAITCWLAGKDRFSSSRQVVRFAGLDVTVYSSDRKGPPGRLSRQGPPVLRWAVYEAGKTHARASAPDHAYYAQVKDRCNGKRAALSEARKILRQACHILAELGDDALATA

SEQ ID NO: 484917 - protein, 358 aa, unidentified
MKHFIGCDAHKSYSVFVVIDEHCRKVSEKRVSHDREEFRAYLQELPAGAAVALEAGNCWYWMVDELEASGHPAHLAQALEAKKRMGRPNKTDHLDAEGLAILLRNGSLPEVWIPPLWVRDERHLLRTRMVVRDQRTALKCRVHGVLAQYGLSTEGISDLFGERGHRFVELCQAHLPEQTGRCVAEEMRRIDGLTAELESLEQRIAKMVKERSEVRLLKTLPGVGPILAPVMALEIGDIGRFARAENLASYAGLVPRVYQSGNRRVHGSVAPNVNRYLKWAFVEAASVVVQNQRKLGWRHAARLYLRLKPKKGYAKAVVAVARHLAEAAYWVLTKQEDYKEPRPRTSSKSASAASSARG

SEQ ID NO: 484918 - protein, 348 aa, unidentified
MYAKKDIILAVDYHDHNLVVRWFNCHTAEERLLKCPTTEEGVGKLVDNSVAEAVEADGRVIWIMESTTGWARIKKLLGDKAALVVANVLQMPLPPKAYRRKTDKIDTGRILREFLNGSLPLAFQPSAWLRRVRRVTASRESLVSRRTAVQNWISRYLAHETWEPRKGLWSAKGMQFLKRLAAKIDGPDRVVLSVKLSELEHIATMMKSIETEILRIYKDWPDVQRVDEIYGIGPISAVSICARIGPVERFSDPEQLISFAGLAPGVRQSDQTCRMGRIGGGGTDKHLRHYVIEATIWARRIPRYRPTYERVEAKRGRKIARLVVGRLLLRSIYKMLRDGVRFDRLPAA

SEQ ID NO: 484919 - protein, 344 aa, unidentified
MDKFKLFCGIDISKADLDVVIGSASAHRHLKLSNDAKGIHQLLELLLSQEAERAAILVCCENTGSLMDKLACVLKAEGLFLWAVHPLLLSYYSMELNRFKTDKADAHKLFSYALINRSRATCFHLPSQTVRELKELFTCRKSLIQTRSAYTCRLIDSQQKTSSNALVAGIEKQLIIVLTGYIKTIEKAIRAVIASDQKINRMYRILQSIPSIGPITAWHLLFVTDCFEKFNNWRAFAAYIGSAPFPKQSGTSVKFKAKTSKKAYAPLKADLNQGIVSVSTRPGQLFYHYYQYMISRNKHHLYIVNLIKNVVLKLIFKLIQSDSLFKPEIFIKNKASWQNYLVMS

SEQ ID NO: 484920 - protein, 351 aa, unidentified
MVTVGIDPHKHVHIAVAVRGDGRPIGTPLTVKNDALLIITLLKWIRSITDGTATWAIEDGRGFARRLADGLLLAGQEVVWVPSRLTAAHRKLHAATGAKSDPVDATVAAHAAIATPDLDRHRIDEHVRELRVLVDYRADLIKRRTMVINQLKAQLHVWLDHTPQDLTRAKNLAMVTTLTSTAQLSPHVRRALAGMTAEIAALNRQIRDLDTTIRQLVSPLAPTLLQVTGISYNSAAVLIAEIGDITRFPSSARLARYTGCAPIPVYSAGQERHRLHRGGNRRLNSVLYTTAIVQKRFSPAAQQLLAHHGPAKGTRGARRILQRHLIDVIHRAMTADQATWQHHITRHHNAA

SEQ ID NO: 484921 - protein, 393 aa, unidentified
MICVGIDVASDKHDCAIMDSSTGEICEVFMFENNREGFNALMSKIILHSEIKDLSDIQIGLESTGHYSNNLVNFLHEKRLSVKVFNPLLVQRLRKAESLRRTKTDKADAKFLACLLIRDDSKSYKRSLPQIEELKTLTRHRHRLVKEQSKHKQHISRLITIVFPEIKTVFCSTSLATVRELFLQFPSAQAIAGTDIRKLTNILWTASKHRFGRNKAEEIRNLARQSVGTNNRGNALELQQHLQSIHFLKQQIQVVEAEIKAIMIDFDSPIISIPGISYTLGAMILAEIGDIRNFKNPAKLLAFAGLDPSLYQSGKFTADRTPMVKHGSSYLRFAIIQAATSVRQYAPEFRAYYDKKIAQNKHYLVAISHVAKKLTRVLFTLLKYQRDYEPQSA

SEQ ID NO: 484922 - protein, 341 aa, unidentified
MTFVMGMDQHREQISAEWIDTITGEVSRARVAPADRAGVRKFLAQFDGADLEVALEATTGWRFLVEELQRVGADPHLAEPAETSGLKGKKRRAKTDWADARHLRELLLIGRLPESWIAPAHLLDLRARVRCRHTLVHQRTEWQQRMHSVLYHHGAPHSRKLLTLANRERIAALKLPAAAREQLTIALEMIDAIETQIGPVDLALRAYARQQPGCRALIDQIYGLGPLTSVTLLAELGDTRRFQNSRDAVRYSGLDVTVYQSDQHRTTGHLSRQGPPTLRWALYEAAQAARRPGSPDRPYYDQLAERIGGNRACVAIARKLLKRSYHVLRGLGDKALEPVTS

SEQ ID NO: 484923 - protein, 362 aa, unidentified
MESVRFAGLDVHAESVAIAVADKGLPPAMLGVFPNDIPSITKRLRRLGRVRCCYEAGPTGYGLQRALTEAGIDCIVVAPSLVPRTAGERIKTDRRDAIKLARFLRSGDLTSVAVPDADTEAMRDLERARDAAKRAERVARQQLTSFLLRHGRRFPGRTAWSQPHFVWLRGQRFDNEAQRRVFEDGLRTIEETTARVARLTTAIRELVDTWSLGPLVKALQAFRGIELISATVIAAEVGDLRRFGSAPQFMSYLGLVPSERSSGNERRQGAITRAGNAYVRRILIEAAWAYRHRPFVGRALRNRSAGISEEVRRIAWRAQERLSAKRKKLWGRGKPVNKVAAAIARELAGFIWAVGQVQHLVA

SEQ ID NO: 484924 - protein, 340 aa, unidentified
MEHIGIDLGSKESQVCVRSADGTIVGEWRWRTDRLVTFLQGRPAARVILETCTEAFRIAAVAQGVGHDVRVVAATLVRSLGVGHRGLKNDVRDARVLSEASCRIDLPSVHIPTATSQEVKALCVSREALIKTRTQLVSRVRGYVRARLGRVVRATPETLPKRVRQALLEDAEGLPAHLERVLVVLETVSEQIAEADAELRLLAEADARMTRLMTVPGVGPVTAARFVAAIDDVGRFSTAASVASYLGLVPGEDTTGFRTRRTRLTRAGAPQVRWALGQAAWSLYIRRKTDPMVLWAKQIAERRGVHVAIMALARKLTHVLYALWKHETSYDPSRAARQAA

SEQ ID NO: 484925 - protein, 414 aa, unidentified
MQHASPSTHAPAAAPVAGIDWATETNALCIIDRDGQVLRRLTAPADAAGIRRLLKELAHHGVARVAIERPDGPVVDALLGAGHTVVVIAPRQVKHLRTRHGSAGNKDDRFDAYVLADTLRTDGHRLQPLQPDSPATVALRTAVRARTDLVETRVALCNQLRAHLRTVFPAAVGLFADLDAPISLTFLARFPSTQAAAWLSHRRLGAWLAANHYSGRTPTRVLLARLTDAPAGLGGDHGHAAAHTTTAYVAALRAICEQITALEAQITKQLTLHPDRVIFQSLPRSGTVRAAKLLVEIGDARGRFPSEAALAALAGAAPSTRQSGRHRVVTFRWACDKKLREAVMDFAADSRRASPWAQAIYQRHRALGKTHQHATRILARAWLRVIWRCWQNHTPYNPALHGIAKHQRLPLASA

SEQ ID NO: 484926 - protein, 424 aa, unidentified
MKVTYQTCCGVDVHKSFLVATIVKTTGGIEPSYQKKRFSTFNNSILEFKQWLLDNHCHDVCMESTGKYWVPVFNLLEDKINVVIANPKWVKAVKGNKDDTKDSKWIGDLFRLGLVKGSYIPCKKVRILREYTRYRYKLVSCRSSEKNRYQNALTVCNVALDSIVSDIFGKSSTSIIDYLLEQSGTSINHEEIASKLLRSLKSKEDAVIESVEGYQMTDAQKYRMRLVRAHIDYITAEINDVDKMIENMISSNPDFENAVQFLCTIPGVKRDSAITIISETGTDMSQFSSSKRLCCWAGLTPGSNESAGKKKSVRITRAGVYLKPALVQCAHAAVKSDKSPYYKKKYESLVKRRGKKRAIIAIARMILTAIYQMLSTGEQWNPSDLYKIDMPVALVEKQKAKAIKQAKKLLQREGLLPPDEPLAS

SEQ ID NO: 484927 - protein, 344 aa, unidentified
MKKNLFFIGLDISKADFAASIYQVPDQPIVTKEAIPNDRKGFEILLLWLNDYHINKKNGHICMEATGVYSQAIAYYLLFAGFPVSVEPPLKVKRAFDPVGHKTDPVDSKQIAEYAYRFQDELTSWKPRDEILEKIRQLLSVREQFTKQKVALDNSIQAYSKQRVQVALIKKAQKETLNQLKKQIARIDKELEKLIKQDPEIFQKASNLKSIPGYGMLLAAHLLVITENFTKIQNSKRLASFVGIVPYQHQSGTSVYKRAKIRHFGPGPSRKLLRLAAQSVATHNATFRRYYLRKLDQGKPKPLVLNNIANKLLKIACTIIRNNTRYIKDYRSINPMYLKSLKSA

SEQ ID NO: 484928 - protein, 348 aa, unidentified
MPTMTETARCVTAGVDTHRDVHVVAVLDERGAQLGCEPFAADPAGYRKALAWVRSFGPVERIGVEGTGSYGAGLTRYLHNERVEVVEVSCPDRRRRRSHGKSDPVDALAAARAAQSGEASAEPKRRTGNVEAIRALRIPRRTAATSRIDAINQMRALLVTGPEQLREAFRDTTVWQMVTTAARLRPGDPTTVAGATKFALRELARRIQDLEEEIERLDAIIGPLVKATAPALVARHGLGPQTAGALLVAAGDNPERLHKESAFAHMCGSAPIDASSGLITHKRLNRGGDRSANEALWRIVMVRMVSDPRTRHYVERRTKEGKSKREIIRCLKRYVARELYPYLLETRS

SEQ ID NO: 484929 - protein, 300 aa, unidentified
MDYFAGLDVSVKETSVCIVDDAGKIVREARVASEPEALLQVLTNTIYRFKRVGLEAGPLSQWLYSVLAEAGFPVICVETRHMRAMLKAQINKTDRNDARGIAQMMRVGLYRPVHVKTLRSQKLRVLLTHRKLLQSKAIAIENDLRATLRNFGLKVGMVGTLKFEARIKELVEDLRDLAVLVEPLLLVRRVVREQLGILHRRLLAIVRDDDVCRRLMTIPGVGPVVALTYRVTVDVPARFTNSKAVGAVFGLTPAKYQSGENDRTGAISRCGDEMMRMMLYEAAQIMLVRSTKWSWLKAWR

SEQ ID NO: 484930 - protein, 377 aa, unidentified
MDQQTGEIISQPVSFSNDKEGFDFLVQKIKSYPKDSILIGMEDKGHYHFALLKYLLDLQYTVALINPKTTDFNRKMQGGITKNDKLDTINICDVLDTPERKKQYRITKVNSFDLYEQKQLTRHHHNLKEEENVYKNRLQKCIDIVFPEFNKLFNSKYGIVYMNILKMFGSAENIANTDIRTIRKCFEIEGRGNRISLTPERLKECARSSIGISSSAEVIQIKHLTAQIELIEEQLTEIDKKIEEFSIQNNSPILSIPGISHFSGTSILAELGDISNYSKPSQIIKFARVAPLHYESSQFNAQHTAITKKGSKYLRKTLYQIILPVIRHNPVFNKYYQLKISQGKGHRCAQGHCVRKLLRIIYHLLKTNQQFDPQLLR

SEQ ID NO: 484931 - protein, 424 aa, unidentified
MNLTQNDRLKQVTSDTLIVGVDIGSQTHFCRAFDWRGFELSRRVFKFSNTGMGFLAFLRWTEELMNKTEMKKVIVGCEPTGCYWLTFQKFLQDHDIQLVTVNPFTVNRSMELDDNSPEKSDLKDPKTIALLVKDGRFSTSYLPSGVYAEIREASVCRDQIMKQHVRLSNQIQGWLQKFFPEYFECYAEWDSTSGLMLLKEAPLPQDILKIGAGGINQIWRDAKVRAAGIKRAQILVEAAQNSVGLEAGEAARIEIWVLVNDYILKAEQLKRLDEYLEEKVKEVPNVEKLLAIKGVGMSTVIGFIAEVGDIGRFTDPKQIQKLAGLEIVKKSSGKKKGQPRISKRGRRKLRRTMYESARTLMQWNPAFQDVFLYYRNRKRKPLGSMQAKIAVACKAIRVFYVVLQTGCDFDEEKFRRDIIRPEAA

SEQ ID NO: 484932 - protein, 334 aa, unidentified
MEKITTVGIDLAKSVFSLHGVDGAGQVVLRRTVRRDQLVKVVAGIAPCLIGMEACSGAHEWSRRFQELGHTVRLMAPKFVAPYRKSGKNDGNDAEAICEAVTRPSMRFVPVKSLEQQALLAMHRVRQGFVVERTAIINRLRGLLCEFGVVLPLRSVTVRRQAAAAAENLPDLARRAIGDLLDELRVLDERIGGYDREIEAQAKLCEPAQRLMKIRGIGPTTALAIVATVGNAREFKNGRQFAAWIGLTPSQYSTGGKPRLGHISKRGDAYLRNLLVQGARSVLNSAGMHPDRMSRWILELQPRRGYYRTLVAIANKNARIAWALLAKNETMRSA

SEQ ID NO: 484933 - protein, 359 aa, unidentified
MTTYYIGADVHSNSTELAIERNNKIVHRYKLPTSIAALSNVLDSLKGEKHLAIEEGPMAGWLYRNLSSKVDELIICDPRRNKLIDSDGDKDDKIDAAKLACLLRGNYLRPVYHSDDDGRTELKHWISLYHDRVRDAVRNINKIRSCCRMHGLAIPRVVVRQAKARDKWLSDANNQTLAKQLELLWIGYDATSQQVRIARRRLSVLSGKYPIIKLWSQLPGIGLVRAVTLFAYLDTPWRFKRKNKLWKYCGVGLQRITSGTDSKGRPKPARLQLPWAVNRTLKNAILGAVSSVINQKNNLFREYYERMLEDGIMPSNARHAVARKLLTVMWAMWKTNSRFDESAWRKPDTKMALALSRLS

SEQ ID NO: 484934 - protein, 435 aa, unidentified
MEEVTDEPLYRDRVCGIDIGKAQMVATIRVPSDKDPARRAQETRSFGTTKKEVLALADWLRCWQVPAVVMESTGDYWKGPLYRLEAEGFECVLADARQVKNLPGRPKRDPSDSRWLAACFERGAIRSCFVPDPEFRIIRLHTRYRRDLTDERTREKNRTEKLLESAAIKLSSVVTDLHGVTGRDIMEHLIAGERNPKVLAQLARARARRKITELEEALEGAEFFTAEHAALLAAMLARIDRVNTEIDELTAVIERLLAPYEEQLQQAESMPGWGRRSAQDAVAETGVDMTRFRTGGHLSSWAGKTPLDNQSGQRTGRAKSKKGNRYLAAVTGETAIAAGKTQTREGARYRRLARRRGKAKAQVAVGNTQLKVYHKLLSNPGMRYQDLGADYYERQRDVRRQIAHHIGKLGALGFEVTLCRIPEPQLDGTGQTRAT

SEQ ID NO: 484935 - protein, 429 aa, unidentified
MNCTQNKKIEQVKETTMIVGIDVGSEKHYFRAFNWRGIELTRKPVAFSNSMEGFNSFYNTIVELMQKSELEEALVGIEPTGHYWFDLGQFMGEKDIKFVMVNPHHVHKTKELDDNSPSKNDRKDPRVIAGLVRDGRYFYSYMPTGAYAELRNASNRRFVLVEEQTRAKNRLQKWIAVYFPEYKGIYTHIDAKGGMLVLKKAPTPEEIVRLGVEGIIKIWKDAKLRGNGHKKAMLILAAAMRSIGLKTGLTEARMEIQDLIEDYELQTKRLERVNDLIKGLCQQVRYADKLLEIKGIGITTVAGFIAEVGDITRFDSTKELQKLAGLELVADSSGKHNGKTKISKRGRKRLRYLLFEAAISVVGKNEEFKEIHRYYTTREKNPLKKMQSLIAVACKLIRVFHAILTKGIRYDASKMLKDIRHPGEQLKAA

SEQ ID NO: 484936 - protein, 342 aa, unidentified
MTYFTALDVSLRFVSICVVDDTGQVCFEAKVPADVHRIATCLRKFSDQVKIVGFEAGALTQYLTYGLQAAGFEVVCLEARQVNAALAAMRNKTDKNDARGIAQILRTGWYSRVHVKSLESHQIRALLASRKAILKKCVDLENELRGLLRVFGIRLASKVPHGAYDAVVREQVETEPLLARALLPLLDAREVLYRTYLKLDNEVKATVRHDRICQQLMSVPGVGAITALTFKAAVDDPHRFKRSRTVAAHFGLTPRRYQSGETDNPGRISKAGDPDVRCALYVAAHSLLSRSATWSSLKAWGVRLAKTRGHRRAVVAVARKLAVIMHKMWIDGTEFRWSAESA

SEQ ID NO: 484937 - protein, 343 aa, unidentified
MTLKASFKWVNPQDINVLGLDVAKAKIDICFLGSNHSQFYQIANNSQAISQFSQELKTLGLNATIPFVLESTGSFHLLLATLLKNDGWNVKEINPIITHQYIKHTVRGTKTDTTDAQLLAKIGLIEGDNLKSFDRDLNIIKLRMFISFLAHLETLIQQSKASFNALEKGLITLGLWKSQELEKMKETIKILEQRAKGLEKEILNIQLSPEAQKQVDCLDSIVGISPFTAKVAYALFAHNTFSSKRAMLAYVGLDPKLKQSGTKTWALRISKRGHPYMRKRLFQSAFCSLQHSPYFKSIYDKHIQKWKHHFIAVLAVAKKMIYIMRALLKNNTQFDHNYHLLST

SEQ ID NO: 484938 - protein, 263 aa, unidentified
MAQQMIIGIDLAKHVFQVCMVTPTGTLKTNTTVARGKLLTFMARPPPALIFMEACGGAHDWARRFCALGHDVRLLAPQYVTPFRRGQKNDPNDALALTEAGQRPHIPTVPIKTVEQQDIQALHRVRERRMKNRTAVVNQVRGLLLEYGIVIPQGIARFRKRLPRVIEEADHGVSFVLRDLLQSLQSDLHALDTRVVEVTCQLTRLSHELEACQRLQEMEGIGPLSATALVAALGNGHDFQTGRQVAAWLGLVPRQQSSGGTTR

SEQ ID NO: 484939 - protein, 324 aa, unidentified
MSSHEIVGIDVAARKLVVIGERLALAEYENTAAGRSKLVNALSRSPQPVRVVLEATGMYFLDLACELAAAGIAVMVVNPKATHHFAEAILQRRKNDPVDAAMLREYGRRMDFVSWQPPRHELFGFRALTREVQALSKTVAAARNRLHAITATQLAPAVLIGALERQIAHNQALINELVAAAVAQTESDPELARLLARTDSVPGFAAKAAVLVIGELSVLPPMTARQWVAQAGLDVREETSGSSLARRPRLSKRGNKRLREALFYPALTAARCCPLAGAFVERLVAAGKTRLQAIVALMRKLLHGLHAMWRHDEDFNAEKLFAQA

SEQ ID NO: 484940 - protein, 331 aa, unidentified
MSVWVGVDIGSRTSVVAVRKDGRPAGQWDIAQTPAGRKAAVKKLLALKPKSIVMEATGIYYLDLALELHAADLPVSVINPKSFHNFAKLMLVNSKTDAIDAQLLSEYGERMTPRLWTPPSLVQLELRALGRHINRLVGHRTRAKNELHALQATATTVSMLIEDQEEAIASLDNRIERFRKAGRELVAQCPTLTRQYKQLLAGPGMGEVSALAALAELTILPQILKSSQVARHAGLDVRQTQSGTSIDKPGRLGKSGNAYLRAAMYMPALTAVRCDPYAKAFYESLVSRGKKKMQAIAAVMRKYLTGIWACMRGNEPFDTAKLFSSEHLRKA

SEQ ID NO: 484941 - protein, 346 aa, unidentified
MDDNYSVFAVLNREGTVEVHKRIEHEPGAIQAFLEEYPPGTQVALESVGNWYWIADEIEAADCIPLLTHPAKAKVMMGNVNKTDKLDAKGLATLLRLNSLPYVWLPPGKTRDDRELPRTRMALTKIRTALKNRIHATLAKYNQKLEGASDIFIPKWREELLGTIDQLPPETQKCMYTELELLDHLFGQIQQLETRIRQLVEESEPIQLLKTLPGIGDILGIVIHQEIGRMDRFPSAEHFASYCGVVPTVKASGGKFHHGRMRKQSNQYLKWAFIEAANVVVLRHTSPKWRSRHVARLYRRVRNRKGSKIAVGAVARHLAEAAYWVLTKHEPYREPAISRQVTPKSG

SEQ ID NO: 484942 - protein, 325 aa, unidentified
MAQNDPIVVGIDVAKDKVDACIRRFTLRQMFPNTAQGHRKLVAWLRKYQVGKAVMEASGGYEREWRNVLHKAGIEVRIVDPRRVRSFAQSAGRLAKNDPIDAEMIAWFAETFSQAPGQIPDAAREELAALAKARTALVGVKIRLLAQDEHAAPEPARKAYARILKSLVAEIDKLEAAISAKVQATPEFAERAEIIESVPGFAQTTSAILIAGMSEFGQVSDKVAAALIGVAPYDDDSGKRRGERYIKGGRRWVRNGIYMPCLGAATQYNPVLKAFYQRLLAKGKEPKVALVACMRKLIIILNTMLARRQKWNPGPHAMGRLRERT

SEQ ID NO: 484943 - protein, 360 aa, unidentified
MAKAKPVHLSPVVGGVDTHKDLHVAAVVNQNNRVLGSEFFATTRQGYRQMLAWMASFGTVKRIGVECTGSYGAGLLRYLQSTGVEVLEVTAPDKMERRKRGKSDTIDAESAAHAAFSRIRTVTPKTRSGMIEALRVLKVCRKTAVAARRIALQMIQMNIVSAPDELRDQIRHLTRMQLTRTLASWRPDVTAYRNVQDAYRIALKSLARRYLELHDEIADLDIMITSIVDELAPELIKCKAVGYECASQLLITAGDNPQRLNSESGFAALCGVSPVPVSSGKTNRHRLHRGGDRAANSALHIIAIGRLRTDTRTQEYVAKRVAEGHSKMEALRCLKRYISREVYTLLRNQNRLINSTQITT

SEQ ID NO: 484944 - protein, 353 aa, unidentified
MRTVGEEYDRVVGVDTHAATHTMTLLTATGGVVEHRTFPTSAAGLHRALAWIRDRTQTRTCLVVVEGTGSYGAQLTEHFTQGGILVAEAPTVPAARRRGKDDVLDSARIARAVLGLRLDQLCWPRAGGTRTAIRVLVSARDQMSTERTKIINSLTALVRGVDLGVEAQKALTSAQITTIAGWRTRDEDPATAACRREAIRLASRIRTLGHDLAANMAELRRFTAAEVPELLNLPGVGPVVAGTILLAWSHPGRVRSEAAFAALAGTSPIPASSGNTIRYRLNRGGDRQLNRVLTTIVLVRMRHDQAIGDYVARRRAEGRTTKEIMRVLKRYIARHRSDSSFFGVLRLPAARLH

SEQ ID NO: 484945 - protein, 391 aa, unidentified
MSMYFIGIDISKYKHDCCIISAADQKVVSKVTIKNNKAGFNELLTIIHSLANPADIRIGFESTAHYALNLELFLENSLLTFMEVNPVLISEYKKSKTLRRTKTDSVDCESIARWLMTVEYKPHSKGFYHAYSLKSLTRLRDKLIRQRSFYLVKITNVLDHTFPEFKPFFNERLSKTALYLLENYGSAGKMARMNSASYEKLRSLSRGKFSPQQFLRLKELAANTVGVNNSIFDVELNSLLSLYKSLVKEINTIEKEINKLIEEVHPRYMSVPGIGPLSAAVIYSEYGDISNFTNPGQMLAFAGIEPGINESGTESHGGKMVKRGSSQLRYTLINCCLPLIRFDMTFATYYAKKRGEGKPHRVAITHVAKKLIRVIYALERQDIDFNAQKLR

SEQ ID NO: 484946 - protein, 417 aa, unidentified
MKKHNNSRKNSELTSKRAKSRGPVQRDTKEVLAELVGKLREKLDPKVGAASAGEKNQRGELRPNLDRLTVGVDLGDQWSHYCILGLEGETLAEGQLRTTQQGVAEFFRALNAARVAMEVGTHSAWVREVICSYGHEVLVANPRLMEGSKRRKRKNDRIDANKLARLGRVDPESLHPIEHRSAEVRQDLVMLRARDALVAARTELINATRGLVKSMGARLPKCSSPSFAQKVEEAVPAQVREALLPLVRMTAALSDCIHGYDEKIEKLGSEKYGHTALLRQVKGVGPITALAYVLTLENPERFVKSRDVGPYLGLVPKQEDSGESQPQLGISKSGDTMLRKLLVGSAHYILGPFGPDTDLRRYGLRLCERGGKNAKKRAAVAVARKLAVLLHCLWVSGEVYEPLRQGMSATIAPAVAA

SEQ ID NO: 484947 - protein, 401 aa, unidentified
MPRQGFIGLDGAKDTFTAAFLIVDALSGQILHEQIATFSDDHPGWPRFLATWEPLHADFWWIGLEASGPYSALLEAHLLRLHRPNVSLHRLSPLQVRDFARARSRRRTQTDRLDACTIALFLRQPLTVQALPAPLQDHTPLRALAHLDPHRAQELTRTQNQVRQLLHFLFPELERAYARFPKALRALLRHFPSAHAIAQAPLQDLHALLPPRHRLDLEALQALARASFGLHDPIRAQTLPLLLDRWAFPETLRARCFAALQQAVRPHHPQAWRLLRTIPGIGPRRAALFLALTGPLDRFPDRKALIADAGLDVTLHPSGRFAGRCRLSKRGDPLLRHVLYLIAAALKRYTRPFAQAFAYYRHPGRAVRETLVILSRKALGMLDHLLRHQVPFQDLPQPAPV

SEQ ID NO: 484948 - protein, 429 aa, unidentified
MQNESIPDARGPVFCGVDTHADSHWLYVLDWRGRKVLSRQFPADAAGYEALAGAIAAAGEPACIAMEGTSSYGAGLTRHLASLGMPVREALSPARMQRRRPGQGKCDEADAERAARAAMSGSRLGTPKSQDGWVDGVRCMLAARSGAVKARTSAINTARSLLTTAPEGLRSRFRGMGGPRLMEELPSVRAEGALGAALGALADLWGAARDAALDMERAIEASLEENCPALLAMYGCGPVSAAKLAVAAGDNPGRLRSEASFAAICGACPIPASSGKTVRHRLNRGGDRQANSALHEIARQRVMRDPETAEYAERARGRGKSDREVMRCLKRYVAREAYRALMRPHEIRRPEDASELVAARRAAKVSQVRAASILGTSEKYISMLERGQRELKPIRRAYEAWVEAGLPLDWDRQAFEAERKMDSKKHLAK

SEQ ID NO: 484949 - protein, 338 aa, unidentified
MQHEPVADAALPVAGQSPDPAPVAGVDVSKGKLDLFVDTVAGGAGLRLAVDNDDAGIGRLVGKLLECKARLVVLEATGRYHRRAAAALLQAGINVAVANPAHVRDFARAAGKLEKTDRVDAEVLARFGRAMNPRAAARTPQNQTVLSDLVCRRRGLVQMRVAEANRAHDRLPKLAASQSRKLLRLLEQQVEDLDREIAKLIEADDDYGHKAKVIDSIPGIGPGTANQLVVGLPELGTLNRREIAKLAGLAPLNCDSGHYRGQRRIRGGRQDVRTCLYMAAFNARQKCRRFKRYFDGLIARGKLYQVAMTACMRKLLVTLNQMVRNNTHWDQNLHGALA

SEQ ID NO: 484950 - protein, 358 aa, unidentified
MLDTTTFVGLDVHARSIKAVSLDVMTGEVRCATFGYDAGAVAEWVRSVDPKAKCVYESGVTGFDLQKRLSGLGVDCVVGAVSKMIKPSADRRRKNDRNDAEFLARMLSVGNVVEVWVPDDECEAARDLTRALEDARDDLSRSKQRLSKFLLRHGLVFDERTPTGRRKGNWTRAHWSWIESIRFAEGADNDVLAYYVDAVRRAAEEKARLEGLVEAEARKPRWRRRVDSLRCLKGVDTATAADLVFEAGEFSRFRNARSFAAWVGLTPSEHSSGESDRRGAITKAGNKHLRKALVEAAWHYLTCSGRPKEPARGQAPDRVARRHAAKGVRRLVERRSSPAGCGRSASWPRRRRGAVPRT

SEQ ID NO: 484951 - protein, 405 aa, unidentified
MDIIIERGCGLDIHKKTITACIMGIGLRKEIRTYSTMTNDLLRLKTWLKENFITHVAMESTGVYWKPVFNILEDSFDVMLVNARHVKNVPGRKTDVQDSEWLCKLLRSGLVRSSFIPPIEVRELRDLTRYKRKLIQNVTSEKQRIEKILEDANIKLSSIASDTFGASGSRIIEELMKGKLNAEEMAELSKGRLRRRKEELKEALVGKMQDNHKFMIKASLGHIKAIEEKLSALECRIQEKIERHFKVEYELLKTIPGVKENASVIIAEIGVNMNIFSTEMHLSSWAGMSPGNNESAGKKKPGTTTHGNKFLRSMLTEFAWVAAKTKDTYLGAKYRSLVGRRGKKKTLVAVGHKILIMCYHILKYKVPYKELGGNYLDDRKKDRITKSYIKRLNSLGYTVTLKEAA

SEQ ID NO: 484952 - protein, 373 aa, unidentified
MGEYSEVFVGMDVSKSRIAVALAEGGRTGETRFLGEIEASAGAVEKLVRRLSAKHEEARFCYEAGPTGYGVQRLIDKLGHECIVVAPSLTPRKPGDRVKTNRRDALSLARLLRAGELTAVWVPDDRHEAMRDLTRARAEAAADLRVKRQQTGAFLLRLGRLYPRKKTWGGAHKTWLASQAFEHLEQRIAFAEMLVAMGEAEARMVRLEKAIAEAVCDWSLAPMVVALMAMRGFDLVAASTLLAEIGDLSRFRSPRELMAFLGLVPSEASTGDQVHRGRITKAGNGRARKVMIESAWCYRHPARIGPAKLKRVEAAPPAVRQIAWKAQTRLAARYRALIKRGKSKNVAIVAIARELCGFVWAIHRALCAERAAD

SEQ ID NO: 484953 - protein, 333 aa, unidentified
MEEGTAVQYIGFDIHKRYTFYTQMDATGQIRRQGKLTNSRDALAQFFGDVAEPARVVIEASMNWYHLYDLLETLAIPVTLAHPLRTRAIAEAKVKTDKVDSTILAHLLRTDLVPAAYIPPREIRDLRELLRYRAVLVRLQTMLKNRVHAILLKHGYECPYTDAFGGQGRAWLGTLPLRPVYQQALQGFLAVLDPLHAQILDASRTIDQEAKAKPLAQTLCSLPGVGHYTALLILAEIGDITRFPGPKHLVSYAGLAPIVRGSGGRVYTGHISKQGSTWLRWILIEAVLHAVRRPGRYQQIYQRLAPRKGAKLARVAAARELLTTIYWMLRHAH

SEQ ID NO: 484954 - protein, 353 aa, unidentified
MKKIAIGIDFSKKTFDATIIRRNDDSYTELAYSKFNNDANGFKAFEKWVKASIKGTPESKKKSELLFCGEHTGMCSIPLCDFLAKKQYFMWLESAMVIHRKCGIVREKNDKIDSRRIAEYALRNFSTDIIPYELDSKDLKRLKSLYAAHDMLTKDKVSKINQLKSGTLDASPSAKREIEKQLSHIRKSLDAIDEEIKYLLSQSQEFCHNFKLLNTFKGVGMLTIACLIIKTRNFKDMRDSRELGCYVGVVPCKQQSGTSIDKPSRTSKYRDKNANSLLTNCVISALSHNNPIIRPYYDRLIRRGVHPNKARNNCKFKIINILLAMVRNDTDFNMAIHGKSKEKWRAEQAAAAS

SEQ ID NO: 484955 - protein, 414 aa, unidentified
MFAVGVDVSNGRSTVAVLQTKTSALMKPFEIPHTAEGFASLAGKLAGLDGEVRIVMEHTGRYYESFARAMHSAGFFVSAINPLAIKNYQDGINIRRVKTDKADAMKITRFALDKWEILPQYTPMDTIRYDLKTMHRQFQLSSKTKTALSNNLVALLEQSYPGANRYFDSPARPDGSQKWVDYVDTFWHVDCVARVSQNAFVERYRKWCKRHGYNFSQQTAIDLHTDARQKFALVPKSDTCKLLVREAVSQLNAVSRTVETYRTEMDRLASQLPEYETVMAMTGVGKSMGPQLMAEIGDIRRFPHQKSIVGFAGTDPIKDDSGDKVSDSKPSSKRGSPYLRKTLFVIMSILLQLHPQDDPVYQFLDKKRSEGKPYYVYMTAGMTKFLRIYYGKVRDCLKEQGLWEQTSDAPGMAD

SEQ ID NO: 484956 - protein, 398 aa, unidentified
MTESSDYESVQVFIGVDVGKDTHHAVAINRSGKRLFDKALPNDENKLRSLISDLKQHGQILLVVDQPATIGALPVAVARSEGVLVGYLPGLAMRRIADLHAGEAKTDARDAAIIAEAARTLPHALRTLKLADEQIAELSMLCGFDDDLAAQTTQASNHIRGLLTLIHPALERVLGPRLEHPAVLDLLQRYPSPEKLASLGEKKLAAQLCKLAPRLGKRLAADIAQALAEQTVVVPGTNAAAVVLPRLALQLITLRKQRDEVALEVEQRVLAHPLYPVLTSMPGVGVRIAARLLTEVACRAFASAAYLAAYAGLAPVTRRSGSSIRGEHPSRRGNKALKRALFLSAFAALRDPLSRAYYTRKMSQGKRHNQALIALARRRCDVLFAMMRDGTFYTPQGS

SEQ ID NO: 484957 - protein, 373 aa, unidentified
MAESITKVALDTHKNQHTGAIVNCETGEMDVFTVKNTVKDIKKMVVKLRKRSGGSLHFCYEAGVCGFALQRQLEALGCQCDVIAPSLVLTKSGQRIKNDSRDAKKLLEQFDAGQLTVVYPPNAEQEAAREITRCRQAAQEDLKRIRHQLLKFLTRHGYIYREGRHWTQKHLQWLKSLDFDLSDLRLVFECYFTELQHCMQRLDGLDKEVQSLADRPDYRPIVGFLRCFRGIDTLTATTVLTEIFEFGRFSSPRKLMCYLGQIPSEYSSDNVHKRGPITKTGNKRVRRLLVESAWHYRHRPWVSKDLKRRRKDQPQWAVDIADHAMSRLYKRYWHLMDRGKLPTKVAVAMSRELAGFIWAVLREYHQRQERKSA

SEQ ID NO: 484958 - protein, 409 aa, unidentified
MELTPIYKRVIGLDVHQAQISACAIVEQADGSSTVERREFGGFKRDREALAEWARSIGPDVVVMESTGIYWKSPYAALESVGIVAWVVNARHVKAVPGRKTDVADAQWLATLARAGLLRASFIAKADLRSLRHIARQRQKLGGMLASEKNRLHKLLTDAGIRLGVVVSDLHGQSARAMVKAIITGKSVPEVLSLASNRLRASRQDIFEALQAEELSGAHRFVLTEIMAHIEEVEARMARFDAELLRSLVDAGYQAPLRLLQTLPGIDLMGAAMLLVEIGADMSVFGSAQRLASWVGICPGNNESAGKRKSGHIRKGNAWVRRLLCEFAQAAARSRCALKAKFQSLSVRKGHKRSIVALGHKLLRTIYAMLSKKTHYVDKIVDYEALMVARNAPRWLQMLVKHGFVPASA

SEQ ID NO: 484959 - protein, 572 aa, unidentified
MSRPNLMLRDAALGYASRGIPVLPLHHPLPHRSDLQPLTGNHQLPSPAVRTSCSCRDPGCGQPAKHPLGSLVPHGVKDATANRARVLARWASHPQANIGLATGRLFDVLDVDGPAGEHAIRQLAATHGLASSGPLVRTGGGWHFCEGEQGRCARRRARPGLTLGITGVLPSDRSVDQLPRTPPGAPSADGVTSEEPGRGPRRSTVRRLAVGAVPTHRRAGRDDMASLPAVARQVTVGVDSHKDVHVAAAVDQVGRVLGTTWVPTTAQGSVQLLRWATRLGQVQRFGIEGTGSFGAGLSRWLQQQGYQVVEVNRPNRQARRRRGKSDPVDAEAAARAVLAGEATTTPKAADGTVEMLRVLRVARRSAIKARGQAANQLHSLLVTAPDPLRHQLRGLPLARLVQVAAAVRPGPLTDPQAATKFTLRELARRYQLLTAELDRLDAELAALAPKAAPRLLTRRGVGAQVAGALLVVAGDNPGRLRSEAAFSMLCGSSPLEASSGQTVRHRLNRGGDRDANNALWTIAMTRLSCDERTQRYLARRTAEGKSKREIIRCLKRYIAREIYRDITAAVGS

SEQ ID NO: 484960 - protein, 466 aa, unidentified
MAQGRTRGKRKDERKAGPKGSAGMRKIHPNAAGIDIGAEAHYVAVPPDRATPVVRRFGCLTPDLHEMARWLKACGVDTVAMESTGVYWIPVAQVLEQYGIEVVLADARHVKSVPGRKTDVVDCQWLQELHHYGLLTGAFRLGREMQVLRTYWRHREGLVQGAAQQIHLMHKALEQMNVQVHKVLSDVTGVSGMRILRAILAGERDGARLAALCDRRVQASAETVVKALTGDYRRDHLFTLRQAVEMYDVYHAKIAACDQELEEQMAAFAPQADPGDLPPRGGRKPSARRKNEAHFDLRAAQYRLAGVDLTQINGISSLTAQTVLCECGIDLSAFASEKRFVSWLGLCPNNRTTGGKVRRTRTRRVQNRLADALRVAAQSLHHSETALGAFFRRMKNHIGPAKAITATARKLACQVYRLLKYGEAYVDQGEQRYEELYRERLLRSMKRHARQLGYDLVSVQTGEVVS

SEQ ID NO: 484961 - protein, 375 aa, unidentified
MGDHSEAFVAFDTSKLRNAVAIADAGRMGEIRYLGEIENSGAATAKLVRKLAAKHQRLTFCYEAGPTGYGLYRLITSLGHECIVVAPSLIPKRPGDRVKTNRRDALSLVKLLRAGELTAVWVPDRHHEAIRDLTRARGTAALDQRRKRQQLSAFLLRLGLHYPENRHTWTKAHMNWLASQKLEHAEQRLVFEEMMLAMRQAQERIERLEQAMRAAVPDWSLAEVVTALMAMRGMDLVSATTFLAEIGDLSRFATPRELMSYLGLVPSEDSTGGTVKRGPITKAGNGRARRMLVECAWSYQHPPRVGKDKQEKVAAAPPAVREIAWKAQCRLNRRYRALVRRGKLKTVAITAVAREFAGFIWAVARAANAARAAAK

SEQ ID NO: 484962 - protein, 366 aa, unidentified
MKKSSTVRVNGNMIFKGHKLTIGLDLGDRWSCYCVLDEAGEIILEQKLPTTPEAMKQTFERIPRSLIALETGTHFPWVSRLLRELGHEALVAHAQKVQLISKSKRKDDRHDARTLARLARIDPELLGPVRHRSAKAQIHLTVIRARAELVSARTALVNAARGLAKSYGQRLPKCGTAQVSRELAAELSVELREALEPLLAEVESLNERIKEYEVRMEKIARESYPQVELLKQVKGVGTQIALTYVLTLEDPYRFPKSREVGCFLGLRPGRRDSGESQPQMHISKEGDPYLRTMLVQGAHYILGPFGEDSDLRRWGLKLAARGGKNAKKRAVVAVARKLAVLLHRLWVSGEVYEPLRNSHEALRAVA

SEQ ID NO: 484963 - protein, 408 aa, unidentified
MEVMYPRCAGLDLGKDALVACVRLHGRPVQQEVRTFATTTRELLALAAWLTDQGVTHVAMEATGTYWKAVWHMLEEDFTLVLGNAGHIRNVPGRKSDVKDAEWIADLLAHGLIRGSFVPPAPIQDVRDLTRTRKQLVREIAQHAQRIQKTLDVANLKITGLMSNVLGVSGRAILRALIAGQTDPIQLADLARGTLKNKRAALVEALTGRVTPHQRRLLKLHLDLIERLEAAVADVDAQLGEALAPFREAVERVDGVPGIDTIVAQAILGEIGLDMSRFPTHQHLISWACLCRRLDESAGRRKSTRTRKGACWLKTVLVQAAWAAVRTKNSYYRAQFLRLRARRGPKKAIIAVAASMLTAIYYILRDGVEYRELGGQYFERLDRPKVTQRLVKRLRDLGYHVQLEEVAA

SEQ ID NO: 484964 - protein, 344 aa, unidentified
MNTSMNHIVGIDIAKDTFTARLLALGESPTPIGEVESFPNSSEGYAQLKRWAVGTGAEPESSQVVMEATGVYWEACALYCHGEGFAVSIVNPAQIKFFARTTLMRGKTDTLDADLIARFGAAIKPRVWNPPGEAFEELQLFSRQRDAYVAMLTQERNRLHALSHRVHCPRQVIRMTKAHIRFLEKRIEELEQGFKDHLDQSPEWRRSVDLLTSMTGIGVVTAGVFLTETLAFSTMVDARQLTAYAGLAPAPHTSGTSVRRRSRISKVGNPRLRRAAYMASISGIRANPVLKAFYKRLREKGKPAKVALVAVARKLLTIAFALVQSQRPFDPLYISTKPGAKVCA

SEQ ID NO: 484965 - protein, 347 aa, unidentified
MRFYTKQHSYYCGIDLHARTMYVCILDQDGEIVFHRNMTSSPESFLKAIAPYREGIAVAVECIFTWYWLADLCAQEKVPFVLGHALYMKAIHGGKAKTDKIDAHKIAVLLRGGMLPMAYVYPAEMRSTRDLLRRRMHLMHKRSELLVHIQNTNSQYCLPEFGKKIAYKKNREGVAEHFPDLSVRKSMEMDLALIDHYDELLTDVELYITKAAKIHDADAFHRLRSVPGIGKILALVILYEIHDIHRFPTVQDFVSYARLVKCSKESGGKRLGYSGAKIGNVHLKWAFSEASVLFLRQNPQAQRYLDRLTSKHGKAKALSVLAQKLGRAVYFMLNRQKAFDMKKFFSS

SEQ ID NO: 484966 - protein, 358 aa, unidentified
MNNVSRQQEKIYFGLDISQKTIEIFALKGEKGVSFGKIPNTPKGLTEFFDKVSVPPETITIALETGTHSAWISRQLEERGYEVIVAHARDLAFIYKGDKKSDRIDAEKLARVARADKKLLHPVKLMDVKRQEDLLTIKARDLLVKEKTCIINAIRGFLRSLGIDDTQYSSETINQIYDELPKKLKQNLRGLFETLTSINTNIKNYDKRIAKISKDYPETETLQQIKGVGPLIALSFALIIGDANRFTSRECSSYTGLAPKRDQSGDVDKQLGISKCGNKLLRRLLVQGAQYIMGPFGEDCDLRDFGNRIAQRGGSIARKKAKVAVARKLAITMLALWRNPDVAYDPHFKINRKKVKSA

SEQ ID NO: 484967 - protein, 389 aa, unidentified
MEARTVNNLPPAGTHDDAVRCLLAIELSKKSWIVAVNTSLSDKISRHTLKPCDGKELLDLCERIRTRVARETKKRVEVVSCYEAGYDGFWLHRLLEAHGIRNYVIDPASLQVDRRARRAKTDHVDAERLLRSLMAYLRGEPKVWSVVCVPSVAEEDDRRLHRERSRLINERVQHVNRIKGLLAIHGIYDYQPLRCDRMQRLERLRAAEGRTLPPRLKAEILRELQRLELAIRMIKTIEAERDAIASPKTEMEHTSAKKIQHLAKIKCVGPEFAATLVGEVFYRSFDNRKQLASYVGLTPAHFQSGAMCRDQGISKAGNAKARTVMIELAWLWLRYQPDSPLSVWFRERVGQLKGRIRRITIVAVARKLLIALWRYLETGLVPEGAALKV

SEQ ID NO: 484968 - protein, 359 aa, unidentified
MSPMAGVLKKSARADPAVQTNANSNQSTPSQSRMNSTCSSLAILGLDVAKASVQAELQSASGSKVRFAFANNPTGFKKLARVLEQHPPAMLHAGLEATGPYSQALARWLHEQGYRVSLLNPRRVKDYARSAGLRNKTDALDAGVIADFVRAHRGRLPGWRPAVAEVQQLQELVRRRHQIEVMLLAEKNRLEASADTVRCSIERLISMLRAEKASLERALAQQIDSHAQLARNHQLLRTIKGIGPLSATVLLAEMAGPDQVQRARQAAARAGLSPRRQQSGTSVRRNKGIGKEGSRYLRKALYMPALVAIKHNAPLRHFARKLQAAGKPKMAIVCAVMRKLIHISFGVLKHQQPFNPSLA

SEQ ID NO: 484969 - protein, 352 aa, unidentified
MTRITTIGVDLAKKVFQIHGVDAEGKVVVARKLRRKEVLAFFAKLAPCLVGMEACGSAHYWGREIAKLGHTVKLMPPKYVKAYVKRGKTDAGDAAAICEAVTRPSMSFVPVKGIEQQGLSMLHSARTQLIGQRTQLINGVRGHLSEFGIIAARGLLGLAELAAIVRDKSNRRLPATARAALMILVRQIGAVSAEIAELDTALRKDNNASELGARLETIPSVGPVIASALRARVTDARLFENGRHLSAWIGLVPENDSTGGKIRQNGLSKKGDRYLRSLLVNGAMAVVQQALKRPDKNPWVTKLLGRMTAKQAAIAIANKTARIAWAIMVHGGVYEAGHRAPQYRAEACAAAA

SEQ ID NO: 484970 - protein, 390 aa, unidentified
MFYAGIDVAMDKHDCVVLDSDGNCIVEVFTFKNNRDGFKTLKKVLLSCSRNPKKIKVGLESTGHYSDNLLAFLNSIGFAPVLFNPLHTNLFRKGLSLRKTKTDHVDAHTIATMLRTEDLKSYSQQSYHLAELKSLTRYRSALVSDCSRHKVTLVRLCQILFPELKTVVSALHVASVYALLSELPSADKIAKCNLTHLTALLSSASKGHYSRDKAIEIRDAARASIGIKSVVKELELQQTIELIQIYQQQIEAVEEQINNLMDEIDSPITSIPGIANRMAAVILAETNNFQDFERAEQVLAFAGLEPSVYQSGQLTSTHSKMVKRGSKYLRYAIFNATKYVCHWDPTFRSYLAKKRAEGKPYNVAVSHAAKKLTRVMFHLVKTNKEFVPQA

SEQ ID NO: 484971 - protein, 343 aa, unidentified
MQNSTRIGVDIAKAVFEIAVSDRPGHVVRTARLRRSQFLDFLAQQPAATVVMEACGSSHYWARRIQELGHHVILLPPHQVRPYVKRNKTDKTDAKGILEASRNEDIRPVPVKTVPQQTLTSLHRLRQGWMHERTARLNALRGLLRELGVFIPVGAENVVPAVWALVEDADSELPDALRPLFAEACREIRDIEARVKLTERQLEALAKQLPAVALLLSVPGIGLLTATALVAFIGDIQRFPSGRHLASYLGLTPREFSSGLKRYLGRISKRGDSYLRTLLIHGARSVLTHTRTHRPDRLREWAHQIAKTHTHNKAAVALANKMARIVWAVWSRQQPYVQAHKAA

SEQ ID NO: 484972 - protein, 382 aa, unidentified
MDLIHSCCAGLDVHKKTVVACIRRTGPDGRVDRQVRTFGTMTADLLALADWLAAADVRQVAMESTGVYWKPVFHLLEDRFEVVLVNAHHIKQVPGRKTDVKDAQWIAQLLQYGLLRPSFIPPPPIRELRDLTRQRAQRVRDRAAVANRVQKVLEDANIKLASVASDPLGVSGRAMIRAMIAGEQDADKLAELARRRLRGKIPELKRALQGRVTAHHRFLLRMLLGQIEALEGLIAQFDDRIGVVMAPFVEVARRLEAIPGVGPQAAEVIVAEVGTDMTKFPTAGHLASWAGLCPGNDESAGKRRSGKTTKGSQWLRAVLVQVAWSASHTRETIFSAAYRKWAKRMGKKKALVALGHKILVVIYQLLKDQTQYQERAKPAQAA

SEQ ID NO: 484973 - protein, 348 aa, unidentified
MESITVGIDLAKQVFSVCVMDDRGRVNQRLELKRETLRTWLMQLPAGTVVAMEACSGAHYWGRYCQQHGLAPRLMAAQFVKAYRKNSAVKNDRQDAEAIATAARQGNMRFVSVKTEEQQARLSWHRVREGYKKDSLAVMNRIRGLLSEFGIVIGQSAVALRRALADLESVSLPPEFVQLVRLQQRYWEAIDACQLACDTRIKAHADQDERCQRIRGLTGVGPLTADAMVATLGNAVDFKNGRQCAAWMGLTPSQFGTGGRVQLGRISCRGDSYLRTLLIQGARSSLQRAKLTPSDKAFDGEFSPEKLEPVINAYAAQGWRVVSVTTLRLPDGPGATRDELIVVMGRDK

SEQ ID NO: 484974 - protein, 344 aa, unidentified
MKYFTGIDVSLRSVSICVVDEAGAVQYEGKVPAEVDLIVAALQRCKAEIKQVGLEAGTLTQYLTYGLQKAGFEVICLEARQTAATLAAMRNKTDRNDARGLAQILRTGWYRTVHVKSLESHQVRALLASRKALLARCVDLENELRGLLKIFGVRLAPHVTHNRFDETVRAAVSTTPELNTCLLPLLDARTVLYKTYLKLDNAVKSVVRHDPICQRLMTVPGVGPVTSLTFKAGVDDANRFRSSRNVAAHFGLTPRRYQSGETDNPGRISKAGDVDVRQALYTAAHALMTRSDAWSTLKAWGLRLAKVRGHRRAVIAVARKLAVILHRMWVDGTDFRAARLQGVA

SEQ ID NO: 484975 - protein, 436 aa, unidentified
MRGCRCSMIMGFTKPIEHFNLQRKKVITMNTLYVGIDVSSKSNVVYLMLPNGDKHSNFSVANSHEGSTLLVKKIYSALTSHSLDTVLIGLEATSVYGDNLVYFLREDATLAPFNRKIHVLNPKQVKKFHDTYNDLPKNDYVDSFVIADCLRFGRINKEVYMGDYRYKALQNLTRARFFAVQNLVKEKQRFMNVLFKKYSTMTQEKVFSDAFSTTALAVYDEFESAEALANMDLHELTDFIIEKGKNRFPDPDAVAKAIQKAARSSYRLPKTVNDSVNQVLSISITSMKALESQIKEFDKAIIALMELLPNVLISIPGIGPVYSAGIMAEIGDINRFDNQASLAKYAGLAWKQHQSGGFEAEVTRLIPSGNRFLKYYLCEAAFSLVRCDKEYSDFYHLKYKEVNRCQHKRALALTARKFVRLVFRLLKDNLLYCPAK

SEQ ID NO: 484976 - protein, 465 aa, unidentified
MMTEQKLWRNRKERKEWARRLQSEDPGLEVVHPQAAGIDVGNGAHYVAVRPDRDPEPVRRFECFTADLYRLADWLQECGVKTVAMQSTGVYWIPIYEILEERGFEVYLVNARHTKNLPGRKSDVQESQWLLKLHTYGLLNNSFQPPAEIRVLRTYWRQRGGHVQGAATCIQRMQKALTQMNVQLANVISDVSGLTGQAIIRALVAGERDPQKLAQLSDPRIQASREEVAKSLQGNWRPELLFVLQQEVEMYDTYQQRMAECDQQLQKHLASFVGAVPPQPSEAEPKRKKTKPAKNAPRFELHSELQRITGVDLTRIDGIDVMVAQTLISEVGLDMSRWKTEAHFSSWLGLCPNNSTSGDKVLGRGTRHVVNRAATALRMAAVTLMRSRTYLGAQYRRLRTKLGAPKAITAMAHRLARLVYRMLKYGQQYVDKGAEYYEHRYRRQQIEFLRKKAAKLGLKITLAQT

SEQ ID NO: 484977 - protein, 346 aa, unidentified
MLHTGLDLSRKRLDFHLLDEDGETVEMGAAPPDADGLRVLAARLHGHGQPLRAAIESMTGARFVHDQLELNGLEVEIADAVKVKGLAPLACKTDRIDAWVLAELSRLHLVPAIWLPDPDVRAERERARFRLHLVRHRTMLKQRVHATLLTHGRPCPVSDLFGVRGRELLARLCLPEPWAGTVEASLRLIDELEREIDACERELAALGAEHRYVPLLITVPGIAWVLAYTIAAEIGDIARFSSPAKLSGYSGLCPRVYQSGESDRRGPLSKMGPRYLRWALIEATTHASRHPAYHDRYQRTKTRLGKQRGPRIAQVDLARRLAEAIWHMLTRNRPFAPAGAPAPMTA

SEQ ID NO: 484978 - protein, 410 aa, unidentified
MKDTIFIGIDVSQATNTVHVMNSYGNKLWHQTFCNSLDGSHELVDRLLETQKKENAIFLSFGLEATGCYGDLIAMFLRETDFVPRSCKSVRILNPRQVYRFKRSYAELPKTDDIDAFVIADSLRFGRIGLKGTVVEEKYLALQKLTRSRFQVAKDLSSEKNRYLQTLFLKFSTMAQDSPFSNNFGVTALQLVNEFECIDQIAYTSIENLAAFLNRHGKGHFVDPETVAREIQKAARSSYRLPKAIADSVNQVLAMQTQTIRFYEQQLGDYDKLITAHMTGIPNTLTSVKGIGPVYAAGIIAEIGDVTRFKDQSALANYAGLSWSRHQSGKFEAEQTHMIHSGNRYLRYYLIEATNLVRKHDPELQRFYALKYKETPKTKGKRALVLTARKFVRVVYALLRDNRIYIPRED

SEQ ID NO: 484979 - protein, 349 aa, unidentified
MIVIGIDPHKQTLTAVAVDGGTGQALGELTVPARAPGFERLVEWARSLDAERSFAVEDGRHVSGALERSLIDRGERSVRVPPRMMGESRRTDRISGKSDPVDATAVARAALRHPDLPEATLAGIEREIGLLVAHREMLVNERTDRICKLRWLLHDLDPDLAPPLRTLDRFKMLDRLATTLRALEPSVVKELCLELLNRCREITVRANELERRIRAVMKTHAPALLEIPGCAALTAGRIVAETAQVCRFPTERHFARYAGTAPIPASSGARHRQRFNRRGNRQLNAAMHRIAVTQIRMHEPARVYLATKRAEGKTKTEAIRALKRHLTRVVFKTLTSMDRPTDRLTAAAA

SEQ ID NO: 484980 - protein, 341 aa, unidentified
MSQVIRFGIDLAKSVFHVHGVGASEEVLVQKPLKRGEMLKFFARQPPALIGMEACGSAHYWARELRKLGQEVRLMPPAYVKPYLKRGKNDARDAEAICEAVSRPTMRFVPIKSVERQCDLAIHKVRDLLIRQRTQLGNAVRGLLYEVGVTAAKGDGGLEMLLRKVEAASADIAEKMAEMIMPMVEQFRAIDEQLSLLDKKIIRAVKANSNMRLLMTAPGVGPIGAHAMIAKIGDGRQFNCGRDLAAWIGLTRLNHNTGGVDRQTGHITRAGDKSLRRLLVLGARSWLRQVKAKPDKGSAWVNGVMDRRPAKVAEVAQAAKTARILWAMLQSGKEYRAPAAA

SEQ ID NO: 484981 - protein, 365 aa, unidentified
MARIPQQGPIHLGLDVHRNTISIATLPPDRAAAAVEQIPSDEAAVLAFLGRFAEPSRLRACYEAGPTGYELARLLHSRGVACQVIAPSLIPRAAGDKVKTDRRDCRRLARLHRAGELVAIRIPEPHEEAVRDLCRARADLVDDRSRARRRLQAFLLRHGRIYRSGACWTGKHQRWLGTQQFDDPQLEATFSHYRAVAASCDAQVAAIEADLAEAATTPPFAEAVARLAAYRGVGQLGALSLAAEVGDWRRFAHAGAFMAFTGLVPSERSSGDSVWRGHITRTGSKHLRFQLVESAWSYHHRPLIAGALRERQQHVGADTLARSWTAQLRLCRRFRQLERRKHITGVAVVAVARELAGFLWAEMQT

SEQ ID NO: 484982 - protein, 325 aa, unidentified
MSSAFLGIDIAKHSYQVTLLQAQRPQRAHFRNDPSAFAELRTWLQRQGVTELHACMEASGRYGDALAIYLHAQGYRVSVVNPARIKHYAKSQFRRNKTDKLDADVIAHFAQTQAPPAWIPPTPETRELAELVHQYDTLQAARQQEHNRLQAGVQSEQVRQLLTQHLAFLDSQLAEVRRLIGEHIDQHPDMKQRQALLTSIPGIGALTAAKLQAIALHRFEDARAASAFGGLHPQQFDSGSSVHRRARMSKMGHADLRKALYMPAVVAQRYNPCVRDLCLRLAEKGKHTMAILGAAMHKLLCLAYGVLRSGKPFDPNFSKIHAVTP

SEQ ID NO: 484983 - protein, 348 aa, unidentified
MVAELEYVVGVDTHRDEHVLAVVEAPSGALLAGRAVAADARGYAQALRFARRHAPVGRGWALEGAGHYGAGLARYLSKRGETVLEVGRSPRRQRRLQGKDDELDALRAARAALADEPLASPRLGERREALRLLLVARRSAVDVRKEALVQLRSVIVTAPDRLREELRRLPPRRLLDRCSRLRPASGAASDEAACRLVLRSLARRAEAATLEAAELEREILGHVRVLAPRLLAEPGVGPIVAAQLLVAWSHRGRVRSEAAFARLAGVAPIPASSGQTSRQRLSRGGDRQLNRALHTVVLHRRQHDPATRDYIARRIAEGKSRREATRLLKRYLARSLYRLLQAQEPLMA

SEQ ID NO: 484984 - protein, 442 aa, unidentified
MKKKINNREQKGVIAMTSKDFSRHYEKRQRIGETTLIVGLDIGCEFNMMCMMNAKGKVLGEHKIFNSRKGFEFFKSVVDTIAKRERLYDVLVGFEPTGTYWRKIIFYAKELGFEVRFVRTTALKHQRELDESSPLKTDKRDAYTIANITREGKYIDSVIQDGIYRELRSLVNLRESVVRETTRSKNALRTFLEDFFPELSRLYSSMCAKGLLAILETCPFPADILCYGEKRLLELISKSSRSKKIGETKSRKIYAAARESVGLKRVGSSDRLRLSVYLEKLKRSECDLQAIAAEMTKVMTKIPQMEPILSIPGAGITSTGIILGEFGDLDNFRGAKQAIKYAGYDPTGKESGKHIGRRRISKKGRWRLRKTLYLLSIRVVRVIPEFKEYYERKLQGIGGSGRKLARKEALCAVAIKLIKLIFALARDRRRYEERSKTVLLAA

SEQ ID NO: 484985 - protein, 517 aa, unidentified
MNAVGIDVSKGKSKVAVVQPGGVMVCKPYDVSHTVFELNELADFILSLDGETRVVLEHTGRYSEPVVNILSKAGVFVCAVNAKLMHDYAGGGNTIRRDRTDKIDSIKIARYCLDKWENLSQYKPEDEDRKTLKVFNRQLSEYMKIKIMLTNNLIALLDQVFPGVNKLFTSPARESDGHEKWVDFVGTFYHGDCVSSKSLGAFSERYEKWCHRNGYSYSYEKAVEIYQLAKQSVTTLSRNSFEKSLVTNLVLQINSLCETIACTKHDMTQIASELPEYDIVLDMHGVGKNLAPQLIAEIGEISRFPKRSSLARFAGIEPPANQSGTYNQHSRRISKQGSPHLRKALFMVMKAVLLNKNLDQPTFQFIDKKRSEGKPYKVYMIAGANKFLRIYYARVMECYKLSGESAYFFLCGRLSYAKLGNNISTCKQDRAMPEGNSSGYAGRNYRLRSRETAHPYYLTGLTPLISAWERFFILPTFRYRDYAKCDKLLVAAISFALHNFCFVWLGEISCNFFRFRT

SEQ ID NO: 484986 - protein, 355 aa, unidentified
MASITLLGIDLAKDVFQLHGLDELGRPQLKRTLRRRALVQFVAKLPACTIAMEACSSSHHFSRKFQQFGHEVKIISPQFVKPFVQGNKNDAADAEAICEAASRRKMRFVATKSVVQQDIQCLHRVRKRLVHNRTALTNEIRSIVGEFGIVFAKKRSALVEGIKGLLNGSCPREELSSEGLTLLQDLYSELLELEQRIENCELKLKKSSSQPQCQRLFKVGGLGLLSVTALAVALADPGQFKNGRNFAAWLGLAPRHQGTGGKNRILGISKRGDMDLRTLLIHGARAKLRGINAKCRAERKLDPLEDWAYRLCQRQGYNKATVALANKNARIAWSISAHKTEFESHQAVASLKKGA

SEQ ID NO: 484987 - protein, 426 aa, unidentified
MEVIHQRCAGIDVSKKDAKVCIRIQGSGPRKTSTTVRTWGAMTADILALREYLIAQKVTAVVIESTSVYWKPFYYLLEEGLNVVLVNATAARNVPGRKTDVSDATWLADLGAHGLLRASFVPPEPIRILRDLTRARTLIGQARVKEIQRLEKLLEDAGIKLSSVATDIVGVSGRAMLEALIAGQTDSAVIADLARQRLRAKIPALTEALRGRFSDHHAFMVRLYLDRIDAHNADITRLDERIEEAMAPFRPARDLLISIPGFSTTVAEVFIAETGAEMRVFPTAGHLASWAGVTPGCNESAGRIKSAHTHPGNRHLKAALGVAALSASRNADTYYGARYRRIAGRRRPGPTTTGRRQSGAGMIGIVALEHKMLTDAWHILTNGTFYRDPGADYYTRRHPSKTKNNAIKQLQALGYDVTLEPHTTVA

SEQ ID NO: 484988 - protein, 432 aa, unidentified
MSNKVIFNLDELFISVGIDVGADFSWMSIALPNQQFVGKPYKILHNSIDSLTTAVSKIKEAEELYSLESRIFLESTGIYHYPLFCYLRDKGFNCSVINPIITKNSTNINIRKVHNDRFDSKKAALVGLKPDLKVSLMPSDLALNCRNLCREYYDLMDNRSAYVNKLQGELRMAFPQYLGIFSKVTINTSLTLLETYTSPSAFLKADKQEIIDIIKSTARFGLTYAQNKYNAIIQAATDANQFGYIIDSNIKRIRLYISFIRKYDEEINSILESLHELVDANEDSDFVKQIHLIETFKGAGFLSAVSIMGEIGDFSAFSKPKQLFAYFGLDPSVKQSGKFEGTKVQMSKRGSAIARRVIHTLTLQSISISRNREAKNPVLREYYLKKCDSKPKLVAMGAVSHKVCNMIFAILRDNKPFKICLLYTSPSPRDTR

SEQ ID NO: 484989 - protein, 410 aa, unidentified
MSQEVAVVFLGVDWAEEHHDVCLLDERGQVLGRARVANSLEGVSRIHALVADHAEEPEAVVVGIETDRGLLVQALVAAGYQIYAINPLAVDRYRDRHSVSGAKSDAADAKVLADLVRTDRSNHRPVAGDSQQVEAVKLLARAHQALVHTRQRQVNQLRSALHEFYPAALEAFKDDLGGRDAVAILEYAPTPSRGRSVSQAKLISALRKAGRERNLEARAVELQGILRRPHLEQPATLVAAYELIVRSAVRMIRELNAQTTELEDELTKSFELHPDAELYLSLPGLGFVLGARVIGEFGDDPNRYLDAKGRRAYSGLAPITKASGTRHLVLARNARNRHLADACYLWAFASLNASTGAHRYYRALRARGKSHPQALRALGSRWVSILHGCLRHRTLYSEDVAWPVQVAAAT

SEQ ID NO: 484990 - protein, 367 aa, unidentified
MTTYYIGADVHSNSADVHSNSTELAIERNQKIVHRYKLPTSIAALSNVLDSLKGEKHLAIEEGPMAGWLYRNLSKKVDELIICDPRRNKLIDSDGDKDDKIDAAKLACLLRGNYLRPVYHTDDEGRTELKHWVGLYHDRVRDAVRNINKIRSRCRMHGLAIPRVVVRQAKARDNWLSQTSNTMLAKQLELLWIGYDATSRQVRIARRQLSVLGSKYKIIKLWSQLPGIGLVRAVTLFAYLDTPWRFRRKNKLWKYCGVGLQRITSGTDSKGRPKPARLQLPWAVNRTLKNAILGAVSSVINQKNNLFREHYERMLEAGIMPSNARHAVARKLLTVMWAMWKTNSRFDESMCRKPDTETALASSRLSL

SEQ ID NO: 484991 - protein, 419 aa, unidentified
MSFKIFKFNCCGLDVHKTWIYACIGITDSNNRTEYKQARFSSFSKGLHQLCVWLAKYNCNDVCMESTGKYWIPVFNILEQHKIRVTLSHPKYTKPMKGNKTDRKDAKWICDLYMCGMVKPSFIPPADIRELRDLVRYRFKLTCMITGEKNRAQNCLTVSNLKLDDVFSDVFGKSSRSITEQILQHPGEKFDVSPFVDSRCKTPIEEIQAAVDGNISKEQDVKLRQCLDHIDELQKHISEVEQEILRLSDKYEAALNLIRTVPGFDKNPMTAIQVLSEIGGDMPVFHTAKHLVSWAGCCPRNDKSDRKIKSTRISCTGSYFKPVLVQIANALIKSKKHFEFTTRYKRIKTRRGHKKAIIARCRMILTAIWHILTDLKPYTSDGFLESRPVKKEKVLTTSQALNLLRQRGYLIKDEPSPVS

SEQ ID NO: 484992 - protein, 453 aa, unidentified
MAPVTIERVTEKAPSLSRRSHRMKNTTAEKCKQIPKGYLIVGIDPHKKKHAAVAITQDFTAHSKFKFNNSKGGFEMASGRIREKMVEAGCTGVFFAIETGGHYWRNLAYFLDERGIPFRFINQFTLKRRREGKDINRRKNDYRDAEVAAQLLCTGEFTETKLQHGVYAELRAAHNAYRRLVKERTRITNLVKGLLDGLFPEFTQVFKDPCGRTALSVLSICSSPMVIAMMAEEEFVSTIEAGHQGRLMRRKLHALYYVARHSIGIEAGSKSVASELSFLVEKLQLIKRQVCRIDETLVRLVDEAEEGKYLLSIRGLNYISVAGLLAELGSFRSYRSAKQLIKMAGSNPIESESAGKRSSHTPMSRKGRPVLRYCAWTAVIPMLRFNPDFRAWAKERRERPAYANPLNGREVVGAALNRLLRLAFTLLKNQTFYQVPQREIESMPELELLPVAS

SEQ ID NO: 484993 - protein, 342 aa, unidentified
MQITTIGLDIAKNVFQVHGIDAAEKVVVRKQLRRSQVLAFFKALPPCLIGMEACATAHYWARELTKLGHKVRLMPAKDVKAYVKRNKNDAADAEAICEAVRRPTMRFVQVKSAEQQGRLMLHRARDLLMRQRTQVINALRAHLAELGITAAQGTAGLKELLKIIASEADERLPAEAHASLVVLAAELQAMQTLVGSLEKRIMARHRANEASKRLETIPGIGFIGATAIEATVTDPTAFRSGRDFAAWIGLVPRQDSTGGKQKLGPISKQGDRYLRRILVVGAHAVLRRAKLNPQKYPWLTQLLARRPFKVVAVALANKMARIAWALLAKGSAYRAPAFAAAA

SEQ ID NO: 484994 - protein, 344 aa, unidentified
MDVTTIGIDLAKHVFQVHGVDAAGGVVVRKALRRAQVLPFFAKLAPCLVGMEACGTSHHWARELVALGHTVKMMPPAYVKAYVKRGKTDSADAEAICEAVTRPTMRFVPIKSREQQAALSMHRARDLLVKQRTQSVNMMRGLLAEFGINIPEGLERALLMARELVDGETPAVPAAAAKIIFALSQQALGTHAHVREIDRALAALQRSDEVARRLATIPGIGPIGATALAASVTDPSQFRSGRHFAAWLGLTPLQNSSGGKERLGRISKMGDKYLRRLLVIGATSLVRRARSKPESVHPHLVSLLARKPARVATVAMANKTARIVWAVMTRGEVYRVHHMPVLAA

SEQ ID NO: 484995 - protein, 341 aa, unidentified
MKFVGADLHKKSITFCIVELVESKIVVLKRERILCKDVTKITKLLKSLGEFCVTVEATIGYDWFAALAEKYARRVVIAHAGKLRVIAESTRKTDKIDARILAEFLARDMIPEAWRPTSRVRSHRSLVRRRHKIKSRITAIKNTMRGILTRYNADIDNLFSKVGWQAAQKLNLLEEEGWLLRDLWDDLQQTEERLMKIEARLAAFALKANAKEREARAVLATMTGVGVVTIETVLAELGDWQRFRCADAVVSFAGLDPGVRESDGRRQSLKLTKAGSPLLRWIMIQLAQRVKRQSPRWQRVFDRLSVRIGKKKATCAVARRLLLVIYAMLRDGRAYQLPAAA

SEQ ID NO: 484996 - protein, 363 aa, unidentified
MKENRRVLTEETVVVGGVDTHKDVHVAAVLSNTGALLGTGEFPATLGGHKDLLGWMRSFGDIESVGVEGSGNYGAGLTRFLLTEGVRVVEVVRPDRRARRFNGKSDTLDAENAARAVLAGERTSAPKHRDGAVEALRALRVARTSAVKARRAALQLLHNTVVSAPDGLRESVSGLTRTVLVRTCAAWRPNRDVAHDPTTATRIALRSLAKRILRLEEEIDDLDELIASLVGRINPRLTEASCVGTEIAAQLLVTAGENPERMKSEAAFAMLCGVAPLPASSGKTRRYRLNRGGDRSANCALHMAAISRLRVDPRTRAYAARRAGEGLSKKEILRCLKRYLARELYKLLKPTPLDPITGREIAA

SEQ ID NO: 484997 - protein, 394 aa, unidentified
MKLIGIDIGKNKHFFCVMDQQTGEIISQPVSFSNDKEGFDFLVQEIKSYPKDSILIGMEDTGHYHFALLKYLLDLQYTVALINPKTTDFNRKMQGGITKNDKLDTINICDVLDTPERKKQYRITKVNSFDLYEQKQLTRHHHNLKEEENVYKNRLQKCIDIVFSEFNKLFNSKYGIVYMNILKMFGSAENIANTDIRTIRKCFEIEGRGNRISLTPERLKECAISSIGISSSAEVIQIKHLTAQIELIEEQLTEIDKKIEEFSIQNNSPILSIPGISHFSGTSILAELGDISNYSKPSQIIKFAGVAPLHYESSQFNAQHTAITKKGSKYLRKTLYQIILPVIRHNPVFNKYYQLKISQGKGHRCAQGHCVRKLLRIIYHLLKTNQQFDPQLLR

SEQ ID NO: 484998 - protein, 411 aa, unidentified
MHQKQKYIYVGIDTHKLTHTAVIINCWGDKLGEITIENKPSKFNDLLLEVKKHAKRKTAVYGLEDCGGVGRALAVFLLGEKKLVKEVDSSLANVERKALPIYHKDDSFDALCVARVLLSRLDELRNANPQDLYWTVNQLVQRREALVRSSSALKSQLHVQLAHNYPSYNKFFFEIDGKTALAFWEKYPSPSKLKTATLEELTELLVTNSHNYYTVKKAVQIIETAENDNVREVPEFQYIRDFLVESMVKEIKFKDDELTKIEVEIKLIVDKMGYKLHTMTGIDIVTAAKLIGEIGDIERFPTPAKLAKYAGVAPITYSSGQKDKQLKNQQGNRILYGIFHLLAVHQIILDRNTKNPRNPVFREYYEKKMSEGKTSGQAIICIARRLVNIIWGMMKNKSEYKIPNLPKQNTK

SEQ ID NO: 484999 - protein, 405 aa, unidentified
MPYILALDVSMGHSYSVLYKDDTCLFEDEIEHTQRGFHALLEEIQHLPERPLIVFEATGIYSRPVEKFFQDHHFSYCLLNPLEAKKQMEENTLRSWKTDKSDAHRLAQTHLKKQRQPKEVQSNFYLEMRDLARFYQEIEKKITRLRMDLHNCLQLTFPELEQFFSNRLTPYALTLIRLFPHPDFVLASTRTKIKNKLINETRKKISANRAEQKADQIIHYAQCAYPAVEKDSIHCQKTIYYAELLQDLLEQKEALATQMIKKAEGSPCFLLYQTFPGIGALTAALLLGELGDITRFKTHKQLNAFVGIDIRRYQSGKYTGQDRINKRGNPKARKIIFFTIRNMIRQQRAAPNHIVDYYYKLKKQPIPKKDKVATVACMNKLLKCMHAMVRAHTEYDYAYAVSVDH

SEQ ID NO: 485000 - protein, 262 aa, unidentified
MRIIGCDLHARQQTLAMLDTVTGEVVELTLKHEGDNVREFYSSLPRPVRMGIEATGSMQWFVNLMEELGIECLVGHPATIRAAEPRKQKHDRRDAELILKRLVEGRFPAIWMPSKELQDLRSLLRHRHPWVRMRTRIQNALQSITLANGLRRGTALWSHDGQSRIAPLPLAPHTAYRRSKLQAMYEKFEAEIEKLNQRVEEQASKRPGARLLMSHPGVGPITALATEVFLGDPARFADSKALASYVGNRVRAPRSTRHLPRL

SEQ ID NO: 485001 - protein, 343 aa, unidentified
MSIVILGVDLGKNACSVVGVDAAGAVVVRRSMRRQTLIDYVAKLPACVIAMEACCGAHHLGRLFSTHGHEIRLMSPEYVRPYVKAQKNDDRDAEGIAEAASRPTMRFVELKSEEQLDIQTLHRVRSRLVAERTNLINQLRAILLERGVIFPVGRRKLEQGLNGLLAEADDTLSPRMSRLIAEMHAEWKALDARIEALNGEFVEMARNDPAMRRLTTIPGVGVLNATALVAAVGDGSTFGKARDLGAWLGLVPRQHTTGGKPRLFGISKRGNRYLRTLLIHGARAALPSLSKSDTSLGQWLKAMMERGVHHNAVVVALANKLARIAWAALRKEASFERSYLVAA

SEQ ID NO: 485002 - protein, 321 aa, unidentified
MTYVGIDVSKTTFVVAYSSAKGNKTNSFKNTIKGIHEFIQTISVAEHHCVLEATGNYSALLVYLLSEAGIAVSLENPLKIKNFARVMLSVTKTDEIDARLIALYGEKMQPTSYKLRSDTILILKQKRTVIRQLKKQLVATGNLKGSMEVLPFFDPKCKKTIEKTIIFLEKQIKGLEEELASLAQSEYKKQMDLLTSIKGIGVTLAAALIMATGGFTYFDNAKQLTRYLGLSPTYQQSGTSVNVKGHINRNGDSSLRSQLYVAAFASLRCNTECKACFDRLRSNGKPGKVALIAVANKLIRQAFAVVTQEKLYVDGFKSAKP

SEQ ID NO: 485003 - protein, 385 aa, unidentified
MDQTSSSAISTNTLHCALELSRNSWLLAIQFPDREQPSLYPIEGGNTEKLMAKLTAALDCWAKVSGSPPAITLCYEVGYDAFWLARFLMGRGIECLVIDPGSLQVNRRGRRVKTDRVDVKMLLRTLIAWCRGERHVWSLVRIPSIDEEDLRRSHRERGRLVRERTAHINRIKGLLFGQGIRGINVKSQYKTLAVDNLVTGDGHRLPPRLACEIAREIQRLAMVQEQIAKIERERDTAPTPCEATERKRHLLLQLKSIGPAISALLSREVYYRQFANRRQVGSFLGLTPSPYNSGAEERCQGISRAGSGHVRAIMIETAWLWIRHQPKSALTRWFVERTAGQSTRVRKIIIVAVARKLAIALWRYVEHGMVPQGAILNPPTTGNAR

SEQ ID NO: 485004 - protein, 344 aa, unidentified
MEITTIGLDLAKSVFQVHGVDATGQVVIRRSLRRAQMLPFFTRLPSCLIGMEACGTSHYWARELIKLGHQVRLMPPAYVKPYVKRGKTDAADAEAVCEAVARPTMRFVPVKSPEQQAALSMHRTRDLLVKQRTQLVNMIRGLLAEFGVDIPKGLERALLMARRIVDGEAPDVPMEAARIVSTLSQQALDIHIRLREIDRDLLVWQRGNDVARRLMTIPGIGPIGATALAASITDPRQFRSGRQFAAWLGLTPLQKSSGGKERLGRISKMGDKYLRKLLIVGMTSLVRRAKYNSKTVDLRLADLLARKPVRVATVAMANKTARIVWAVMARGETYRAGHRPALTT

SEQ ID NO: 485005 - protein, 347 aa, unidentified
MKQIAVIGIDLAKNVFQVHGTDPAGNAVLSKKLSRAQMIEFFSKITPCLIGVEACSSAHYWGRRLTEMGHTVKLMPPQYVKPYVKTNKNDARDAEAICEAVTRPNMRFVPIKTVEQQAVLALHRVRDGIVKQRTALSNQIRGLLAEFGIVAAKGSKQLNACMTHLLSDPNSTLPVNLQKTFSSLFQELINLTARVKEFDKQIESHVKATDECLRILQIEGVGVLTATAVVASVGDIRNFKSASQFAAWLGLVPRQNSSGGKTQLLGISKRGDTYLRWLLVHGARAALSYAKRTEKLTAWQQAMLQRKSLNKVVVAMAHRTARRIWAVLAKDCAYDPLHHQRHAMVVA

SEQ ID NO: 485006 - protein, 372 aa, unidentified
MTAVVIGIDPHKRSNTALVLDAHENVLAKQRFANDRDGYRQLKQFAQPWRERTWAVEGARGVGLGLAQRIAGDGERVLNVPARLSARVRALGGSSGRKTDDADAYAVAVAGLRGRDLQVVEPDAVRAVLKLLSDRRQQLVDQRIVAINRLHQLLTELVPGGAERRLTPAKARQLLSGIRPRDQVGKARKQLALDHAKDVERLDAELLKVKTSIGAVVAENPTKVSEVRGVGPVMTALILGEVGDVRRFPSKAHFASYTGTAPVDVSSGDHVRHRLNRGGNRRLNYALHIAAPVQVRLPGAGRDYYLRKRDAGKTSLEAMRCLKRRLSDVVFRALLDDLKASERSEQPQGEEATPEPYQGKLTTCEEASQTVR

SEQ ID NO: 485007 - protein, 363 aa, unidentified
MRKTELPRICVGVDLHKMQFTVHAVNEETGEVVLTGIFKTDNQGYKDFCEKLHIIEAEEECTIELAVEATGNARYFKNKMEAEGFGVLVVNTSKFKVITMSTKKTDANDAATLAFYLSKDMLPESHLCDQTSEEIRRMLKTRSILVSSTVKIKNQIHGMLLGYGIETTSAQFQSKKKRQELINVLAEHYFSQFTASSLEVTLNILDDIYAQVKKIEEQIKEMTKENETVELLMTMPGIGFVGATTIASYVDNIERFDGDFKKFSSYLGIIPSVHNSADTVRMGHITKRGPQELRTAFVQVAMGIIRQPQNTSEWKLMKDYQTMKISKGSGRAIIALTRKVARIVFAMLNNKEAFNPELMKKAV

SEQ ID NO: 485008 - protein, 362 aa, unidentified
MDSSKYVAFDVHCATIVAAVHNAAGRCVMESVIETKAKTVRDFIKGISGRVHVTFEQGTQAAWLYDLIKPLAAEVVVCNPQHNKLVCGAGNKSDRIDANKLAMLLRQGGLKAVYQGEASTRSLKEHVSNYEALVADSVRVMNRIKGLFRARAIPTVGSSVYQPSQRTGWLNQLKDSAVRMRAESLYRQMDCLKDLRKEARTAMLAEARKHKASRILRRVPSLGPVLVAQIIGTVATPHRFRTKRQFWAYCGLAVVTRSSADYEFANGRLRKKARAASTRGLNRNYSRRLKSVFKSAALIGMQHDPFQKVYAALIAKGMRPELARLTLARKIAAVTLSLWKREEKFDPKRLLQKVPTARRKRN

SEQ ID NO: 485009 - protein, 353 aa, unidentified
MKTYYVGMDVHSATIRIVVLNGAGKVVMELVIETGAERVRSFLKQLRGKVYVTFEEGTQANWLHEVVRSLVTEVVVCDPRHNKLLQSGNKNDRVDAQKLAELLRLGALQAVYHGDNGVGTLKELVRTYDCLVSDTTRVMNRLKAIFRGRAIACGGHEIYRQDQRGLWLAKLREPGAKQRAGFLYEQLAALKPLRRKAKLAMVKEARQQTAYRWLMSVPKLGSVSVAQLIAVVGTPHRFRSKQQFWTYVGLAVVTRSTADNEVINGVLRRSQRPVSTRGLNRNHNHLLKRVFKNAATSACYSGPFKAGYDERVARGMAPSLARLTIARQLAATTLALWKRGEQFDPERKKQQAA

SEQ ID NO: 485010 - protein, 427 aa, unidentified
MKKADLLSTLFVGIDISSRSNVVAFLDFESQKPLQSFAVANNQPGAVELAKRLADYLHSRKDLAQLVVALESTSFYGVHVANYLSSCELLAPFHTAVYCLNPKAIKNYKKSFIDLGKNDYVDAFVIADFARANRITTKPWRGSQFLALQRLTRHRLHLAKALTREKAYMLSNIFLKFSEFSLLDAQEQPFSNSFGATASSVLTDFLSTEEIIEMPTEDLISYICEKGHNRFPYPEKTASLLQQAARNSYRLDKCLYEPLTVSIASSFTLISTYETEIKAVNKAIEKTLKGIDPSAYQSLLSIPGIGPVMAAGILSEIGYIDAFKSQEALAKYAGLVWRENQSGNFQADDTPLSKAGNAYLRYYLIEATSHVKNHCGEFAAFYQKKYDEVKTHQHKRALALTARKFVRLIFGLLANHQLYSSSRVVQA

SEQ ID NO: 485011 - protein, 345 aa, unidentified
MEPMYYIGLDVHKRKISYCVKDGAGKVYSEGSLAATRLDLDVWMKTLPQPWSAAMEATMFTGWIYDHLKPHAAALKVAHPLMLRAIAAAKKKNDRIDAGKICDCLRCDFLPECYMAPTAIRERRRTLRYRNLLVRQMVQMKIKISSLLMEAGVSYNKQRLHKAGYFRELLAANPDINEGLKPLLQLCRETVVRLQKTESAMVRSLERDSLLMDRVERLMTIPAVGPITALTWTLEVGDVQRFSSIKKAISYCGLCGAEKSSGSTVHRTPLSKQRNKHLQTTLIEAAKMAPRNSPELAMLYDKEKQKGNANRATLAVARKLVAYLVAVDRRQKEFLTVERENRTAA

SEQ ID NO: 485012 - protein, 419 aa, unidentified
MRRRCFGLDVHREFAQVAVWEDGLVRQEGQIATTPEALRVFADSLGPGDEVALEATGNTFAIAALLAQTAGRVVVSNPRKTRAIAEAKVKTDKVDAAILAQLLAADFLPPVWMPDEATNVLRRQVARRTLLVRQRTRLKNQIHAILHRNLVPRCPASDMFGRKGRQWLAEQPLPPDEQAALTALLRQLDFHGEELAAVETDLARIALTSPEVARLMTVPGIDAMIALSLLAAIGDFGRFQTGEKMVAYLGLHPKVKQSGGAPASHGRITKQGRAQARGMMVEAAWSAAQVPGPLRAFHQRVARRRGMQIAVVALARKMTVLCWHLVVHEQDYAFAKPSLVAKKQRALELKAGLPPRRGRKGAAAAYSLKQVRAAEAHAALQAEAAYRVLTDRWQPARPERRASAPAEHGGVLAGVQATA

SEQ ID NO: 485013 - protein, 266 aa, unidentified
MEKVFIGIDVSKLTLDFYVKSDKMNQHYQLENNVKSIKKFFKSFINNSDTVVAMENTGRYNFALYEVLSTMNFSIYVINPLHLKKSIGLLRGKSDKIDSQRICTFIEKNYMDLELWNAGSIDIQKISFLNAERRHRVKIKSGLQKQSRDMELLKNIVDKEMIKLNKQAIELLDKQIKTIEKKILDIINSNDDLKDNYDRIQTVPGVGKVLTTLMIIKTKKFSEIKTARKMACYSGVVPFEYRSGSSIYHKPRVSTMADKELKKYCI

SEQ ID NO: 485014 - protein, 352 aa, unidentified
MDYYAGIDVSLEYSSVCVVEASGKIVREGKVASEAEALIGWFAGLGHGLTRIGLEAGPLSQWLYAKLKEAGFAVELLETRHVRDAFKAMPVKSDRNDARGIAQLMRLGWFRPVHCKSLPAQEVRALLTARKLVQSKLLDIENSLRGILRGFGLKVGKTTAGKFAERIRALVAGHPMLEKIAKTLLSVRQVLLQEFNSLDKLVRETARTSVTARLLMSTPSVGPIVALTYASAIDDPARFKSSKQVGAHVGLTPKKYQSGEIDVSGRISKIGDAAVREALYQSAHIMLTKPLAGCSQLKGWAMRIARRAGMRKAKVALARKLAVIMHRMLADGKTFNPNAKAEVKSMPKALAA

SEQ ID NO: 485015 - protein, 409 aa, unidentified
MEVFVGVDWSEESHDVCVMDVEGRVVASGKVTNDLAGVARLHDLVGRAFADADDEVEPVVSIGIETDRGLLVQALTTGGYRVHAVNPLSVDRYRDRHRVSGAKSDPGDARVLADMVRTDAHQHRLVAGDSEQVEAIKLIARSHQSAIWSRRRLANQVRSALREFHPAALLVFDDLTHGDAIAVLEIAPTPDLGRTLSKAKIASALCRGGRKLHIDKRAQEIYNALRSEQLAQPATVADAYGSIVRSLVKVIAAHNRQIDELEELLTDHFGQHPDADILCSLPGLGVVTGARVLGEFGDDPDRYATTKDRKNYAGTSPLTVASGTRRVVRARHIRNRRLADALHWWAFNAISRSPGARALYDKRRAAGDTHSGALRVVGNRLVGILHGCLRTRTLYDEDLAWAHRQDLAA

SEQ ID NO: 485016 - protein, 342 aa, unidentified
MRLFVGLDVSLAKTAICVISEHGEIIKEVEAASEPEVLARWLGGLDGGIAAIGLEAGPMSQWLHRGLAELGLDAVLMETRQVKGALKAMPIKTDRRDAEGIARLLHLGWFRPVHCKSVSAQETRAVLGARKAIQQNMIALEMSLRGLLRNFGLKVGAISRGKFETRIRDLAAGNTMLETATSPMLRARAALRLELANLEKQVRQLAQDDPTCVRLMTMPGIGAVVALTFRAAVDDPARFRSSKRIGPWVGLTPSRNQSGERDVSGGITKAGDVNQRRALCQAATVMMNRGRSTWLRTWGAQLAQRRGRKIAMVALARRIAVILHRIWVDGTVFQPDVAPNMI

SEQ ID NO: 485017 - protein, 251 aa, unidentified
MTQSLCIGIDVSKLALDWASYPAEGSGRFANDEQGIDALVARCLELRPQCIVLEATGGYEAACAGALAAAGLPVAVVNPRQVRDFAKAIGQIAKTDTLDAEVLARFAAVIRPQIRPLPDDKAQELEALIARRRQLVTMQTMERNRLKQALPKLREGIREHLEWLRRQIADTSDQGRRMLEESPAWQVKVDLLKSAPGIGDITAMTLVAELPELGKLNRKQIAALVGLVPLNRDSGTLRGKRAIWGDRKSVV

SEQ ID NO: 485018 - protein, 389 aa, unidentified
MLHDHPSVRPTAILTQFGAIFVSLELSRSKWVLTSLSPGNGEKMSQYSLTAGDIGGLLARFADLKRKAKERTGSDYPIITIHEAGLDGFWVHRVLRNDGIESHVVDAASIATSRRRRRAKTDKIDGEALLRALLAFKRGEPRVCAMVVAPSPEEEDRRRLCRERQTLIAERILHVNRIKGLLFAQGISDYAPLRRDRRKRLEGLRTGDRRPLPVHLKTQISRELDRLELLLDQIRKVEAEQEALLAAESKAAPEGEPHNAVAMLLAVKGIGEHSAAILWSEGLCRQFSNRRQVAAYAGLAATPWRSGAVMHEQGLSKAGNPQLRTTMVQLAWLWLRHQPQSALACWFRARGERGRKGSIVALARKLLVALWKYVTHGVIIEGAVMKPAA

SEQ ID NO: 485019 - protein, 412 aa, unidentified
MLKIVYPICCGMDVHKSFVVACIATTNDHGVTNYKSKRFSTFTGDLRRCADWLSENNCKDVCMESTGKYWIPIYNILEHTCNIVLAHPKYVKAIRGKKTDKRDAKWIADIFKHDLVSGSFIPPADIRQLRDLVRYHWKLTNFNVGEKNRAQNCLTVSNIKLDDVFSDVFGKAASAITTRLLESNEPFDVKPYLTKNIKKPIEQIQAAVDGEMCAEQAEKLRIIRSHMDSLELCKLNLESLILSTAEKYIPQLNLVMTAPGIQSFAAIGIISEIGVDMSVFPTSKHLCSWAGLTPQNNESAGKKKTTRISRAGAYIKPLLVQCALCAIRTKQFPEVRNRYLALKKRRGHKKAIIAIARMLLTAIYNILKWNEVYNSELYRKADRPPAHREVSVEEPVFILQRQGYLVTAPAVT

SEQ ID NO: 485020 - protein, 460 aa, unidentified
MPLKRVSNDVEEIDSDETERVLTVAAAVDVAKASGMVCVRRPHPSVEGRRMSRVWEVESATNSILALGDDLVTMGVERVVLESTSDYWRPFFYLLEAAGLSVWLVNARDVKQVTGRPKTDKLDAVWLAKLNERGMLRPSFVPPREIRALRDYTRLRTELVEERSRNKQRLEKLLEDALIKLSSVATDLLGVSARAMIEALIAGERDPEALADLARGKLTAKRAALLEALNGRFDDHHADLARLLLDQIDACSDKIDRLTARIEQLVAELPDPQPPTDGEPRRSATSDVPIAHDPQAHRLTTVERLDEIPGIAERAAQIIIAEIGLDMGRFPTPAHLVSWARLSPQTIQSGPKVKAGKTGKGNRYLKGVLGEVATAAAKTDTFLGERYRRLVRRRGKQRALVAVARSILVIVWHLLNDPDARYIDLGSDYYTSRLDPDRKTRDLIRQLQALGHQVTLRPAA

SEQ ID NO: 485021 - protein, 311 aa, unidentified
MTDDTIGIDISKATLDIYRLSDGKMTSFSNCCVGFEALALFCKETAVIRIVYEATGAYHSGLERALGAHFPLVKVNPLQARRFAQARGVRAKTDAVDAKMLAVMGDAFALEPSKPISETQYILKELRAFRSGLITDRTRILSRQKTQTLPMTRRQSKARLTQTEKQIVEIDAEIARLIQSSEVMARSMKILRSIPGIGAVCAAAILIEMPEIGGMDRKQVASLTGVAPMTRQSGQWRGKSFIQGGRKVVRDALYMPALVAMRFNPDLKTKYQAMIKAGKPPKVAITALMRKLIELANALIKANRTWVNKTA

SEQ ID NO: 485022 - protein, 364 aa, unidentified
MPTIADPGRPVTGGVDTHAEVHVAGMVDQAGRVLGTKEFPATAVGYAAALAWIRGHGELAKVGVEGTGSYGAGLARYLAARGIEVTEVIRPNRQARRRRGKSDPADAVAAALAALNGEASGQPKSGDGAVESIRALQVARRGAVKARTQAGHQLRDLIITAPQVLREKLAALPAPQRVKLATRFRPGDLTNPAEAAKAAMATVARRHQALTAEIAQLDTALETLLGHAAPAGFLAKTGVGARSAATLLITAGDNPARLRTEASFAALCGASPVDASSGKQRRHRLNRGGDRQANSALWRIVFTRMATDPRTQAYVARRTSEGKTTREIIRCLKRYVAREVYKALTAHTRQLNQDPATQIHSMIT

SEQ ID NO: 485023 - protein, 349 aa, unidentified
MLADELDYVVGVDTHRDEHLLAVVAAATGAVLARQLVQANERGYQAALRFAGEAAQGARAWAVEGTGSYGAGLARCLADRGEAVLEVSRTPRSERRLRGKDDALDAVRTARAALACETLALPRSGERREALRPLLLARRSAIEVRREALGQLRGVIVTAPDRLREELRVLPTGRLLERCSRRRRSSSAGADELATRLVLRSLARRIDAATCEAAELEREILAHVGALAPALLDEPGVGPIVAAQLIVAWSHRGRLRSEAAFARLAGVAPIPASSGQRVRHRLSRGADRQLNRALHTIVLHRRQHDPATRDYIARRIAEGKSRREASRLLKRYLARHLYRLLQNQEPLLA

SEQ ID NO: 485024 - protein, 351 aa, unidentified
MDKYIGLDVHATSTTFAVMSSSGKRLGTYVEETTGESLVERLKTIAGKRHVCLEEGTQSTWLYEVLSPHAEQVVVVGVSDSRGPKSDERDAFSLAQQLRIGAIDRRVFKETGTYTRLRELARTHMMIVQDVVRVQNRIRALYRSRGVAAAGRTVYSVDGRQPWLAKLPEAQHSAATMLYAQYDAVQEVRKKAEKALVEEARRHPISRVLETCPGLGPIRVAQLTPIVVSPSRFRTKRQFWSYCGLGIVMRSTSDWVRTQQGGWIRSDVQKTRGLNLSHNHSLKNIFKSAATTVISQLVEEPLHQDYQRMLAAGTKPNLAKLTLARKIAAIALSMWKNKEAYDATKHRKHDS

SEQ ID NO: 485025 - protein, 343 aa, unidentified
MEQITTVGIDLAKSIFQVHGIDQAGQIIVQKAFRRRDLVAFFGKLRPCLVGLEACSTAHHWARVLMQFGHEVRLIPPAYVKPYVRRQKNDAADAAAICEAVTRPTMRFVPVKSEEQQAALMLHRARSLLLSQRTALICAIRSHMAELGLTAPRAVRNLRPLLEVLADRTDESLPPLARAAITPLADQLASTESRIAELDRQLLAWHRSSAVSQRLATIPGVGPVTASALAASVTEPSMFASGREFSAFLGLVPRQNSSGGKTRLGRVSKMGDRYLRTLLVAGATALISHTKTRRGSLDTWAKTLIEKKKPAKLVALALANKMARIAWALMARGETFHASAQPA

SEQ ID NO: 485026 - protein, 320 aa, unidentified
MSEQPVVVGIDVAKLHVDVAVLGAPASAARFSNDEPGHQSLIEALAPVAPALVVMEATGGYEAPLACALQAAGLAVAVVNPRQARDFARSFGQLAKTDRIDAHGLAEFALALLGRADLERYLKPLTTAAQQDLVALVNRRRQLLTMLGMEEQRLAAARPAVRRSIQALIRAIRKQLDDVDGTMAEHVTRHFAELAGLLRSTSGIGPVASATLIADLPELGHLTRRQVSALVGVAPFACDSGSMRGRRRIRGGRFELRRTLYMATLAAITHNPVIRAHYRRLVDGGKLKKVALVACMCKLLTILNAMVRTQTPFQENYRNA

SEQ ID NO: 485027 - protein, 393 aa, unidentified
MDMIYVGIDVAKNKHDCCILGGSGTVLREAFTLSNDRKGFQELYSAIQEALHQEGADQIKAGLESTGHYSENLVAFLRSSGIQPIVFNPLQVNLFRKSQSLRRTKTDKVDAKCIAQLLMSAESTPVPASYQIQELKTLTRHRSRLVSQRTKLKQCISRLVDILFPELPSVCCSAAQASMRTLLLELPSARQIAACRIDRLTNLLYAASKGRYSREKALEIKQLAQQSIGANSPASELELRLTLQQLDFLLDQLKQLEKAIQTIVAAIHSPILSIPGIGPTLTAIILAEIGDIHRFSSPDKLLAFAGLDPSTYQSGKFTAGHTPMVKHGSTYLRWALMQAARLASVYCDTFRHYMDTKLAQGKHYFVALGHVSKKLVRVIFRILTTNEAFVTQA

SEQ ID NO: 485028 - protein, 441 aa, unidentified
MTQLQVVDPHAAFVDVGSELMHVSVAGAAPAVFGTVTSQLEALRDWLLAQGARSVAMEATGVYWLPLYSVLEAAGLQVVMVNGRQTKNLPGRKTDMADCQWGATLHAHGLLRAGFVPPADIRLLQDYVRLRNDHIVEAASCIQQMQKALERMNIKLHDVISDLSGASGMAVVRAILAGQRDPERLLTLCNTQIRNAKAERVKESLRGTWAGEHLFALRQALQTYEHYQRQIAECDREIQALLPKPPDNGGSAGGDNGQNKGRKRSGANAPRIPDLRKIMQAMCGGRDLAVLPAHTDYTVLQLVSEVGTDLTKWATEKHFTSWVGLAPGSHQSGKRHRNVKRGRNRAGRLFCVIARSLARSKDIALGGFYRRMAARRGGLLANVALARKLAVLFWRVMVKGVEFVEHGLAAYEAKVLETKKKTLERLAKEFGQRLVPVQNPS

SEQ ID NO: 485029 - protein, 405 aa, unidentified
MKTIIGIDWSEKKHCIHIYNEVGALLMRLEIPQTMVGFAQLAEVLTRMTPKPANCLIAIETSHNLLVDYLHSRGYTLYILAPSVVSSNRGRQGSSGAKDDDRDAQLLADILRTDRGRLIAWLPDGPLVRQMRTLLSWVDDLTELIVAQHNRLRANLLRYYPQPVSAFASLTSAIALHFLSTYAAPAELAHLTFDQFTQFCRAHRYYRADRLPTLWSLLQAPAPSLDETIVPAYRQQTVFLAQQLVGLTQQKKTTIRQLNVLFHQHPDAPIFASIPGAGELLAPKLLVMFGDHRQRLPYREILPAIAGTCPVTVASGKSRYVKFRRACNHSFRQTTQQVAQASVRRSPWAAAYFARARDRGHSKSHAYRCLANRWLHIIWTLWQTQQPFDEAYHQQQVARHRRPTD

SEQ ID NO: 485030 - protein, 351 aa, unidentified
MNYMGIDHHKQYSHMTLMDEKGKILKAGRVMNNRIEVEEFLNGAGDKVEAVIEAGFSSYVMVDLLEVLGVEVKIANPSEVKAIAKAKIKTDKRDSKILAHLLRTDLIPEVYRRSGENQRAQRVMRQRAFFVESLTRVKNRIHALIAKQSEEVLRDLNQIKDLFSKRGMEVLKRIELPSTDKQLLEALLKTYRHLEEMIKESNELVKSLYKEMPEAQLIDTVPGFGTFLSVLTAIEIGDIGRFDSAGNLHSYAGVIPSTHSSGNRTYHGKLIKGGNRWLRWAAVEAVIPATRKDFELKVFYDKRARRKNANVAKVATAKRLLTIIYKILKEKRCYEPYKREWEVKKKESAAL

SEQ ID NO: 485031 - protein, 330 aa, unidentified
MPTYYLGLDVHKVRTQYCLVDVFGEILGEGSVPTEEAALLVSDSDTVVVLEATGSWHGTYDALVATGAHVKLAHPARIKAIASAKVKTDKIDARILAHLLRADLIPEAWAPPLHIRELRDLVRLRWRFVSQRTTAKNRITNLLARENLRYAGADLFGRSGRKWLQALELPAHTRGLITLLLVSIDEADAHVEALTTQLHELLDADEDVRLLMSIPGVGFITAATLAAEVGDWSRFSSARQLSAYFGIVPSVRASGGVAHYGHITRTGSPHARRAIVEAAHTARKLPGPVRHHYLSLVKRRGKKVALVAAARVLLELSWTLAHKKEVFQAA

SEQ ID NO: 485032 - protein, 336 aa, unidentified
METKTKFIGIDFSKATFDATIYEGEHCKFTNDDQGFKEFLEWVKTHIDGLSLQDCLFCGENTGNYSVRLSNFLYVHHCTMWLESALRIKRTMGLVRGKDDKIDSAYIARYAARNAEDAVSYEPCCKNIGELRHLFARRQLLVSQRTALMNAGKEANVLGEKSKYDRALEKQNTKLVTMLAKEVLRIEKMMLEVIQADERLSRQYQHITSIKGMGPINAIALISVTEGFTKYASDAKKLACHAGVAPFKKESGTSVNGGTHVSHLSNHILKPLLPQAALSAILYNHQIIAYYERLISRGKKSQVALNNVKNKLLHIVIGLIRKDEDYDIQYQPAPKI

SEQ ID NO: 485033 - protein, 365 aa, unidentified
MKKISTVATEQGRNISEQKLTIGFDLGDHSSWYCVLDETGSVLLEQRVSTTPKAMKEVFGGMPRSRIALETGMHSPWVSRLLSELGHEVIVAHARNVRLIGESRKKDDRLDARTLARLARIDPHLLSPVKHRSAKAQADLTVIRARAGLVRARTALVNTARGLAKSYGERLRGCNVRNMNPEKAEALSPELQRALEPLLAGIESLSERIREYNEGIEQLAQESYPQVARLKQVKGVGTLIALTFLLTLEDAHRFRKSRDVGCYLGLQPGRRNSGQSEPQMHISKEGDPYLRTLLVQGAHHILGPFGVDSDLRRWGLKLAERGGKSGKKRAIIAVARKLAVLLHRLWVSGEVYEPLRNQRALSAAA

SEQ ID NO: 485034 - protein, 326 aa, unidentified
MVIIGIDVSKTKLDCLWIRDLQAMKIKGKVQANTPTGHQALLAWAMKQTGEDVSGLHFVMEATGVYHETLAYALHDAGAQVSVVNPARVRDFARSLGAQTKTDKRDSVAIARYGMTQSPRLWVPEPVEVRQLKALIARCDAINQDIQRELNRLENATASDASEEVRASIETVRSQLEAEKARLESLIEDHIDNHPDLKNDQVLLESIPGVGPVISQHMVAIIRSRSFKQAPQCAAFLGLIPVERQSGTSVYSPPRLSKHGDGRVRAKLYMAAVVATRYNPDIRRQYQRLLKNGKSKMSAIGAAMRKLVHICFGVLKHQTPYRPQPA

SEQ ID NO: 485035 - protein, 424 aa, unidentified
MRVTYQTCCGVDVHKSFLVATIVKTTGGIEPSYQKKRFSTFNNSILEFKQWLLDNDCHDVCMESTGKYWVPVFNLLEDDINVVIANPKWVKAVKGNKDDTKDSKWIGDLFRLGLVRGSYVPCKKIRILREYTRYRYKLVSCRSSEKNRYQNALTVCNVALDSVVSDIFGKSSTSIIDYLLEQSGTSINHEEIASKLLRSLKSKEDAVIESVEGYQMTDTQKYRMRLVRAHMDYITAEINDVNKMIENMISSNPDFENAVQFLCTIPGVKRDSAITIISEIGTDMSQFSSSKRLCCWAGLTPGSNESAGKKKSVRITRAGVYLKPALVQCAHAAVKSDKSPYYKKKYDSLVKRRGKKRAIIAIARMILTAIYQMLSTGEQWNPSDLYKIDMPVALVEKQKAKAIKQAKKLLQREGLLPPDEPSAS

SEQ ID NO: 485036 - protein, 314 aa, unidentified
MAEAKVYVGVDVSKAWLDVAIEPRGETMRAENNDRGISELIGSIRGLCLERIVVEATGGYESLLVETLYAAGLPVSLVHPARVRKFAQGMNWLAKTDKIDARLLARFGEKANPRLVEMPSEQEKQLGALVKRRKQVLEIVVAEQNRLETADSSVRGYIESSLQALRGQLDELDAAIEAFVEQTPDLKMKQDLLQSVPGVGKITASTLTSQLPELGKCNRKEIAALVGTAPFNHDSGYKRGKRVVKGGRSAVRNVLYMATLTATRHNPVIKVFYDRLVKSGKEKKVALVACMRKLLTILNSMVRNHTTWQPAFPY

SEQ ID NO: 485037 - protein, 430 aa, unidentified
MNNFINDYVVGVDVSSTSSVITILKPDGEAYGKTFSITNDLIGFNKLISILNDINSKHSKRAKIFMESTGMYHLLLHNYFTNNNFECFIINPISTKNFAKQSIRKVKNDKIDSLRIAQLAQSPIFSIQNTFNENFFLLKKLCREYDSIIDHRSHFKKKLNSLLNLVFPKFDKVFSDTFSPIPLAILSKYPTYNDFLATPKSDVIKLMKSTINHSNEWAEKKYNLVLNIALEAKSLKIPTSYLGSEVCCFINIIESFSKTSDILKEQIYLLHKEMPNLEQNLKLLCTHPEVGFMSAVTLLAEIGDINNYKSAKKIVAFLGVDTSVSQSGNYNSTHNKLTKRGSRLARKTLYNLAIGSIKTRRNGAPANPILLAYYKRLTKSKPKKIAICAIMHKLINHFFAILRDQQPFKLRLPEIHEKNYLSKQLTLTAI

SEQ ID NO: 485038 - protein, 347 aa, unidentified
MVVLGVDPHKKTHTVVAADPAGRKVAVITVNASAAGHLRLMRWAARFAPRRWAVEDGRHVSGRLVRDLVAAGEDVTCVPTKLMAAARAGARTRGKSDPIDALTVARAALREPDLPTAHLDPVSLDLRLLVDHRENLVAERTRHINRLRWHLVDLGPDLEPPSRALTRPTRLRQLIAMLEALPPGVRRDLAIEIAQRVLADTVRINQLERQITDAVTPLAPTLLAIVGVSGLTAAKVLGEVAGIERFASSAKLANHAGTACIPVWSGNTERHRLNRGANRQLNCAVHRVAITQVQHHPGAAALYARRRAAGDTKAGAYRVLKRHLIDVIYRAMKTDTATTTTALTPAA

SEQ ID NO: 485039 - protein, 393 aa, unidentified
MPIVGGLDIHRKQITFDYLDTATGEVKRGQITPADRKHVRAWLARFAGRGEVAFALEGCTGWRYIAEELAAAGIAAHLGEPADTAALRGRKRHAKTDKTDARHLRTLLGEGRLPECWIPPGHILEYRALLETYHDLRAEHTAWVQRIHAVFFCQGAPRLGEGALRTEQGLAGLRAAAAAHLSPAGQLQVATALDMLAAVEARLGPLRRQLRDAARHLVGAKVLAARLYGAGPITALALTCWLGGAGRFSSSRKAVRFTGLDVTVHSSDRKGPPGRLSRQGPPVLRWAVYEAGMTHARISAPDHGYYAAVKDRKNGKRAALPGGPQDRPAGLPHPGRARRRRAYRRLTAPTSDGGHAEDTPDPRAGTPAATLPRWGTTAASSCKPPVRRRRLLP

SEQ ID NO: 485040 - protein, 411 aa, unidentified
MSTSGKRIWVGVDAGKGHHWAVAVDSDGEAVFSRKAINDENEILQLIAVACETGIEVRWAVDISGRASTLLLALLIAHGQQVVYVPGRTVNRMSGAYRGEAKTDAKDALVIADQARMRRDFDTLRTPPELVSTLQLLTNHRADLIADRVRLINRLRDLLVGICPALERAFDYSGAKGPVLLLTEYQTPSAIRRIGEKRLAARLERRKVHGAGAVAAKAVEAARTQHTELPGEKRAAQLVRDLAHHLLSLDERIRENDREIREAFRTDERAEIIESLPGMGPILGAEFVAIVGDLSGYKDAGRPASHAGLAPVPRDSGRRTGNYHRPKRYHRRLRWLFYMSAQTAMMRPGPSRDYYLKKRAEGLIHTQALLSLARRRVDVLWAMLRDGRLFTSAPPAPGRTHSRSPLLTSAQ

SEQ ID NO: 485041 - protein, 326 aa, unidentified
MMILGIDVSKAKVDVALFNDKEFIASGEFANTATGFKKLNQWIENKDAKKVWACMESTGRYGDALATYLYEQDHQVSVVNPARIKKYGESQLKRNKTDKLDARTIADFCRTQEPALWTPLSPEQRELQEMVRRLSVLIQDQTRERNRLKSGVESEVVKTSITDTLDFLARQIDQLGALIQGHIDRHPDLKQNQELLTSISGIGDKTAFKILGELPDVRRFDKSGEVVAYAGLSPQQHISGSSVRKKTRLTKTGNQNIKTALYFPALSAIKHNPVVKALADRLKEKGKEKMVIVGAAMRKLMQLIYGILKSRQPFDPDYSANLQNTA

SEQ ID NO: 485042 - protein, 332 aa, unidentified
MKKIIHFIGIDVSKETLDIALIKKNDKSNIYSSKVTNNKTGFKKMNQWLKLEKVSLQEAVFCIEHTGMYSKPVGQFILSVQGNLWMEMSLKIIRSMGVQRGKNDMIDAMRIALYAQRCQDEMKLYEPPRPIVEKLRTLLHLRKRLINSRNSLQVPCNELTVIDEQAGKEATRLIKSSVTALEKNIDVINEQIDELIASDEQLTHEFEIGTSVPGIARITLAYIICFTNEFKNYSDGKQLACYCGVVPFEYTSGKSVKGKPHVHNMANKLLKKLLHMGAIAAVTYYDEFKRYYKRKVEEGKPKMLVLNNVRNKMILRLAAVIKNNKPYQKIAA

SEQ ID NO: 485043 - protein, 350 aa, unidentified
MIIIGCDYHPSFQQIAFVDTETGELQERRLQHREEAEKFYRDLAAQGVKVRVGMEASGHARWFERLLSELQFELWIGDAAEISAKRVRKQKTDRQDAQLILRLMLKDDFPQIWVPSWENRDLRQLLWHRHRMVQARTRMMNQLQAVALNEGLRCKKKLWREAGRAQLEAFKLAPWASQRRTDLLELLDRLNPTIAKLTQAIDWEVEKCPAARRLQTHPGVGPLTALAFVLIIGKADRFQCGKQIASYLGLVPLEKSSGNQRRLGHITKQGNSLLRFLLVEAAQVTVRSLPEWRSKYCHLTLRRGRKIAKVAMARKLAVRLYWMMRKEWDYEQLRKFGSYAGKPGHRDGVK

SEQ ID NO: 485044 - protein, 345 aa, unidentified
MEGYAGQQFVGIDLHRRRSVLVRMTEAGQVLETVRIVNGADRLVEVIARAGGCPEVVLEATYGWYWAVDVLQAAGAQVHLAHPLGVKAFEYRRVKNDERDAADIADLLRMGRLPEAWIAPPATRELRELVRHRAKLVALRSHCKAEVHAVLAKCGVQVLMSDLFGVGGTALLDGLELPGPYAARIASLRRLMEALDFEIELFAGMIRGRLATDPGYTAVRTIPGIGPVLAAIFVAEIGDITRFATAPQLASWAGLTPKHHESDTHVHRGRITKQGSRLVRWAAVESVQTLPKTSLVGQLRDRVAARRGHNIGVVAAARRQIELVFYALRDHHVRALHHTPPAKAA

SEQ ID NO: 485045 - protein, 293 aa, unidentified
MRQTCPSTAQGQRKLVAWLREHQVNKAVMEASGGYERDWAKVLRNAGIEVRIVDPKRVRSFALSAGHLAKNDTIDAEMIAWFAETFREAPSQAHDAAHEELRALVKARKGLLDLKTRLQSQNQHAAPGAVQKAHARVLKSLDREMAKLEAAISAKIKATPDFAERAEIIESVPGLAETTSANLIAGMPELGQVSNEIAAALLGTAPYDDDSGQRRGERHIKGGRRWVRNATYMPCLGAATQNNPVLKAFYQRLIAKGKEPKVALVACMRKLIVILNTLIARRQKWDPSRYALS

SEQ ID NO: 485046 - protein, 405 aa, unidentified
MEMEKCAGIDWASEEHALCVVDESGRSLAGEMHSHDEVGVRELIARMRALGVVRVAIERHDGLLVDRLLEAGFTVLPIQHNKLKATRPRYEAAGGKSDGFDAFVLAELARTDSHRHRALAPNSDETKALRSLTRAREDLVGARVRLANELRAQLDAFWPGAARVFADVDSPIGPAFLERYPAPEDARGLGGKRLEGFLARNGYCGRRPAAELLERLRCAPAGRAGAMEAEARRGAVLGLVAALKPIVTQIRELTSQIAGAVRSHPDGQIFLPLFKDPKSVITAARLVAEIGDDRGRYPTQEALAADAGMAPVARESGKRKVAGFRWACDKRLRDAVACLANSTRHTHPWARSVYLDARSRGLEHPHAIRVLGRAWLRVLWRCWQDEVAYDPAKHGNLRRLQPQGG

SEQ ID NO: 485047 - protein, 508 aa, unidentified
MKTKRCKAKNQAARKTDQCRTVSSAEVAEELAILRPDAGGVDCGAEEHYASVPPDRVPADHASVRCFSAFTEGLDALVDWFKECRITTVAMESTGVYWIALYQKLEAAGIEVYLVNARHVRCVPGRKSDVQDPQWLRQLHRFGLLNASFRPEDLVCRIRSLHRDKENRVASAAAEIQHMQQALQQMNLHLHHAVSDITGETGLRILDAILAGQRNPEELAKLRDKRCFKTTPKQMQAALVGDYREEHLSVLKRSLEAYRFYQSQIEECDRQIEPLLQELARRVEAASAQLQLPSPEAKAGEPQQKLAEKQQQQSNATEPNTNALRTKKKRKAEANEPKIELAGLLERICGVDLTRVVGLNVASVLLIVSEIGVDMSKWRSARAFCSWLGLCPANKISGGKVLDSRTRKVVNRVATVLRLAAQSAGRTDTCLGIFYRRKKAHLGAPKATTVTARKLACLLYHLLKNKEPYQDPDPVLYQNRLQKSALTKLERQAAALGYKLLRDAPAPV

SEQ ID NO: 485048 - protein, 437 aa, unidentified
MVPHAGGAVEEEKTMDILHERVAGLDVHKNTVVACARIMTGKETTRECRTFATTTDGLLALRAWLSECPCTHVAMEATGVYWTPVWRILSEGDFELIVANAAHIKNVPGRKTDMNDAMWLADLLAFGLIKASFVPTEPMHELRSLTRTRKQLVREQTRHVQRIQKTLAEANIRLDSVISDIMGASGRRIIEAMIAGVRQPHKLADLAGKQIKATPKELYDALHGRLTDHHRFLLDLHLRQWDGLDTTIRTIDLEIDQRIDLMDEDRAAGESPFRTLIGNADTVPGVSAVSAPAILSEIGCDMSRFPSAGHLLAWAGMCPGQNESAGKRKPSRLRKGAPWLKTMLVQCAWAAIRKKGSYYQAQFLRLRHRRGPQKAICAVAASILTAIYHMLKDGTEHHDLGADYFDRRSTETKAKHLVASLTKLGFTVQLQPSAKAA

SEQ ID NO: 485049 - protein, 455 aa, unidentified
MKNEIAKLQIVNPNAAGIDVGAKSYFVAVNQQRSNVCEFGVYTRDHEKMIDHLKTHEIKTVAMESTGSYWQTIFNSLQAAGFDVILVNGSQTKNVKGRKTDVLDCMWIQKLHSLGLLSGSFLLSDMLQELRTYYFHRQHLIEQTVMYGNKMEKSLRLMNIRLDIVLRDVTGKSGLNIIEAILAGDRDPVNLAGLADIRVKKSQGEIANALQGSWRAELIFELKAALQFYKLYEEALKECDKIIEAKLKEYLPKEPLSSEIENKKKISIKKTGKHSPTFNVSKISFQYFGTDLFAIPGISHTTVLCLITNVGHDIHKFPTGKSFASWLRLAPNNKISGGKIISSRSPSGKNYLAVALRQAANSIGNQKSHPLTPFFKRIAFKKGRISAITATARKLAVIIWNMITKVEPYNREDVQIHNERHKQTLLKNIERRICSLQLNQAELMKLFTRTSLLTI

SEQ ID NO: 485050 - protein, 392 aa, unidentified
MWVGLDVGKSAHHAHALDHDGNTLYDKPLKQDEKAIRTMLGKLSKHGRVLLVVDQPNTIGSLPLTVARNMGIAVAYLPGTAMRRTAQLLPGDAKTDRRDAHVIAWAALKLPETLRDAGPDDETLAALKLLAGHDEDLAHESTRHVNRLRSLLLQTHPAFERALKGERITRDATLALLERYGGPMGVKRAGIEDVKDWAKSNGLRAGRIIDDMFKAIGEQTVTVPGTLMAETIIPSIAHDIKTIRDRRREVGRQVEKLLEDHPLLTVLTSMPGIGVRTASNILLGIGGDIANFKSSAHLAAYAGISPVTGQSGTSIKGERPSRRGNKRLKNALWQTAFVASTKHPPSVAYYKRKREQGKHHNAAIICLARRRCDVIYSMLKNGTLYQEPALVA

SEQ ID NO: 485051 - protein, 356 aa, unidentified
MQTQFTKKIDFKGKELFIGLDVHKKSWSVTIVVDGIEHRTFTQPPDPQALNNYLQRMFPGGTYQSAYEAGFCGYGIHRELNSLGIRNIVINAADIPTSQKDKLHKRDPADSRKIARELEKGSLQGIHIFDRELEELRSLNRTRFYLMRDLRRSKNRIKSFLQYYGEPLPPEFDNNQWTLKFISWLKQVQMKTLSGQDAFTHLIKSYENNRQQMLILSRIIRLRISQYDNELYSLLKTISGIGPLTSSALITELGDINRFKDIDHLSSFVGLIPRVKESGETIHTGGITFRCNSFLRTLLIEASWQAIRMDPALMHYYQQHLINNKGHKVIIKVARKLLNRIRYVMKNRQPYVTGVA

SEQ ID NO: 485052 - protein, 416 aa, unidentified
MISFPKRERAQRAAACVGIDAGKFSHTLVVRPQHQPDSKPFSFPTTRAGFDDAVAFVQRQVPGAAAEAILVGIEFAGNYGFTFAHYLAQLGFPIVSVLPAHTKRWKDVAHNQPLKTDAKDAATITDLVAQGHFVGFPFLSPAYADLRYLVTARERLSLLRRGAITQLRTLLQVVFPEFEALFPFLTKKTPFAVLRAFPTPQDLLDATRTKVLRVLKSGSRGHLGTETYEQLVTAARATLGLPGAQARLKQEILLTLERIALFERQITALEAELVQALQAVPETPYLLSIPKIAPVTAAIFLGSIGDPRAYEAGEQILRVAGLSLIERSSGVLRGTKRISKRGRPLLRQAAYMFAVRSITRGGLFRAEYEALCQRNGGVKMKAVVAVMRSGLRLLYSIARDRRLFTAEPPVRRRAAA

SEQ ID NO: 485053 - protein, 392 aa, unidentified
MRFVGIDIASEKHVVAVVDEAGGVLVKPTGFGEDAGGYGRLFEFLGTAGEVLVAMEATGHYWKNLFAELAARGFPVALLNPVRTRRFAAEDLERTKTDAIDALGIARFAQQKRPAVTRLTDSVTDEIRELVRHRERLVQDFGDRTRQLHRLVDLGFPELKRFIHTLDSQLATAVLHEWPTAEAFLGLPWKKLAKFRYDGVHIVGDELAKSIVETAKVSVGRHHGYAYRIQVQDTCEDLDLLRRRIKRLDGDIDTKLGDHEVGSLLTTIDGIGTTTAARIIAELGDPADFRDAAAIAAYVGVVPALKQSGKRTVSRAGLTPIGNARLRAALWMPTLTAVQKNAWLKAHYKRLRARGKLPKVALVACMRKLLTAVYSVAKHRQPFVPEVAGGSA

SEQ ID NO: 485054 - protein, 429 aa, unidentified
MPFVGLDLHKKSVEAVILADDGRILHRDRFPTTRAALQAFARRHLSPDHRVAVEATFNTWPVVDVLEPFAGDIVISNPLRTKAIAQAKIKTDKVDALVLAHLLRADFLPRVWRPDAETRSLRHQTTQRANLTADRTRLKNRIHAVLHQRLIEAPKGDLFSAANLGWLLGLELDDDGRETLHCHLRLLAAATGELEWVDRRLARHAWHSGPVKLLMTLPGVDVAVAETLLATLGDITRFRTPEQAAAYLGLVPSTRQSGEHCYHGPITRQGRAHARWMMVQAAQHLGNHPGPLGVFFRRLAQRKNRNVAVVAVARKLVMIAWHMLTHNEPYRYGQPVTLKAKMSRLRIRATGQKRRGGLAKGAPRPAAYGTGQGTRAVPALDAVYAAEGLPPLAGLTPGERRMLEREGLTGMARQVRESRRVRRGSGAAG

SEQ ID NO: 485055 - protein, 397 aa, unidentified
MSAVVGIDVGAYKHAAAVCRAGEREAERGVFRLSADRAGFDELDRWLERQGPVERVVMESSGHYYWPLASHLHRRGYGVAVVNPLQAKYFAKSRLQRSKSDPADARTLAALGMSEEPRVKDPLLGAEAKEAARFWGGLVKEQGQVRQKLLRLVEIGFPELTECFEDPLCETALAVLREAPTARVAARKRVSTLAETTRPGGRRRLGENKARRLHELAKETIAPPELDAQMSFEVGMLIQQFDLLDKQIEIAEQRVAEVLDSELARRLQTIPGVGPALAATFIAEIGDIWRFDDFDQLASYAGVHPKELSSGTKGQNPETSWRMAKTGNAYLRSAAYKMAVVGTQHNPVIRAHYLRKRAQGKSAMNALGHCMSKALAIVWGVWRSGLDFDPTLGGPRT

SEQ ID NO: 485056 - protein, 314 aa, unidentified
MQDSPLFIGVDVSKAGLVIATSAAQRLRSIANDALSIGRWLRQVPSHALLAMESTGRYHALLAHLASQAGFKVYVLNARDVYFYARALGTRAKTDGVDALVIARYLAEHHARLHPWQAGSALEQQLQQLLSRRAQLGVSQARLKQLLADTELDARALLGAFESLLQALDAKVQALIAGDVPLSQGYQRLRTITGIGPQTAALLATLLSRFEFANADALVAYCGLDPRANDSGTKRGHRRLSKKGPPLWRRQIYMAGFAASSSKALKPLYRALRAKGFAATEAFIILGRKLLRVAFAIWKGTASFDPARLLPTTA

SEQ ID NO: 485057 - protein, 339 aa, unidentified
MKLYAGIDLHSNNSVVCVIDEQDRVVAEKRLPNEIEGIVVLLAAFKRALVGVVVESTFNWYWLVDGLMAAGFRVHLAHPAAIVQYEGLKRTGDAHDARWLAHLLRLKILREGYIYPRQARGVRDLMRRRMQLVQSRSRQLLAMQTQLMRSTGRSLSSAQLKGTQAAAQLEGLVDDANVASALRANLAVAQALSGEIERLEREILAQVRLAAQFEPLLSVPGIGKILGLCIMLETGEIERFAKVGNFASYARCVDSERVSNGKKKGEGNAKCGNRYLAWAFVEAAHFAVRYNARIKRFYERKAAKTNPMVAIKAVAHKLARAAYHVMRTHERFEEARAFA

SEQ ID NO: 485058 - protein, 353 aa, unidentified
MQEITRVGVDLAKYVIQVHAVDRVGQRVVGRALPRDKFMAWCAQLPAGCMVVMEASSSAHHWARKLVELGLDARIIAAHLVAPYRIQGKHGKNDANDAAAICEAASRPQMHFVPIKSVEQQSMLCVHRLREGFKAERIACTNRIRGLLGEFGIVLAQKPEILRHALPDIIEDASNELPTLARLTLQRAWEQCQELEAHLAWCDARIAAHRKANEQVRQAEQLMGVGPIGASALIATVGDFKQFRNGAQFGAWMGLTPRQSSSGGKNKLGGISKHGDTYLRTLLIQGAKAAVFTAHRRADPISQWVYRLREKTGWQKAAVALANKNARILWAVFARGKPFDAHHVSVRAVIASA

SEQ ID NO: 485059 - protein, 338 aa, unidentified
MAMYCGIDLHSNNNYVAIQDGERRDIACRRLRNDLETVLSFLEPHRKELKTIAVESTFNWYWLVDGLMEAGYDVRLVNTTKASKYSDMKYTDDRHDARWIAHLLALGILPEGYIMPPKERGLRDLLRRRSFLVNKRSALYLSIKTIFTRSTGKRVSIQDIQHWDAETVPGFFDDPNVAESIIVMLPVVRVVTAQIKKIEKIVLKTEKLRDEFRLLRTAPGIGQILALTIMCETGDISRFAKVGNYGSYCRCVKSEHTSNYKKKGKGNRKNGNKYLSWAYSEAAHHATRFEPGAKRYFERKKSCSHQMVAARALANKMARACYYVLRDQVPFDPSRTFC

SEQ ID NO: 485060 - protein, 505 aa, unidentified
MTAPTIRGQPASSSSPSGSRAQAQAHRQAYHRRQMRAKAKSEALRHQEAAQVEALPVQHPHAAGIDIGSRSHWVCVGFTSEAPSCLIREFPAHTAGLKAIAAFLREHQVTTIAMESTGIYWIPLYELLASEGFEVLLVDPSYSHQLRGRPKTDRRDCQWIYRLHSVGLLAAAFRPDEQTCQLRAYLRQRANLIRQASRYVQHLQKALEQMNLKLTEILSDITGVTGRTILRAILRGTRAPEKLAKYRDKGCKASEAEIAQALTGSYREEHLFALKLAYEAWQFTLGQVEKVDGQIALQLGRMKCDRALPPLKPKARPKRRVNSPGFDVRTALYYVVGLDVTEIEGISELTALTLISEIGPGVSRFATVKKFCSWLGLCPQWQKSGGRVQSSRTRRGVNRAAQALRLSAQSLHHSQGALGGFLRRMKGRLGTQAAVTATAHKLARIVYLALKHGMTYVRQSQEEYEVQMKEKQIKALRRKARLLGLEIIEKTSGSDATAVAASVQG

SEQ ID NO: 485061 - protein, 330 aa, unidentified
MKHNHVGIDVSAKTFTTIIDHEGERTEAFDLPNDAKGFKKLIRMITKKGFTAQVVLEATGNYSLDLALALHRTKRIEVMVANPRAIALFAGAFLRRSKTDALDANVIVEFSIRMPFEAWKPPEAHCFNLRAISRRIEALTKNATQEKNRLHAATTFDEMTDVVRNDIEVNIRHLERRIERLREQARELIREYPDLESAFLHLISVKGIAQAAGIQILAELSILPKDMDVRQWVAHAGIDPMQFQSGTSVNKPSRISRRGNVHLRRALFLPALVAAQHEPHVTAFYQKLLGRGKTKMQANVAVMRKLLHAIYGMLKHDQDFVGEKFYVLGA

SEQ ID NO: 485062 - protein, 455 aa, unidentified
MAKLGKKIKTAKGLELKVVNPDAAGIDISPKELQVCVPVGRDAENNRTFGVYTRDLHEISAWLKRCRISTVVMESTGVYWLPIFEVLKEDGFDVLLVNAKDAKNYSGKKTDEADAEWLMLLHSYGLLRPCYQPENLTRKIRNLVRHRDAMIKSSSREVLHIQKAMEQMNLKLDNVFSDILGKSGQAIINAILAGERDPEVLASNADLRCKKSREEIKLSLQATWDEDQLFIMKQSQELYLYYQEKIASCEREIEKYVKECTSAIKRKEGIAKEMERSGKRQSDRNKIAMDIEGYAFDLWGVNIMNIPGMSAPSTLRLVAELGENFIDKFEDARHFVSWANLVPNNKISGGKLLSSRVQKKKNPVGLIFRQCANSLYKSKEPMGDYFRHIKSRSGHMQAMVATGKKLATIFFTIISTKTEYNPDVYSNHRKAQLDRKIANLRNRLNRLENEKAACN

SEQ ID NO: 485063 - protein, 362 aa, unidentified
MTMIGAERPETRVEVILGVDTHLEFHVAVAVDHLGRRLGESSVPTTTKGYERLLCWAEGFGPVRCAGVEGTSSYGAGLARHLKTQGVEVLEVERPKRRQRSPRRNVKSDSSDAERAARAVLAGETSGAPKSGDGCVEMIRALRAARRSAMKARTQAANQLQGLRVTAPDELLNRLRGLSTKELVAAAARFRLGDDPRDVPAATKFALRSVARRYEALSGEIAELDAHLDRLVAQVAPELVSLPGIGTDHAATLLIVAGDNPKRLRSEASFASLCGVSPIEASSGKVVRHRLNRGGNRDANRALYMICLARMRRDRRTQEYVARRTAEGKSKREIIRCLKRYVAREVYRVLISCVACSSPIGS

SEQ ID NO: 485064 - protein, 508 aa, unidentified
MVYKLKKLCSRATSPKQNMQKTHTLPIIGYGIGFDVHKDSVVVCISSQLQNNEIIQLKTHSFKHDPVGIKEMCQFLSKYDQNPTFLMECTGIYHLSVYHALNSAFPKHKDKIIAMNPLLIHNRISDLGNKNDKADAQSLSVLAFYSQILRPSYVGSIEFFSLRDLIRSYHRNQSQVNKFKNRIHRHLNSVNQKFPFDLSTEWGLKLLDWYCSKSWTLLECYNSLLQEQLKGNKAKVLQRLESEANRNGEIILSSRTQFMIQFDLVRLLSSQEANSILLVRADQSIIKDKHMKNLYENLLRIPGFGAITVLTILTEIGDYTRFQDSNAFVKFCGVVPKIEQSGALNKRMRVNRFTNKFLRYVLTQAAGRLINQKQKDSDLGNYAFKQRYLKQMPFKKASMKVANKMARKVYQIINGFEDMSMTYEIEKKRRAKIHNKIKSKGTALDPVYTRALRRDIQNFLVSHSQMLNSTSRYHLVSGFKRLLQKSQYIANKKEFDDEKGEKKEVCKK

SEQ ID NO: 485065 - protein, 376 aa, unidentified
MKKIRFVGLDVHAETITVAVAEPNGEVRSLGTIPNREESIRKLVKKLGPPDQLRACYEAGPTGYALYWQLTALGVKCDVVAPTLVPVKVGDSVKTDRRDALKLARSHRSGDLTAVWVPDEAHEALRDLVRAREAAKQDQLRARHRLSKFLLRQGKRFPDGGKAWTLKYMAWVRQVHFTQAAQEYTMLDYLHEVEHMNERVLRLEQAIEEAVKLAPSWMQEVIQALQALRGVAKISAATLVSELGEISRFQTPRQLMGYSGVVPGEDSSGERVRRGSITKAGNAHLRRVVIEAAWCYRLRPGLGPKLRQRQKGVNQEVKEIAWRAQHRLHKKYQRLMAAGKDQRKIITAVGRELLGFIWAIGTRTEALSSQRRAMTA

SEQ ID NO: 485066 - protein, 345 aa, unidentified
MNNTIIGVDLAKEVIQVCTYTNKKVRSNIEMTPNEFTSFLVKSKPMIVVFESCGMSNYWKQTAQRFEHDARLICPKLVASVRQNQKTDKNDALAVVQASLLPDVNFIAGKSMEQQQLQSIMRFRELAIKQKTALGNQLKGLLLEFNIRVSSRNGGLKGVVESTLEDYENGLSFEFRSALNAAWQQYKALIKSIALYENNLEKIVATHSDCKKLLKLEGVGTINAVNLYIALGCETIGQFNKGKDASACIGLTPIQHSSGGKVKLGSVGKYVKNSMLRSNLVVGAMAAINVIIKKEAVTKKEAWLQALVERRGKRCAAVALANKTVRTAFAMLTKETEYKAEFISA

SEQ ID NO: 485067 - protein, 344 aa, unidentified
MDISVLGVDLGKNVCSVVGLDASGAVVMRRKVRRETLIALAEKLPPCVVGMEACCGAHHLGRVFAAHGHDVRLMSPEYVRPYIKAQKNDDRDAEGIAEAVTRPTMRFVELKSQDQLDMQTLHRSRDRLVGERTALINQLRAILLERGMVAPQGKWKLEQFLAVLMDEQGGAGLSSRMIVLVADARAQWAELDRRISAFDAEFVRWVKENEEARRLTTIPGVGPIVASALVAAVGRAESFDRGRDLAAWLGLVPRQFTTGGKPKLLGISKRGNKYLRRQLIHGARAALPYVAERDTPLGRWVKGLMSRTHRNVVVVALANKLARIAWAVLQRGKPFDARAVSVAA

SEQ ID NO: 485068 - protein, 375 aa, unidentified
MKQYSKYVGMDVHKERITVAVAQANRKAPLYYGEIENTSEAIAKVVKRIAGQEETGFCYEAGPCGYGLYRQITAMGHRCEVAAPSLIPKKSGTRVKTDRRDALALAGLYRAGELTPVWVPDKEQEAMRDMTRAREDMKMMERHSRQRLGGFLLRHGKVYPGRSKWTQGHFRWLEGIRFETASQQIVFQEYVDMVKHTQGRVTAMQEEMRKALDGYTLKEVVEGLMALRGIDLISAMTIVGELGDISRFTSPRQLMAHLGLVPSEHSSGGKRRQGGITKTGNSHVRRVLVEGSWSYRLPARKTAHLQRKAAKASKAVQEIAWKAQKRLCSRYWYLVYKGKLPVESCTAVARELVGFIWAIACEVMGNKRSLPVGKG

SEQ ID NO: 485069 - protein, 334 aa, unidentified
MELYAGLDLHSRNTYIGIMDKTFNRVFKKRVPNDLDQILETLTPFHDQLKGFVVESTFNWYWLVDGLMEAGYGDAHLANPAAIKQYEGLKYSDDQHDAFFLAKLLILDILPEGYIYPKEHRSVRDLARKRMFLVQHKTANILSLKSLLQRSCSIKLSANDIRKLTADDLEKWLKEEYLILTAQASLDTINFLKEKIKCLEKAIIERVKLRTGFRQLLTIPGIGNILAMTIMLEVGDIDRFTRVGNFVSYCRCVPSQRLSDGKSKGVGNRYLSWAFTEAAQLGRRYNEQFRRYYNRKVAQANTSLATKALGNKLARICYYVMRDRVPFRKELIAQ

SEQ ID NO: 485070 - protein, 325 aa, unidentified
MTDVFVGIDVSKDQLDVAIRPSGETWQVANTDLGIATLVNRLVKVEPALVVLEATGRLESAAVSAMAVAGIPLAIVNPRQVRDFARSTGRLAKTDKLDAQMLARFADVVRPEPRPLPDETQQRIEALLVRRRQLLGMVTAERNRRRRAPALTRVEIDEHIAWLQVRVEAIEDELNKTIRSSPLWRDKVALLRSVPGVGPMLAATIVAQLPELGVLTHKEIASLVGVAPLNRDSGHWRGKRTIWGGRPQVRAALYMSALVATQFNPLIRPFYKRLLATGKPKKLALTACMRKLLTILNAIAHRGQPWRSPAGATLTGAASLIPADA

SEQ ID NO: 485071 - protein, 408 aa, unidentified
MNTLYVGIDVSSKSNVVYLMLPNGDKHSNFSVANSHEGSTLLVKKIYSALTSHSLDTVLIGLEATSVYGDNLVYFLREDATLAPFNRKIHVLNPKQVKKFHDTYNDLPKNDYVDSFVIADCLRFGRINKEVYMGEYRYKALQNLTRARFFAVQNLVKEKQRFMNVLFKKYSTMTQEKVFSDAFSTTALAVYDEFESAEALANMDLHELTDFIIEKGKNRFPDPVAVAKAIQKAARSSYRLPKTVNDSVNQVLSISITSMKALESQIKEFDKAIIALMELLPNVLISIPSIGPVYSAGIMAEIGDINRFDNQASLAKYAGLAWKQHQSGGFEAEVTRLIPSGNRFLKYYLCEAAFSLVRCDKKYSDFYHLKYKEVNRCQHKRALALTARKFVRLVFRLLKDNRLYCPAK

SEQ ID NO: 485072 - protein, 419 aa, unidentified
MSFKILKNNCCGLDVHKTWIFACIGITDSNKRTVYKQARFSSFTKGLQELCHWLAKYDCTDVCMESTGKYWIPVFNILEKNNIWVTLSHPKYTKPQKGNKTDRKDAKWICDLYMCGMVKPSFIPPADIRELRDLVRYRFKLTCMITGEKNRAHNCLTVSNLKLDDVFSDIFGRSSRSITEQILQHPGETFDVAPFVHGRCKTPIEEIQAAVDGAVSKEQAVKLRQCLNHIDELEMHKSEIEREIFRLSDKYEDILTLIRTVPGFDKNPMTAIQVLSEIGGDMSVFPTAKNLVSWAGCCPHNDQSNHKIKSTRISRAGSYFKPVLVQVANALIKSKKHPEFSTRYRRIKARRGHRKAIIAICRMILTAIWHILTDLKPYTAKGFLEPRPVSKEKVLTASQALNLLKQRGYVIKDEPIFIS

SEQ ID NO: 485073 - protein, 353 aa, unidentified
MKRDQYMGLDVHQATTVVTVIDAEGKLILETTVATEAKAIVRLLQSMSGPLHVTFEEGTQSAWLYDVVRHFVAEVIVCDPRRNKLLSEGSKADKSDSRKLAELLLARMLRSVYHGHEATRKLQQLVRGYETLSGDMQRAMVRIKAIYRGCGIASKGRAVYQVQQREQWLKKLTEPGRRQRAEWLYAQLDHLRPLRKQAKQAMIVESRKHRAAELLKTIPQLGAVRVAVLVATIDTPHRFRTRQQLWSYSGLAVVTHMSSEYEIKDGRAVRRRKPIQTRGLNRNCNHRMKEVFMGAATGGSQSEPYRSYLESLEKRGIRREMARLTLARKIAAVTLAIWKKGETFDPKKLNWTT

SEQ ID NO: 485074 - protein, 426 aa, unidentified
MPYHIAGINVHKKMLAVVVADVSVDGEYRFEHLKIGTSPAQLRALADWLAERAVEEVVMESTAQYWRPVWEALERYWVPQRRTCNDAPATAGRLYLAQAQSNRGVGGRKKDFPDAERLVRRLVAQELTLSFVPDAEQRLWRTVMRRRWQLTRNRVQLQNRLESLLEEAHIKLSSLVSDLLGTSARRMLQAVAEGATNPATVAALADQRLRATPDQLRDALGACATLHPVYRRLVQLTLDELRVLEDHLGQLDQQMAQLLAQHHDAVQRLAEVPGLGVDSAQQIIAEVGATAATFPSPKHLASWMGACPGHEESAGVNRSPRCPKGNRQMRRVLNQAANAAVRAKGTIFAVVYRRLAARLGHAQAIGAIAHRLYRLIWKILYQRIRYEERGPAVTEQAKAIRTRKMIRELRTLGYRVELVNPTPSGA

SEQ ID NO: 485075 - protein, 351 aa, unidentified
MLIIGCDFHTRFQQIAMLDPTSGEILERRLEHETGEAEKFYASLPDPARVGVEATIRAQWFERALARYGHELWVGDAAEISAARVRKQKTDSRDALHILDLLLTNRFPRIWTPSPTERDLRQLLRHRHKLVRYRTSVMNQLHGLAMSQGLCRKRKLWSRVGRRELEALTLDPWADRRRQELLALLDRLNPWISDLDRAVEQEAELRPEAVRLMEQPGVGPVTALSFVLTIGPVSRFQRSKQVVSYLGLNPREESSGGKQRLGSISKQGNSMMRYLLVEAAQVASQSDPELRREYLRLKFRRGHSAVAKVALARKLAVRLYWKLREAAPPLPSARMQGSPSNPMVEGNPSPS

SEQ ID NO: 485076 - protein, 442 aa, unidentified
MSVLTAFGRIFFCKEVLLTAKLRIVYPICCGVDVHRDFLVACIASTNKQGVTTYESKRFSTYTGQLREFGIWLLDRNCHDVCMESTGKYWFPVHNILTPLGLNVVVCHPKFVKAIKGKKTDKKDAQWISDLFKHDLVRGSFIPPEDIRQLRDLCRYWCKLTHYTTGEKNRAQNCLTVSNFKLDDVFTNVFGKSATTIIDQLLINMGEPFDVAPYIHKLCKTPIAVIQEAVDGAFTSEQAEKLKIIRQHIDYIAVLKTNLEEVIFKLAEPYHPQIELLLSVPGIKDRITAIRIIAEIGVDMPVFESAKHLASWCGLAPQNNESAGKKKTTRIGKAGAYIKPLLVQIALAASKSKANPEISSKYQMLKKRRGGKKARIAIARRIVVAIYNMLLKNEAYDGTLYSKFEVIPEKREVTATQAFAILRKQGFFIKDVDSPHDIALLA

SEQ ID NO: 485077 - protein, 322 aa, unidentified
MEMLSFGGIDVSKDRLDITVLPDEQCSSVSNDAAGWAELIEQLRGSSITAIGVEASGGYERGVVRALLAAGMSVRQINPFKLRQFAKASGILAKNDRLDARMIASFVAIMPTRPAQRQTPMIEQLAAMLTVRRQLSDHKVATENASRLLEGAMLQRLSRRRVAGLTADIDLLDQRLVEIVTADPALAHRFWLLTSMPGVGAVLACTLIALLPELGQMSRKQVAALVGLAPYDFDSGKLKGRRCIWGGRARVRHVLYMAALSASNWNPALKAFHDRLAATGKKPKVVIVAVMRKMITTLNAMLRDGTTWVDRYSGRRSAATAR

SEQ ID NO: 485078 - protein, 465 aa, unidentified
MREGATSTRGVTWLPGGSSSGTEIPNRCVLLTARKSTPQPSNQGESSMDEDGNTRGSRRYVALDIHKHYCIIAAVDREGRVVLHAVRVEHADLEGWLKKNLRATDHVVIESTTNAWHVYDLLEPLAERVVVANPIKVKQISQARVKTDVRDTLILARLLAANLVPDVWVPPAHVRELRQLLSQRRQLVETHTQIVNRMHSVAHRHHLKHERGKRFNEKTTLWQRDNRLSKVEQFQLELEMENRGYIEKQISRIGKEVAKMSHQKPWAESMTYLMQLPGFGVITAMTILAAIGEVQRFETAKKLASYSGLTGGVDQSGTHLVQKGITKEGRKELRWAMVEVAQRAVKSDPRWTRKFQELHKRMHRNQAIVAVARQLLELVWYVLTRRQPYRHFSQERIAYKYLTWAWQMDEAARDGLTRQQFARYYMMRLGIGQDLTRIALDPKHPRKIASEAELLALRPDLKHIE

SEQ ID NO: 485079 - protein, 430 aa, unidentified
MKSSTQNAKIEAITENTLVLGIDIGSETHYARAFDYRGIEYSKKPFKFSNTEAGFMSFKAWIQAMKEMHEKDKVVPGMEPTGHYWFNLGKFLQDNEMRPVLVNPHHVKKSKELDDNHPTKNDRKDPKVIAGLVREGRYMIPYLPEGVYADLRTASNIRFQLQAELTRIQNRISRWFNIYFPEYKTVYGKPDAKSGMMILKVAPLPEDILTLGIDGVNQIWRDAKMRAVGKARAKTLMEAAEHSVGSKEGAVSARMEIRMLLEDYESRNVRLQEVMALIEELVKQIPMAEKLLEIKGVGIKTVSGFLAEVGDISRFNNPKELQKLAGLALVENSSGKHKGETRISRRGRKRLRYLLFEVAMSLVSKNAEFKELHIYYTTRRINPLKKMQSLMAVAAKALRIFYAILTKGVAYDPKKMINDIKRPKIYLQAA

SEQ ID NO: 485080 - protein, 330 aa, unidentified
MRKVTEAGIDVSKDVLDVAVRRDERRLETARFANDAAGHPKLIRWLTKGGRTVRVVLESTGTYSLDVALALHRTRGVTVMVANPRAIKQFTGALMQRSKTDLTAAVALRDFAIRMPFVAWEPPAAHVLELRGIARRIAALVVERTRERNRLHALHATTEASSIVCNDIDVNIRHLERRIELLSTQAVALIGVHADVQAAFELLISVPGIAAHTAVQLLPELLVLPETMTVRQWVAHAGLDPRAHQSGTSVEKPARISKVGNAHIRRALYMPALVAVQHNRHVRAFFEKLVARGKTPLQAYVAVMRKLLHAIYGMFTTRTTFVAAKFHAAA

SEQ ID NO: 485081 - protein, 407 aa, unidentified
MYYLGIDISKKSFAVSVLDEEGEAITKFLTFPCTRKGMEKLIDKISSLKLKKSEVVIGIEATGNLWENLYSFLKGYKVIILNPYQTRKYHQVLSKKAKTDKVDALVIAGLLRSKEALASYVPEEEVQVLRELVRLRHHLQKDKKNYLRKAYSLLNLVFPEYTDLVKNPFKKVSSMILKKYPTAIHMARARRTDLVKMARRIKGNNYSSELAEKLIQIAKESIYSGKAAEVRGIVLRIIIDEIESLRNKIKEIENKIEEILSSDEPSSPQKRLLEIPGVGPKTVAAFLGEVGGDVSRFSSANKLIGFIGWYPKISESGESKNLHPKMSKKGPSALRASLYMAAVASLKHNPYLRSLYHRKISEGKESKQALICVGKKILSIMYSMLKYEADYDPQRIFFQFEKERILT

SEQ ID NO: 485082 - protein, 418 aa, unidentified
MSEERNASPSHRYMALDIHKHYCVAAGVDREGKVVLQPVRVEHQDLVGWLKKNLRPSDHVVIESTTNAWHVYDLLEPLAERVLVANPIKVKQIACARVKTDIRDTLILARLLAANLVPVVWVPPQQVRQLRQLLSQRRQMVETHTQIVNRMHSVAHRHHLSHPKGKRFNEKNTVWQKDKILSQLEQFQLTIEMENREYIEKQINKIGKEIAKMSHQKPWSESMTYLMQLPGFGVVTAMTVLAAIGDIRRFETPKNLGGYSGLTPGLEQSGTKKRGKGITKEGRKELRWALVEVAQRAVKSDPLWKRRFQELQHRMHRNQAIVAIARRLLELVWYVLTRRQPYRHFSQERIAYKYLTWGWQMDEEARDGLTRQQFARYYLMRLGVGQELTRVALNPKYPRRLASEAELLALRPELQKIE

SEQ ID NO: 485083 - protein, 403 aa, unidentified
MTKYHVGIDVGKYNHHVSIRDIERDTYCKTFSITNDHEGFAELISSLKRLSHDRREFLIGIEACPYGINLSYFLMGTGFSLVEVNPFRVGQFRKAQGKKAKTDTIDARSIAGILSLGDHKALSMPDPILDNLKELTRFRTDLVDEKATIMIHLRESLGILFPEFDKVFRQLDSSASLAVLTAFPSPECLIRAGEDEVTKILSLASPHRMGRGMASRIIEADKDTVGVAQKQPAIGIKISILAKKIASLQATIRELDKQITVVYNSLPNKLQGFPCGKATSLAAIISEIGDIHRFATLKKFLSHLGWCPQSFQTGGYHMEHPRMSHAGNKHVRRLIWMLSIHAIKNVPRYRLYFITRVKEGKAKMHILIAIGRKLLSVLYTMLKKGTSYDPNWEEVGHLAAAGH

SEQ ID NO: 485084 - protein, 475 aa, unidentified
MARQALRSPHEGAPLFPHETLYVGIDVGKFRHVAGFLSRSLLNRHERFEGCPTFAFDQSREGFRALVDHLRELVPIEQVVVLLEHTGHYHRLLEQYLLDLDITVYRIHVQERPKGMLKTDKRDALSLANRLYSQLELGAQVQDKMQLVRQALPATKAASQLKGLIQHRYELSHQSTQLKNKLTAICDELFPEFTQVFRDPNRQGALAFRERFPTPASIASASMAALQELRPRSFPSDAQLLTLQHMAAETIGITDGDRQQGLLLEQGLLIKELRIVQEHLEILHTTISEIVTSSREGQILLSIPPIGPIQAATIIATIGNIANFERACELKSYFGWAPKRSQTGVSFDRSSLARRGVRPMKQMLFLIAAQAIRCECEWARIYRRLLPRLATYDERIQDYRGKMRVLGRIAGQITTMIFALLKTDQELLSQVPAGEVPPPPMLYDPEVHRKHQEGQYRSLKPATHPRKIIHLPRSS

SEQ ID NO: 485085 - protein, 347 aa, unidentified
MKHFVGLDVSQDLTHICIVDSDGKTKWQGKCKSTPEEIAETVKARGLDIERIGLETGPLSNWHWRELTNMDLPVVCMDARHVNGILKLRKINKTDKNDAQGLAQIVRTGFYQEVSIKSPDSHTVRAMLGVRSQVVGMRVKTTNQIRGILKNFGIVLKKGSGKSFKERVIAISEGPGLLNETLRALLAVMESLEVQIEVLDRKAHNFAKGNKTCRTLMTIPGVGAITATAFVTSVEDPARFKRSLDVGAYFGLSPKRYQSGERDVNTRISRWGDGLVRSYLYEAANALLLRGEQWSSLKAWGIRIAKRSGINKAKVAVARKLAVIMHRMWVDGTEFRWSNSGEKVVPT

SEQ ID NO: 485086 - protein, 289 aa, unidentified
MKKEKVFIGIDVSKLTLDICIVKNTTTSLVIKNNKTDIKKFLNEETKGSSEVYLCIENTGKYGWLITELAPDYLTNFYIINPLHLKRSMGLIRGKNDKIDAVRIAQFIKRNYQEEVCYVRERSLITALKVLLSERGYKVKSKTQLKVKNKDIEVISDKKLAKKLIKSNLKLIVTLEQQIKEIELEIKRLIESDKQLKQHSYLLKSIPGVGDILSTSLIIKTNEFKSITDPRKLACYCGVVPFENRSGTSIFGKKRLSLLADKKIDPSVANTVNNISGSSLELATGHWCK

SEQ ID NO: 485087 - protein, 345 aa, unidentified
MKLSRVGVDLAKNVYQLHGVDRHGKTVWKRRLRRGQWLQVLTDTVEPGCEIGMEACTGAHHWARELQARGYTVRLIAPQFVKPFVKSNKNDANDAEAICEAMSRPHMRFVSVKTVEQQDIQATHRVREELKAHRNAKANQIRGLVAEYGLVAPKTLLALRRAIPEWLEDAENGLTDNFRSLLHGLWNDLLTLEDRLKGLDKEIEKLARSFEVTKRLQQLRGVGPLVATALVATVGDGSQYSKGRQMASALGLTPRQNSSGDKYRLFGISKRGDVYLRTQMIHGARAVVSQAKHRDDPLSRWVTDISKRRHPNVAAVALANKTARMAWAMLQNETNYDSSLAVGQA

SEQ ID NO: 485088 - protein, 328 aa, unidentified
MIQLGIDVGKSKIDLCLRPDGPEGRKKTKILTNGPDVAVSVLEWLAKQKVAPADVQVVMESTGTYHEHLAYGLYERAVRVIIANPARVRAFAQGMGILTKNDTVDADVLARYGAMRQPDVWQPPSPAIRELKALISRRDALVHDVGREQSRLEKLLSTRCSLLVEASVRKILQVLHNELQVVQALIDNHIDNHPELKRDMEYLTSIKGIGSAVGSTMLVVLRGNHFISAEQAASWVGVVPKEKRSGSSVRGRTRLSKNGPPEVRAKLFMAAIVAVKHNPLLKQFYDRLLAAGKAKMSALGGVMRKLVHICYGVVMKQQKYDENYATAA

SEQ ID NO: 485089 - protein, 343 aa, unidentified
MEITTIGLDIAKHVFQVHGVDARGNPLIKRRLRRAEVHQFFAGLPACVVGLEACATAHYWARELAAMGHDVKLLPPQYVRPFVKRNKNDAADAEAICEAVTRPTMRFVPIKSVEQQSVLMLHRARDLLVRQQTMIVNALRAHLAEFGIIVPQGIQNMPKVVAIIADDTDQRVPSLAREALASMAAHYAELKRQISSFETRIVAWHRSNVMSRRLATIPGIGPITATLLVSTIADPRHFASARQFAAWIGLVPRQYSSGGKERLGPISKRGNPYLRRLLVIGAHSVLRWGRARLAQVSRWLQGLLARRPLNVVATALAHKMARTVWAVMTKKVAYTAPKIVAAA

SEQ ID NO: 485090 - protein, 341 aa, unidentified
MNQKYYVGVDVSKGKLDIAVIDSSYNLKLEKVINNNLSKIKSFFTSLKRQLKVSANDLLICAESTGIYNTPLAKTCMALDIPYWEENALKIKRASTDFRGKSDQKDAVRIAEYALRYCDKVVLHQKLDPITEELRSLTHVRETLTKQMVGLENQIREAKTHDTELWTILKKQLSPIIKTMKKQLGEVEKLIVDKVNQSPEFANNLGLLKSIPGIGKQIALMFILGTDNFKLFETAKQMACYAGVVPFPNQSGITTKKDRVSRHANKKLKALLHLAAMAAVKSSSDLKAYYIRKVSEGKNKMSVLNAVRNKLVHRMFSVIKRQSPYTPMAKESINQDSLIFT

SEQ ID NO: 485091 - protein, 440 aa, unidentified
MAVRKREEEVFPNAAGIDVGASSHWVAAPPHVGDESVREFGAMTDDLNAMADWLLACGVDTVALESTGVYWIPVFEVLEQHGLKVWLVDTRQMKYVPGRKSDVMDCQWLQKLMSLGLLRAAFRPDAQVLVLRAVARQRELLVTEQGSWVQRMQKSLVQMNIQLTEVLSDVMGITGQAIIRDIVAGQRDPKALARHRNGRVKASSEEITKALTGNWRDEHLFVLAQSLAMYDDIARHLTECEAKMQALLTELGQSQVDLGKVPRAGSKTRAEYDARQTLANWVGVDLTRINGLGLTAAMKILTEIGPDLSRFASVKHFCSWLGLCPGTKISGGKVLSAKTKRSTNRVRQAIKMAAMSLAHSESALGAFYRRMCARMDKPSANTAVAHKLARMVYFMMTRGEAFVDQGQQRYEEQQHHRSVAALKRRATALGFVINPVTAAV

SEQ ID NO: 485092 - protein, 419 aa, unidentified
MAFKILRKNCCGLDVHKTWIYACIGITDADGRTEYKQARFSSFSNGLRELADWLAKYSCADVCMESTGKYWIPVFNILEKTCWVTLAHPKYTKPQKGNKTDRKDAKWICDLYMCGMVKPSFIPPADIRQLRDLMRYRTKLTNMLTSEKNRAQNCLTVSNLKLDDVFSDVFGKSSRSIIQYILEHPGEQFDVAPFLDRRCKHSVEEVQAAVDGAVSREQAAKLRGCLQHIDQLNEHRKNIEAEILRLAEPYPYQLELLRTVPGFSSAPLTAVALVSEIGVDMSVFPSSKHLVSWAGCCPRNDQSSKTVKSTRISRAGCYLKPLLVQIANAVIKSDKYPECRERYRRIKARRGHKKAIIAVCRILLTAIWNVLSKLVPYSAEGYLTDKLTEHSVVISKAQGLELLRKRGYIFKDDLPADSA

SEQ ID NO: 485093 - protein, 341 aa, unidentified
MQIHSIGIDLGKTTFHLVALGAAGKVLVKKKFSQKQLLAYTANLQVSLIGLEACSGAHFLGRALRKQGHDVRLIAAQFVKPFVKTNKNDFVDAEAIAEAVDRKNMRFVPIKTDDQLDLQAIHRVRDRLISRRTAVINQIRAFLLERGLVFAQTPAKLKAAMAEVLENAEADLTPMMRNLIDTLWGEWKLVEQQIEELTDKLEQISASDAGCSRLRKIPGIGPVVSTAIVAAIGNGAAFRKGREFAAWLGVVPRQYSTGGKPRLLGISKRGNVYLRKILIHGARAAVSRIKRDKVPIGAWLDRLDARAPKNVVVVAMANKLARIAWAVLSSGNDYRPTALPV

SEQ ID NO: 485094 - protein, 450 aa, unidentified
MMREVQEIEDEEHEQILERVCAIDVAKAPGKVCTRVPHPSRPGARRTRVWDVDATTNAILELGEHLAGEGIEKVTLESTPDYWRIWFYLLEASGLDVQLVNARDIKNAPGRPKTDKLDSVWQAKLTERGMLRPSFVPPAEIRRLRDYTRLRTDLTRERTRYWQRLEKLPGDSLIKVSTVASSLDTLSVRDMLEALIAGERDPKVLAGLARGRMKAKHAALIEALTGRFDDHHAELARMLLDQVDALNAQIGKLTTRIGGLIAAIPSAQGVDADGTTGPAAGTSPGAPVLPAAARLDEVTGIGLDGAQAIIAEIGLDMSRFPAAGHLVSWAKLSPRTIQSGTSSRSGRTGKGNPYLKGILGEAAAAAARTGTFPGERYRRIVKRRGKLKALVAVARSILVIIWNLLANPAARYHDLGSGYHASRTDTGKKVRNHIRQLEALGYTVALTQAA

SEQ ID NO: 485095 - protein, 345 aa, unidentified
MLYVGLDLSRKRLDWQALDQAGEQVAVGAAPPDRDGLAQLARRLGDCEIVAVIESMSGARFVHDELERWGWDVRVADDSKARGIAPLACKTDRIDCWVLAELARRDLVPEVWLPDAAVRAERERARFRLYLVRHRVSLKNRVHAILFQHGIPVAHSDLFGAAGRRTLERLRLPEPWQSTVCCSLELIDTLNTEIRDCERELKRLGADHPYVSRLVTCPGIGPVLAYTIASEIGDIARFQSPRKLVGYTGLCPRVDQSGERDRRGALRKNGPTYLRWALIEAAHVAVRCYPPYRELAETMRDRHGRARGGNIAAVETGRRLSEAIWHMLTNDQPFAPAGARYRLAA

SEQ ID NO: 485096 - protein, 415 aa, unidentified
MKVVFPTCCGVDVHKTFLVATIITTPADSLQPNYQKKRFSTFNSDLNRCADWLLEHNCLDVCMESTGKYWVPVFNILEKRGIRVVIANPKWVKAVKGNKDDTKDSKWIGDLFRIGLVKSSFIPDLNIRILREFTRYRYKLVSMKSSEKNRFQNAFTVCNVALDSVVSDMFGKSATAITDYLTSDGSFDPEHCVSLLQRSLKKKAEQVLESIEGFSIADEQKARIKIIREHHDFIEEMIATVDTRVNEMVAKYEGNINLLCTIPGIDRRSAITIISEIGTDMGQFGSSKRLCCWAGLTPGNNESAGKKKSVRISRAGVYLKPALVQVAHAAVKDNDHPYYKLKYERIAKRRGKKRAIIAIARMILTAVYSMFCTGEVWNPVDLYKVDMPGCLKEQQLAKAIKQATRFLEKQGLSVA

SEQ ID NO: 485097 - protein, 343 aa, unidentified
MVHSVGLDVSQKTTAVCVVDVSGNSLWRGVCATDPDRIEASVRRHAGHDAHVGVETGAMTPWLVHELRGRGLNVVCLDARHARAALKMQINKTDQNDAEGLAQIVRTGWYRSVHVKSLDAHRARALLGARSQLVGIATRLSNHIRGILKTFGVLPGRVRGLRFDRRIEALLIERPDLEPIVAPILETWRHLREQIRVFDKAVQTIVSNCPTCRLLMSVPGIGPLSVLAYVSAVEKPERFRNARAVGAHFGLTPRKYQSGEIDRSGRISRCGDSLARTLMYEAAVVILTRVKRPSALKDWALAIARRSGAGKARVALARKLAVILHSIWRSGEPFRWSEPSVAA

SEQ ID NO: 485098 - protein, 368 aa, unidentified
MVKLTRTMNKCHSNTELSSLEETRCQFNGGRCAIKLGIDVHQDFYVVVEQVDGSNPKPPQRFPKAAFLHWAAKLKREGAEVHAVYEACGFGFALQRQLSALSIQCYVVCPQKLDEQNKRVKTDGLDAKALCLKLDRFVQGNRDALAIVRVPSEEEEQARAIHRQREQLVKARKQLEAQGRSLMVNHGIEPVKNWWKPHTFAALPMPQWVKELLKNSQPILIALQEKISALTAQLQSGAAPEQPRGLGKMTSVIIDREIGDWNRFSNRRQIASYTGLCPGEYSSGNTRLQSCVTKHGNPRLRAALVELAWRLVRWSCAQKSDRGRGAPVGRGSVENQDRPAPRRRVGINQLVKFEGNTKEVRAALALIA

SEQ ID NO: 485099 - protein, 378 aa, unidentified
MALELSRSTWLAAVSAPGSDKISKYRVAAGDTPALLCLLARLKAHAERRCKSVQIVSIYEAGLDGFWVHRVLETSSVESYVVDAASIAVNRRSRRAKTDRIDVETLLRTLMGWARGERRICSMVRPPSPEEEDARRLTRERGTLVTERIRHVNRIKGLLATQGVFGYEPIRKDRRERLEELRRWDDQPLPPRLKMELRRELDRLELVLSQIAALETERDRVLQANQAAASEEGSERRLARPALIGETGAHLLRLRGIGPEIASVLSLEAFYRNFANRREVAAYSGLAPSPWKSGGTDIEQGISKAGNARLRKTMIQLAWLWLRHQSGSDLSRWFHDRVGDRRGKVRRITIVAVARKLLVALWRYVTHGLVPSGAEFKA

SEQ ID NO: 485100 - protein, 384 aa, unidentified
MAAVIIGVDPHKLSATIEVLDGQEKMLGGGRFGTDRDGYRQMLATGRRWPQRVWAVEGSNGIGRHVAQRLVADGESVVDVPAKLSARARVFSTGHGRKTDATDAHSIAVVAVRTSTLTAVDVDGELVALRLLADRRDELAGARTRTANRLHRLLLELIPAGAPRFLSATQAKALLATVRPRDVAGRTRRQLAAELLADIVVLDRKLKDSDRRLTEAVTATSSGLPGLYGIGPVGAARILGDVGNIARFRSKAHFASWTGTAPIDASSGQQQRHRLSRAGNRRLNRVLHIMAIVQIRHDTEGRAYYQRKLAAGKTPMEALRCLKRRLSDVVFRQLVADANRIREAGPGGHSGATLQSSAASPTPAADSSDKSLPGPADQHLTPVG

SEQ ID NO: 485101 - protein, 421 aa, unidentified
MFKIFRKNCCGLDVHKTWIYACIGITDENGRTEYTQSRFSSFTKGLRELSEWLDKHGCTDVCMESSGKYWIPVFNILELTCKVVLAHPKYTKPQKGNKTDRKDAKWICDLFMCDMIKPSFIPPVDIRHLRDLVRYRFKLTNILTGEKNRAQNCLTVSNLKLDDVFSDVFGKSSMSITKYILDHPGEQFNVAPFVDGRCKKPIEEIQAAVDGSISLEQAAKLREILRHIEELEIHKLNIESEILRLAEPYIHQLDLIHSVPGFFANPITAISLISEIGVDMSVFPTAKNLSSWAGCCPRNDQSGGKRKSTRISRAGSFLKPLLVQVANAIVKSDKHPEFKDRYRRIKSRRGHKKAIIAICRMLLTAIWNILSTGEPYDPAGYLVNRFIPKGDTFITRAQALNYMRSRGFVIFDDSEPEEALS

SEQ ID NO: 485102 - protein, 372 aa, unidentified
MNSIVYVGMDVHASNYTLSCYTLTNDECFATVQMEPEVKNILTYLKKVQRNLGGPCEFLCGYEAGALGFSLYHQLQKHGIPCTILAPSTMPTFHCNEIKTDRRDAMKIARCLAFGAFRPVHIPTKEDAAVKDFIRMRDDHKIALKKIKQQIQAFCMRYDLHFTEGRSYWTQRHLAWLKALALDDLLREVLDEYLVTLHQLADKIERLDARIEELAQGERYAENVKKLSCLIGVRTHTALALVAETGDFRRFAKAEQYAAFLGLVPGERSSGDKQSRTGITKAGNTHLRKLLVEASQCYGRGKPGYKSRLLKERQQGNTSEVIAYADKANERLRRKFYRMVLRHNKKHNVAVTAVARELSCFIWGMMTGHTAI

SEQ ID NO: 485103 - protein, 400 aa, unidentified
MPAFWVGIDSGKRAHHCVVIDQTGTVLLSKRVENDENELLALIAMVAEIAAGGEVCWATDLNAGGAALLIELLAAHAQQMLYIPGRIVHHAAATYRGDGKTDAKDARIIADQARMRTDLQPVRGADQISVDLRLLTARRTDLICDRVRAINRLRATLLEYFPALERAFDYSKKAPLILLGGYQTPEGIRRTGLTRLTGWLRKRGCRNSAKMAEKALMAANSQHTVLPTQTTGSALVVRLAEQISTLDEEIAATDAQITELFRQHHSADILLTMPGFGPVLAATFLANIGGNLDAFDSVDRLASVAGLAPVPRDSGRISGNLHRPRRFNRRLLRTCYLAALSSLKNSSASRTYYDRKRGEGKSHKQALIALARRRINVLWAMLRDHTTYQEPIPRVRAQAA

SEQ ID NO: 485104 - protein, 347 aa, unidentified
MRFYTKQHRYYCGIDLHARSMYVCILDPQGEILLHRNMACAPELFLKAVAPYREDMAVAVECIFTWYWLADLCAQENIVFVLGHALYMKAIHGGKAKNDKIDAHKIAALLRGGMLPMAYVYPALMRSTRDLLRRRMHLMHKRSELLTHIQNTNSQYCLPQFGKKIAYKKNRQGVAEHFADSSVRKSIEMALSLIDHYDKLLTEVELYITQNAKIHDVNAFNRLRSVHGIGKILALVILYEIHEIDRFPTVQDFVSYARLVKCAKESAGKRHGSSGTKIGNVHLKWAFSEASVLFLRANPAGQRYADKLTSKHGKAKALSILAHKLGRAVYYMLKRDKAFDMNKFLNS

SEQ ID NO: 485105 - protein, 346 aa, unidentified
MKHYAGLDASLEEISICVVDGTGAVQARKTVACDPAAVTRFYAQKRIAPVLAVHESGQLSIWLQRSLSDLGLAVTCVEARVAHKVLSARLNKSDAADAEGLAQLARTGWITPVHVRSLDADRLRTLIGARDRPLRLRNDLERHVRGVLKTFGIRMTGVHQGKLRQSFRDQLADAASREPVFGLIAEGVMTVHATLCPATATIDRDLRDLAKESELARRLMTVPGVGAIVALNVIAVVDRADRFGRSASIGAFPGLTPRRYQSGETDYQGRISKCGDAAMRTLLFEAATSLMCRVKRFSPLKSWALRLAARKGAKRARVAAARKIAVLMLTLWKTGADFRWIAAAAA

SEQ ID NO: 485106 - protein, 397 aa, unidentified
MYIVGIDIAKRKHEAAVIDGEGTVIIKPFSFTNNCSGYNRLLAMLTKAKLPLDEVSFAMEATGHYWLALFTRLQKEGFRVQVINPVQTNSIRSFYIRQAKTDPRDALLIAEVIRFGHFSESTLHPENIYELRELCRGRHAIVSMQADVKRKVVALLDQVFPEYETAFTNMFGDTSMAILQTCPTPKELSEMRLEELCHLIEVSSHKRFRMAKARELQELARNSFGFAMAGDVFSTMIRLYAKHLDFLKQQVREMDRKIAEIMDTLDTPITTITGIGPTLGAYILSEIGDISRFSSAAKLAAYAGIDPTMRQSGEYNGVRNRMSKRGSPYLRHAIWLAASSAVLHDPALKLYFQKKRDEGKPYMASVGHACRKMVSIIYAVMRDNKAYTPCIPNEISA

SEQ ID NO: 485107 - protein, 313 aa, unidentified
MAQSVITAGIDVSKPYLDVALYPKRETIRVGRDASGLAELAAWLTQHDVHRVGLEATGGYERMVMDRLSAAGFEVIRLNPLFVRRFAEAKGRMAKNDQADAHTIAQFTAVMLDNPKPGRRTDLDALAEHLALRRQLSDWATDCGNQLEHLTDRALRKQLEALRANFERRKLAIEVKLARMIAERDDWATLEQRLRSVPGVGPVLAQTLIALLPELGQLTRRAIAGLVGVAPYDNDSASHSGERHIKGGRSAVRDVLYMAALVAKQHNPMVAAFAKRLAGKPPKVILVACMRKLLTILNAMVRDGVGWKATKPA

SEQ ID NO: 485108 - protein, 421 aa, unidentified
MEPVVDEVVLVERVAGIDIGKAEVVVCVRVPDPGGRASRAQEVRTFSTLTSGLQQCADWLHDWAVTRVVMESTGDYWKAPFWLLEAAGFQVWLVNARDVKHLPGRAKTDKIDAVWLCKLAERGMLRPSFVPPLQIRQLRQLTRYRANLVHDRTREKNRVEKVLDQSGVKLSVVISDLFGVSGRDMLAALIRGQRDPHVLADLARGRMRAKNDALVQALHGLFFTEHDAFVLSRMLARVDAITADITAVEERIDELIAPFGEAVTRLCTIPGVGTSTAIAILAETGADMSRFPTAGHLASWAKVSPQANESAGKTRGSRSTGKGNSYLAGALGLAVLGCARTETFLGARYRRLVKRRGKSRAIVAVSRSILTAVWHILSQPGTTYLDLGPDHYERTRNHDRALRNAIHRLNALGYRVTLQAA

SEQ ID NO: 485109 - protein, 332 aa, unidentified
MKKKQIFIGIDVSKAKLDVFIYGIKTYFVVENSPQGFVQLLETCIKSASCKKRDLFFCFENTGKYSRMLSVFLASQGILFAMESALKIKKSFGITRGKNDKVDSERIALYAYEKRESLTPTVLPGGEIDQIKSLLSLRNKLIRHRTAYKNGTTDLNDCYQDGETNMLKEVQQRLIAALNEEIKKVEKQIRTIIKEDENLSKNFQLIMSVKGIGKIVAFYLIAFTANFTQITNARAFACYAGIAPFDHSSGTWKGTTRVNHLANKQIKSILNMAALSAVNSRGEYQLYYQKRINELGKNKMSTLNIVCNKIVHRAFAVVNRGTPYVDFLKFAA

SEQ ID NO: 485110 - protein, 368 aa, unidentified
MDKAITFFVGLDVHKQSIAIGVAAAGDEPPRFVGTVGPALAELLTALGRIGPAASLRVVYEAGPTGFHLARELAGRSYDCQVIAPAKIPRRPGERIKTDRRDCQKLARLARAGELVAVVVPDARDEAIRDLSRAREDAVAARLKARQQLKAMLLRHGHRYAGKTSWTAAHERYLAAVSFPHPAQDLAFAEYRLAVGTADAQVTRLTDALRAQVETWRMRPVVAALSTLRGIDFVAATTLLAELGDLTRFAHPRELMGFLGLVPAQYSTGETRRHGAITRTGNGHARRVLVEAALNHRFPARMSRLLQQRQTGQPEAVRAIAWKAQIRLCHRYRRLVDRGVPKNKVGVAIARELAGFVWDIARHVAPTR

SEQ ID NO: 485111 - protein, 367 aa, unidentified
MKKISTVATKQSKNFREQKLTIGLDLGDRSSWYCVLDEGGEVLLEQKLGTTPKAMKEVFGGMARSRMALETGTHSPWVSRVLSELGHEVIVAHARNVRLIGESRRKDDRMDGRTLARLARIDPQLLAPVQHRSAQAQADLMVIRARAGLVRARTSLINTARGLTKSYGERLRGCSPRNMNAEKARQLSPDLQAALEPLLAAIESLSERIYEYNQQIEKIAKESYPQAARLKQVKGVGTLIALTYLLTLEDAQRFRKSRDAGCYVGLQPARRNSGQSEPQLHISKEGDPYLRTLLVQGAHHILGPFGADSDLRRWGLKLAERGGKNGKKRAVIATARKLAVLLHRLWVSGEAYEPLRNSRREMLPAAA

SEQ ID NO: 485112 - protein, 338 aa, unidentified
MKITTIGLDIAKSVFHLFAVNKMGRFVKKKQLRRKQVLATMAKIEPCLIVMEACGGAHYWAREFIALGHQVKLIAPQYVKPYVKGNKNDYNDAEAIAEAAQRPSMRFVPIKSVERQDVQNVHCQRERIKKERTALVNQVRGLLAEYGVVINKGIGAVRRDLPEILEDADNGLTALARACFAELLEELRVLDERFAQCEQRIKLMNQDNEICQRLDEILGIGPVIASATYAAAGDGKDFVNGRHFSAWLGLVPGQHSSGGKTVLLGISKRGNVYLRTLFIHGARAVLRHSANKTDRFSRWAQAILVRRGHNKACVAVANKMARMAWVIMAKGETYRVAT

SEQ ID NO: 485113 - protein, 354 aa, unidentified
MSNTSIATIATMGIDIGKNSFHVVGLDRRDAIVLRQKWSRGQIEARLANMPPCLIGMEACVGAHHLSRKLQAHGHDARLMPAKYVRAYSKWQKNDFRDAEAIAEAVQRPTMKFVATKTADQFDLQALHRVRERLVRQRTGIINQIRAFLLERGVAVRQGPRFLRSELPGILATRSDVLSPHMMRIIEDLAGDWRRLDARIEGLSADITSLVEQDPACERLMTVPGIGPIISSAMVAAIGNGEVFSNGRDFAAWLGLVPRQLSTGDRTILGKISKRCNRYLRVLFVQAAWVVLIWPQSWERHGLKSWIEAAKKRLHHNVLAIALANKLARIAWAVLNKGRNFECVRTNAMAPQPA

SEQ ID NO: 485114 - protein, 344 aa, unidentified
MYHYAGIDVSLESSTICVVDGTGKILRETKVASEPEALIAWFRSQGLGLERIGLEAGPLSQWLYAALREAGFAVELLETRHVRDAFKAMPVKSDRNDARGIAQLMRLGWFRPVHCKSMEAQEMRAVLTARKLLQSKLRDVENSLRGVLRGFGLKVGKTTECTFAERIRELVAGHPGLELVAKALLEAHAVLRREFNGLDKCTQKLARAHPSAKLLMTTPAVGPIVALTYASAIDDPKRFSSSKATGAHFGLTPKKYQSGQTDYTGRISKIGDASVREALYQAAHVMLTKPVKNCSALKSWAMRIAKRAGMRKAKVALARKLAVILHRMLADAKPFNPVAKAAAT

SEQ ID NO: 485115 - protein, 342 aa, unidentified
MASIASTSRVVTGGVDTHKDLHVAAVIDATDVVLGTAVFATTRAGYRDLVAWMRTYGDIQQIGVEGTGSYGAGLLRHLATAGIRTLEVGRPDRADRRRRGKDDTIDAENAAHAALAGRRVTTPKTRDGMVEALRALRTARTSAVKSRRLALQVLRAQIVSAPQALRESLRNLTKMRLIRTVAAWQPDPALARRCLELDDEIADLDDLITPLVQTLAPSLLDRAGFGVQNTAQLLVTCGDNPERIATEARFAKLCGVAPLPASSGEHTRHRLNRGGDRQANSALHLAVVTRIRTDDRTQDYIKRRTAEGKTKPEIIRCLKRYAAREAYHLIRTDRLQLTTQNT

SEQ ID NO: 485116 - protein, 354 aa, unidentified
MGNSTTIAVDLAKSVFEVAVSEVPGRVSERKRLNRAGLVPFFSNRPASVVVMEACGSAHHWGRELEKLGHEVRLLPPARTTKYRIGNKTDRADADAILEANRNEKIHPVPVKTIPQQTLSTVHYLRQAWMKTRTARLNALRGVMRELGVAIPVGAKVVLAKASEALAQGRVPEALQPLLLASMAEIRQLEENVKEGDLLLARLARSIPVARALQEIPGIGPLGSTALIAAVGDPNRFRSGRKMSAFLGLVPREFSSGDKRRLGSITKRGNTYVRMLVIHGGRAVLVAAHRRKNPDRLHRWALEVERRQGRNRAAVALANKIIRMAWAVWARGTRYDGALGENSVQTTARTTGAF

SEQ ID NO: 485117 - protein, 369 aa, unidentified
MSVIHVPSDVVVLAMDVHKKSISTAVLEPGVTSVAMDRIGTDDESVRRLVARFADPSRVWACYEAGPTGYELARWLRMVGMRCEVIAPSLIPTAPGDRVKTDKRDAQRLARLFRAGQLTAVRVPTPVEEAVRDLCRAREDMVIDRTRARHRLDKFLLRHGRIWRGGSNWTVKHESWIRAQRFDEPAMTDTFNHYLAVLSARDAAVAAIEADLWPWTEQPPFSELVSRFAAYRGITALGGLVLTSEVCDWRRFPTAGMFMGFTGLVPTEHSSGERQHRGGITHAGNTHLRTQLVESAWSYRSAASIGAILAKRQDGVHPDTLARSWKAQQRLSSRFRRLDARKNNRKVVVTAIARELAGFIWAEAVADNT

SEQ ID NO: 485118 - protein, 363 aa, unidentified
MEEAKRRYVGIDLGKREFTMAIIGLNGKMKILEGKTSDKGRQSLYRLLEKTDKVALEAGNLAFIMASEIMERVGSEVRVLNAAKLPFIWDAPTKTDKEDAMKLAHLVEERRDEKLPIVPLPSKKELERRKMLASYGREMKNRTRHINTLHAIFVHQGHTTIVRKNLATAAKRKEAILILAGQEREEAEWLLKYLELHELRIKELKGKIQEEAKSDEDMKVLQTIPGVGPVVAYAFVAHVGNGSRFSTGAQVSNFIGFVPRLDYSGTIQRNGCITKQGNGYLRGLLVQASWSMVRCSTGSTLKERFVCLTMYGGKSKKMTIVSIARRLTELMYAILRDKKSFETRLWAGRREYLTKMKELIKSA

SEQ ID NO: 485119 - protein, 414 aa, unidentified
MDVVHPRCAGLDVSKRDAKVCVRVQGVGRARATSTVTTWGAVTSQVLALRDHLIDQGVTLVVMEATGDYWKPFYFVLEDGPFEVMLVNARHVKNVPGRKTDVNDAQWLAQLGAHGLVRASFVPPEPIRQLRDLTRTRTTIVRERAREIQRLEKLLEDAGIKLSSVASNITGVSGRAMLEAMVQGERDPAVLAEMAKRKLRAKIPELTEALAGRFGDHHAFLVRVHLNLIDQHTVAIEELTARIEVVIAPFGDARELMCTIPGISTLVADVIIAETGADMARFPTAGHLASWAGTCPGKNESAGRVKSTKTRPGNPYLKGALGIAAMSAARSKDTYYSAKYRRIASRRGPIKAIVAIEHAMLVAIWHMLNDGSLYTDPSGDFFTRRNPDRAKSRAVEQLRQMGYTVTLEPICGVA

SEQ ID NO: 485120 - protein, 392 aa, unidentified
MLFVGIDIAKRNHEASVIAQDGRVVRKAMRFANSQAGYNKFMDMVRSLKEPVVFGMEATGHYWLTLYTHLRNDGFTVHVINPIQSDALRGMYIRKTKTDSVDSVIIADVIRFGRYCETSVEPGDLQAMRELCRQRFYIIDMASDLKRKVIALLDQVFPEYEKLFSDTFGASSMEILSQYTTPEEMLSVSSQQLAEILEKASRGRLGAEKAVEIQDAAKNSFGIVMASSSFSLIIRQYIEQIRSLEASVDVFDAEIARLLSGFDTQLTTITGVGPTLAAVILSEIGGDIRRFSSPAKLAAYAGVDPTVKQSGDFSGSRMKMSKRGSPYLRRAIWLASTVAAFKDPAIHALYERKRAEGKDHMTVIGHVCRKMISIIFAVLRDNTPYVPAAISD

SEQ ID NO: 485121 - protein, 336 aa, unidentified
MIKYIGLDAHSSTCTFNVTDERGREVDNTTIESNGRLLVKYLRGIEGVKKLTFEECELSNWLYEILRPEVDELIVCNPVANKDYKKVKTDKMDARKLSKLLRGGFLISVYHDGSKRERFRSLMSGYQDLIEEGVRLKNRYKSLFRKSGKKVKGEALYSDESFLEGLERPDFKFIGTQIYQLLEKTEGSRQEYVKEIVRCSKGFKEIKYLKSIPGIGSIQAAKIVSQVIDPERFSSKYKYYSYCGLVRHKRISDGRGYGSEKIWGNRILKCVYKMAGHSVLKGKSGLRNYYDSLRLKGISHDNAYNAVCRKIAAISLSVWRKSEKYDDRLITGNLIK

SEQ ID NO: 485122 - protein, 428 aa, unidentified
METPARVPEVVAWIGLDWADQRHEICLAAVGSAGTESFSVEQKPEALHAWVGQLRARFREGKIAVALEQSRGAVIYALMNYDFLLLYPIPPKTLARYREAFATSGAKSDPTDADLLLELVRTHADRLRAWQPDDGLTRQLRLLVEHRRKTVADRTRLTNRLTALLKTYFPQALEWVGDLRQPAAGEFLRAWPTLGAVQEARRTELGEFYDCHRRLSAEQREDLFRQIDQAQPLTRDPALVEASALMAQGLAEQLSTVIAVIARLDSELERLFAQHPDHNLFDSLPGAGEALAPRLATAFGSDRDRYDSADEVQKFSGVAPVTEKSGKTKWVHWRMACPKFVRQTFHEFAAASCKKSLWARAYYEQQRRRGADHPAAVRSLAYKWIRILYRCWKDRAPYDEQVYLKSLQRHRSPLWLAVMSQSTQEAHG

SEQ ID NO: 485123 - protein, 462 aa, unidentified
MRRPESYGLLGSRTAQSEVRPQSLAIRAPRVLVRVSDQGQQCRKGRYSLNQITCGIDWAEGHHDVALLDHEGQLLARRRIVESVEGFAELITLLAEVGDSTEDPIPVAIETPRGLLVAALRATGRPVYAINPMAVARYRERHSQSRKKSDHADAVVLANILRTDAPMHRRLPADTDLVRQIAVLARAHQDATWRRSRASNELRSLLREYFPGFLHAFAARTGKLTSPEARAVLGVAPTPAAAARLSKTQLVAALRRAGKQRGITTLAAQLQVALRRPQLRQPQLVEDAMGAQALALLATLNAECDSVERLGEATIAAFTQHPDHEIITSFVGLGDITGARMLAEIGDDRARFTDARALKAFAGAAPVTKASGRSISVTHRRVKNNRLAAVGFVWAFVAAGRDGPGRDHYLARRGHGDGHPAALRHLFNRMLGQLFHCLQTRQLYDPARAFPPRIADPQPVAA

SEQ ID NO: 485124 - protein, 343 aa, unidentified
MDHYAGIDVSLESSSVCVVDASGRIVREAKVASEPEVLIAWFGGLGISLARIGLEAGPLSQWLYAGMREAGLAVELLETRHVRDAFKAMPVKTDRKDARGIAQLMRLGWFRPVHCKSLPAQELRAVLTARKQVQGKRHDLEMSLRGILRGFGLKVGPTTPRSFEGRVRELVNGHATLLVVADALLAARAVLSEQLGKLQKRLVSLAREDTRARLLMSTPGVGVIVALTYVAAIDDPGRFRSSKAVGAHFGLTPKKYQSGETDVTGRISKIGDASVRTALYEAASVILTRPVKGSSLKSWAMRLAIRAGMRKAKVALARRLAVVLHRMLADGTEFVAGKAAAVA

SEQ ID NO: 485125 - protein, 415 aa, unidentified
MSEARWFVGVDWATEEHAVCLVDDVGKVLGERMFSHSGTGLADMCTWLLEKTAGEPSGLNVAIEVPHGAVVETLLERGMSVFAINPKQLDRFRDRFTVAGAKDDRRDAHVLADSLRTDMQCFRRVRIDDPKVIELREWSRIVEDIGQERVRLSNRLRQQLLRYYPQLLELAQDVESEWFLALWELIPTPADAATVREKKIAKVLGEHRIRRFNAEHVLTVLRQKPLTVAPGTTEAAVAHIASVVARVRLLNSQHKDGLRRLDALTNEIAARQAEPGQACEQRDVGVLRSLPGIGRIVLATLLAEASQPLAERNYHALRALSGVAPVTRNSGKRSGKRSVVVMRNACSMRLRHAVYHWARVATVRDPKSRAAYATLRARGHTHGRALRTVGDRLLLVACAMLRDGTEFDPSRRLAV

SEQ ID NO: 485126 - protein, 354 aa, unidentified
MAQVLVEVTGGVDTHKDTHTAAAVDAAGRLLASAQFPATPGGYAALLAWLVGFGRLVLVGVEGTGAYGAGLARFLRGQGVRLVEVDRPDRKTRRWQGKSDPVDAEAAARAALAARATGTPKDRDGRVEALRNLRVARRSAVRQRADVQRQMHTLVLTAPEPLRADLRALPAAALIARCATATADRARADQPATAATLALRTLARRHQRLSEEITDLDAVITPLAEKINPQLNGLNGVGPDVAGQLLVTAGDNPDRLRSEAAFAMLCGAAPLPASSGRTNRHRLNRGGDRQANAALYRIVICRLRWDPRTRAYVQRRTAEGMSKKEIIRCLKRYIAREVYQTLIPPTSKDLEPAS

SEQ ID NO: 485127 - protein, 350 aa, unidentified
MKEGNTVGIDMGDKNHNVCVLDDNGEVVSRETIGNTGKAIRKYFGGMEPCRVAMEAGTHSGWVSRIVEELGYEVLVGNPRKLRMIWNSDEKCDDRDAEMLARIARLDPHLLYPIRHRGQKAQADLAVIKARDMLVQVRSSLIAHARGTVKSIGQRISKCSAEAFGCRLLEEMPAELLPALEPVMKSIEDLTIRIRHYDKLVESLGAERYPETKGLRAISGVGPVTSLAFVLTIEDSSRFEKSRAVGPFLGLTPKRDQSGQTDKQLHITKAGDVYLRRLLVGSAQFILGAFGPDCDLRRFGLKLAARGGKNAKRRAVVAVARKLAVLMHRLWKSGAEYDALYQENRKKKAA

SEQ ID NO: 485128 - protein, 351 aa, unidentified
MNEFSGDYVGMDVHKASIAVAVARAGRGEPEYLGEIPNTEAAVRKLLKRLSPDGEVLSFCYEAGPCGYGLYRQLTGLGHDCAVVAPSLIPRKAGERLKTDRRDALSLGRLHRSGELTAVWVPDEEQEAIRDLTRAREDAKSLELKARQQLGAFLLRHGRVYGGKSRWTQAHLRWLETVKFDTPVQQIVLQDYIDTVKAAQTRVAELEAQMRAALETWSLRPVVEALMALRGLKLIVAMTTLAELGDLTRFDSPRELMAYLGLVPSEHSSGGSRRQGGITRTGNGHVRRVLIEAAWAYRFPARKSACIQRRAEKTSAEVQAIAWEAQKRLCGRYRADAGRQAKTAGHHRRGP

SEQ ID NO: 485129 - protein, 314 aa, unidentified
MMDAQFVGIDVSKDRLDVHVLPKGEAFAVARNGEGLAALNDRLVGLGVVSVAVEATGGFETVVAASLAGAGLPVVVVNPAQVRAFAQALGKRAKSDPIDAAVVARFVEATRPEIRPLPDEQTQALADLVARRRQIVQMIAAEHQREKRAMIKRVKRSIQRLVLALEKELAELDKTIDDMVRGSPAWRRNEDLLRTVPGVGPIIARTLLAEMPELGTLDRREIAALAGLAPWTRQSGKWKGKSFIGGGRSSVRTVLFTGAMAAARFNPALKAFHQKLVDAGKPKIVATIAVARKLLTILNAIIRDQKPWSESRCQ

SEQ ID NO: 485130 - protein, 347 aa, unidentified
MNYIGVDCHISSLDFAVINERGIVTQKAKVSTGVKEFMAFVKSIPKPRKIFIEEGELAGWMLETSLKFGEELIITDPKINKWIGKAGQKNDPIDAEKLAQLARGKYIKEIYHPVNNRRRFKDLVFAYHDTVKSRTRIKNKIKANFRRNGIKCSGDTVYSDKYRDKWRERLPKNKMTHLIVEELWGQLDQLRESKEKLKRIIKVQSREYPEIKKFRKVPGIGLIHASTISAIIETPHRFANKKKLWMYAGIGLMERSSGETVYSRKLTREYNRPLKNAIKKAAEAAILAKDNQFRRQYLRLTIEKGIASHRAKLTVARSMLAALYGMWKKGEEYDPEIDNKRAKGNKK

SEQ ID NO: 485131 - protein, 471 aa, unidentified
MVMTREPEEILDEPHEQIMQRVCAIDVAKDSGKVCVRLPAESGSGRRVSKVWDVPARTKAVIELGDHLACQGIQKVTVESTSDYWRIWFYLLEARGLDVQLVNARDVKNVPGRPKTDKLDSVWLAKLTEKGLLRPSFVPPKQIRVLRDYTRLRVDLTAERTRHWQRLEKLLEDALIKISAVASRIDLRSVRDMVEALIAGQRSPRFLAGLARGRMKLKHADLVEALTGQFDEHHAELARMLLDQIDALTAQIDTLTARIDALLAAILDDRNPDPDHPEPGPADPGSATANGPGAIAQPSPGQRSAVPSTADLVDILDEIPGVGPHIAQVIIAEIGLDMSRFPTAGHLVSWAKLCPRTIQSGAKSTAGKTGKGNRYLRAVLGDAAAGAGKTNTFLGERYRRIIKRRGKLKALVAVARSILVIIWQLLSHPGLRYHDLGADFHTRRIDTERRTRNHVRQLEALGYTVTLTAAA

SEQ ID NO: 485132 - protein, 401 aa, unidentified
MEAIVQRSAGLDVHKKIIVVTILLEQSDGSVQEETREYGTTYKACEELASWLLSNDIQLSVMESTGIFWKNIYAALEKAGLRVSVVNARHVKQVPGRKTDVKDSQWLARLARYGLVKSSFIPPKDLRELRIIARYRTKLVGTLAGEKNRLHKTLDDAGVRLGNVVSDIGGVTATEIIAGLVEGKTMDELLACTRGVLKKKKDELQAELEGELSGRHLFLLKQLQEHIAYLRNKLKELDDYIFAAMQPYQKQWEILQTIPGIDAVGSALLIIEIGVDMQQFGSREQFCSWAGMCPGNNESAGKKKSSKTPKGSKQLRYILCEAANAASKTDCQFQHKYKSLMIRRGHKKAIVAVGHKMLRVIFSRLKTGEVYQDPKVSYEELVVKKNAPRWIKMLTKYDYAM

SEQ ID NO: 485133 - protein, 352 aa, unidentified
MMIIGCDFHPRFQQISFLSEETGECGQRRLMHTAEAELYYRSLRGAKVRVGIEATGSYGWFRRLLSELGHELVVGDATQIRASNPRRQKTDKRDAEHILGLLVEHRFPAIWQPPAENEQLRQLLLHRSRLVRLRTRVTNQLDAMAKNEGQLVAGGWSGKRRRAIEALPLLGWYGERRTDLLALLDRLEERIAPLNKAVSQAAANNAEACLLMTHPGVGPVVSLAYALTIGNWQRFARGKQVGSYLGLIPSEDSSSDKRRLGHISKQGNTLLRWLLVEAAGTAQKYDPSWHRQYVRLSMTKHHGVAKVAIAHKLAVRLYWMLRSGQDYQHVRERGSHARQSECPVGRSTRPIE

SEQ ID NO: 485134 - protein, 352 aa, unidentified
MTRITTIGIDLAKKVFQVHGVDAEGKVVVARKLRRKQVLAFFAKLAPCLVGMEACGSAHYWAREIAKLGHTVKLMPPKYVKAYVKRGKTDAGDAAAICEAVTRPSMSFVPVKGPEQQGLSTLHSARTQLIGQRTQLMNGVRGHLSEFGIVAARGLLGLAELAAIVRDKSDRRLPVTARAALMILVRQIEVVSTEITALDSALRKENKASELGPRLETIPSVGPVIASALRARVTDAKLFENGRHLSAWIGLVPENDSTGGKVRQNGLSKKGDRYLRSLLVNGAMAVVRQAQIRPDRNPWVTKLLGRMSAKQAAIAIANKTARIAWAIMVHGGVYEAGHRAPQYRAEARAAAG

SEQ ID NO: 485135 - protein, 438 aa, unidentified
MSALPVIDPKAAAIDVGSEQMHVSIAGGEPKVFGSTTAQLHALREYLLSQGVSSVAMEATGVYWLCPYEVLEKAGLHVVMVNGKYVKNLPGRKTDMKDCQWQATLHAHGLLKGGFVPQEHIRRLQDYQRLRADHIAVAASCEQHMQKALERMNIKFHDVISDLTGVSGLKVIRAILAGERNPVALLALCDCQIQKKKASRVCESLVGTWKQEHLFALRQALAAWEFYRAQIGECDQALEQVLKELTQDQPGPPEVLPSWGRRSGGNAPEIPQLREMLWKLCGGKDPTAIPGISDYTLLQLLAETGTDLATHWKSDKHFTAWLGVAPGARQSGKRRGSQKRSRNRAGRIFCLIARAVGRTADRALGGFYRRLRARRGGLVANLALARKLAQLFWRTMVHGVAYVEQGLQKYQDRVAKTEQTWLQRMAQKYGMTLQPKAA

SEQ ID NO: 485136 - protein, 366 aa, unidentified
MTSIAPQTSDRKIIVGVDTHKYAHVAVALDSLGVRLGEQHISANREGYARLEAWAASLGRVRAFGIEGTGSYGVGLASYLRRTGHRIIEVNRGDRRSRRNNGKTDTLDAEAAARAVLSGTAVAVPKSADGTVEMIRQLKIARDTARKGRTSAIVTLKALLVTAPAELREQLDGLTDKVLVERCASLRPGAITSTTASAKHSLRALAKRHQALGVEIAGHDAVLDDLTSNHAPTLREGFGIGSDTAAEVLVVFGDNPERVRSEAAFAKLCGTSPIPAASGITNRHRLSRSGHREANAALYRAVIVRMRHHQPTIDYVARRTAEGLSKRDIIRCLKRFLAREIYQRVMVDHRVRLSGPQSAPPRSLDI

SEQ ID NO: 485137 - protein, 422 aa, unidentified
MLTTTHDNEEIIERVAALDIGKAELMCCVRVPDGDHAGRRLQEVQACPAMTRSVLGLADHLARLGVTRVVMEATADYWKPVFYLLEAAGLETWLVNAKDVKHLPGRPKTDKLDAVWLCKVAERQMLRPSFVPPPPIRQLRDLTRYRADLVAARTAEKQRVEKLLEDACIKLSAVVADIFGVSGRDMPAALVAGERDPKVLAQLARRSMRAKIAVLEEAFTGHFTTHHAFLLRTMPGRVDAISADIAAVDDRIAAQAAPLAGAVARLDEIPGISLASAHVILAEIGTDMTRFPTAAHLASWARLAPGISESAGKKKGKGATGHGNAYLASVLGNAAAGAAKTDTFLGEKYRRIARRRGSKRAIVALGRSILVIAWHLLSDPEGRFYDLGPGYHAARIDPERRKRTHIRELEALGYTVTLKPAA

SEQ ID NO: 485138 - protein, 345 aa, unidentified
MAYFVGLDVSVQETAVCVVDEVGKVICERKVPTEPDDIAVLLTSIGGDYVRVGIEAGPLSQWLVNGLTEMDLPVICVETRHMKALLKAQQINKSDRNDACGIAQMMRVGLFKPVHVKTPAAQEQRMLLTSRKLIQRKLLDIECDMRGTLRNFGLKVGVVSSRNYEARIRELVESFPRLAAIVEPLLIVRQVMRQQLAVLHKMLIDIVRDDPVCRQFMTVPGVGPVVALTYRASVDQPHRFMHSRNVGAHAGLTPKRFQSGEIDYDGGISKCGDAMLRSMLYEAAQSMLTLSKKWSWLKAWAMRVAQRRGMRRATVALARRIAVILHRMWIDGTDFRFNNSTAEAV

SEQ ID NO: 485139 - protein, 356 aa, unidentified
MEYGAIDLHKRESQVRIITGDGEVLDRRILTTRDRLTVIFWGRPQTRILLEASTESEWVAQHLESLGHEVIVADPNYGAMYARRSRRIKTDRRDAAALADACRHGNYRPAHRRSARQRLVQSMLNVRRELTDSRTRAILLARAITRAAGFRIRSGRTETFLDRLGALELPAAMTATLWPLRSVIEVLDDELAAADEQFGTLAEEDPVAKRLMTLPSIGPITATAFMAALDDVARFDGAAQVTSYLGLVPREYSSGEHQHRGRIVRSAHPHVQSLLVQAAWRMGRSSDAKTAGLRGWADAITRRRGKKVAMVALARRLARILFAMWRDHTEYQAPRVRIIRRTAAAIVEGPAAAAGV

SEQ ID NO: 485140 - protein, 373 aa, unidentified
MTKNLRYLGLDVHAETIAVALAEPGGEVRSLGIIPNEPSAVAKLVRKLGGREQLRACYEAGPCGYVLYWQLTKLGVACDVVAPTLVPTKPGDRVKTDRRDAEKLARCHRAGDLTAVWVPDAAHEALRDLVRAREAAKADQLRARHRVSKFLLRHGRRTPGDVKPWTQRHRRWLDTVTFAPLAQQTTLADYVHEVDHAGARLERLESALDLAIAAAPPAMQAIMRALQCLRGVRQLTAATIVSEIGPLSRFAHPRQLMGYSGTVPSEYSSGSSVHRGAITKTGNAHLRRVLVEAAWAYRFPPKCGDALRTRQRGEPPGITAIAWKAQQRLHTRYRRLLGRGKPVPHVITAVARELVGFIWAIGIAAEREVAIAA

SEQ ID NO: 485141 - protein, 323 aa, unidentified
MNKYKETFGVDISKDVFDVQGSASSHKQFKNDAKGFVSFLKTLPQESLVVMEATGYYHYRLAQFLYKNKVLVSVVNPLSVKRFIQMKLAKVKTDKSDAKAICDYALSNEVPLYNALTDVQSECLQLFRLLDSYLKKRTATKNKLHGEETLGIPSRFVYRSLKKNLKHLNKEIEGIDQRLLALVKEEQQQQLSLLTTVPGIGLKTALFLIVVTDGFSKFETASQLCSYVGITPTIRESGSSVRGRSRISKVGNKKLRNLLFLCAFNACKHNKACQELYERIVNKGKSKKLALIAVANKLLKQSFAIAKSGRPYDPSYISVLKLQ

SEQ ID NO: 485142 - protein, 343 aa, unidentified
MQSISTIGLDIAKSVFQVHGVDAAGQVVDRRQLKRRHVLPFFAKLPPCLIGIEACASSHYWARELQAVGHTVRLIPPAYVKPYVKRQKNDAADAEAICEAVTRPNMRFVPIKTVEQQGCLVLHRTRHLLVRQQTATINSIRAHLAEFGIVAPVGRRGVEHLLGVIADADDTRVPEVARACIATLGVQLRQLKAQILELDRRILAWHRSSEASRRLNHIPGVGPLLATALAASIADPKAFQSGRDFSAWIGLVPKQNSSGGKDKLGNISKRGDRYLRSLFTAGALAVIRYAKIHGTKHRPWLVALLARRPTKVAAIALANKLARIAWALMTKGSRYRQPAELMV

SEQ ID NO: 485143 - protein, 339 aa, unidentified
MNSMAVGVDIAKTVFQVHYIDQATGEIVNKQIKRAKFLEHFANRAPCLIGMEACGGAHHWARQLTKMGHQVRLMPAEFVKAFNIRNKNDAADARAIWLAVQQPSKAVAMKTEMQQAMLALHRMREQLVKFRTMQINALRGLLTEYGEVMGKGRTALDKAIPEVLARVAERLPAALVETLRERWSGLTKVDEQIAGIERRMRDWVKEDNAVKAISEIPGVGLLTATATVAMTGDAKTFRSGREFAAWAGLVPKQTGSGGKVNLHGISKRGDTYLRTLLIHGARSVVTRAKDPGPWVEQMTKRRPLNVVVVALANKMARMIWALLAHDRPYQKDYISVKPA

SEQ ID NO: 485144 - protein, 387 aa, unidentified
MGRVVIGMDPHKRSATIEIIDDRETVLAGGRFGTDRDGYRAMLAAGRRHPERIWAVEGCYGIGRHIAQRLVADGETVVDVPPKLSARVRVFATGQGRKTDPVDAHSVAVAALRAKGLRQVAVDDETVALRLLVDRRDELGRSRTDLVNRIHKLLLELLPGGAKTFLRADQARALLATIRPRDLVGRTRRRLASELIAELVGIDKKIKAAKEELTDLVKATGSSLQDLNGIGPSGAARLIGDIGDIRRFASRGHFASWNGTAPLDASSGDQQRHRLSRAGNRRINRVLHIMAIVQLRHDTPGRAYYRRRLAEGKTAMEAIRALKRRLSDIVYRHMLRDIHRLQTGPGGQAGATLQSSAADPNPEVNTSERSLPGPADYHPRTPNTDAA

SEQ ID NO: 485145 - protein, 416 aa, unidentified
MSLALPDALFFTGIDWAAETHAVCVMDAAGTIVAEFTIDHSADGIALLIGRLARYGTPGGMPVAIERPNGRLVDLLLEAGHPVVPVSPNAIKTWREGEVLSGAKSDAGDAAVIAEYLRLRQHRLRTAAPYSDETLALRTVVRSRGDLVEMRVAATNQLSALLEAHWPGAKAIFADVESPISLEFLTRYPTPAAAAHLGEKRMAAFLVKHGYSGRRTAAELLARLRAAPAGTGRESLTEALRDAVLAAVGVLAALNASVKSLDRSVAAHLGEHPDGAIFTSLPRSGQVNAAQVLAEWGDCRQAYDGPDSVAALAGCTPVTSQSGKHRSVQFRWACNKRFRVAMTTFADNSRHASPWAAKIYSDARASGKDHPHAVRILARAWIRVIWPCWLEGIPYDPARHGAAAALAKQTAQPIAA

SEQ ID NO: 485146 - protein, 522 aa, unidentified
MSKMYISMPFAQTVYQNGVFNPFLNLVGRLKLRGLCSVDDYTGEFYKTSRYRKLVELSGFLQKFFIHYFNQINMKDQKKMFIPVVHPNAAGIDAGSRSHFVAVGQDKDDVREFGVYDKDLRDCALWLKSCGIETVAMESTGSYWQNLYDVLTESGFEVLLVNGAHTKHMKGRKTDVQDCQWIQYLHSVGLLTGSFLPDLDTEELRTLYRHRDFLRKQAAKYITKMQKCLRLMNFRLDIVLNDITGVSGQAIIKAIISGENDPVILAGLANHRVKKSREEIAKSLSYNGRNDYMYELADCFGIYHSYMDKIAACDREIAALMHSQIVKLGKPQTDPPPLDKPKQRSKNSPAIPLEKLSWQRNNEVNLMSIKGVSHSTVLAIDSEVGLSIGKFPTAKQWTSWLRLSPNNRKSGGKVLSSHVPKGSNRVATALRMAAESVGKQKDAPLYPFFQRILQRKGRAAAIIATARKLAVIIWNMLYKKEAYKPYDTAKIESQIRDRQIKKINKLLHVFDIKVSEINFALG

SEQ ID NO: 485147 - protein, 354 aa, unidentified
MEDYDGRQVVGMDLHRRRSVLVRMTEDGRRLGAVRITNSPAELRREIARAGKGPRVVLEATYGWYWAADVLAAAGAEAHLAHPLGVKAFTYRRVKNDVRDSADLADLLRMGRLPEAWIAPHQVRELRELTRYRAKLVRLRTSCKDQVHGVLAKLGIPVTCSDIFGTAGSAWLDGLRLPQPYAGKVTSLRHLAGEFTAEIDMLGEVIADLLAGHRGYQVIQQLPGIGPVLAAVIAAEIGDITRFKNPAQLCSWAGLTPRHRESDTKVARGHVSKQGSRLLRWALIEAIQRIPKDSVIGAVKDGIITRRGKEARNIAKVAAARRLLTLVFYGMRDHQIRCLARPAGPAAAAPARAA

SEQ ID NO: 485148 - protein, 388 aa, unidentified
MIYVGIDIAKLNHFASAISSDGEELIKPFKFTNDNDGFQLLLSKLDPLDKDSLIIGLESTAHYGDNLVRYLVAKNYKVCVLNPIKTSTMRKNNIRKTKTDKVDTYIICKTLMMQESLRFVTFYDLDLMDLKALGRFRQKTIKQRTRLKIQLTSYVDEIFPELQYFFKSGLHQKSVYALLKEAPTPEAIVSMHMTHLAHLLKVNSHGCFDKEMAQQLRVLAQKSVGANDSSLSIQVTHTIQQIELLDSQLERVEAEMTEIIKFNDSVIMTIPGIGYINGRMILGEIGDIHRFSSPNKLLAYAGLDPSVYQSGNFQAKKTRMSKRGSKVLRYALVNAAHNVVKNNATFKAYYEAKMAEGRTHYNALGHCAGKLARIIWKMMTDNVEFNLD

SEQ ID NO: 485149 - protein, 358 aa, unidentified
METRKKVGLDIAKRSLKLVRYNDSEQNHEWLDTRTTETGIRKMLNWLKENDTVVMEAGNMSFRLAKRIKKSKGCEVIVLNPGDIQLIYKSLKKTDAEDALKLARIAYRNPREELPEVNIPSDEEEVLRALSTEQEYWTKLATMNKNRLHGLFHQSGLTTITKSQLKSSRNRKRILELLKNSTSYEPAERLVRSLENFDIELRSVNEQIKNKLRNNDQTRLLMSMPGIGPITVLAILGYLGNFSRFSHAKQVSHYSGFVPRIDQSGDSSYYGPIIKRGCKPIKRALVQGAWALVKSPHGGELRDFYERLCNRGKNKRVAIIATSRKMLTTLYGMMKTGNIFSSMPEEMLNKKLKYYGLI

SEQ ID NO: 485150 - protein, 440 aa, unidentified
MKEQSTEPEWAAFAAIDWADQKHFWRLAPAGSGAYEQGEMENTPEAVEVWAMQLQQRFGGRPIAVCLEQSRGSLVCLLTKYPHLVLFPVHPKTAAQYRETFCPSGAKSDPSDTASLLDLLQRHREKLRQLRPDTAETRLLQMLVETRRLIVNEKTRQKNRLTACLKIFFPQVLKWFDAVDSPLVGALLSRWGSLRELQGAHPGTLRKFFHQHNCRDQERIQERITGIQQAVPATEDAAIVEGCSRRARTLVAVIETLRNQIVEYERRIAELVESHPEGSLFGSLPGAGPVLTPRLIVAFGTQRDRFASAEEVQRLSGIAPVTEKSGKSTYVHMRRACPKFLRQTFHEFAEHSMARSGWAKAYYDAQRAKGNEHQAAVRSLGYKWIRIIFRCWKDGRPYDEETYLRSLERRHSPLFGALATTTGIGWKTVSGFQKFSGESS

SEQ ID NO: 485151 - protein, 344 aa, unidentified
MEHFAGIDVSLKDSSVCVVDAAGRIVREAKVASEPEALVAWFGGLGFAVTRIGLEAGPLSQWLHAGLSGAGFEAVLLETRHVKAALSAMVVKTDRKDARGIAQLLRMGWFRPVHRKSADAQEVRALLVGRKLLQSKLRDVELSIRGILRGFGLKVGEISKGRFAARIRELVAGHEMLETVTGAMLAAREALLAEFMRLHRRMLVTVRADAVCRRLMTVPGVGALVAVTFKTAVDDPGRFSSSKAVGAHFGLTPKKYQSGETDVTGGVSKVGDAMVRTALYEAANVLLSRTTRFCALKAWALAVARRRGAKRAKVALARKLTTVLHRMWVDGSTFRWSKKAPAAA

SEQ ID NO: 485152 - protein, 342 aa, unidentified
MEKVATIGLDIAKSVFQVHGVGADGEVLIRRRLTRARMLPCFAKLPRCVVGIEACNNSHYWARELTALGHDVKLMPAQYVKPYVKRGKNDAADAEAICEAVTRPTMRFVAVKSPEQQSLMMLHRVRLMLNRQRTQISNAIRAHISEFGVVAPVGRLGVDRLLEVVADASDDRVPEDARLCLQMLAAQLDVVKQQILENDRRVLASARRTELGRRLMDIPGVGPLLASAFVASVADPTMFRTGRDLAAWIGLVPKQNSSGGKDRLSSITRAGNRYLRQMLVVGAMAVIRYAQRHGTKRPWLVRLLARRPAKVAAVALANKNARMVWALMTSGERYREPMPMAA

SEQ ID NO: 485153 - protein, 327 aa, unidentified
MFILGCDVSKNKLDCTLFLDPAGDKRKSKTVPNTTDGVSTLLAWVTKQGIPLDQLHVVMEATSIYHEVAAMALFNAKVKVSVVNPAQVRNFARSIGVRTKNDKVDSAVLARFGVLIQPSAWQPAPEEVRELQALLSRREAVAADLLRERNREEKIRTAATVSQYVIQSVVFSIEFLETELSRIQKEIDEHINRHPNLKDARELLVSIPGVGPQVSNTLLSVILGSSFDSAEQLAAYLGLVPVESQSGSSISGRPHISKNGPSHVRAILYMAAVVAKKYNPHIKTLYERLLAKGKSKMSALVAAMRKLVHLCFGVLNTGKPYCSNYGK

SEQ ID NO: 485154 - protein, 348 aa, unidentified
MKYYIGLDAHSTTSTFAVVDENGQCILRETVKTSEQSLGHVINRINGERHMTFEESTISQWLYLQLKDKVDNLLICNPTYVAKKQGAKTDFRDALHLAQELRTNHLQPVFHDTSHWMEIRTTVSGYLDIVEEIVRFKNRLKAVFRAEAIQTDENSFYKNKVRIKELKNPSAKFVAEKLFDQIEFLESEKDKYKEVFERNRKKYRPIRNLMTIPGISIIRANIIAAIVCQPARFENKHKFWGYCMLVRHIQVSGGKIYGNKRFFGRRELRNVFIGAAENVMRLDGELRDRYDALRAKGVDHKDAKLNLARQIASIALCLLKNNDKYNESYSEYLKERKRTQKEFFEPSL

SEQ ID NO: 485155 - protein, 341 aa, unidentified
MNGNKNVVGIDIAKRVFQLHSIDMETGEIVSLQLKREQFLEHFANGQKCLIGMEACGGAQHWARKLTAMGHHVKLLPGKAVKPFVTGNKNDREDARAIWTAVQQPHVKAVAIKTEEQQAILALHRMRSQLVKFRTAQINGLRGLLTEYGEVMPQGKAGIRKGITEALERLEDRLPAMVIDTLREQWARIGKMDEEIATIEQRLKRWLKQDDACQRIAEIPGVGPLTATAAVAIMGDAKTFKSGREFAAFAGLVPRQVGTGGRVKLLGISKRGDTYLRTLLIHGARSVLTHAKEPGPWVTELRQRRPLNVAVVALANKMARTIWAMLAHERTYQKEFVSQPA

SEQ ID NO: 485156 - protein, 381 aa, unidentified
METLHSHCAGLDVHQKEIVVCIYIGNSEAELTKEIRTFPTLTKHLFEMLQWLEELHITHLAMESTGIYWKPVFNILEDYFDITLANAQRIKNVPGRKTDVADAEWIAKLLRYGLIEKSFVPPSDIRELRDLTRLRKKMIGNMTAEKNRIQKTLECSNIKLGSIISDVFGVSGRKLLTRLVEQGYVNSHEVEENIHGSMMPKASQITESLFGTLNPHQIFLIRQSWNHILFLEESIQQIEEKIDELLSSYQEQVELLLTIPGVKKHAAASIIAEVGVEMRQFPSAQHLASWAGLSPGNHESAGKKKNSRTTKGNPHIQSMLCEVAWAISRTRHTWLSGKYWSLAARRGKKKALIAIAHKVIKIIYHILDQRSGFIEYSKVLS

SEQ ID NO: 485157 - protein, 343 aa, unidentified
MKLSRVGIDLAKNVYQLHGVDCFGETIWTRRLKRHQWLKVLLDKTDPDCVIGMEACGGAHHWARELQARGYTVRLIPPQFVKPYVKSNKNDANDAEAICEAMSRPNMRFVAVKSVKQQDIQATHRVRAECMAHRTAKGNQIRGLVSEYGLVAPQQSAALRAAIPCWLEDAENGLTSRFRALLHGLWEDLLRLDERVAVLDADIALIAKTDPVAKRLQQLRGVGPLIATALIASVGSGEQYARGRQMAAALGLTPRQHSSGGKDRLLGISKRGDGYLRGLLIHGARSTLWHARHKQDRLSRWMNDLSARRHPNIAAVALANKTVRMAWAMMRNESDYDPEFATA

SEQ ID NO: 485158 - protein, 336 aa, unidentified
MTALCASDNTFIGIDVGGASFEAARHRGDCTRYANRPEAIAAFVERLRAGPSIERIVIEPTGGYEKPLVQALRRAGFAVELIHTSRFKAYRELMGVRAKSDTSDARLLAAYAAAPDEVRGRKTSHVVLPDDAGREQLAELAARRDQLKQMIHAESCRLTTVRNEEIRREIALHLEALQASAANIHGAMMRLVRQRHDLDRARSLLRTIKAIGDKSALTMLALLPELGHIDNKAAAALVGVAPFVRKSGTMNAPARIYGGRAPVRNAIYMAAVTAARHNPVLRPFYERLIAAGKPVKVALVAVMRRLVVFANAVLKSGQPWKGNTVDSGFALTRSPE

SEQ ID NO: 485159 - protein, 459 aa, unidentified
MGPSVLPRARELDSLLSQQLLRATTFGYWFITVRRKPVLEETQDEQEIIERVAALDIGKAELVCCVRVPDPKGGSRRVQEVKSYSTMTRSLQVMAERLLDLGVTRVVMEATSDYWKPPFYLLEAHGFEVWLVNARDVKNLPGRPKTDRLDAVWLCKVAERQMLRPSFIPPVPIRRLRDLTRYRIGLVSDQTREKNRVEKLLEDSQIKLSVVASDIFGVSGREMMAALIAGERNPQVLAQMARTAMRTKIPQLEEAFVGNFNEHHSFLLTKMLARIDALDADIADLDTKIEAHLAPFAEAVARLDEIPGIGATAAAVIIAEVGLDMTRFPTPAHLSSWARFAPGVKESAGRKKGTGATGHGDRYLARALGEAAVGASRTNTFLGERYRRIARRRGKKKAIVAVGRSILVIVWYLLQDDTVHFHDLGPGYYDSRINPERKKRNHIRELEALGYKVTLEPAA

SEQ ID NO: 485160 - protein, 480 aa, unidentified
MKARVYAGVDLGGTFHQVQVTTAEGERLGKSFRIGRGRAGLAELRDGVRRVAGDDVEAVYTVEATQNFWLELVHPLQRDGASVYLVSPAKSAALRTFYRRHTKNDAIDAEALSRLPVVDPKLRPASASPPQWDMLRRLVRQSWLLKSQMANRKRRIMGRVLTVYPGYESVFRDRYCGASLLFCRRYLDPAKARRLGRRRLVVLMRKRALGKFDDARAERLWQVIENAPELNLGYDDLQLLLNQDLDLLEAEERSQQALRERIAELYGELDPSTRLTSVPGLGDYLAATITAFIGEPGRFTNADQVVALSGLCARLKSSAGTDAANQPLTQHGDPVLRGCAYLAAEICRHYDPELRAFHRRLTARGKHYKQASCALAAKILRRCFALLREQRDYQIAHQDEMARARSEEGKTVRGSVHEVAERLNDVSGTPSPRAQGRSAPTSEQTLARSGKRPRRMRADPPSSLTMAPASCPIEPERSLS

SEQ ID NO: 485161 - protein, 340 aa, unidentified
MSLYGGIDLHSTNSVVVLLNDRDEVIYQKRLPNDLPTILEQLAPHHAEIQGLVVESTYNWYWLVDGLMDADYRVHLANPAAIQQYSGLKYSDDHSDARWLGHLLRLGVLPEGYIYPKADRAVRDLLRKRAHFVRQHTSNVLSVQNIMVRNTGSRCSVKRLHELTKKELNGLLPEAEQALAVTSSLAVLDCLGQQIKTLEKAVTQCLKHTPSYEQLLTVDGIGTILAQTIALETGNIGRFPSVGNYASYCRCVDSTKISNGKRKGKGNVKNGNPYLAWAYMEAAQFAIRFNPRAQRFYQRKLAQSNNNTILARKSVAHKLSRACYYIMRDLVPFEAMKAFG

SEQ ID NO: 485162 - protein, 383 aa, unidentified
MAGAEPQAWGAGQMQDNIFVGLDVHKATLAIAAAEGKRGGEVRAMGSIAHTPTQVAKLAEKLGKAGHRLCFCYEAGPCGYDLYRQLTALGHDCIVVAPSLIPMKAGDRVKTDRRDAVMLAKLHRAGELTAVWVPDRAHEAMRDLVRARATAVQVLGKARQHLQGFLLRHGRVFAGRRGWTFAYRRWLSAVHFDHPAQQIVLQDYIHAVTDAEARVARLTKQIEELVPQWSMAPVVEAMQAMRGVALIVAVTLVAEVGDFSRFDHPRQLMGYLGLVPSEHSSGATVRRGGITKAGNALARRALIEGAWTYRLPARVSLTLLRRIDHLPKNIRDIAWKAQVRLCARYRRLAATGKPKTVVNTAIAREMLGFLWDIARQVQISSAT

SEQ ID NO: 485163 - protein, 371 aa, unidentified
MKKSSMFIGLDVHKNSIEIAIAEEGRTGEIRHYGKIDGSLVALDKVVRKLVSRGCELHFVYEAGPCGYDVYRHLTAQGFDCVVVAPSKIPRKSGDRIKNDRRDAQMLARLHRAGELSPVFVPLTEDEAMRDLTRSREDAKSAEKKAKQHILAFLLRHGHRFSGRTPWSQAHKRWIAGIKMPHPAQQITLQEYVGALTEGTRRVERLTEQIQQLLPQWRMVSVAKAYQSLRGVSLIVAATTVAEIGDLKRFKSPVELMSYLGLVPSEHSSGETTKRGSITKAGNGHVRRVLVEASWAYRLPARVSRDLRRRQEGLSQAICDISWKAQLRLCARYKRMLAKGKSKQVIVTAIARELCAFMWAIAHEVEIPAMA

SEQ ID NO: 485164 - protein, 417 aa, unidentified
MFKIFRKNCCGLDVHKTWIYACIGITDTNGRTEYKQARFSSFSKGLKELSEWLAKYSCIEVCMESSGKYWIPVFNILEKTCFVTLAHPKYTKPQKGNKTDRKDAKWICDLFMCDMIKPSFIPSPEIRHLRDLIRYRFKLTNMLTGEKNRAQNCLTVSNLKLDDVFSDVFGKSSRSITNFMLDHPGESFDVATFVDSRCKTPIDEIQAAVDGAISPEQAVKLRECLSHIDELEAHKEKIEHEILLVVKPFSAALDLLRTVPGFDSNPMTSIAILSEIGPDMSVFASSKNLVSWAGCCPRNDQSASKVKSTRISRAGCYLKPLLVQLANALIKSKKHPEFKQRYHRIKTRRGHKKAIIAVCKMLLTAIWNILTKLEPYTPQGFAEHPPVNESMILTKAQALHLLRKRGYIITDVVAGTS

SEQ ID NO: 485165 - protein, 346 aa, unidentified
MAKSSVAVLGIDLGKNSCSLVGFDPAGTVVLRRRARRETIVGLTAKLPACVVAMEACCGAHHLGRLLAAQGHTIRLMSPEYVRPYVKAQKNDDRDAEAIAEAATRPTMRFVPLKAQEQLDMQSLHRVRSRLVGMRTMLMNQLRAILLERGLVFPQGRRKFETAVGILVTDPQAQIGARIQALVAEIREEWASLDGRIEALDREFAAHARADEAAHRLVSIPGVGPMTATALRAAIDDGSAFASARDLPAWLGLVPRQHTTGGKPKLLGISKRGNAYLRGLFIHGARAALASLSKVEDATGRWLRGLLARAHYNVVVVALAAKLARIAWATLRKGVSFERRPEPALA

SEQ ID NO: 485166 - protein, 367 aa, unidentified
MEKSSTAFVGMDVHKESIDVAIADANEARHYGRIGGEAASVDKLTRKLRSAHRRVVFVYEAGPCGFWIHRRLKAQGLECMVVSPSMTPRNAADRIKTDRRDAMKLARLARAGELEPIYVPDAKDEAMRDLVRAREDAVCTQRQARQRLQALLLRNEIRYVGKSAWTQAHRRWISELKLPNPAQQIAFEEYVQAVHEAGERLERLASAIGAELEHWRWRPVVEALQALRGVQSIHAVRIVAELGDFQRFESPRKLMGYLGLIPSEDSSGPRRRQGSITKAGNSSARRALIEAAHAYMHPARVSWVIARRQSGLAKVACDIAWKAQLRLCARFRRLAARRLPRNKVIVAVARELSGFVWAIARQTKPAA

SEQ ID NO: 485167 - protein, 360 aa, unidentified
MTGTMTWAAMDVHARSTYAASMDVVTGELSRQRFDTGAVEPVVGWLAGLPGPVRCCYEAGPTGFGLYRAAVAAGIDCQVIAPSKTPRPSGDRNKSDRRDTDLLLRQLMAGGLTAVVVPSATCEAARDLARAREQVRVDLMRCRHRLSKLLLRHGRVWDRSAWTKVHREWLSAQTFEQVNTELAFIDNLAACDGLTARKDALDERLSWVVSDPEFWPLVRRLRAFRGIDTLSALIIVLEVCDFARFSRAVQLGSWLGLVPSREQSGESDHHGSITKTGSKYARRILVEAAWHYARPPRIGRTLYERQEGLPDHVLQIARRAQSRLYRIHRRMRERNKPGNVIVVACARELACFLWAAATAP

SEQ ID NO: 485168 - protein, 466 aa, unidentified
MKSFYLGIDVSKGYADFVIINQQKKPVVENFQLDDTFDGHSQLYEIVSRFLADHPQATLYAAVESTGGYENNWYNELTKFQALLSIQSARLNPLAVVHNSKADLKRNSTDKISARSVAEYLVAHPEKVLYQQHDPLTGLRKQWGFIRMLTKQCTQIINQLHSLLYTAQPQLLSFCRDGIPAWMLKLLLQYPTAAELKKARVKSVAKIPYVSMQRAQQLIAGAKRSVASATDPVTAQLVSATAAQVLQLKKTIATQTDVMAAQCDLPEVQLLKSFPGIGDTSAIGLMIELQSVARFKNVKKLASFWGLHPVYKISGDGSGAFKMSKQGRIQPRRILFTVALSAIEHNPVIKSLYQYHLGQGRKKMDAIGICMHKILRIIFGMLKNNTAFDPKIDSANRLRMLSTKPIDPKKDKNRRFQGFDLKAPVSRRQNKKRMEREQSQSVNNTKSGIRAPVPIANIISEMLLNL

SEQ ID NO: 485169 - protein, 387 aa, unidentified
MMYCGIDVAKLKHAVSLMDDKGQTLKAAFTITNTRSGFDQLLAELHNLTGEVTVGLEATGHYWLALYDELTHKNYPVIVLNPMQVAAYRKSGIRKIKSDVTDAVWIADYIRIANLPASELNLPVFLQLRELSRFRFRLTEQVGNLKRKLLTILDRVFPEYERLFSNVFLQASRSVLQEAVSAQEFADFNLQELTDILAEASRGRFGQEKAEKIQEQARKSVGVGFLTNAVHLEMRCLLAQLELLDDQRDQIDLAIADLMNQIPQHITSIPGIGPVTGAAILAEIGDIQRFETVDKLVAYAGIDPSVYQTGQFEASETHMSKRGSPYLRHALWLAATAALLHDPSLKEYYQKKRNEGKHHGTALGAVCHKLLARIFVVLKEQRAYIIQ

SEQ ID NO: 485170 - protein, 362 aa, unidentified
MFRPHTLYIRIQIVRKVHEPVFAMRDQDVSDVIKTKNRTAMQYIGIDVSKATFVVAYSSDKGGEIRTFNNTTAGIKQFIGTLPKDGNIHCVMEATGNYSALLLYMLNVAGITVSMENPLKVKNFARAMLSTVKTDKIDARLIALYGEKMNPQPFKVQGEAILRLRQKRTVIRQLTKQITAMSNLRGSLACLPVPDKGATHTVDETIKFLEKRRDRLQSELTDLVEVEFSRQLALLTTIKGIGITLATALIITTGGFTYFQNAKQVSRYLGICPTYEQSGTSVNIRGHINRNGDAYTRGLLYIAAWPASRFNAQCKETYTRLRQNGKPGKLAMIAVANKLVRQAFAVVAHDKEYIDGFVSIRP

SEQ ID NO: 485171 - protein, 335 aa, unidentified
MEFTYFIGTDVSKNELDLAVMRGSTLLFHQEISNTQDAIVSFIKELYKLPGFNLSNALFCMEHTGIYNNHLLACLYKKKANIWLEAAIQIKNSSGKLRGKNDKVDSIRITNYAYTQRDKVRLWVPKREIIQQLTHLSAARTRLIVAKKMLKTPLKELDSFSTKKTTGPGASICSHALKAIDADLERADHKIDELIAADPELRRLFNLVTSVSGVGKVTATQILITTNEFKDINDPKQYACYAGVAPFTNDSGKIEKKARVSHMANKKVKTLLHMSALIAIQHNRDIKLYYNRKVNEEKKNKMSVINAVRNKLILRIFACVNHNSPYQNNYQKLLV

SEQ ID NO: 485172 - protein, 428 aa, unidentified
MKYNTQNAKIESITEKTLIVGIDVGSETHYARAFDWRNYEYSKKPLEFSNNEAGFVTFKVWMEELAEKYGKDVVIPGMEPTGHYWFNLGAYLQDNGMKPVHVNPHHVKKSKELDDNNPNKNDRKDPKTIAALVNEGRFSYPYIPTGVYAEIRSLSNLRLQAQEEITRIKNRIARWFSIYFPEIKDVYKNPGAVSGLMILKVAPLPKDIVKLGVDGVNQIWRDAKLRAAGLKRAKTLVTAAEHSIGSQEAPDSAIIELKNLLNDYEIYKNREEDLMSLTEEKLSEIPHIDKLLEIKGVGLKTVSGFVAEVGDITRFDNPKQLQKLAGYAIVECSSGKHKGESHISYRGRKRLRYVLYEAAISLIARNEEFKEVHRYYRTRKENPLKKMQSVIAVACKVLRIFYTILTKGVTYDGAKMMQDIKRPQMLAA

SEQ ID NO: 485173 - protein, 393 aa, unidentified
MYLVGIDIGKLKHSFCLLEKETGEILVEPVFFKNNRDGFNALLSSFKHLPQKDILIGMEDTGHYNLALLKFLLDRNYQVALINPVATNLTRKMQGGISKNDKLDTLTICDVLASNQRVKSYRISKYSSFDLYEQKLLTREHHNLKEEENQLLNRLQKCIDVVFPEFNSLFKSKYGIVYMNILKEFGSADAIAHADIRTLRKCFDTGRGKHISLTAQELKEAARNSIGFPSSSEATQIKHLVARIELIKEQIAEIDKKIEEFSIQNNSPILSIPGISHFSGTSILAELGDIHNYSNPSQIIKFAGVAPLTYESSQFTAQHTAITKKGCKYLRKTLYQIITPVIQYNPVFRKFYLLKIAQGKGHRCAQGHCVRKLMRVIHHLLSTGTQFDPALLR

SEQ ID NO: 485174 - protein, 350 aa, unidentified
MNVNHYIGFDVHKKSISYCVKTADGTILEEGKLPAKRAILRAWARKRTEPWHGAMEATLFSGWIYDTLKPFAAELQMGHPAMMQAIGASKKKNDQLDARKIADLVRCHLLPVCYVAPAELRELRRRLRYRNLVVAQAVQMKNKMSGLLMEVGAEYNKQQLHGAKYFTELLEGLEEVPESVKDLLRLSRGALETFQTTQQQLLARLEQHPRLAERVKRLKSIPGVGQVTALTWALEVAEPQRFGSIARAVSYCGFTSALGSSAGQEHRGPISKQRNAHLQTALVEAAKLAPRWNPQLAAVHEQEVQRGDRNRATLAVARKLVAYLLAVDKSGKPFQIRTPATAEQEVGTAA

SEQ ID NO: 485175 - protein, 400 aa, unidentified
MISVGIDISKDKSTVCMLRTYGEVVEAPHSIDHTEQALNALIERIQSFDEDVKVVLEATGGYHQVVVTKLLSAGIFTVVVNPYIMKKYCAAALRKAKTDKIDSIRIASYGIDHWFSMTAYCPPDEIYAELKLLGRQYDRYVRLKVNCKIQLANLLDGVMPGIKTILQGTVPAYSTKDKLCDFVEKYWHYDNIKKMSEKRFIEDYGKWAKKKGYRCSESQAIAIYQLSKNNIPTLKSGTPSTKMLVLQAVKAVRDAEITLSLIISQMQEIASTLPEYSVVRNMKGVGDVLSVRLIAEIGDVRRFHNGSALVAFAGIDAPPYESGKFIGTKRNISKRGSSTLRKIGYEIMHSLKVVKPTEDSAVYDFIIKKETEGKPKRVAKIAGLNKFLRIYYARVMETYC

SEQ ID NO: 485176 - protein, 390 aa, unidentified
MRYFIGIDVAKSKHTACVIDTYGTVLVESFDFTNDIIGFQSLLKNIKPFLKKKHLIGMEDTGHYGDNLRNFLLEKQYKVVMLNPIVTSHIRKASNKAKNDRIDCFVIANTMMNPNFYRDQHVQSIDYTTIRQLTRMHHTHTEEINRYKCQLQKSIDIVFPEFNSLLNTKYSKTYLEILDTYHSAHTIANTDIRLLRNTLKNVGVGRSVSISAEQLKKAAKESIGQHNLAIEMDIPFLISLIRRLTSILGEIDKKIEEFSHQLNSPILDISGISHFSAMSIISELGDITYFSSEKKLIKFAGVNPCVYESGTYSMTHTRLEKKGSKYLRKTLYQIIDVVIRFNPIFQAFYQKKISQGKSYRCAQGHCIRKLLRVIYKILSTGERFNPEKLK

SEQ ID NO: 485177 - protein, 387 aa, unidentified
MKKDSIFEKDSQKKRKGTNKGELSSQELVTKIEALQREREAALKLTIGLDLGDRSSCYCVLDEKGEVIGRGVVVTEGKELEQLFGRLPASVVALEVGGHSPWVSRLLEKLGHEAIVANARRVKLISQSSRKNDRLDAEFLGRLARADKKLLAPIRHRSETAQADLMGIRVRAQLVELRTETVNAARGLVKSFGQRLAKCDADSLKESHAKDLEPAIRGHIERLLRVVGELTKEIAACDEELEKLSAERYGEETKRLKQVPMVGPITSLAYVLTLDDASRFGRSRDVGCYLGMRPKRDDSGQSQPELRITKEGDVYLRKLLVQCAQQIMSRRGPECDLKRWGEKIAAKGKKKAKRRAVVAVARKLGILLHRLWVSGQPYQPQRHKQAA

SEQ ID NO: 485178 - protein, 339 aa, unidentified
MHVTTIGLDLAKNVFQVHGITDNGDVAFNRALRRSQVLSFFESLEPCLVGIEACGTSHHWARELIKLGHTVKLIPPVYVKPYVKRGKSDAVDAEAICEAVTRPTMRFVEVKTPDQQAILAVHRTRDLIVRQRTQTINMLRAQLAEFGVILPQGVGHAIQFAKNCLDGEQPDLPEVAGNVIVELCDQLLFLNEKILRCSREMTQIAKREKRVALLQTIPGVGLITASAIVATIGSGKQFNNGREFAAWLGLTPINKSSGGKERLGRISKMGDQYIRRLLFLGMVSRIRQIAKTPEAFDPWFVDILARKPSKLAAVAMANKTARMIWAVLARNEPYKVRTI

SEQ ID NO: 485179 - protein, 348 aa, unidentified
MTTYYIGADVHSNSTEFAIEKRGKIVARYAVPTTIPTISNILDTLQGKKHLAMEEGPMAGWLYRNLNKKVDKFIISDPRRNKLITSDGDKDDKIDAAKLASLLRGGFLRAVYHSDDDKRAELKEWVSLYQDRVRDSVRNINKIRARCRMHGISIPRLALRNPSHRSQWLFSINQPVLAKQLNMLWIGYDATAKQTRDAKQQLIELSKKYHIICSWKDLPGIGLIRATILFAFLDTPWRFKQKNRLWKYCGVGLQRTTSGTDKKGRPKPARLKLPWAVNKTLKKAVLGAALSAINQKDNVFKDYYERMVKDGVVPSNARHAVARKMLTVMWAMWKTNSQFNENSVLLSN

SEQ ID NO: 485180 - protein, 305 aa, unidentified
MNTTLCGIDISKDWLDAHIEPMGAANRFANDAAGIADLAAWCQNHDVELVIMEASGGYERLAFLLLWEMGQPCGMANARSVRYFAEAMGFLEKTDRIDAAVIARYGAVKRLKPTPPPSAAQQRLKALVARLSQVGGDLTIQKQRKSTADAETIASLDEVIALLARQSRRLEGEIATLIDDDPLWACLDRAFRSLKGVASRTVARLMAQLPEIGILSNKAIAKLAGLAPIANDSGKRSGRRPVRGGRAGPRGVLFLVASIVAKAFKQRLQTAGKEKMVIRIALARKLLVILNAKARDARNEFANAT

SEQ ID NO: 485181 - protein, 519 aa, unidentified
MKHRVVGVDLGIRAPSVAVVADTDGTILDGKALRFKLSIDELERVESAALEGSKEGTKLHVVMEQSYPTSEYASAFFRARGHEVSFAKTNQVKEFRKCLSPKVKTDEVDAYIMARLPWLDLKQLTRNRVASPATHELKMQVSQRASIVKQLVSLKNQLIAYANAVWPGVSNAFGDLDSAHARSFLREQTPHSVVELQADELEAFLSDRGQIQQSYAQRLAGKLLAIAQTTLGLHELLSEEQIDSTRAHTIELIEMVEEVELRLRAKEKRLDNAYLSCDPDRLLMSIPGIAEMTAPTIFSFFGEPERFATTRKAQGFVGLFPETDATGLSDRKGTHITKAGPALLRRDLYLVADHFRRLDPHGARLYHDLMVHGGKHHNSALCTLANRMLIPRILAVLREQRPYELRDLDGKPIAKSDARELALQWKVTQEVRKRLRNTKTLTQERREASPYVTSEPKAPRNGRPSRPDDSNSASPSVTKDQLAMLVFRSLEKMLNAGENLEEIRLHLKNQSDAFFNKGP

SEQ ID NO: 485182 - protein, 347 aa, unidentified
MLIIGCDFHSRFQQIAMLDTETGELIERRLEHENGEARKFYQELPRPALVGIESTGYTMWFDEMLRELGHELAVGEAAKIRRMEARKQKHDRRDAAHLLNLLQRGDFPRIWLPGVEERDVRVWLEHRHQLVQMRTRAKNGLQAIAMNYGVCRREKLWTEAGREKLEKLPLLAGRSRRRADLLKLVEQLDQWIGELDARLEQEAKRRPEVQRLATHPGVGTLTALGTVLVLGPVERFPDARHVTSYVGLIPEEESSGGRQRFGKLSKQGNRLLRFLLVEAAQTAGRLDPGLQRCYKRLAFRKGAAHAKVAVARKLAIRLYIMLRDRIDYAEFVRRGSHAGMLEQVALV

SEQ ID NO: 485183 - protein, 397 aa, unidentified
MGYDVVIGLDVGKTMHHAVALDGEGQRLVDREVANTEAALRELFGRVAREGELLVVVDQLHSIGALPVTVAQAMGIEVAYLPGLSMRRLADLHPGSAKTDARDAYVIADAARTAPHALRTLGVPDETRAALSMLLGYDDDLAAQSTAAINRLRGLLSQIHPSLEKSLGTSVYHRAVLGLLLKAGGPTGLRRMGRSRVDRELAKGAPRIHARLTEQIFQGLDAQTVVVPGTAAAERVLPGLAAQLLHLFDERERIARDVEEVLDAHPLAEVLTSMPGVGVKIAARLLAEIGADVSAFATAAHLASYAGLAPVTRRSGTSIRGEHVSRNGNRRLKNALFIAAFASLHADPPSRAYYDRKRGEGKSHNAALICLARRKTDVLFAMIRDHTTYVPAMPSAA

SEQ ID NO: 485184 - protein, 420 aa, unidentified
MSLDPHEEPAAIQTHIGAIFISLELSRSKWLITSLVPGGGQRMSKHWVEAGDLAGLLARFWAIRDKVLARTGKSYPIVVIQEAGLDGFWIHRSLVKEGIESHVVDAASIAVSRRRRRAKTDKIDGEGLLRALLAFKRGEPRVCSMVRVPTPQDEDRRRICRERKTLTAERIRHVNRIKGLLFSQGIGDYEPLRRDRRRALEAARTGDGRALGANMKAQIGRELDRLELLLGQIAAIEAERDAMLARQAEAEAVQGAPGAPARVQKPMDLNGPGAETVPEAEAAPVVQKLMDLNGLGAETVAMLWTEAFYRSFDNRRQLAAFGGLAGTPWKSGSIDREQGVSMGNHRLRETMIQLAWLWPIHPPNSALTRWYRERTKGATKLQKKKMVVALARKLLVALWRYVDAGVVIEGAVLKRAARAR

SEQ ID NO: 485185 - protein, 359 aa, unidentified
MITSKFKKVIAIDTSKHTFNICVRDLTTNKETFSKVKRDSFVSKVVQLATEGSVIVMESCGGSHYWARTFQKVNLAVRLIAPQHARKFLPNRRMKNDTNDAIAICRCAVQPETNFVRVKTEEESAILCTHKQRQTVISLRVAAENRIRAMLSESGKIFPVGMSGVTEMLEYVDSEEITKDMVEEKVINLRDEVEHYRYQCQREKRLNDQIIAFSKNNELVKLAQGCPGVGPLTASAVVGQFGDCSQFNNAREMAAMVGLTPSQNSTGGRNNLGSISKNGNNYLRSLLTMGAESIIRHYKKRMEAQKSTQLDLFACRLELRGKHKRKIIIAVAARLARTLWAMLTHKEAFKNTREQAEQN

SEQ ID NO: 485186 - protein, 331 aa, unidentified
MNYSHFVGLDVGKKTFDASLMSADEKELSHKSFDNTPEGIQSLLDWIAGYHLSLSKLLFCAENMGSYVTELSVSSVSMGFSLALVCPLTIKKSIGLQRGKNDRIDAKRIANYAVLHSRKLELYKLPDKDLVRLRGWIIIRDNLVKQKVSSIKLLETFSQMAKLADVTESISFLEEQLKSIKEKILEVEEDMEQLIACCTSLYTNYLLLRSIKGIGIINAIVLLCVTDNFQRFDNPRKFACYCGVAPFEHTSGISIRGKTQTSSLANKEVKVYLTRAAITAISWDPQMKAYYKRKTAEGKHKASVINAVRAKIIARSFAVIRRQTPFVTLAV

SEQ ID NO: 485187 - protein, 352 aa, unidentified
MKKTLFIGIDFAKANFVASALLGEDLDPICLPKSFSNDDKGAKALISWIVKLLPETCSLSDVLVCGEHTGSYSLLLPRRLFDAGIDCWLENAVCIKNGSGRIVREKSDSADATMIAEYARTFYQKRVRLFVPESPILSELRECNDIRRRLVKEQAGLMCKRHDAEVRLKAKPGSKAIMMNIKILDRQLAYIKEQIAKVDRQMYSLIRSEKKLSGIYDIIVSINGVGPVTAIALIVLTSGFTTFGSKRSLACFLGIAPFRSESGTSIQHGSHRSRQADSYYSGLLYMVAVSAMNWNPEIALYRERLLKKGKPRLVVINNIKNKLITIIWAMVKSDTLYDPDHHLKIAQQYQTA

SEQ ID NO: 485188 - protein, 340 aa, unidentified
MKFTPFGVDIAKHLMQIHFVDEYTGEVIDRQLRRQDFLTFFSNRESSLIGMEACGGAHYWARELRKLGHEVRLLQARFVRAFRMGNKNDVQDARAIWQAVQQPGKSVAVKNEEQQAILSLHRMRYQLVKFRTAQINALHGLLLEFGETVHKGRASLDKAMPEVLERLREKLAPFLLSLLEEQYYRLNEIDEQIEQVEKQLIAWAKQNADCQRIMKIPGVGVLIATAAIATMGDPRAFRSGREFSAYLGWVPKQTGTGGRVKLLGISKRGDTYLRTLFIHGARVATLTTKTPLPWVTELKKRRPTCVAIVGMANKLARTVWALVAHQRDYQKDYVSVRPLN

SEQ ID NO: 485189 - protein, 541 aa, unidentified
MRLPELPKVTLSSRWASEHRGGSSAGVFLGRAQRVLHLRWQFLEARRDGRARARLDESAVEPNTIMPTHTKNARSSRARAKPCAAGPSPAKSANASPRGSGADGTFESPVSSAPTPSSPSKASGRSRSKKLTDLPPTGCPADTPTRSDGAVEPGAKGRSVMRSVALDLGVKKIAYCEVSAGEVVDRRMVNSLSSLEPTLGPGAKPARVAIEACREAWFVHATLTAWGNEVLVVDTTRSRKLGIGQHRRKNDRIDAEVMARAVESGGIPMAHVLSPHRQELRRQLSVRRTLVETRSQYVTTMRGLACALGARLPSCDTEQFSAKMRKAPLNPDVRTAIEPLLALLSPLQEQLAMVEQGLEELCALEPVVAQLRTVPGVGPIVAAQFVSVIDEAKRFRTAHEVESYLGLVPSEDTTGGKRRLGAITKHGNTYLRALLVQSAWSMFRQPGRTDPLQKWALAVAERRGKRIAIVALARRLAGVLWAMWRDDTVYDAELAMRSGVRGLRNAAQSIEFRAQALERAAAKLRQHRARPAKITEVTSSN

SEQ ID NO: 485190 - protein, 350 aa, unidentified
MSTVTSFFVGVDLHKTIIQICVVAGDGSPVCERRFLVRSLPDSDGVFSFLEPYREAGRMAVEALGLNRWFVNMALERGFDIVVCDPLKLHLKMLGRKTDRRDAQEIARRLQLGDIDRNATTWYADDETYGRRKVLRARHAQIEQRQQVLNQIRALLNSYKITGFAGDLTGKKMISRLSGLELATEELTAVLQSWVSQLISLGESISFLNQQLRSMDRGGLAEYLQRHLEHVGPVTASVLVHELGDVRRFTSSRAVAAYAGLVPRVSQSADTSHHGRLTKRGNRELRHVLGEWAVRLLSSNPQVQAWAKPRLKRSHKNKVRMALARRLLVGVYKMLLTGEMFEMERCLGQI

SEQ ID NO: 485191 - protein, 309 aa, unidentified
MTTSSYVGIDVSKDKLDVAVLGEKQAWQVENTKEGIQKLVQQMQKACPELIVVEATGGYQRSAVEALFHAGLCVAVVNPARVRQFARACGLLAKTDKLDAFVLAEFGRKMQPRRYEGKSEAEKQLSALLVRRKQLEEMLKAEQNRLRTISPSLRGSVERIIAILKEEKKRLDEQIRELMNEQKAWQEQREILSSAPGVGIVTTATLLAELPELGKLDRKKIAALVGVAPMNYDSGRKRGYRKTKGGRGDVRSVLYMSTLVATRHNPLIQTQYQQLLKRGKLKKVALTACMRKFLTILNAMARDQQPFRG

SEQ ID NO: 485192 - protein, 377 aa, unidentified
MKKICVGIDISMDDFYACIKIRTETGATKIKGTHSFENTENGFKEFLIWALKAKEDDCSVIFVMEATGVYYENLAYFLYANKQAVAVILANKVKNYIKSLNIKTKTDKTDSKSIAGFGIERELDKWQPMSPVYKNLRDLCRELLSIKKDLQRSKCQLHAMNKSHEKLESILALKLEQIMFYEKAIGIIKKEIKNSVNKDDFLKEKIRKAQTIPGLGFETVVILVCETNGFALFDNIRQLVSYAGLDVTFNESGNYKGKTRISKRGNSRIRQALFMPSMSATRANEPIKKLYERICDRNPDIKRKGIIAGMRKLLILTYTLWKKDEEYDIKYQWNKETSDTNMDMPSFGPATIKKKAEQNCSALDRPRFNELTEAFFC

SEQ ID NO: 485193 - protein, 343 aa, unidentified
MKIIRVGVDLAKSVFQVHGVDRCEKVVWRKKLGRAEWLAALLEKIEPGCEIGMEACGGAHHWARQLQKRGFTVKLIAPQFVKPYVKSNKNDANDAEAICEAMSRPSMRFVAVKSVEQQDLQAIHRIRAELCSQRTAKGNQIRDLCSEYGLVAPREMIQLRAAIPCWLDDLENGLTLRFRRMLRGLWLDLLNLELRVKELDQEIEIAAATDPVATRLQQLRGVGPIIATAIVANVGDAKQFSSGRQMAASLGLTPRQNSSGGKERLLGITKRGDAQLRTLLIHGARSVLRTAASKNDRMSRWVTHIAQTRHHNIAAVALANKTARIAWAMMTKGTDYQPGAVAV

SEQ ID NO: 485194 - protein, 347 aa, unidentified
MLADELDYVLGVDTHRDEHVLAVVTAPAGALVAGTAAPANPRGYRELLRVADRHARGRRAWAIEGTGSYGAGVARYLARRGEVVLELSRTPRGERRLRGKDDALDATRTARAALAADTLSLPRAGERREALRLLLVARRGAVDVRREALNQLRAVIVTAPEPLREQLRGLPTGALLDRCSRLRRTHTTADELAARLVLRSLARRVQAATLEADELEHEILAHVRALAPALLDEPGVGPIVAAQLIVAWSHRGRLRSEACFARLAGVAPVPASSGQTRRHRLSRGGDRQLNRALHTIALHRRHHDPATRDYIAKRIAEGKTAREATRLLKRYLARHLYRLLERQPTMT

SEQ ID NO: 485195 - protein, 375 aa, unidentified
MSIVMGIDQHRAQITAEWIDTASGEIGRARVRPADRAGVRRFIERFAGQQLEVALEATTGWRFLVEELRAAGTVVHLAEPAETAALRGNKQRAKSDRADARHHRELLLAGRLPESWIPPDHILDLRAQVRLRHTLIQQHCEWQQRIQAVLYHHGCSHRRQLMVGDGREWLAAQPLPETARQQITVAIALIDGLELQIAPLDRELRRYARRQTGCKALIDAYYGIGELCAVTVVCELGDCRRFANSRDAVRYGGLDVTVYQSDRHRAPGHLSRQGPPALRWALYEAAQVARRPRSPDRAYYEQAAERLGGNRACLALARKLLKRCYHTLRELGEDALAPPAEPSGAGSAAARRASSGSPPSTKPPATHQPADALAA

SEQ ID NO: 485196 - protein, 372 aa, unidentified
MKQKIVYIGLDVDDTQYHGSALNKESGELLSFRCRPTLKGLLGQLAKVRKHFPRYTIKVVYEASYIGFTLQRDLAAKRICCDVVAPSSIPRKGGKAVKTDRIDAAQLAQFYANDLLTIVQVPELEMEQDRDLLRSRQSLMHQREQVRRYLQAILRRNGLHYKAETQHKSHWTIQHHSWLERTITAQPGSLKVNLQLLYRQLQDINRSLAEYNEQIEALAKTERYQKSVQALTCYKGIKTIFALTMITEIGDVQRFPHPRQLVSWIGMDIREYSSGGKHNRFGITKHGNRYLRTAFIEANQRGYRTTRLSKDVRLRQARSAPEYVEIATRCLRRLSKKGNRLLLAGKHPNKVKVACAREMVGFVWESLRLAAA

SEQ ID NO: 485197 - protein, 381 aa, unidentified
MQTEFYVGLDLHSNNTYIGVIDEQERRVVKGKFPNKLEVILSILEPHREHVVGVVVESTFNWYWLVDGLMDNGYKVHLAHPAAFQQYSGLKHTDDEHDAFFLAKMLKLGILPEGHIMPREERQQRDLLRKRMKLVRQRSTHILSFKSLLSRNLGFSMPSNEVKKLEDDEMHDWFNNEYLALSAKANITAMNSLKWQISEIQNALLKAAKLKPQFEKLLTVPGIGNILAMTIALETGDIQRFPSVGDFSSYSRCVGSRRISNDKVKGSNNRKNGNKYLSFAFVEAAQKARRYCPPAQAFFLRKSIKTNKIVATKALAHKLARACFYIMRDQVGFDETKIFGKPSTVEKGCAREPKRGLGHQPSAPIGMSGAAPQQLDHIAAK

SEQ ID NO: 485198 - protein, 452 aa, unidentified
MAEEPVEIDAEEHEQIVERVAAIDVAKASGELCTRVPHASIPGKRVTKVWSVAATTNAITALAEQLARERIERVVVESTSDYWRPFVYLLQARGLTVWLVNARDVKQVPGRPKTDKLDSVWLAKLNERGMLRPSFVPPAEIRRLRDYTRLRLDLTEERSRHAQRLEKLLEDALIKLSSVASDILGVSGRAMIEALIAGQRDPQLLAELARGRMRVKRAALVEALTGRFDDHHAELARMLLDQIDALSAKIDALTLRIEALIAQIPAAQAPAVDETRGGEGDDPATAPLAAVARLDEITGIGVHTAQVLIAELGLDMRQFPTPGQLVSWAKLSPRTIQSGARNRSGKTGKGNRYLRGALGEAATAAAKTNTFLGERYRRLVKRRGKLKALVATARSILVIVWHLLADPAAHYRDLGSDFYAKRIDKNRRQRHLIRQLEALGYTVTLQALPMAA

SEQ ID NO: 485199 - protein, 338 aa, unidentified
MGKITTIGLDLAKNVFHVMCCDQHGKIIKKKMLRRSGLLAWFANLPPCLIGMESCASAHYWARALKAQGHRVKLIPAQHVKPYVRGNKNDYNDALAIAEAVTRPEMRCVSIKTPQQQDIQALHRLRERRLQDRTALCNQLRGLLGEYGIVFSRGVNVLRKRIPEILEDGENGLSDFFRRLLTQGYQQLTELDAHIEAYTQTLEAHSKHDDACQRLQTIPGYGPIVSSAFYSVVGNGQAYRRGRDVSASLGIVPRQHSSGGKNVLMGISKRGDRYLRSLLIHGARAVVIQAANKEDALSRWINKTRAARGFNKAVVALANKLARIGWAILANNTVYQAR

SEQ ID NO: 485200 - protein, 401 aa, unidentified
MEGPIVSIDVSNGNSHYMCFIKNNKRFGKVKKIDHDIEGFKRLLEDIQKLEAETNEKVCAVFEATGVYTKPLERFLSKNSIKTYIINPLESARKRKEEIHNKKTDKLDPISISKVYYDKEEMMELKKKDKTYNWLRKKNRLYEDQLNHLRKYKVTFQNQLSICFPGYLDLFRDGYSDIPMTILKKYPHPDLLKNKKAETVARYLEKNTCHTHKVSLEYALKIIEFAKKTYPGCEKDDVEVEIFKILLDKVIETQRECEKTLNEMITVASTLEEYRYISSIDGIGPNLAARIIAEIGDIEEFKSREALVAYAGLDPHIYQSGDQDGKHLKISKKGNKYLRCLLFLAVGCSIRGAKDNPVNRFYQKKKQQSNPLNSKAAKTACTAKLLKIIYGICKNKTTYKR

SEQ ID NO: 485201 - protein, 391 aa, unidentified
MAMRKRDEEVVFPNAAGIDVGASSHWVAVPRHATDEPVREFGAMTDDLNAMADWLLDCGVDVVALESTGVYWLPIDEVLAQRGLQVWLVDARQMKYVPGRKNDVQDCQWLQKLMSLGLLRAAWRPGDEVCVVRAVVRQREVLLTEQARWVQRMQKALVQMNIQLPEVLSDVMGMTGQAIMRDIVAGQRDPQALARHRSGRIKASAEEVRKALTGNWREEHLFVLTQALAMYDSLAGRIGECDARTQALLAHLGRQDIDLGKAPKERGKQHAAFDVRQTLANWAGVNLTRIDGLGVAAATKILSEIGPDLSRFANVKHFCSWLGLCPGTKISGGKVLSANTKRSGNRVRQALKMAAMSLSRSASALGAFYRRLCGRMDKARATRPSPTSSRA

SEQ ID NO: 485202 - protein, 350 aa, unidentified
MLIIGCDYHPGFQQIAFVDTETGECGERRLAHREEAEQFYRKLSERSLRVRVGMEASGHARWFERLVSDLQFELWIGDAAEIRTKRVRKQKTDRQDAQLLLRLMMEDRFPQIWVPDAANRDMRQLLWHRHRLVQMRTRVMNQLHVVALNEGLRRKKALWRPAGRKELESIALAPWATRRRQDLLDLLDQLTPKIQELTRALEEEVEKRPVARRLRTHPGVGPLTALAFELVIGTPERFHCGKQIASYVGLVPSEESSGDRRRLGDISKQGSALLRFLLVEAAQVTVRSQSEWRSKFFHLAMRRGRKIAKVAMARKLAVHLYWMWRQGLDYGQMHKLGSHAGEPGNLDGGK

SEQ ID NO: 485203 - protein, 318 aa, unidentified
MTKTICIGIDVAKASLEIALGAQGTVMTYPNTPEGHDELAATLTNYEIDLVVLEATGGYEVSVACVLQTIGLAVAIVNPRQARDFAKAMGNLAKTDKIDAQVLAQLALVLSQRTDRDKIVRILPSAQQRVLQAMIARRRQLVVLSISERQRLGNCHPDIRESITLMISFIQEQLKVIESALSKHIKTYHRSKLDLLSTVKGVGPATIATLIADVPELGKLTRREISALIGVAPFNRDSGFFRGKRTIFGGRAMVRRMLYMATLTAIRFNPVLCAFYKRLTEAGKPNKVAIVACMRKLLVILNAMIKTNKPWDESFHTV

SEQ ID NO: 485204 - protein, 336 aa, unidentified
MFNTVKYKIMNYSHFVGLDVGKKTFDASLMSAAEKELSHKSFDNTPEGIQSLLDWIAGYHLSLSKLLFCAENMGSYVTELSVSSVSMGFSLALVCPLTIKKSIGLQRGKNDRIDAKRIANYAVLHYRKLELYKLPNKDLVRLRGWIIIRDNLVKQKVSNIKLLETFSQMAKLADVTESISFLEEQLKSIKEKILEVEEDMEQLIAASTSLYTNYLLLRSIKGIGIINAIVLLCVTDNFQRFDNPRKFACYCGVAPFEHTSGISIRGKTQTSSLANKEVKVYLTRAAITAISWDPQMKAYYAEGKHKASVINAVRAKIIARSFAVIRRQTPFVTLAV

SEQ ID NO: 485205 - protein, 385 aa, unidentified
MLKLNLSDTPATGEYATIYVAFELSKAKWKLGVMLPGSPKMSRYTIDGGDLPALSARLAAWQAKAEATGKPVRIISCYEAGYDGHWLDRWLTHQGVTNYEIDPASIQVNRRARRAKTDRIDLEHLMRTLLSYLRGEPRVCSMVRVPSVEDEDRRRGSRERDRLLQERSAHTNRISGLLHAQGIRDATPLKRGFIASLDSMRTGDGRPLPPRLKAEVVREHERLCLVHKQIVELEAKSKAEVRAPVPSSVEAKIKQLIDVRGVGLVSARKLMHEVFYRSFNNRRQVGSFVGLTNSPYQSGNSNRDQGISKAGNRRARALAIELAWLWLRFQPDSELSRWFKERVGTMKGRIRRIAIVALARKLIIALWRYITTGLVPTGAVLRQSV

SEQ ID NO: 485206 - protein, 411 aa, unidentified
MEAIYESVCGLDVHSGSVQACVRRLKEGRIWQEVRAFGTMTRDILALADWLATGEVTHVAMESTRVYWKPIYNILEGRFEILLVNARHVKHVPGRKTDVKDCQWLAQLLQCGLLRGSFVPDRPQREMRDLTRHRSQLVHQAAAVANRIHKILEDANIKLGVVASDILGVSGRAMLRALIAGQQTPQQMADLARRQLRGKIPELRLALEGHVTEHHRFVLAELMDQLEDLERRIERFTRRIEEISGPFASAIRAVAEIPGFDERSAQNVVAEIGTDMTRFPTDAHIASWAGVCPGSNESAGKRKSGKTTKGNRWLRAALGQAAWAASRTKNSYFRSHFRRLVGRRGKKRAIVAVGHSLLVVIYHVLLTGRPYQDLGVDYFDKLDAARIVRSHVRRLESLGYKVTLAAPEKAA

SEQ ID NO: 485207 - protein, 388 aa, unidentified
MLLDHPSDGPAAIRTQFGAIFVSLELSRSNWLVTSLSPGKGEKMSKHSVTAGDIAGLLKLFADLKCKAQARTGENYPMITIQEAGLDGFWVHRVLQQEGIESHVVDPASIATPRRRRRAKTDRLDGETLLRALLAYKRGEPRVCAMVVAPSPEEEDRRRLCRERRTLIAERITHVNRIKGLLFAQGISGYAPMRRDRRARLETLRTGDGRMLPSHLKAQVSRELDRLELLLDQIKAVEAEQDALLAAARKPAAEKAPDPVTMLLALKGMGANFAAVLWSEAFWRQFANRRQLAAYAGLAPTPWRSGSIEREQGVSKAGNPRLRTTMIQLAWLWLRHQDQSALTRWFKAHSQRGRKSTIVAMARKLLVALWKYVTSGVVIEGAKMKIPT

SEQ ID NO: 485208 - protein, 285 aa, unidentified
MEVTTIGLDLAKHVFQVHGVDASGSVVLKRRLRRREVLTFFAALKPCLVGMEACATAHFWARELRALGHEVRLMPAQYVKAYLRRGKNDAADAAAICEAVARPSMRFVPVKGEAQQAALMLHRVRDLLVRQRTQLINAIRGHLAEFGVIEAQGPWNVGRLLAGLEQDGSVPGLVQELAHLLAAQLQEAEKRIAEVDARILAWHKADAVSQRLAAIPGIGPLVATAIAATVPDPSAFRSGREFAAWLGLVPRQNSTGGKTRLGRTSRQGDAHVRRLLVAGAPSVLR

SEQ ID NO: 485209 - protein, 352 aa, unidentified
MKYDIGCDAHKHYSQFAVLDKDGKFCRQARIEHARGAIQEFLSEFPEGTPVAVESVGNWYWIVDEIEASGCEPQMAHALRAKVMMGHVDKTDKLDAKGLAVLLHNGTLPTVWIAPKEVRDERELHRTRMVLCKLRTALKNRIHASLAKYNLSLPTHSDIFAPKWQSELHQLINQLPAETGRCIHQELELLKTLQEQIHHMETRLQERVQSTLNMRLLQTLPGIGQILSLVIEREIGSVDRFPSAQHFASYAGTVPTTNASGGKVWQGSLRKQANQYLKWAFVEAANVIMLQQNHPRWRSKHTVHLYQRIRRRKGHAVAIGAVARHLSEAAFWVLRKQQPYQDPAFCMVAQTG

SEQ ID NO: 485210 - protein, 368 aa, unidentified
MLMQSHYKVGCDAHKHYSLFSIFDGQGRVVRRTRVDHQRGAIQDFLSQFPPGTPVALETVGNWYWIVDEIEGAGCTPLLAHALLAKKRMGYVHKTDKLDADGLATLLHMGTLPAVWIPPGDLRDERELPRTRMAFSKVRTMLKNRIHSTLAKYALSLDTDSDIFTRKWRPQLSALLQHLPSETRRCVEQELELLELLQAHIQRLEARILERVKITPTLQRIMSIPGPAEILSIVIDRELGSIERFPSPKHLASYSGLVPRVQASGGKVHYGRMVQQSNHYLKWAFIEAANVVVRQRHHSNWRDKYVVRLFERTRQRKGHAVAVGATARYLSEATFWVLKKGEPYREPVPRRPVGLTSTVLPRQGQARA

SEQ ID NO: 485211 - protein, 310 aa, unidentified
MAKESFDWAVHGEASRHTLPNDDKGFEGLLVALKAYRVGLVVLEATGGWEKRLARFLLGYGLPVAVVNPRAAREFARSMGHLAKTDAIDAMALAHLAQTLAAKADQAGVAFAPPPAEVERLQLLVTRRAQLIDMRTAETNRLSGAGRALQRSITAVVKTLDKEIARVEGDIDAHLKSHFEEQARRFDAIKGIGPITCAVMLAFMPELGRVSNARAAKLAGLAPLNRDSGKERGQRHIFGGRSIVRSTLYMAMCSAVRFNPVMKIFHDRLIAAGKPKKVVLTACAHKMLRILNAMARKGQPWNEDLHPVAP

SEQ ID NO: 485212 - protein, 402 aa, unidentified
MINEDIDIFLGLDVGKTEHWACAVDRQGKQLWNRTLPNDETKLVELYQQLSAKGRVLVVVDQPATIGALAVAVAQDLGLSIAYLPGLSMRRIADMYPGTAKTDQKDAFIIAEAARTMPHTLRALTVSDEDEATLGMLTGFDQDLARQITQTSNRIRGLYTQIHPPLERVLGPWLDHDAVLAVIAAWPTPAQLQRAGQTRIAAKLKKHGARRHTAWAGEIMTALSRQTVTVVGTEAAAMVLPHLANQLISLHAQRADVAASVERIVEQHPLYPVLTSMPGVAVRTAAIIIAETSGKTFLTAAALAAYAGLAPTTRQSGTSIRSERVSHSGNKRLKRALFLSAFASIRSDPISRDYYDRKRGQGKRHNQALIALAHRRSTVLFAMMRDGTLYDAPEPRPLALAA

SEQ ID NO: 485213 - protein, 309 aa, unidentified
MKEKVEFEQVIERGCGLDVHKENVTATILGKGIKQQTREFKTYTRSLISLRDWLLRHGITHVAMESTGVYWKPIYNIIGDHFTILLVNARHVKNVPGKKTDQKDSQWLAKLLMAGLLQGSFIPNRKIRELRDLVRYKTKLTNQISSEKNRLIKMLEDANIKLSSVLSDIFGVTGRKIIHDIVESDYKPEQLLYHVHGKVQKSRAEIKEAITGNVTDHHRFMMQTILGSIEKIEETIGILDTQIAEQTAEYGLELELLDGIPGVDKDGAISILSEIGVDMSVFPDEKHLAKWAGMCPGNNETGGKKKVEG

SEQ ID NO: 485214 - protein, 338 aa, unidentified
MPTDQTVPTYTLFVGVDIAAQTAMVATQRPGAKASRSLTIEQTPEGYTSLLHQLQATGSVPGQVLVVMEATGSYWISLATRLVHEGFAVSVINPAQAHHFAKALLKRAKTDAIDAQTLAQLAMILQPEPWTPPPQIYYALQQRLAQRDDLLNLRQQVRNQLHALVQHPEVIAEVRARMERLLATFASQLTEVESEITAALSQDSAWAAAATRLQSIKGVGWVTAAWTLVTTLNLTSCDTVDSLTAYAGLAPMPRQSGSSVWHRPSIGHTGNGRLRTAFYMATLSAAQHNPVIKAFYTRLREVGKPEKVARCAAARKLLHIAWAVVTKDQPFDPNYALG

SEQ ID NO: 485215 - protein, 342 aa, unidentified
MQITTIGLDIAKNVFQVHGIDAAEKVVVRKQLRRGQVMKFFEALSPCLIGMEACATAHYWARELRKLGHQVRLMPAKDVKAYVKRNKNDAADAEAICEAVRRPTMRFVEVKSAEQQGRLMQHRTRDLLLRQRTQAINALRAHLAELGIVAAQGREGLKNLLTIIADEKDERLPIDARASLIVLAAQLQALQMMIGSIEKRIIAQHRASEESRRVATVPGIGTLGASAITATVTDPSAFRSGRDFAAWIGLVPRQDSTGGKQKLGPISKQGDRYLRRILVVGAIAVLRYAKQNPEKYPWLTQLLARRPFKVVAVALANKMARMAWALLAKGGTYRAPALAAAA

SEQ ID NO: 485216 - protein, 395 aa, unidentified
MYRLLVGVDVSKDFFSAAGLDEEGKEHFSGTYEMNSQGFSEFLKVLSSHSERLDQMIVAMESTGCYHINLFSFLTSEGIHTMVVNPLLISNFAKLSLRKTKTDKKDAMTIAKFLMEHHREISQLSFSQDVQDLRDLSRERESLCHLISATKVEIKRVLRTTFPELESIGNLYTRVMLRFLQQYPSARLVRGVKPRAIAKALKGPYVGDKLTFTAEDIVKAAQSSVAVVSPAKEIIVQGKIATLLHLQERLEELTKLLTDLCKATRVEDLKILQSIKGVGPNTAVPFLAEVGEVKNFSSSKKLIAFAGLDPSIHQSGKFTGASKLSKRGNRHLRRAIYLMTSSVVSQNGFFKSYFLRRKKEGLPPQKALFAVAHKLIRVIFAMLSQRTCFNVKEAI

SEQ ID NO: 485217 - protein, 431 aa, unidentified
MLKINPLSTLYVGIDVSSKSNYICALDFFKNKYINSSFANNQPGAEELALKILECLNQHPDLTMVVAALESTSVYSIHIANYLSSCEELMRFKPYVFVLNPKCTANYKKSYIGLGKSDPIDAFVIADYARAGNIESEPWRGSQFLALKRLTRHRLHLVECMTREKTYLVSNLYLKFSELQMLEGDDQPFCDIYGATSSSVLMEYFSPEEILDSSEEDLIAFLAKKSRNRIKDISKTADLLKKAARDSYRLDKALYEPLNVSIASSFNCIETFKREIKVIDNAIEKEIKGLNPNAFIILQSIDGIGPVFAGGIIAEIGDITAFHSSDALAKYAGLTWKSNQSGDFYGEDTPMIKAGNRYLRYYLGEAANSMRKHNVEYGAYYRKKYNEVPKHQHKRALALTSRKFVRLVYGLLARNQLYSGVSLDTSIKDSN

SEQ ID NO: 485218 - protein, 413 aa, unidentified
MAVVVIGVDPAKRSNTIEVIDSEETVLLLARFENTSADYRKMRALVKRWPDRVWAVEGATGVGLNLAQRLVSDGERVLDVPSKLSTRVRAIDTGHGRKNDPTDAHAVAVVGLRTAGLREVTVDDEAVVMRLLSQRRRDLVRSRTQAVNRLHQVLMQLIPAGARKKLTADKAKTLLATVRPHDAAGKARRQLAADLIDDVAVLDRKLDAVDKRIAEAVKASSTTLTEIVGVGPVTAAAILGEVGDVARFTTADRFASYTGTAPLEVSSGDVVRHRLSRAGNRRLNNALHIVALSNKRYDPRGKAYYQRKLAAGKGKKGSLRCLKRRLSDVVFRTLVEDRARANPGGQMGATLTASAVDQIPKANTSDKPQPGFTADATPTRRLAKAASRHRGEPIPGASPARNGIRCAGPSGSI

SEQ ID NO: 485219 - protein, 320 aa, unidentified
MMAQNDLVVAGIDVAKDKVDVCIRSPSLKRTFASTAEGRRELASWLRRHKVRKAVMEASGGYEREWAKALRDARIEVRIVDPKRVRDFARSAGRLAKNDAIDAEMIAWFAETFDEAPGQAYDAEREKLAQIVNARLGLLDLQTKMQNRGEHTVPKPVQEMHARLLKKIAVEVAKLETVIAAMIKATPHFAELAEIIESVPGLAGTTSAGLIAKMPELGQVSNKIAPALLGTAPYDDDSGRRRGERHIKGGRRKVRNLFYMACLGAATQHNPVLKAFYRRLIAKGKEPKVALVACMRKLIVILNTMIARRQKWDANLHVLG

SEQ ID NO: 485220 - protein, 407 aa, unidentified
MLIIGLDIHRAFAEAVAWEEGRLRRLGRVDMRRDLLAAFAAKLSPNDVGVIEATGNATSAAAVVAPHVKKVGIANPKQVFIVAYAKIKTTIDADVLAQLYASGFLPEVWIADEPTQALRRQVTRRNQIVRQRSRLKSVIQSILHSHLIPSCPHADLCGAKGRTWLIEQVVPQDERLAIDRHLREFDRLGEDLQVIERDLVRSALEDEGVKRLMTIPGVDITVALAMKAAIGDVSRFDDPQKLVTYLGLNPSVRQSGQVRPTMGGSPSRAVVMRAACSSRRPGRPLVLPDRCEPSPCGVRARRGQHVAAVATARKLSVVIWHLLRRARVTRGLDPPCMPRSLRDVELKAGSKAVRGQKGAHAYNIKSHREEERRWVEQAEGAYARLVAGWNPRGPKRVGTDAANEARR

SEQ ID NO: 485221 - protein, 387 aa, unidentified
MLTTTHDTEEIIERVAALDIGKAELMCFARVPDEDHPGRRLQEVQPYPTLTRSVLGLSDRLRCLGVTRVVMEATSDYWKPVFYLLEAAGFETWLVNAKDVKHLPGRPKTDKLDAVWLCKVAERQMLRPSFVPAPPIRQLRDLTRYRADLVAARTAEKQRVEKLLEDACIKVSSVVADIFGVSGRDMLAALAAGERNPKALAQLARRSMRAKITVLEEAFTGHFTGHHAFLLQTMLGRVDAISADIAALDDRIAAQAAPLADAIARLDEIPGISLASAYVILAEIGTDMTRFPTAGHLASWARVAPGITESAGKKKGKGSTGHGNAYLAAVLGNAAAGAAKTETYLGEKYRRIARRRGSKRAIVALGRSILVIVSLGDLGVGLAKARK

SEQ ID NO: 485222 - protein, 355 aa, unidentified
MTSAKYIGMDVHKESISIAVRNAAGKIVMECVIETKASMILQFIDGLRGDVQVTFEEGTWAAWLYDLLKPHVTKVVVCDPRRNALLQEGNQNERVDARKLAELLHNNQLRSVYHGDHGLRTLKELVRSYLTITQDLSRVMTRVKAIYRSWAIPCSGKQVYASRHRAEWLGKISEPGVRRRAEFYYQQLDALRCLRQEVRRELLAESKKHKAWKLLCQIPSIGPIRAAALLGILQTPHRFRTKRQLWTYGGVGIETSSSADHRVVDGQLERKKKPVEIRGLNRNYNHDLKNLFKGAAIVAATKPGPFAEFYAELLARGMRPEMARLTLARKIATIVLIVWKRGVCFDAQHLKPQTA

SEQ ID NO: 485223 - protein, 459 aa, unidentified
MRCLARGLRVPLDCCCEHVGLYPGRRPSERHRPGRPGGPVGGVVRELIGMEVLYDRVAGLDIGKASLTVSVRTPGARRGRHQETRTFKTTTGSLRVMRDWLLEQGVTIAAMESTSTYWKPPFYCLEEVMEVWLLNAAHMKAVPGRKTDVRDAEWIAQLLEHGLLTPSFVPPPPIRRLRMLTRYRIQLLGDRTREIVRLELMLEDASIKLSTVASSLKTVSARAILGAMIDGETDARVLAEMAKGRMRAKIPDLAQALEGHFDVHHAQLARSILDRLDRVERDMVELDVAIEAACAPWAHQIELLQTIPGVGPKVAQVIIAETGGDMSKFPTAAHLASWAGLAPAIYESAGKRTPSGRRRGNKWLSAMLVEAAGSVGRMHGKNYLAVQHARLTRRRGMSRAQVAVAHSILTTAYYMLKRDEPYRDLGPEWLAKRNEEAHTRRLVAQLEKLGHTVVIDPAA

SEQ ID NO: 485224 - protein, 448 aa, unidentified
MSDIPTSSIQPEFVALIGIDWGDKKHAWALQAGDSTKIEKGEIEHTPEAIQQWAAELRRRFPSGRLAVALEQSRGPLVFALSKYEHLTLFPIHPSSAAEYRKVFRPSGAKSDGPDAVLHWDMLARHRDKLRPLNPDTPETRALQLLTEDRRQLVNERTRYSNRLTANLKSSYPQLLQWFDDLYAPVTLDFLEQWPTLEELQKAKPGVWSKFFQEHRCRDAKNQQLLAAIPTAVTATTDFAVVTAGRAGVCAAVRLLRNLNQAIQEYDRQIDQLAKGHPDFALFQSLPGAGKVLVPRLIAAFGTQRDRYQRAAEIQQYSGIAPVTEASGQQRWVHWRWGCPKFLRQTFHEWAAQSIAQCDWAAAYYRVQREDKNKSHHAAVRSLAYKWIRIAFRCWKDRQLYDGSYELALKTRAKATPEPKQPSSFPLPLRWISCAGFQKLAEKNEENT

SEQ ID NO: 485225 - protein, 422 aa, unidentified
MKTPGDTPFTAFIGIDWADAKHDICIQAADDERREFSRLSHKVEAIDDWAQSLYRRFGGPIAVALELSKGPLVYALQKYNFFVIFPVNPSTLASYRETFTPSGAKDDPTDAEYVLDLIMRHADCFEPLQPQSVEMRTLVSLVEQRRRLVDDRVRTTNRLRDTLKQYYPQALEWFDRIDTLLFCDFIERWPTLLQVKRARRTTLQTFFHQHNMRSARVLDARLTSIKAASPLTLDAAVITPNRLQALVLIDQLRVTLRAIKRFDDEIAELAPQHPDYALFSPLPGAGPSLAPRLLVAFGEQRDRFKNAAELQKYAGIAPVTERSGNKHWVHWRWQCPTFLRQTFVEWAAQTINKSYWAGLYYRQQRDRGCNHQAAVRALAFKWIRILYRCWQTQTPYNEALYLKALKRRGSPLLNQMETAIST

SEQ ID NO: 485226 - protein, 379 aa, unidentified
MEIITRNEKILYVGIDVHKDTYSLCCFDFFRNELSDEMTIKATTKAVIKYLEAIKKRYKEEILFACGYEAGPTGYGLCRGLQKAGYGCVVMAPTTMSNPDGKKRVKTDRIDARAIARILAYKSYSQVHLPSEEMEALKEYTRARDAKKRMFKKAKQELLSFLLRNGKSYPESGNYWTEKFFKWIKTVQFSEKWMQEAFSEYLSEVYSLKAKIELMDTKIREIAELEIVKDKVDRLICFSGIDVITAVETVAEINDFSRFATAAQFVSYLGLCPGEDSSGKTKNMLPLTKAGNKRVRALFCESAKAIKRTNPYGEKSKRILERQKNASPEIVAYADKATKRIRTKMKHLEERGKNYNVSSAAGARELACFVWGMMNSKIA

SEQ ID NO: 485227 - protein, 328 aa, unidentified
MKKEKEQKQYCGIDVSGDTIDVCYIQMDGTMEWRQFENNRMGFKQLLKTCGIDYHYIMESTGVYHLPLAFFLQAQECMYSIINALQIKRFIQMNLERNKSDKKDAFHICNYGIMNNPEVYEMPERQYFECKSLNNAIEGLTQEITSFKNKLNALSKLEIDKKVIEKSYKQIIKTLSAELLKLETELNVKLASWQPELVKLVGSVVGIGKRATSLLIVSTQGFKHTTSYQQLISYAGLSPKEYSSGTSIKGKVRICKQGGGRLRHVLYMCALNAKETNKECKALFDRLVAKGKNKKLAVIAVCNKLLKQVFGVVKNRTPFDRNYLQKTD

SEQ ID NO: 485228 - protein, 332 aa, unidentified
MMAQNEVVVVGIDVAKDKVDACIRALSQRRAFPNTAEGRRELVRWLRKYKVGKAAMEASGGYERDWATALREAGIEVRIVDPKRVRSFARSAGRLAKNDAIDAEMIAWFAETFTDAPDQAYDAARETLVQIVNARQGLLDLQTSLQNRTEHATPDVVQNMQARLLKKIALEVAKLEAAITAMIKATAHFVELAAIIESVPGLGKITSAGLIAALPELGQVSNKIAAALLGVAPYDDDSGRRQGQRHIKGGRRKLRNLFYMACLGAATRHNPVLKAFYARLIARGKAPKVALTACMRKLIMILNTMIARRQKWDVTRDKVSDHARPLPSACPA

SEQ ID NO: 485229 - protein, 688 aa, unidentified
MAQHFLLSAAARSLSAAKIMRMSDRGVENVFLRLRWPATDGKPVCPGCGCMTCYACPRPTGQQRWRCKACRSDFSITSGTLFAWHKLPLRTYLLAIAAFCNEVKGKSMLALSRELDVQYKTAFVLAHKLREAMASSMKALRIGGEGRVAEIDGAYFGGHVRPENRAADRLDRRLGENRSGKRQVVVVMRERAGRTLVQVAPAEAAAVPAIRQRVAKGTVLHADESTAWNKLHASFAMQRINHQEAYSLDGACTNAAESYFSRLRRSELGHHHHIAGRYLLRYAQEMAWREDRRRVSNGEQVYGVVGLAMRCRPSVDFCWCGRPPTASMCQNEVVVDLRQRRPSVGQISRIGMDTSKHVFQLHGVNAAEAPVLRKKLRRNEMVAFFEKLAPTVIAIEACGASHHWARLLQSFGHTVKLIAPQLVKPYVKRGKNDAADAEALCEAMSRPTMRFVPVKTAEQQATLMLVGVRDRLIRNRTQLANAIRGHAAEFGLTAAKGVAHLAPLLERVETDESLPVLARELFAMQAKEYAQLQTQIDEVEAKLTSWHKADECSRRLAKIPGVGPIGAMLLRMKTPDPALFQSGRQFAAWIGLTPKDHSTAGKVTLGGITRAGDEGLRSVLVVGATAVIRHALSSGKASPWLLDLLKRKPPKLAAVALANKTARIAWKMMLTGEAYSAKPAAAASVGVA

SEQ ID NO: 485230 - protein, 369 aa, unidentified
MNDCITVVGLDVHKDSIVAAVLPPAAHRPTETCQIENQPKSVEKLIRRLTQRGPAEFVYEAGPCGYAVQRHLSELGQRCVVIAPGLIPVRPGDRVKTDRRDAEKLAKLYRAGELTPIHIPSMRWEGARDLVRSREDALVDWLRARNRLGKFLLRQGRVFRETKTWGFKHREWLMGQRFDWPEHQQAFDAHRRSFDESETRLKALNEQLQELSQQDPYRLPVRYLRALKGINILSALTLVVEVQEFRRFQKAPAFMSYCGLVCSEHSSAGRIRRGSITKVGNAHIRRVLVEASWCCRHGQGVSRDLAARRAACPVEVVQIARKAQSRLCRKFNRMLDRKKMATTTVVAVARELAGFVWAIAQHFPEVATV

SEQ ID NO: 485231 - protein, 341 aa, unidentified
MAVAGGFDLHRGQLTFDYVDTGTGESCRGRISPADRESLRRWLRRFDGAQDVEFAVEGCTGWRYVVEELQRAGITPHLAEPAETAGLRGSKRRAKTDWADARHLRDLLLNGRIPESWIPPAHVLEARALVRLYKDLLEERTSWQQRVHATLFHQGIPVVPKLGTADGQQRLDAAELSAAGRQAVQAGLRQIERLNQEMAPLRRELARLSSRQPGCRALRKAHYGIGGLLSVAVWAELGDCRRFSSSDDAVRHTSLDITIYDSDGRRARGHIARQGPPVLRWALYEAALYASRPASPDYAYFCGVRDRIDGQRALLSVARKLVRRCYHTLRELGEDALLPAA

SEQ ID NO: 485232 - protein, 350 aa, unidentified
MSVIHYIGFDVHKKSVSYCVKDAAGKIIEEGKLRATCQVLRQWAGDRTEPWHGAMEATLFSGWIYDTLKPFATVLEMGHPAMMKAIGASKKKNDQIDARKTADLVRCNLLPACYVAPVEIRELRRMLRYRNVVVAQAVRMNNKMSGLLMEVGAEYNKQRLHGKHYFTELLGSLEEVPESVKDLLRLSRGALELLETPQKQILDRLQKEPRLVRRLEVLQSIRGVGDVTALSWALEICDPHRFASIADAVSYCGLTSALVSSADKQQRGPLSKQRNAHLQTVLIEAAKLAPRWNPQLAAVHEREANRGNRNRATLAVARKLVAYLLAVDKSGKPFQVHTPPATKTEVPAVA

SEQ ID NO: 485233 - protein, 420 aa, unidentified
MARRSCWLTLRRWVLSVHDVSSSAVVVAVDVGKNTVALSVTDDRRHRLLGPLDFAMTRSGLAVTLARISAVVPPTAVVTVGIEAAGHYHQPLMARSSWPVGWELRELNPAHVTEQRRVQGRRRVKTDAIDLEAITELVLAGQGTPVTDRARAIGELAAWVAHRTRRVDARSGLKNQLLGQLDRAFPGLTLALADVLGTKVGRLVATHFADPARLVALGESGFIRFAATRGLQVRGPVAARLVTAARDALPTPGAAAAREVLAADLELLRVLEEQVAVAEEQLAALLPDSPFRTLPSVPGWGVVRAAAYGAAVGDPDRWPGPRQIYRASGLSPMQYESAGKRRDGAISREGSVTLRRALIDLGIGLWLNDPAAKTYAADLRTRGKKGGIIACALANRANRIACALVRDQARYDPARWSKED

SEQ ID NO: 485234 - protein, 337 aa, unidentified
MKLYCGIDLHSNNHYVVIIDEQDKRLLEVRLSNELSATLKALEPYKSRICGVAVESTFNWYWLVDGLQEAGYPMMLVNTYKAQQYSGLKRTDDRHDAFWLAHQMRLGILPLGYIYPKEGRGLRDLLRERRRLVRQRTTHALSVQSTVWRHTAVKVPGQVIIGRRSGEWPEVSDSYVEMGINAHRQAIIALTKQIKSIERTVVKQLEPMPSYKMLLTVPGIGPIIAWTIVLESGDLSRFAGVGNYASYCRCVDATRTSNDKKKSENNAKNGNRYLSWAYFEAAHFAIQFMPAAKRFYEKKKAQRNPILAMKALSHKLARASYFVMRDLAPFDETRLFS

SEQ ID NO: 485235 - protein, 317 aa, unidentified
MTFAGIDVSKTHLDLALVSNSPKPTRLRFPNSPEGRQALLAALAHHNPAWVALEPTSAYHLPLLKLLAENRLQVALVNPYHLAAFRKAKGERQKTDRQDALLLARYAQVYHGELWAYTLPPEALRELKALVGYREDLAGRERAILNQMEAAEWAGSKEVLALLQKELACVKGLLGEVEARIQALLATLPEAEVLMALPGVGPQVAAAVLALLPPELWGRAKRAASYAGLIPEREESGKSVERSQLSRKGPPLLRRKLYMGALVAVRHDPEMRAFYHRLLSRGKRKKQALVAVAHKLLRRMMGRLREYYATQLDQGVA

SEQ ID NO: 485236 - protein, 357 aa, unidentified
MTIVANTHPYVIGVDTHAATHTYAVLAGATGVVEDVATFPATRAGMDRALAWIGRRSGGDLDALVVIEGIGSYGAQLARTVAKAGYQVAEPAAIPKALRRSMGKSDELDAQLIARSVLPIATDRLRRPRLGQGDREAMRILLGARDQLNTERSQALGALTALVRTHDLGIDARRALSAGQIKQIAAWRPRQGQDIATATARREATRLARRITDCDKDLANNKRELTDLVAASDSAHITNELGVGAVNAATLLTVWSHPGRIHSEAAFAAIAGTSPLPASSGKTTRHRLNRGGDRRLNRALHTILLTRMRTDPRTRAYVERRTAQGRTLKEIRRSLKRYLARQLYRILNNPPATATAA

SEQ ID NO: 485237 - protein, 341 aa, unidentified
MKNLFIGVDFSKEKVDVAIIFADGLTETAPRVFNEFKTTVSGYKQLVKWVEQNSYGIDSSLWLFCGENTGDYSKGLCNFLYGKGYDMWLENAKSIKDASGLRRLKSDRADASMIAEYAMRNYDKAVMYEPLSESLAQLRELFLYRQMVVRHRCSFQVRRGEKRLTMEKSPVKTMISQSGRHIVSELNKEIEKIDKRIAELIKSDEELTEVFTIVTSVPGIGTQNAVCLMVYTDNFRRFNYDSRKIACYYGIAPFGKDSGTSVHSDPHVHYMANRQIKAMLTQAALAAVNFNPVMARYYMRLVERGKKKQVALNNVKNKLVHLVSAMVRNSQTFTPEYKISA

SEQ ID NO: 485238 - protein, 351 aa, unidentified
MSIDIVGVDTAKAVFQLHGADATGKAVLKRKLHRSAMVPFFEKLPACRIILEACGASHYWARTLSGLGHDVKLIAPEAVRPFVKKGKKNDPADAAALVTAASQPDVKFVPVKDTEQQGILSLHTARALLVKQQTMLANAVRGLAAEFGHTAAKGMEKLTELVTTLEADEGLPARARQAIVGLYDQCRALDEGIATLEAEIVAHARHDERARRLATIPGVGPITSSMVVATVTDFSVFKSARHFAAWVGLVPRQNGTAGKMRLGKITKAGNKQIRTLLVQGTTSMVRRAEHWNSALGKWTAGLLAKGRSARLVTVALANKVARVIWVLMTRNEVYRPQGRARTVAAQAVAVA

SEQ ID NO: 485239 - protein, 381 aa, unidentified
MDTAARNQECNPERILYMAMELSARKWKLGFTVGLGQKPRQRTIDAGDLEALCEAIERAHKRFKLSESTQVVSCYEAGRDGFWIHRYLETVGIRNVVIDPASVGGNRRRKQRKTDRLDLGKLLRCLIRWHRGEPKVWSVVQVPGVEAEDARQFHRELEALKRERTRHVVRIRSLLVCHGVQVERIGAEFAEWLTGVRMWDGSALPPQLVGRLQREYERLEVLSRQIADLEVQRREAIRRSRDRRMEQVRHLMRLRGIGENGAWLLVMELFAWRHFRNRREVGSIAGLAPTPWDSGDSDKEQGIDKAGNRRVRAMMIELAWCWLRFQPHSELSQWFEQRFGPGGKRSRRIGIVALARRLLVALWRYLEHGVVPKGAVLTTPR

SEQ ID NO: 485240 - protein, 461 aa, unidentified
MAKQLGKRKKDGAREDATAGLPPLNLHAAGIDVGGAEHYVAVPADRDDEPVRRFGSFTADLHRMARWLKDCRIKTVVMQSTGVYWMALYDVLESHGLEVNVANARHTKTLPGRKTDVQECQWLQKLHTFGLLNNSFRPTEEIRVLRSYLRQRENLVAAAATCIQHMQKALTEMNIQLANVISDISGTTGLAILRDIVRGERDPHRLAMHKNSRIRASRQEIARSLEGTWRQELLFVLEQSLHLYQTYQEKIQTCDQRIDEQLRSMEPKIDPLSEPIPEPRRGKDARGHQSGFDLRGQLYRITGVDLTRIDGIEVQTAQTIISEVGVDMSRWKTEKHFASWLGLCPDNRISGGKVLKRGTRHVVNRASTALRLAASALLRSQSALGAKFRRLRSKLGAPKAITAMAHMLARLTYRMLKFGHDYVDRGIEFYEAKYQQQQLQRLTKQAAALRLQLVPSMPHVS

SEQ ID NO: 485241 - protein, 461 aa, unidentified
MSRERSKKKQKRAGQGGAVPSLNCIEPNAAGIDVGAREIFVAVPQDRDPSPVRSFETFTQDLHRLKEWLQHCGITSVAMESTGVYWIPLFQILEEAGLEVCLVNAQHVKHVPGRKSDVIDCQWLQYLHSVGLLRASFRPEDRVCVIRSLLRHRDRLVQMAAAHVQHMQKALTQMNVQIHHVLSDITGQSGLAILDAIVAGERNPVVLAQLRHSRVQASEEEVVKSLVGDYRREHLFTLRQSLEAYRYYQRLITGCDAEIEQQLQNFDGHLPPDAPALPPERYPHPQRKNEFRFDMRSELYRIFGVDLTAIPSINALTGYTLLAEVGTDWSKFRNLQAFASWACFCPQNKKSGGKVLSAKTRRSANRVNRALRLAAQTLERSTSYLGIFYRKMCARLGRPAGITATAHKLARIIFHMVTTGRAYDESIFAAEEQRQRKHLESSLRRKAAKLGYQLIPLPQTA

SEQ ID NO: 485242 - protein, 454 aa, unidentified
MGRKSNMEKMPIVNPNAAGIDVGSKSHYAAIGQSDDQLREFGCYTEDMRELCQWFADNGVATVAMECTGTYYKGLFVMLQEYGIEVLLVNGRQTKNMKGKTDVKDARWIQKLHALGLLTGSFQPQEFTEAVRKYSRHRQGMVQDAATYIRKIQQALRLMNLRLDVAISDVTGKSGRAIIEAILAGERDAQKLANLCDRRIKKSKEEIARALTGYWRDEYLFELKQSWEIYQFYYIKIRECDTEIERLLEQGVEDNERQDGEERPVYNEKTRPVKKLNKNDPKFDVQQLAFQLSGGVDLSTIPGVGRNTILSIIAEVGLNMSAFRSAKAFASWLRLAPNNKISGGRTLSSHVPKGATPLANALRKAANVIGDLKTGGLMHFFKRIAYKKGRPAAITATAHKLAVIIWNMLTKKENYNYYNDEQYESKIRELQIQNLNKKIRALGIQAHEINFSTI

SEQ ID NO: 485243 - protein, 313 aa, unidentified
MQQPSHVGVDVSKHHLDVAFPGVSKVWRTPNDASGIAALIRRVQRLDSPHVVCEATGGYTRRLTSDLAAEAVPLSRVNPRQVRDFTRATGRLAKTDEIDAVAILRFADAMQPPASPVPSPEQVRLTDLVRRRRQLVDAAAQEKQREAIPDQPLVTGSIERHLAFLTKEIAAIDEAIANAIEADVTLARRAGLLRSIPAVGVVTAATLVAELPELGTTGNKQIAALIGVAPMNRDSGISRGQAHIAGGRMSARCCLYMAAVVAIRCNPVIRPFYKRLREQGKPSKVAIVAAMRKLITTANAMLAHDRPWRNDPA

SEQ ID NO: 485244 - protein, 342 aa, unidentified
MEHYAGIDVSLECSSVCVVDAKGKIIREGKVASEPDALISWFRSLGYELSRIGLEAGPLSQWLFAALRKAGLAVELLETRHVRKAFEAMPVTSDRNDARGIAQLMRLGWFRPVHCKSIDAQEVRAMLTARKLVQSKLRDVENSLRGILRGFGLKVGKTTEREFAGRIEELVAGQPHLEVIAQALLAVRAVLRKEFAAFEKQTRKMARTDARTRLLMSTPSVGPIVALTYASAIDDPGRFKSSKQAGAHFGLTPKKYQSGETDYTGRISKIGDSSVRTALYEAAHIMLTKPLKGCSQLKSWAMRIARRAGMSKAKVALARRLAVIMHRMLADGTPFNAAAAAA

SEQ ID NO: 485245 - protein, 337 aa, unidentified
MGLEPAQARKGDEDDTFSGVVGIDVSSGKLDAHVHGHDQSRQVTNDASGHRELVAWARAKRATTAVMEASGGYERDLARALRRAEFAVYVVDPKRVRHYAKAVGQLAKTDRIDARIIAEYGTTVLAAGRLALPRPDDPQRDRLSALLGARAALIEHRDALQQQSAAMPAGLARQALKDAHASMKLRIKQLERQIGALIAEHAAFAALARRLDTVPGLGPVAIAALIAWLPELGYAGRARISALVGVAPVADDSGDREGKRHIAGGRKKLRNVLYMPVVAAIRCNPVLAAYYKRLLACGKEPKVALVACMRKLLVIVTAMITNQQDWAPHSGAQTAAA

SEQ ID NO: 485246 - protein, 372 aa, unidentified
MQKTLYVGLDVHKVSISVTTAEEGRDGEVRFIGTIPNTPTDVAKLAKRLANGGRRLEFCYEAGGCGYGIYRQLVDLGHGCTVAAPTLIARKPGERIKTDRRDSQKLALQHRFGDLTAVWVPDPVHEAIRDLVRARMDAVMQLMRACQQCLAFLLRHGRNYGPGKKNWTLRHRRWLATQKFDLTTHQIVFQDYVEAVWSAQDRRDQLEARISAMLSDWSMAPLVEALRTVRGIDLISSVIFVAAVGDLGRFESPRQLMAYLGLVPSEQSSGSRIRRGGITRAGNGEARRMLVEAAWSYRYQPRVSSGKTDVVERQPKPVRDIAWKAQVRLCSRYRKLAAAGNKPTVVVTAIARELSGFVWAIGQTVRPPMRQV

SEQ ID NO: 485247 - protein, 351 aa, unidentified
MDNDITRIIGMDVSDRYSHLCVLGLDGEVEEESKVPTTPNGIRRRFSEMGKVRVALEVGTHSPWMGRLLEELGHEVILANPRKVRIISQSNDKSDRVDAEMLARLARSDPKLLSPVAIRSEERHAGLVVIRSRDILVKTRTKLVNHVRGVCKSLGVRLPKCDAACFHRRGILLIPEEILPSLEPVLRQLEGLERSIKDCDRRIKEMAAKIEGVEVLTSASGVGDLTGVTYVLTLGDPSRFRRSREVGSYVGLRPKRGQSGDVDKQLRVTRAGDKYLRSLLVGSAQYILGPFGPDTALRRWGLGLAERGGKAAKKRAVVAVARKLSVILHRMWVTGEMYQAFPEGKPEEKAA

SEQ ID NO: 485248 - protein, 388 aa, unidentified
MNTTKTSFTSTDSFVHIGVDLAKNVFQVAYKDPTSSKFVNRQLKRKDFKEFLENANSFKKHIFVEACGSSYYWCRLAIALGHKATIIPATATATFVQNNKSDVNDAKAIWQLSFVPDVKTVRIRSEANQILGTLLKLREKLISERTKLCNWMRGQLYELGFITSLGDSSKITKLLDDCSEQTKEKEWSDIFSTVSNVFKDSLKAIEKNIKTTEDYIISYARKDNLCCRLMTIPYIGPVNSVAISYVMEDSSCFKNGRQFASYAGLSPKHTGTGGEIRILGVGEQGHNILKRTIYQSALSMYCRYKERQQQIQDSTCYKDLAEYKEKLSEKAENSSWIAQLSRRMPCKKAVCAIANKMVRTAWAVAASNGDYNYKLSTLVKNTEENLSN

SEQ ID NO: 485249 - protein, 365 aa, unidentified
MAIVGGIDIHRRQLTFDYVDSVTGEVVRGQVGPADRQHLAVWLKRFRDVGDASFAVEAGTGWRYVVEELARAGLRPVLADPAETATLRGRKRRAKTDRADSKLLREALAAGRIPRCYIPPGHVLECRALLECYQDLRREHTAWIQRIHAVLFHHGVPAVPAGELSAATGRGRALEAAQVHLTPAAQTQVGIAADMLEVVEAHLHELRRELLRRSRQMRGARMLEQTIYGVGPITALALCCWLGGANRFSASRQAVRFAGLDITVHSSDTKRSPGRLSRQGPPVLRWCLYEAGKAASRTRSPDHDYYATVKERVNGKRAALSQARRVVRHACHLLNALGDDAFTLVPLTAPPRVTARRTRTLRPAA

SEQ ID NO: 485250 - protein, 418 aa, unidentified
MNREQNARVSEKRYVGLDVHKHYITVGGMNGQQEIVLRPRDVEMERFKTWAESNLRKTDEVVLEATTNTWDVYDTIAPLVKRVVVAHPAEVKQIANSRVKTDHQDVIRLIRLLIADIVPEVWVPPVEVRELRALISYRWRLVKMSTAIQNRMHSLLHRHNIQAPQGKIDTGENREWWQKLKLSELENLRLKQEIKTLRLIRENIVEVERELGRLSNSERWGDQAVYLMQIPGVGIIVTMTILSAIGDIRRFESPKKLVGYAGLGAGVHDSGQKHRGKGITKFGRKELRWALVEASWQAIRSNPRWRAEYDELCKRKHQNQAIVVIAHKLLVTIWYLLNKQETYHHSNEEDLAYKMLTWAWHMDKSALNGMTNQQFAKYGLIRLGKGEELTRIVRGGLPRRIASKEEVLVLKPELCLKQ

SEQ ID NO: 485251 - protein, 343 aa, unidentified
MIFIGMDVSSKEFVIHAIDQRQQKVFEGRIAPSRAGLRKLVKDLGVGPKLFVFEAGNQMKWIALTLMKQEGVRIHVVHPNEIKWINQSSGKTDKVDARKMAQLARGDLLPRQVHVVEGKARQLRELVSARGQLQSKRVALMNTVRGYMKQEGVSLPEKFFQRTDWKSSLGEKSLGDTQKFIVKSFKDGIEAMERSEEEITEKMKEIQDSRCELLETIPAIGKIASRVLVGALDDASRFDNKKCVANYGGLAPTIYQSGDVTHLGRINRDGRQEVRKVLLQCAHTIRRTATHDAAPIREFFERIEKRRGKKRAVVATARKLLTIAYGVLKSGAPYDPMRLRAFA

SEQ ID NO: 485252 - protein, 318 aa, unidentified
MDVAFKSFVGIDIAKRTLDVHVLPERTSLKQQNDSKGRGQLREKLPPPGECLIVVEATGGYERALVAELIDAGYQVTVVNPRQVRDFAKACGTLAKTDRVDAAVLALFGQRMGELRIQAKIPEKQLELQDLVARRRQLVELRTAEMNRKEHVGSKFVKKSLQESVDALNKQIRRFEKRIAALVQSDDDWKQKLEIVQSAPGIGPGTSATLIAEVPELGQLSRRKISALVGLAPFNRDSGEFRGLRAIRGGRSSVRCSLYMATLSARRSNPVIRAFSDRLKALGKKPKVIITACMRKLLVILNTMVKNNTHWNPAISTT

SEQ ID NO: 485253 - protein, 407 aa, unidentified
MSDQGGWPAFAGIDWGGAHHQLCIVGGDGKRRSQLRVTHDVAGLASLEAELSRFGDRLPVAVERSEGLLVERLQQAGHAVFPVSPRIAARARERYKVASVKDDRFDAFVLADTLRHEHEHWRALTVPSPLLAEIKALTRDRHRLLETQQATEHQLRMILEAYHPAPVRLFSSVDRQITLSFVLDYPTPAIASRVKTARMNGFLARHHYTGRVPAQVLAERMRAHLLTASAGTVAGKSFSAQAFTRLLQLLNSQLAEFDDAIAAAVAEHPDTPIFASFPGVGPVLTGVLLAEIGEDRQRYPVPAVLLAEAGLAPVTRSSGRSRSVRFRYAANTRLREAAMWWAFNSLKESPWAAAAFRHARDQRGQHYHRALRGLSARWMRILWRCWADSTTYDPEKHDSAAQLAITS

SEQ ID NO: 485254 - protein, 465 aa, unidentified
MKDKPTARTRPRRRSPAILDRINPHAAGIDCGAAEHFVAVPPASDPDPVRSFPTFTADLVRLADWLIACGVTTVAMEATGVYWIPIFELLEERGLAVLLVNARHVKNVSGRKTDVSDCEWLRDLHTVGLVRGSFRPTKTIVALRAYLRHRQTLVETASTYVHRMQKALTQMNLQLPLVISDLTGQTGMRILRAIVAGQRDPAQLAQHRDRRCHATLAQVTAALTGHYRPEHLFVLQQNLELFDMCQTQLAACDRAVAAHVATLTATVAPPAEALPAPRTRARPRGHEPTFEMRAPLHHLTGVDLTQIDGLGPYTVMKLVSEIGTDMSRWPSAKHFTSWLTLAPQNKISGGRLLRARTVPSANRAAATFRLAAMSLGRTHTALGAFYRRLAFRTGKPKAITAVARKLAVLVYRMLTGEIRYQDLGAAAYEAQHRARTLQHLRKRATSLGFELVNLATGELASDGVS

SEQ ID NO: 485255 - protein, 432 aa, unidentified
MKNDIRKQIREFQELKKSMAGSARHLIVAVDVSKRSHQALLMDGRRKVLRKLSFGQNWEGFHRMSQIAETIRAERGMEKIVVGMEPTAGYWKPLARFCELLRRETGVWEVVTVRTAATAANRRTLDSCPDKNDCKDAYNIGDLVTQGKCHRCRRRSIHGEVLCRLLRLYYRERTKAGTLKTRLRQVYGEIFPELELRGTQLFSLRWRRVLKEYPTARELWELGERLGRLLCVYGRRGHFVAEGTQVVELAKQTVGVEEGDEGVRLELQWLWEELECAEERLEELRERMAAHLQPRRDYWLLQTIPGVGPILAAGFAAEIGAIGNFGNCKELVSFAGLDVIGRQSGNWQGERRMISKCGRKYLRTVAYQAALTAVRCDGEFRQCYERALARQGERKLRRKALVKVADKMLRVVYGVLRSGQVYRHKPKEEQAA

SEQ ID NO: 485256 - protein, 376 aa, unidentified
MIAVSSSTITPTQYKGGEERRMVEYVAVDIAKKNCMLCAENEFGTVDESFHYPNTTADATSVAKRLASKYGECEGVVESTGNMWQKTYEAFESCGIKMKLANPLKTRLIAEARIKTDKLDSKILADLLRGDLIAECYVPSKEIRLQRTLLGHRATISREQNRIENRIHALLNKYDLSCPYESRMFGVHGMAWLHSLKLDGYDQRVFESLVRQLEFLKEEEARTNAEIASDAIQNSKYAPKIMSMTGFDYYSASMMSACIADISRFRSPSRLVSWVGMCPTVHQTGETIYYGKMKDGNKKAQWIMTQVANVAAQRDPRMKAYYEKIVKRHHHNVAITHVANKMLRILWYMLTEDTLYNERNERLYASKLKRLQRIAV

SEQ ID NO: 485257 - protein, 347 aa, unidentified
MAKLIIGIDFSKEKMNYCCMESESMSILQEGEVENSRKGCTQMTGRLRSLYKGLKAADFLFCGENTGMYSMEVVECFTQRKYLFWLENPLQIKLSSGIQRSKTDRLDARMIAEYACRHRGKAKGCTLPDKGLKKLRELHLTRRMLKECEVKLRNFSGSTSKASSEASKALRKVMKAIMESVKSLEKEIRETLMEEDEFKENTELALSVPGISWVTASAIILDTRNFTRFDSARQYANHTGCVPHEHSSGTSINKKPRVSKASNRYVNSLLTQGALSLLTHNPRTKEYAQRKKAEGKPFGFIVNNIRNKTIHRLFAVIRNKTPFCWDYVKGSPTSCVNLLQKDVVTFA

SEQ ID NO: 485258 - protein, 355 aa, unidentified
MTASYDYHIGVDYHKSYSHLVVQDSSGKRLRSGRVKNDRQSLGGFLEPYRENSHAVVEATRNWMVMYDWLDDICDDVVLAHPLKVKAIADAKIKTDKIDATVLAHLLRADLVPEAWAPSDKARELRIALRERMFYVRLRTMTKNRIVTVFDRYPEQAALLKKLADLFGSAGRVQLAELKVSPIDRIQIDRGLAFIGDINERIKQSEATIRAMTKANADVKLLKTIPGIGEFFARLIDAEVDDIGRFRTPKKLAAYAGLVPSTYSSGGKTYHGKIIKQGNKWLRWAFVEAVAPAIATDPQLRAQYEHLKNRGTNKARVAIARKLLTIAFHILRDQRAYQRRGTSTMEGASTISRSS

SEQ ID NO: 485259 - protein, 371 aa, unidentified
MEHTRFVGLDIHKERISIAVAESGRSCAVEYLGEISNDPVAIGRLCDRLERPGKTLAFCYEAGPCGYGVHRQLISLGHRCDVVAPSLIPTRPGDRVKTNRRDATMLARLHRAGELTPVWVPDADHEAMRDLIRLRSVVRQIVSRARQHLQGFLLRHGRKHGRGTAWRMAYRRWLSTLAFEHPAQQIAFQDYVDAVMDAERPLQRVEEQISGLLPEWNLRPVVDALQAMRGIALITAVVLVAEVGDFTRFANPRQLMAYFGLIPGEQSSGETIRRGGITKTGNAHARRALVEGAWAYRMKARIGRHKVDRIEALPKVVRDIAWRAQLRLCTRYRRLSARGKTANVVNVAIAREMVGFIWSIACTVQSAPKTA

SEQ ID NO: 485260 - protein, 338 aa, unidentified
MTQFSNFVGVDIASASFMACAGTTPWKLMVKPMKFDNREDGYASFLEWLKENNLKPENTVVCMEATGVYSEGLAYFLSASGYAVAVEPPANIARKFPINASKTDWLDCQYIAEYACRYVDKLALWQPRDEILEQVKVLLTTRQQFSVQLTAHKNALHAINRKRVLSKVAKQVHEDIIRQIAKLIIEIDTEIRRLIDSDPTFKATLLLLLSVPGIGLQLAAHLIILMQKSLDPRELAAFVGIAPIQHQSGTTVYSAPTSRHYGPPALRKLLYLAACSVRTHRKEFKQYFLRKTAEGKPGKLVLNNIQNKLLKIACAVVRSQKPFIPNYVSVNPLLLKSA

SEQ ID NO: 485261 - protein, 416 aa, unidentified
MQNDQELAAYIGLDWGDRQHAVQIQAAAGGPVEQLELEQRPHVLHAWVAQLRERFGGRPVGLAIEQRRGAVIHALMQYEFLVLYPVNPKALARYRQAFHPSGAKDDPTDAALLLDLLRKHRDQLRPWHPDTVMARKLQLLCEHRRKLVNLRGGLTNRITSLLKQYFPQALDWVGALDSRQACDFLAKWPTLAAVQRARPATVRRFYQQHNCRRAPVIDTRLDEMATAQPLTTDPAIVDTLALAVQSYATQLRPLLEAIDAFDVQIAEVFAAHPDHALFVSFPGAGAVCAPRLAAAFGTDRTRWDAATELQSHVGIAPVTERSGKALWVHHRLACPKFLKQTFHEYADQSIRFSGWARRYYDQQRGRGNDHHAALRSLAFKWMRILFRCWQDQTPYDEARYLDALRRHGSPLVKDLA

SEQ ID NO: 485262 - protein, 364 aa, unidentified
MHESMTVTIGLDVHASSVRLAAVRGDELLDERTLPYDHQVVERALRRWREVRCCYEAGPTGFGLYRHLVERGIACDVVAPGLVPQRPGDRIKTDPRDARKLAQLHAAGLLSPIRVPTAELEAARDLIRAREDARIERMRARHRLSKLMLRNDRRLPTTCWGVSRRRWLGQQRFVETPRQVAFDDYLHALDLVDARIATLGREIETLAAEPAFALLVGRLRCLRGVDTLTALGIAAEVGDFSRFATAEEFMSFVGLVPSERSSGERRRQGSITKAGNAHVRRLLVEAAWSAGRRPQIGERLARRQHEQDPLVRVRAWRCQQRLYRRWRRMAARGKPRQKIVVACARELAGFVWAIATEQPLRAEG

SEQ ID NO: 485263 - protein, 345 aa, unidentified
MNKISVIGLDLAKNVFQVHGVDGEGEVVVRKQLKRSQVRRFFTNVEPCLVGMEACGGAHYWSRELARLGHTVRMMAPVFVKPYLKSNKNDRKDAEAICEAVQRPSMRFVQPKTPEQQCVLHLHRARRLLVRQRVALGNHLRGILSEYGIVLPQGVKALSWRLPGLLEDAENDLPMLTRDLLAECKEEYDQLMERIERVEGRIKAWHATNRVSQRLASIPGIGVLTASALVATVGEGQDFSNGRQLTAYLGLVPRQASSGGKVRLLGISKRGDGYLRGLLIQGARNVIYHIRRRLRAGQPGGNAWVEQLLQRSHPNAVAVALANKMARIAWVLLVRNQTWCPASPV

SEQ ID NO: 485264 - protein, 344 aa, unidentified
MSEIKRIGLDTSKAVFTLHCVDQTGRQVLQTNLRRAQMATFFNKLAPTEIALEACGSSHHWARELAALGHQVRLIPPQYVKPFVKRAKNDRNDAEAICEAAGRPGMRFVPVKTTTQQAQGMVLKVRETLVHQRTQLVNALRGHAAEFGVIAAKGTSQVILLLEAIATETAIPPEAREMLALLGQEIEHLEAKLDEIEMKLTAAHKANPVSQRLATIPGIGPIIGLTLAVEIDPAAFQSGRHLAAWIGLTPKEHSTGGKQRMGGISRAGNERLRRLLVTGATAVIRFATRPGNKHASEWLLKLLQHKPRKLVAVALANKMARIAWAMMKSGETYRRSQAAATVAA

SEQ ID NO: 485265 - protein, 467 aa, unidentified
MAPGSRRSKGSSHNLQVLNPRSAGVDIGSRFHVAAVSPDLASDPVRRFDSFTVNLREMVEWFATCGVTTVAMESTGIYWIPLFELLISAGIDAVLVNARYAKNVPGRKSDINDAQWLQRLHSYGLLRASFMPDEELAALRSYVRQRDMLVRRRASHIQHAQKALMQMNLQLHHVVADIMGVTGRSIIDAILCGERDPDKLAMLRDRRCKNSAITIAAALDGNYQDEHLFELRVAIELFDAYSEQIQASEQMIQERLSALAKEDAEEQCSHSYGAEPADRGEQSARCRKRSCSFDPRPVIQSMDCHRILEIPGLGPSSLLTIISECGLDMTKWPSAKHFTSWLGLAPHNKISGGKLLSSSTNRGARQAASAFWTAALVLSRTSTALGAFHRRVAIRIGKAKAVVATARKLATIYYQVLRYGVSGKDPGVEAYKASQQQRLMTGLKRRAKQLGMSLVPLEKTVSMTGVS

SEQ ID NO: 485266 - protein, 378 aa, unidentified
MQTTAAPREYSEEKVLFLALELSNSKWKLGSTMGVGSKARERTIAAGDLGALHEEVSRAKRRFGLESSARVVSCYEAGRDGFWLDRHLRHAGIENIVVDPSSIEVNRRSRRAKTDRLDVGKLLRQLMRWWSGEPKVWGVARVPSVEAEDQRQLHRELEALKRERTRYTNRMTSLLVTQGIRLKVSRSFLARLSAVRLWDNSPVPAGLRSRLEREYVRWTLVQEQIAELEKQRRSALRTARDRGAQTARRLYRLRGIGENYAWLASMEAFAWRRFDNRRQVGGMAGLTPTPYSSGQIQRDQGIGKDGNRRLRAATVEIAWGWLRFQPDSELSKWFQERYGPGSRRSRRVGIVALARKLLIALWRYLETGVVPAGAVLKT

SEQ ID NO: 485267 - protein, 334 aa, unidentified
MSIVSTVGIDLAKNVFSVHGVDADGVVLIRRTVSRAKLTQLIVQLPACLIGMEACSGAHEWARRFATFGHSVKLMAPKFVAPYRKGGKNDGNDAEAICEAVARPNMRFVPVKSIEQQSDLTLHRVRQGFVEERTAVLNRIRGLLAEFGHVLPLRAAEVRRRVPELLETLPTRVARCVRDLLEHAVRLEAKALEYEREIRAHVRTNALAQRAQTRLGIGPLTASALVATVGNAHDFKNGRQFAAWLGLVPRQYSTGGRTRLGHITKRGDPYLRTLLVMGARAVLQGALRLKDPLSRWALALQQRRGYHRACIAIAAKNARIAWALLAKDAVIAAA

SEQ ID NO: 485268 - protein, 343 aa, unidentified
MDHFAGLDVSVKDTSVCIVDGTGKIVREVKVASEPEALLAVLTNGTYRFKRIGLEAGPLSQWLFSALAEADLPVVCVETRHMRALLKAQINKTDRNDARGIAQMIRVGLYRPVHVKTLRSQKLRMLLTHRKLLQSKAIAIDNDLRGTLRNFGLKVGMVGAVKFEARIRELVEDLPDLAILIEPLLVVRWVLREQVGILHRRLLAIVRDDDVCRRLMTVPGVGPVVALTYRATVDVPARFRKSKSVGAVFGLTPSRDQSGERDCQGAISRCGDEMMRTALYEAAQVMLMHSVKWSWLKAWAMKIARHRGRNKAIVALARRLAVIMHRIWVDGTEFCWTREAAAA

SEQ ID NO: 485269 - protein, 388 aa, unidentified
MIYVGIDIAKLNHFASAISSDGEILMEPFQFSNDADGFHMLVSRLDSLESDNIIIALESTAHYGDNLVRYLVASSFNVCVLNPIKTSSMRKNNIRKTKTDKVDTYIIAKTLMMQDSYRFVTFYDLDLMDLKQLGRFRQKAIKQRTRLKIQLTSYVDQAFPELQYFFKSGLHHKAVYALLKEAPSPQDIASMHMTHLSHLLTTASHGHFKKEQANELRVLARKSVGANDSALSIQITQTIAQIELLDSQLKKVETEMTEIMTFHDSVIMTIPGIGYINGGIILGEIGDIHRFSTPSKLLAFAGLDPSVYQSGNFQARRTRMSKRGSRVLRYALINAAHNVVKNNATFKAYYDKKMAEGRTHYNALGHCAGKLVRVIWKMLTDEVEFNLD

SEQ ID NO: 485270 - protein, 383 aa, unidentified
MLQTTDHLDRETAAAQGDPARYLVSLELSRSTWLVTTLAPDSEKLSRHQVEGGDADALLALLDRLKARTEQRLGRPVQIVTIQEAGLDGFWLHRRLERHGIESQIVEPASIAVPRRHRRAKTDRIDGEVLIRTLAAWLRGEPRVCSMVQPPSPEEEDRKRLTREREELLAERVRLVNRIKGLLFGQGIRDYQPLRRDRWQRLEALATGDGRPLPARLEAELRRTLKRVDVVCGQIEEVERARDTMAAATAPTAALTQLKGIGPETAARLWVEALYRSFANRRQVAAYAGLTPTPWQSGDSDREQGIGKSGNPRLRTTMIELAWLWLRHQPGSALSRWFRERVGDRRGRARMTAIVAVARKLLIALWRYVTQGLLPDGAELKAA

SEQ ID NO: 485271 - protein, 351 aa, unidentified
MPRATSNANVIATIGIDIGKNTFHVIGLDDKGAIILRHKLSRGQVYARLANIPPCLIGMEACVGAHHLGRQLSALGHDTRLMPARYVRPYSKGQKNDFRDAEAIAEAVQRPTMKFVAIKTVEQLDLQGLHRIRERLVCQRTSVINQIRAFLLERGIAVRQGLRTLRTEMPIVLAKTDKLSQRMIHMIEDLCMDWRHLNGRIETVSKEIETLSEQDDGAKRLMTVPGIGPIISTATVAAIGTGEVFSKGRDFGAWLGLVPKQMSTGGRTILGPISKRGNRYLRMLFVQAARAVLLRPQSWEKHGLKLWIEAAARRLNRFKLAIALANKIARIAWGVLHGGRNFEVRPMNQVA

SEQ ID NO: 485272 - protein, 359 aa, unidentified
MMDGSRGKPTMTVGIDLGDRYSYLCLLDTESGEVIEEGRLRTTPEAFRRRFGSEQWMRISIEAGTHSPWVSRLLGECGHEVLVANARKLKLIYAESRKTDQIDAQKLARLARLDPKLLSPIEHRGESSQAHLALIRSREALVRTRARLINHVRFTVKPFGHRLPKCSAQGFHKKVAGGIPEFLEPSLGPILQTIGELTDRIREYDRELEAAAEELYPETRLLRQVQGVGPLTALAFVLILEDPMRFANGRAVGAYVGLVPGKDQSGDNDPQRRICRHGNELLRRLLVGCAHYSLGPFGEDSDLRRHGEKIAHRGGKNARKRAVVAVARKLAVLFLHRLWLSGEVYDPLYNARRAGEYAA

SEQ ID NO: 485273 - protein, 425 aa, unidentified
MGFITPQHLTDSLPYHWFVGIDWGSQTHQVCVLDRPRRCVAEREVHHDGLSLAQFATWLRELSAGEPTQVAVAIEMPHGAMVEMLVERGFAVFAINPKQLARFRERHSVAGAKDDRRDARVLADSLRTDLPSFRAVRLSAPELLVLRELSRAEESLLQEFRRTANRLRDHLHRFFPQMLQLCPAADEAWLWDLLELAPTPAHAQLLSEKQVHQVLKAYRLRRRQAPKVLTCLQAPALPVAPGVAEAAQAHCALLMPCLRVLAEQLRSCAQQVNTLLSILTRPTAETGPSDVAIVQSLPGVGRKITTWLFAEAAVPLAERDYEALRTQSGVAPVTRQSGKRRQVVMRRACNNRLRHALYHMARVAMQCDAEFSSVYQALRAKGQRHGQALRNIADRILRILIAMLRDRTLYNPAQRPFLTCAQMSR

SEQ ID NO: 485274 - protein, 335 aa, unidentified
MDSTKYVGMDVRKDMISIAVMNSAGKVVMESILETKAVTILQFIQGLRGNLLITFEEGTWATWLYDLLKPHVTKVTVCNHRKNALLKSGNKSDRIDAQKLAELLRNGSLSAVYHGENGLRTLKELSRSYLTISKDLTRVMNRLKALYHSWGIAGAGTQVYAPCHRLEWLSKITEVGVRGRAEFTYQQLDGLQALRQGVRRDLLAESRKHQATKLLRQIPGIGPIRAALLVALLQTPDRFRTKRQLWAYSGLAIETHGSGEYRYLEGQVRRSKKPVALRGLLYRYSPIQVQGCDASRMVISPLLGEERWSYHVPSSFVHGCTAHDVVRDVLLGFVG

SEQ ID NO: 485275 - protein, 368 aa, unidentified
MSLVVLGVDPHKQSHTATALAAGSQQQLATLRIPASTTGYAQLLGWARQFPQRRWAIENARGLGCHLTQWLLARGETVQDVRTTATARVRELSRGRGRKTDALDAAAAAGIAAVQGDAEQLQPEDETVVLAVLEERRSNLVGQRTRSVNQLHAVLRQLIPGGAPRKLRADKAAAQQRGVRAVTAADRARKQVAWDLVAEVRGLDRRLTMIGKRIQDTVTALGSRLTQTVGVGPIIAGRLLGRTGQASRFLMAAHFASYTGAAPVEFASGERVRHRLSRAGDRQLNHALHIIALVQVGTPGCAGYHYFRRKLAQGKTTREAMRCLKRRIADHVWRIMISDEQARNHRQLQAACHCDDSARWSWRWPDPV

SEQ ID NO: 485276 - protein, 360 aa, unidentified
MEIYRTSVGLDVHARSVVACGLDRSTGEVFERRLTPDCREILEWVGSLPGPAMVTYEAGPTGFGLARSLVGAGIECVVAAPSKLQRPAGDRVKTDVRDARHLARLLHLGEISAVTVPSVEQEAARDLVRAREDCRGDLMTLRHRLSKLLLRQGIVYYGGKAWTGKHELWLRTHRFDVRGLQLAYDTAFDAMLAALDRRDRLDEAIAEMAADSEFTPVVTRLGCVRGIATLTAFGLATEIGDWHRLDGRSIGAYLGLVPTENSSGASRSQGGVTKTGNGHARRLLVEAAWHHRTRYRPGPELRKRWDAASLAARARGQAANRRLHARWARFDERKKRSVVANAAIARELAGWCWSLAVLDD

SEQ ID NO: 485277 - protein, 353 aa, unidentified
MKQYIGCDAHARYSVFVSVDETGRIGAPVRVDHFGRDLRDYLQGLEKETPVAVEASGGWYWFMDELEAAGLDARLVNPLEAKRRIGGRNKTDKLDARGLAILLRNGTLPEVWIPPAELRDLRGLMRARLALRSHTTVLKNRIHAALKRYGTLDGEPASDLFAKKQRLRLSLAIGRLPEETRRATLHEWELLDEVERHIGELEVRIRSRIGSIGWVRLLKSLPGVGEILGATIHLEIGDVNRFPTAAHLASYAGLVPTVHASGGKSFNGPTSKQANHYLRWAFVEAADCILMHRQRYTGHHALQLYDRVKANKCHGKAAVAVARHLAESSWWILRRREKYRQPHAAVGSSSKNG

SEQ ID NO: 485278 - protein, 402 aa, unidentified
MISVGVDVSKGKSTVCILKPYGEIVCSPFDVQHEEGAMEAFADLLAKLEGEIRVVMEATGIYHLPVLTFLQDKGYFVSVINPFAMKKYAKDNSIRGAKTDKLDSMMIANYGIEKWYKLQKYEGDEETYAELKLLGRRYRYYMELHVKALQELTHILDYVMPDIKKMFNSWNEANGKDKLSDFVEKFWHYDLITSMNLEGFTEEYLSWAEEKKYHRSRSKAEAVYELACNGIPTLSSNTPSTKMLVQEAVSVLRAVDSSLALILARMQSLAKSLPEYSTVREMGGVGDVLAPKLIAEIGDVRRLHSAKALIAWAGIDPPPYESGQFIGSKRKITKRGSSTLRKVGYEVMRVLKSHPAPKDDAVYNYILKKETEGKSKKHAKIAGLNKFLRIYYSRVMEVYQQL

SEQ ID NO: 485279 - protein, 350 aa, unidentified
MIIIGADYHPGFQQIAFVDTDTGEFQEGRLQHREEAEKFYRDLAAQGMQVGVGMEASGQARWFEQLLSELHFELWIGDAAEIRTRRVRKQKTDRQDAQLILQLLLEDRFPKIWVPSWENRDLRQLLWHRHRMVQARTRIMNQLQAVALNEGLRCKKRLWRKHGREQLEAFRLAPWASRRRRDLLELMDRLNPTIAELSQAIEQEAKKFPEARCLMTHPGVGPLTALAFVLIIGRADRFQRGKQIASYLGLVPLEDSSGNRRRLGHITKQGSSMLRFLMVEAAQVTVRSVPQWRSKYFHLMMRRGRKIAKVAMARRLAIALYWMWRKGWDYERVKKFGSHAGQLETGDGVQ

SEQ ID NO: 485280 - protein, 393 aa, unidentified
MTATHSHDSTTASPVLYLAFELGWGEWKLGFTTSLAQPVRQRTVRARNLKALNEEIAKSKQRFGLAAETPVRCCYEAGRDGFWLHRYLSQQGLDNLVVESASIEVNRRARRAKNDRLDVEKLVRMLLRYHSGERQVWRVVRVPSVEDEDGRQLHRDLQTLKAERTQHTNRIKGLLAGLGLEAEVTADFAERLPALRNWDGVAVPARLQERLLREFARWQFVDRQIRDVENERARKIRTSAEEPERKVRKLLELRGIGANSAWLFVREFFAWRQICNRRQLGALAGLTPTPYDSGDSAREQGISKAGNRRLRAMAIEIAWCWLRHQPTSRLSQWYRERFGGGNSRMRKIGIVALARKLLVALWRHLEEGKVPEGAEIKPSSRKRLPAAGEPALA

SEQ ID NO: 485281 - protein, 346 aa, unidentified
MITIGIDPHKDTHTAAAVEDATGQLLGELTVPGTEDGHRHLRAWAHELAPNEAKPRFALEDCRHVNGRLERFLLAAGETVLRVGTRMSANARQGARTYGKSDSIDALAVARAALREPNLPQAGHDPKLRELKLLVDHREDLVGERTAHSMRLRWHLHDLDSGLEPYARTLNDEKVRRGLAQRLGRYGEGVQVRICRELLLRIGELTRAIDALRKEIATRVRPMAPALLAISGVGELVAARILVEAGGPGRFTSDAALARHAGCAPIEVSSGRTRRHRLSRMGNRKLNATLHVVVLTQARVHPPARAYLAKKRAEGKSNKEAFRCLKRHLVRVVFRALQEQPSPTVG

SEQ ID NO: 485282 - protein, 427 aa, unidentified
MRKENIKRLARKEAVKGDDLILGIDIGSRFHAVVFQSSDGKVLRSFEYIYNSERGFSYLVTEIEKARKQYKLKGVHIGFEPTGHYWKNIIYYLSGLSYEVHFIRTTAVKSQRELDESSSSKTDLSDANNIASLVREGKFIDARVQHGVYKNLRDAGKLRARIMRMKTSTLCRLKMLLHTYFPEVLEHFWSMDCIGLWRLIKHAPFPEDVKNIGESKLIELLKVKGVKKSKLESQVGGILAAAEGKSIGLKASEFDRHNILNCIENLELYHEQLLKIKNEMEKLLNQTNYWELMRSIPGVGVVTAATFLGELGDPENFKDAKAIIKFAGIDPKENSSGLKKSRSKLSKKGRYLMRTTIYFISMRLIYRADEFKTYYKKKLETKTIRGRTLEKKEAIFAVAIKFIKVLHAMFRDKSTYNASKTEYKLAA

SEQ ID NO: 485283 - protein, 320 aa, unidentified
MAMTAHRVILGADVSKDWLDISCHGDHGATRIDNARQAIDAFLKSYPDAAIAVEVTNTYHELLVDRAIKRGLEVYLVSGYQLKYYARSIKQRMRTDPIDAELLARFLHREIDDLKPYVPKSPAFRQLWQLIKRRTLLVRHNDQLRQSGVGARSLKRQFQSLIRSNQHVIDLIEKRMHALVNALGWREEVARVKTMPGVGPLTAIALVFAYRSGDFIHSDPFVAFMGLDVKTKDSGKFKGKRKLTKQGDGEYRRLLHCAAMAAARTNSYFIERYQALQARGLSTTAAYVVIARKLVRIAFVLMNKQVNFDSNRLKGACNAT

SEQ ID NO: 485284 - protein, 347 aa, unidentified
MELHAIGIDLGKTLFHLVGLDSSGNVIVRKRCSRTQLLKYTANLQVQRIGMEACSGSHFLARALREQGHDARLIPAQYVKPYVKTNKSDYIDAEAIAEAVQRPTMRFVPIKTEEQLDLQTVHRVRERWVTRRTAVVNQIRGLLLERGLTLPKGRSHVDRALPEILTDPTLRLAGSFRVLLGQLQLELEQLSARIEQMDAVIQETARENEACQRLTAIPGIGPVTATALVAAIGNGAGFRRGKDLAAWVGMVPREYSSGGKQKLLGISKRGNSYLRRLFVQGARVVMQYRTKQAPGLSCWLSLLMARTHQNVAVVALANKLLRMAWAVLCKNETYRIPALAAPCVRTQ

SEQ ID NO: 485285 - protein, 466 aa, unidentified
MKHNQRTPVGKRRKSPSLLERIQPAAAGIDCGEKSHYVAVPRERDPQPVREFRTFTTELYHLADWLAQCGIKTVAMESTGVYWIPVYEILEERGFEVILVNARNVHNVRGRKSDVSDCEWLQELHSVGLLRPSFRPAAAIVALRSYLRERATLVKEAATRIQRMQKALTQMNLQLHTVITDLTGTTGLNIVRSILAGVHDPEQLAVHRDPRCKADKAELVAALTGNYRAEHLFSLRQNFAAYEFHLGQIAECDAAVEALLRNLAAQQPSPSAALPPPRRKPTANNHAPHFDIRTPLHRLTGGADLSQIDAIGPQAALQLVAEIGTDMSRWRTAQHFTSWLTLAPNNKISGGRLLSSRTPPSANRAAAVLRRCAMSLTRTRTALGAFYRRLAVRIGKPKAITATARKLALLVYRVLSGDLVYQDPGANAYHQLHLARELKSIRRRATQFGYDLIDRNTGEVLLNPVS

SEQ ID NO: 485286 - protein, 375 aa, unidentified
MLYLGIDQHRKQLTVNLRDEQGTILLHRQVSTTWVKVRAFFAELRQRAEPQGGFAVLVEVCGFNEWLLKLLAEYGCREIVLAQTEHRSKKKTDRRDANSLGELLWINRGRLASGERLAHLRRVRPASPSDATDRQLTALRKRLAEQRTRALNGIQHLLLKHNRQQESPTKGLQTKAAREWLRTLPLDDVDRLEMDGLLDQWKLWDEQLEKIDAKIKVRQAVHAAAVIVATVPGLSRFASLAIASRIGDIHRFPRPSSLANYWGLTPSCRNSGDARQRLGSITKEGSAVVRFLLGQAVIHVLRVDGHARSWYQQIKKRRGSKIGRVAVMRRIATMLWHMLMDQEPYHVDGHPCRGKREQTQTSQPHPWGTAVPQTP

SEQ ID NO: 485287 - protein, 323 aa, unidentified
MNKDINYFGIDISKDVFDVMNEKSVHYQFKNNASGFKKFCKLLNNTSHCVMEATGYYHYKLAYYLLENEIKVSVENPLSVKRYIQMKLSKIKTDKSDAKMICSYAKNVDLRLWKGDSKDQQACLQLTRSLSVYTKQSTAIKNKLHGEDVLGIPSKDVYRSLKRTLKNIQKEMKILEGKLHELIKKEHQELLTLMESIPGIGRKTGVMLLVLTDGFNRFQSAAELCSYAGITPVIRQSGSSVRGKARISKVGNQKLRNLLFLCSFNACKYNKACKALYDRIVAKGKSKKLALLAVCNKLLKQAFAVAKSRIPYDENYRSTLVIN

SEQ ID NO: 485288 - protein, 350 aa, unidentified
MPGEELDAVIGVDTHRDTHTAALVDVVGRQLAVLVITADAAGYARLLAWVAEHVPGGRVLWAIEGTRSHGAGLCRALAEVGARVTEVDRPTRRARRAGKSDAIDALLAARAALAAGFVRQPRIDGDREAARLLLVERDRLVRHRTAVLNQMRDLVLTAPEELRQRLRDRSIAGLIAACSVLRSGGSDEIETRVRVQSLRRLARRARALTEDAKTVETDLKALTAMNVPQLLAEPGIGPIVAAQLWVSWSHPGRIRSEAAFAALAGTSPLPASSGQVTRFRLNRGGDRHLNRALHQVMITRLSCHSPTREYVLRRIGEGKTQREAQRCIKRYLARRIWRLLDHGTPTPAAA

SEQ ID NO: 485289 - protein, 317 aa, unidentified
MNNSKVQIPVNIGVDVGKANLDIALHPTGEFYSIPNSEAHIRRFVKILKGYSIERIVVEATGRYEHALVQACDQVSLPIIVVNPTSVRRYAQAIGVLAKTDRIDAQVIAKYAATLKPEFKPIPDKTSQKIKDLLTRRSQLLDMSTMEKNRLQILPKTLHRSINSLLKMLQSQVKTITQQIDQEVAKVDHWRVKAEILTSVPGVGKVLTYTLLSELPELGSLNRKEIAALVGVAPINRDSGKLNGKRRIRGGRHRVRTVMFMAMLSSIQCNPVFKRFYEHLKAQGKLPKVALIACMRKMIVVLNTMVKNQEPWREIMA

SEQ ID NO: 485290 - protein, 412 aa, unidentified
MEVVYECCGGLDVHAKTVVACLITKGRKEIRTFATMTDELLELGDWLSSVGCTHVAIESTGVYWKPVFNILEGLLTVILVNARHIKAVPGRKTDVRDCEWLADLLRHGLLKASFIPPLEIRELRELVRYRQTLVTEHTAVANRMQKLIESANIKLGQVASDVLGLSGRLMLRALAEGEQDATKLAELAQGKLKSKKAELRRALAGRLTQVQRWVLAEFLTRVEELEVALTRVEARIGEEVAACTDPFVPEAVALLESIPGVGARTAQTIVAEIGVDMGRFPSAKHLASWAGVCPGNHESAGKRKSGQPTKGNKSLRTVLVEAAWAATRAKGTFLQAKYHRLVKRMPKQKALGAVAHRLLVISYHLLSRRVPYAELGSAPLDHQQVERQRRRLVEQLKTLGVTVTMEEATSAA

SEQ ID NO: 485291 - protein, 320 aa, unidentified
MENIALIGIDLGKNSFHIHCQDHRGKAVYRKKFTRPKLIEFLATCPATTIAMEACGGSHFMARKLEELGHFPKLISPQFVRPFVKSNKNDFVDAEAICEAASRPSMRFVQPRTESQQAMRALHRVRESLVQDKVKTTNQMHAFLLEFGISVPRGAAVISRLSTLLEDSSLPLYLSQLLLKLQQHYHYLVEQIKDLESQLKRKLDEDEVGQRLLSIPCVGTLTASTISTEIGDGKQYASSRDFAAATGLVPRQYSTGGRTTLLGISKRGNKKIRTLLVQCAGVFIQKLEHQSGKLADWVRELLCRKSNFVVTCAWQTSWPE

SEQ ID NO: 485292 - protein, 487 aa, unidentified
MAKRKKSTFERLSSDGMNRKQRRDLARRLAGQDPGLTIIHSNAGGIDVGNESHFVAVPPDRDANSVQEFGCWTADLKRMAAWLKACRIDTVAMQATGVYSIPLYDILTGYGIQVVLVNAQHTKNVPGRKSDVQECQWLMKLHTYGLLRDSFRLEETMESVRTIWRLRDRHVKDASRAVQHMQKALTKMNIQLANVITDITGVSGQAIITAILKGERDPWKLADLKHEMVKASREEVARSLEGNWRDDLLFELRQAVESYHFAHLQMRECDRQLERFLASLPTRILERPHPPSDTTAATAQPTKKARKPKKTRRNEPTVDLATELKRICGVDLTSIDGIDVITAQTILSEIGTDMSGFKTEDHFASWLGLTPNKDITGGKIIGSGKRKVQNRVAMALRMAATTLLRSQTYLGGRYRHLRKQLPSHASAIKAMARYLAVLVYRILTHGEAWVDRGAARFEQRRTELEMASLNSRALAKGFKLVPITEAS

SEQ ID NO: 485293 - protein, 320 aa, unidentified
MIAQDDLVVVGIDVAKDKVDSCIRALALRQTFANTAQSHRKLIGWLRKHQVNKAVMEASGGYERVWARVLREAGIEVRIVDPKRVRSFALSAGRLAKNDAIDAEMIAWFAETFSEAPGQTHDAAREELQALVKARLGLIDFRMRLVSQSEHAAAGLVQKAHAHILKSLASEIAKLEAAISAKIKSTPDFAERAEIIESVPGLAETSSANLVAGMPELGQVSAGIAAALIGVAPYDDDSGKRRGERHIKGGRRWVRNAIYMPCVGAATQSNPMLKAYYQRLIAKGKEPKVALMACMRKLIIILNTMIARRQKWDPSRYALN

SEQ ID NO: 485294 - protein, 421 aa, unidentified
MNKIKPKRTKVVNGNVLIATIDGGKDKHYGYYRCPDGTEGESLPFWNNGRGFQEFWERISSAATAHGFEEIIVGFESTGPYLEPLVQFLRSKKGVRLVQVNPMHTKRLKELSGNSPLKTDRKDPKVIADIITLGHALTVVIPEGAAAELRRLTQARERTTASRTRLLNQMQSLLVLSFPEFLQVMKDISTASARYLLQHYPTAQDIVGLGESALAAVLRKVSRGKLREDRARALFEAANESVGIQEGRHSMLLEIRMLLDTIASYDRFIDQVETEMERQLKLIPYSHIILSIKGIGAVTAAGLIGEVGDFTKFKTISEVMKLAGLDLYEVSSGKHRGKLRISKRGRSHIRKLLYLASLSAVKKGGVMHAWYRRALDRGMQKTKALVAVSRKLLGLIYALVRDHSVYVDNYEQQKPIYQEAA

SEQ ID NO: 485295 - protein, 410 aa, unidentified
MDAVLERCAWLDVHQETVVACVISGPLDRKPQQEIRNFGTTTGELLALSDWLTEKQCSHVAMESTGVYWKAVWNVLEEHFTLVLGNAKKIKNVPGRKTDVKDAAWIASLLRCGLIEPSFVPPVDIRDLRDLTRYRRKLQGQVTSEKNRIHKILQDANVKLTTYVSDLFGKSGLALLEAIGNAEVLDADSVKGLVHTQLKKKVPELLEALNGRVRAHHRWMIRRHLVHLRQVEEHIEALNGEIDQLLKPYEEEIDLMITIPGIQKDAAASILAEIGTTMEVFPSENHLASWAAVCPGNNESAGKKRSSKTNKGNKGLKAVLCQVAWAASKTRNSRIAAFYSRVVKRRGPKKAAMATAHLILKICYFMLRDKTTYQELGWDYLPKKEKGLDYWVSKIKSMGYSIQLQDIHPA

SEQ ID NO: 485296 - protein, 400 aa, unidentified
MRAVFGIDVSKASSEVAILVNGEKVHGYTISNDALGFARLLGDLKTVHKPEIIFEATGVYSRRLQAFLEDNGYAYTRLNPLEAKKQLDSLRVRKTDQIDAEKLAQSQFVLNRKTTYVQEEIYQNLRDLSRFYQNLTEDIVRAKNRLHKALQVTFPELENILSTPSGEQYWNLVIAFPCKDFVLDLSKDELSESIRQSTSKRISDKRVAYLAEKLIALANQSYCAVKKTSPMLEEVRYYAKELFRLSEQRQTILDEMVELAQPLPEYDILLSIPGIAETTATSIIGELGDIRRFQSANQINAFIGIDLRHYESGNFLAKEHITKRGNPYARKILFKCIHNIASASNTNPCHIADFYEKRKRQSQTTSTKPHTIASIHRLIRTMYYLIMHNKLYDYASTQNR

SEQ ID NO: 485297 - protein, 412 aa, unidentified
MLFIGDDWAEDHHDVEIVDGRGHRLAQRRLPEGLEGIARLHALIARCMPEQWAQLDPVEAASRVKIGIETERGPWVRALVAAGYEVFAINPFSTARYRQRHSSSGAKSDAGDAHVLAEIVRLDRAHHRPVAADSDDGEAIKLLARTHQTMVWERTRHLLRLRSALREYFPAALQAFDDLDAPEAVELLAAAPDPDRAARLSKAKITAALKRANRRAVQDKAAQIQSILRASALHQPAPVQGAFAVIATSEIRIIATLNLEIERLSEVVAKHFGRHPDAEIYASQPGLGVILGARVLGEFGDDPHRFANAKARKNYAGTSPITRASGTKRIVAARYARNDRLGDAVQQWAFSALRGSPGARAYHNTMRARKIGHQAALRQLANRLVGILHGCLKTRTLYDETTAWAHPSSAAA

SEQ ID NO: 485298 - protein, 387 aa, unidentified
MRTVCGLDVHKDSVFLCILHDSGEIIEKVFGVLTHQLRDMRRMMQSHGVSEVTMESTAVYWIPVWRVLEPHFHLKLVNPYFIKQLPGRKSDVKDAQWIAECTLKDLVRGSFVPPERIQQLRQYDRRIFDLDAEIVRKLSKLDGVMQRCNIRLSNYVSNTDTKSYKNVVRKLCEGVTEPEELIKEIYSRITNRHGRETILAALTGVVSEAEKDTMRQLRDELDLAEKHKQECLDKMMHICKTYYPEELRRLMTIPGIGERAATSLIAEIGVDMTKFQTAAHLASWSGLKPRNDESNKKIKSRRITHGNVYLRKTIIECAWGASRTKDCFFSRFSYHQTQVRKKNKMKVLVAVARKLLIAIWHVLHDETDYKDFGVNIDCETSVSGSNG

SEQ ID NO: 485299 - protein, 407 aa, unidentified
MGIACGIDWSERHHDIALVDHDGNVVARRRIGTGIDGFAELLAAVAEHSEQPEDVAVAIETDKGLLVAALQATGFTVYAINPRAVARYRERHGQAGGKSDPGDAVVLADILRTDRHRHRPLPELSELAAAIKVLARQHQEAIWARQQTVNRLRSLLVDFFPNALTTFPVLTHRTALAVLAAAPSPAAAAKLTRRRVVTLLHRCGRGDRPGLADQILRDLRAPALRQPLQVEEALALSVLGLIAVIVSMQTTITRLEHALTETLERHEHAKLLRSAPGVGPILSGRLLAEIGDDPTRFATADGLRAFAGTAPITRASGRSKVVSTRHIRNRRLADACHWWAFAAITKSAGARAHYDARRAAGDAHNAALRNLANKLLGRLWWCLVNNQPWDDQAAWPRQLADDEHDAA

SEQ ID NO: 485300 - protein, 429 aa, unidentified
MNSTQNKKIEQVKETTMIVGIDVGSEKHYFRAFSWRGIELTGKPVAFSNSMEGFNSFYNSVVELMQKNELKEALVGIEPTGHYWFDLGQFMGEKNIKFVMVNPHHVHKTKELDDNSPSKNDRKDPRVIAGLVRDGRYFYSYMPTGVYAELRNASNRRFVLVEEQSRAKNRLHKWIAVYFPEYKGIYTHIDAKGGLLVLKQASTPEEIVRLGVEGIIKIWKDAKLRGNGHKKAMLILNAAMKSIGLKAGLTEARMEIQDLIEDYELQTKRLERVNDLIKELCQQVRYADKLLEIKGIGITTVAGFIAEVGDITRFDSTKELQKLAGLELVADSSGKHNGKTKISKRGRKRLRYLLFEAAISVVGKNEEFKEIHRYYTTREKNPLKKMQSLIAVACKLIRVFHVILTKGISYDASKMLKDIRHPGEQLKAA

SEQ ID NO: 485301 - protein, 464 aa, unidentified
MTRGDRRRNARRERLRAMLPRDGVVIGIDLAEDKQALAVVDHDVRVLARKTVRVKAFRLGEALDWAAGQARAKGFTQVTVACEPTGPRWLQVQRLCAERRLPLVCIQPLVSHIAREQQDYTTHKTDEADCVLIARLATELHCYIPEELDETWAHLRHLGRRRAQLITTATASAQRIRDFLSVAWPTVTETCAQPLESKTWLAAMQAVTSRCGGQPGRLAAMGLEAFTALVRGAVAGWGGQKAWGTISRKIFGALTDTEGVVVSSRRGLLRRCADELGDLQRTRTQLRAVEADMAAVLGELGLSRLADIPALTAVGAAAILAETGDPRRYDSSSSLVKHAGLSPSDNASGAFYGEAHISRRGRPGLRLTVWRAVWPMLRFNPVLAAKYAAMTKAADGAAEAAHIQAGTGSRQATAAAAAARARRAKARVACAASLLRWIYSLVVHSTSWDPDVASGPATCPAEAA

SEQ ID NO: 485302 - protein, 313 aa, unidentified
MSPNTSPTLYAGLDIAKANLQFHLAGQFHDLPNTPAGHRRLRQLLAAVPGSHVVCEATGGYERDVVAALHQAAVPVSVLNPARGRHFARAQGQRAKTDRIDAAVLTACGLALQPPPTPARSELEQQLAELVRRRAQLLAALVAQRQQAQHLTVAALCRQARGLVRRLEHDLAQLEELLAQLRAQSEALNQRVQRLASIAGVGPTTALGVLAELPELGTLNRGQAAALAGLAPHPRESGAWQGRRTTGGGRAAVRRALYMAALSAARCNRHLRSFYQRLRQAGKPAKVALAAVMRKLIVLMNHALKNPHFSLAT

SEQ ID NO: 485303 - protein, 422 aa, unidentified
MSYCPVAGIDVSKRFSDMCILSPDNKIFAQEKIYHDETSINRANALLQKAERLFFRKPVIVMESTSHYHLILFQFFSEHGYDVIVVNPLQSNSMKDFSIRKRKTDRVDAFKLAMIYRTKTLRPSQIPQTATRALRQLCRHRAELLNDVSSYKNRLTALLDQTFPGYDKVFSDVGGVTSCAVLVRFPTPTILLVEEESELVEVIAAASKSGYSFAKKKAGLLISAAQKAQTLGIHSCADETLIVCTIQMLRTLSESVLQIEAAIDNLLAQRKEMRNNVSLLQSIPGVGSHSAALLLGEIGDISLFKKPKQLAAYFGLDPTERQSGSFRGTKNKLSKRGSPYARAALHMGVVNSICKRGKDSAANPVLLSYYEKKCKNKPAKVAQAASMHKLVFIVFAVLRDQKPFELKTPEQHAVEQGFVKAA

SEQ ID NO: 485304 - protein, 414 aa, unidentified
MEVIYERCAGLDVHKKSVTACRIIPAVRGGWQKERRRFGTMTDELLKLSDWLREAQVTAVAMESTGVYWKPVFNILESEFEVILVNARHIKYVPGRKSDISDAQWIGELLQHGLLKASYIPERPQRDLRDLIRYRTSLIGERAREINRVQKVLEDANVKLASVASNVMGVSGRQMLEAIIAGNEDPEALAALAKGRLRSKIPDLERALSGRIRTSHRLLLRLHLEHIDDLTNKIKELNEEIDRLMLPFDEDEQLRRLDDIPGVGREVAQVIIAELGVDMNRFPSAAHAASWAGLAPGKNESAGKNRSGKITPGNRHLKAMLVQAAHAVSRTKDNYLAAQFRRLAARRGKKRAAIAVAHSILVIAYYMLRDGTEYRDLGGDYFDKRNKEKLQRNLVRRLEGLGLKVMLEPAAVAA

SEQ ID NO: 485305 - protein, 464 aa, unidentified
MGTQPAAALTETWDVPAPTGFLYLGIDIGRRKHLVAAIPEPRMWDGSWERAPVRAIATTGLGFRQLTGWLGELGFSPDQVRIGMEPTGGWYGRTVAAWLERHGYRVDWLQNFALHDRRHLMIGKQTKTDALDARLIARLLFERERLGLKGGFLQRPPRNTDALRMLVRNRVRLVEQRTRCRNQLTTIEDVLFPELKDFFKTSITRPSARLLLESFPTPDHVAAADPADLDRIVVGQGHASALRPRLMALQMAAADSAGLTTDTEPILHTQEWLLYQLRLLDGQIQQVEAAIGAVLEDWPTQDRVVLASFPVMTVVRQAVLLASIGDVACFRDDRQLRKLFGWYPEARESGSSLSRHHLGRSGNRLARRELWLWSWELLTPVRGDTPFRDYYRRLRARGMTGPVAMGHLAGKLISVLFHCLRSGTPYDPQRHARDLGIIDACDGGEAPDLSSHGANDPDPREPSS

SEQ ID NO: 485306 - protein, 349 aa, unidentified
MPILADQVDVVIAVDAHTDSHTAALISPLGAVWGELTVPADGHALHRLTSWVERTVDAPRRHWVIDGTRSHGVGLLRQLRKAGERVAEAPRLKRGSRRGRGKSDALDAIAIGRAVLAAPTLAEPRADGIREALRLLLVTRRHYSDYRTATVNLLKSLILTTDEQVRDQLRRKTTTAQVRHLLTLTVPVDSPYHIRISVERMIDLARRIADLDKTLAQNKKELTALVKQSCAVLLEQVGVGPVTAAALLCAWSHHGRVRDEAAFASLAGVNPIPASSDRTVRHRLNRGGDRTLNAALHTIALVRRRVDPTTQNYVARRTTDGKSSREINRSLKRYLSRSLFRIMEATATL

SEQ ID NO: 485307 - protein, 356 aa, unidentified
MTKRNKLDFTGQPIYIGLDVHKKSWSVSIFTRYGEYKSFSQPPQVETLVHYLRHHFPGAVYYAVYEAGYCGFWIHDQLVRERVHCTVVNPADVPTKNKERKSRRDRVDCRKLSRSLRNGELEGIYVPPRGKVEDRSLIRTRLSMGRKQTRCKNQIKGMLLFYGVEIPEEKQMGHWSRRFIRWIEGIRLERSSGDMALQIHLEELSHLRQIIAKLNRAILALSRTEEYRPWVRLLRTIPGISTLTAMILLTELGEILRFRSIDPLCSYVGLIPDTQSSGEKEYIGGVTQRGHSHLRWLLIEASWIAVRKDPALLMAFDQYCKRMRKSKAIIKIARKLLNRVRYVLKNQAEYVPCVIE

SEQ ID NO: 485308 - protein, 346 aa, unidentified
MHATTIGVDLAKTRIQLAVADEHHQVQQRLRLSRTRFEAFVANHPKCLFVMEACGSSQPWGRKLKSMGHDVKLLPAQYVRAYVRRNKTDAADAAALIEASRAPDIRPVPIKTVDQQQILLLHRLREHYKHTRVARINLLRGCLREVGIDIPKGVARGLAAMREALALADNGLPDALRPFIAEGLAEITALKQRTLDLERQIQNLTQDDELVQRWLAVPGIGLLGASALRATTGELNRFPTGRHLASWLGLTSREHSSGEQRRLGRISKRGDAYLRTLLIHGARSALQAAHRAERSGRSLNSLQRFALGIEQRRGTNKAVVALANKIARVLWAMAVHERHFDGHWND

SEQ ID NO: 485309 - protein, 307 aa, unidentified
MAKLVEIITLGIDVAKDQLVVCTWPSQEGFELVNERRTIKRWLRSLNGPVQLAIEPTSHYHMILVEEAVALGFAVYLINPRQLVHYREAVNVRNKTDPQDAWLLARYLHQEAKQLRPFQPQDRRAQCLWALLLRRATVVQSRQRLQQSFSTMRLSIQALLTQFKQLLVRLDRQIQRLIRELGWWSDYQRCLSIPGIGPANAAALVATYHRGVFANSDAFVSFMGLDVRIRESGQYRGKRKLTKRGESELRRLLYCAANAACCYECFAAYRQRQLDKGLSKIAARVILSRKLARIAFALMRKQESFMR

SEQ ID NO: 485310 - protein, 411 aa, unidentified
MEVVHVRCAGLDVHKATVVASVRVPGSRRGERHSETKTFATTARGLTELAQWLIGHGVTDVAMESTSVYWRPVYAVLENTVHVILVNARHVKMVPGRKTDVRDSEWLAQLLECGLLRASFVPPPPIRDLRDLTRLRKTLIRERGHHVNRIEKTLELAHIKVSGVVTDLMGKTGRAILQALSAGSDDPDQLAEYAQGLLRKKRAALREALVGRLTPHYAFLLQQHLALIEALDTHIATLDARIDEAMMPFAEAAALAQTMPGVAGRAAQAILAETGVDMTPFPTAAHLASWARLCPGNHESAGKRQPTTTGKGATWLRATLQQVAWAAIRTKQSYYRALYHRLKARGGAKKAIVAVQHALIVALWHMLKHRVVHHDLGADYFERRDPARLRRHHVRRLEQLGYDVVLVDKAA

SEQ ID NO: 485311 - protein, 418 aa, unidentified
MSLTGVLVRLFVGDDWAEDHHDVEVMDEAGKVLAKRRLPEGVGGIAQLHGLIGRHLGENADAAEVIVGIETDRGPWVAALIAAGYTVFPVNPLQACRYRERHGVSGAKSDAGDAHMLADMVRTDSHQLRRAAGDSPEAEGVKVLARTHKTLIWERTRAVQRLRHQLREYFPAALAAFEDLDAPDVLELLGKAPDPARAARLTRAQVSAALKRARRRNIPDKVTAILAALRSEQLGQPAALTAAYAVTVRSLIAVITTLNEQVKALQGQVEEHFGQHPDAEIYLSQPGLGAILGARVLAEFGDDPRRYRDGKARRNYAGTSPITRASGKKKIVAARFIHNDRLIDALNAQAFAALSASPGARAFYDELRARGMEHNDALRRLASKLVGILHGCLKTGTVYDEATAWGHRENLPQSSVAA

SEQ ID NO: 485312 - protein, 339 aa, unidentified
MTIQDQTIIEGTKPLFAGIDVGSEELVLVIRSNGTSCKAQKFPNTAASHKLLVKKMAKLAGIKVCLEATGAYHFDLSIALHDGGVLLMVVNPKASHNFAKVLMKNSKDDDVDADTLAQYAERMDFVAWTRPSNEKIAIRSFSRQINMLTRQKAASKNQLHALNASQENPKAVLNDAKLAITQLEKRILRLSEAALVLIKSHPDFERIFQLLNSVKGIAEASAIALMGELLMLPPGLSNREWVKFAGLDPCSFDSGKSVHKKASLSKKGNSHIRSALYMPAMSAKQHDPHVKAYAQHLIDKGKLPLQAICAVMRKLLHAIHGMLKDDKPFDNTRFYAIPT

SEQ ID NO: 485313 - protein, 398 aa, unidentified
MSSEKYIGLDVHQATISVAVLDSRGKLVMESIVETKAATILDFFAGLRGTLSVTFEEGTWAAWLYDLLKPHVDKLVVCNPRKNALLKDGNKSDRIDARKLAELLRLDNLKPVYHGETGVRMLRELARSYLTIVKDLSRVMNRLKALYRSWAIPCAGRDVYYTRHRAEWLGKIREAGVRRRAEQLYQQLDMLQHLRQQTRGELLAESRKHTITVRLRQIPSLGPIRSALAVALIQTPHRFRTKRQLWAYSGLALETRTTGEHRYVKGQLRRSKKQISIRGLNKDHNHDLKGLFKAAATRASVQPGLFQDFYQRSLAKGIKPTMVRLTPGAQDCSHYADSMEEGRKLRRCETKIASRLSVSGQEPSISSDLSGGGRWFLRRSGSRVSIPIACRRTSAAGT

SEQ ID NO: 485314 - protein, 274 aa, unidentified
MDEIARVGVDLAKRVIQVHAVNASGLVVTNRPIARDKFLSWCARLPAGCQIAMEASSGSHHWARKLQELDLNPKIIAAHLVTPYRSQGKRGKNDANDAGAICEASSRPNIHFVPIKTVSQQGMLCVHRLREGLKEERTACINRIRGLLAEFGVVVAQSYQALERCLAEVLEDGSNGLPGLARLVIDRARQQWRELDEHLAWCDARISAHIREDQQAKTATQLMGVGPVTASAVIATVGNFQQFKNGAQFGAWLGLTPSQNSSGGKNKLGTGTGR

SEQ ID NO: 485315 - protein, 377 aa, unidentified
MKKELYLGLDVHKDCIKRAVAEEGRKGEVRDMGAISNDLHAVEKWISQLRKVHGQDVILRACYEAGPCGFGLARRLGQLGVECEVVAPSMTPTRSGDRVKTDKRDARKLARLLRAGELTPVYIPEATDEALRDLCRARTDAVDDRRRSRHRLKGFLLRHGYRYQGKSAWSAAHERYLRELVLPHPAMKVILEEYLISIQAAGERIQRCEVAMRDLLEKWRLAPAVRALMAMKGFQTVAAMILVSELGEVHRFAHPRQVMAYLGLVPTENTSSDKRRQGSITKCGNAHARWLLVECAQHYVAPPKVSKELSRRQEGQSPEVRAISWRAQNRLHRRYTRLLARRLQRNKAIVAIARELSGFIWELLRTQSCYQAQSPSI

SEQ ID NO: 485316 - protein, 411 aa, unidentified
MDVVHERAAGIDISKRDAKVAVRVPGKRPGSYTTTVKTFGSTTAQVLALVDYLLSQRVTTVVMEATSDYWKPFYYVMEDTLPVMLVNARHARNIPGRKTDVSDAAWLAQLGAHGLLRGSFIPPEPVRHLRDLTRARSMAARDRARIVQRLEKFLESSGIKLSAVASDLTGVSARAMLEALVTGERDPQLLADLARRTLRRKIPALIEALEGRFTEHHAFMVSQYLAQLDTQQATINALTARIETVIAPFGAARQALVTIPGISHTVADVIIAETGADMTVFPTAAHLASWAGVCPGLNESAGRIKSTHTRHGNAHLKAALGVAAMSASRTKDTYLAARYRRIAVRRGPVRAVVALERTILTAVWNMLTHHEAYSDLGGDYYTRRDPVRARNRAIRQLESLGYQVTVQPAVA

SEQ ID NO: 485317 - protein, 482 aa, unidentified
MKAKPPEKIQETTNRSTRGHWNEMNRKQRREMMRKIQSEDISLEVVHPDAAGIDIGNESHYVAVAPSRDKQPVRCFGCTTGELKAMADWLKQCGIRTVAMQSTGVYWIAVYDILEQAGLEVYLVNARETKNLPGRKSDVQESQWLMKLHTYGLLRNSFRPSQEIRTMRTYWRQRNDLVQSAGRHVQRMQKALTQMNIQLANVLSDVSGVTGQAIIKAILGGQRDPHKLAEFRNPRVRASEEEIARSLEGHWEEDLLFVLQQEQDGYEFCQKQMAECDRQLNHYLEQREDRSQGAPLPEEKRKGRRKKKSGNKPQFDLRTGLFRMSGTDLTRIDSIDVMTAITILSEAGWDMSKWETEDHFVSWLRLCPDNRISGNRVIGKGRLPTNNRVTIALKMAASALRLSDTYLGAQFRRFRTRLGAPVAIKAMAAKLARLVYRMLRYGMQYVDKGAATYQAQHRQLQIKQLKWKAATLGYQLIGVPAA

SEQ ID NO: 485318 - protein, 320 aa, unidentified
MSDSLDIGVDVDSKEFVPAVADRKAGDRIANTRAGIAQWLNTLPQRCRIGMEATGRYYELLARMAGQAGHVVYVINPRLIKHYGRATGSRGKTDAMDAEAIARYVKKENDRLREYVPRTDEQQQMHDLLRKRQTLVKTRARLEQSFGVSKSAPGELSDLFCALAGTLSELESELQRLGRDGEHGTLYKRLLTIPGIGPAVAAHLIYYMTRWPLANANAWIACTGLDPRPNESGGRTGRRRLSKQGAPVLRQMLYMAAMGLKRCRRGQPLYDELSKRGHPSTAVFNILARKLAKIAWGVFKSGRDFDPAMLKVGQACFQQA

SEQ ID NO: 485319 - protein, 390 aa, unidentified
MERPMQKLNDLSRSLTALEPDGTLIAVIEMSLSSWLIGGILPGVERQPLKKLAVDESALLKLLHRWREEAEKAGHRIERIVVAFEAGRDGFWLARWLKARSIEAYVIHAASVAVSREHRRAKTDRLDSELLKRAFLGWLRGERDHCKMVAIPSIMDEDAKRPNRERESLIGEQSRIVNRMKAALIRLGIRGFNPKLKRAAGRLDGLHTPEGEPIPPNTLAELRRDMERRRLVSNQIRRIEQARLQRLEQEPDDGPHAMVRLLARVIGVGIETADMLVREVLSRNMRDRRAVARYAGLTGSPDESGRKCREKGLARSGNARVRRGMIQLAWRLLMFQKNSALAQWFRARTENARGTRKTMIVALARKLLIALWRLVHEGVVPDGIVLRPAQ

SEQ ID NO: 485320 - protein, 358 aa, unidentified
MAEVRPKRRYARMKVLIGVDPHKASVAVAAVDEAKGELVESASFPQDRTGLRCLKRWAKRFPERRWAIENSGGLGRHLAGRLAATGESVVDVPPKLSARVRVLSTGNARKNDGLDALATALAASRNGRLAAVDPEVGSEALRLLSERREDLVAERTRALNRLHGLLRDLVPGGVARTLSAHRASRILRGIRPKGTSACLRRRLASEILRDVRTLDRKIADLNGRIEAEVEASGTTLTEIFGIGPILAARIVGTVGDVGRFPTKAHFASYSGTAPVEASSGEAVRHRLSLAGNRKLNYALHMVAVCQARSDARGGIYYRKKIAEGKSRKEALRCLKRRVSDAVFRNLVADSQAPSRSAA

SEQ ID NO: 485321 - protein, 350 aa, unidentified
MKIIGCDYHPGFQQIAFVDTETGELQERRLQHREEAEKFYRELAAQGMKARVGMEASGHARWFERLLAELQFELWIGDAAEIRARRVRKQKTDRQDAQLILRLMLKNDFPQIWVPDWENRDLRQLLWHRHRMVQARTRIMNQLQAVALNEGLRCKKRLWREAGREQLEAFPLGPWASRRRRDLLEMLDRLSPTIAELTQTIEQEAEKCPAARRLRTHPGVGSLTALAFVLIIGRAERFQCGKQIASYLGLVPSEESSGDRRRLGHISKQGNTLLRFLLVEAAQVTVRSLPEWRSKYFHLAMRRGRKIAKVAMARKLAVQLYWMIRKEWDYEQVKRFGPHAGQPEHRRGVQ

SEQ ID NO: 485322 - protein, 318 aa, unidentified
MQTSIVFIGVDVGKFELQVAASDGEIVTGVLPNNRSSIVGWLKRLPATSVIAMEATGGYQELLARTAHERGFEVYVLNPTHVHHYAISLGNRGKTDRLDAAVIAQYIAQHHKMLHRYEPISPELQEVRALQALRSTVVRVGTSLRLSAQRHGCVSSHQKKALASLTAWSEQLEREMIAKIKAQNDWAKTYGLLTGICGIGPITGVALTSLFSRIDFASSDAAVAFCGLDPRPNESGRKVGRRRLSKQGDKAARTLLYNAASSAARTEQFKDYYAMLRVRGLASTAALVIIARKLLRIAYGVWRTGQPFDPEKLRPTTA

SEQ ID NO: 485323 - protein, 435 aa, unidentified
MFNNHKEDEVRSVGRAIGLDVHRDFCEVAIAQDGEVRSSGRVDTTPERLELFGSSLHPRDRVALEVSGSAWEVARILERHVVRVVVVSPADTGIRQARAKTDRLDARTLARLLAAGELDAVWSPDERCRVMRRRLSRREQLVRARSRAKNEIHAVLVRRLVGRPPASDLFGVKGRQWLAELCLPLEESETIEACLRHIEFLDSEIAAVERHIAAQALDSAEIRRLMTVPGVNVICAATFMAAVGEIRRFQNPRALTGYLGLDPRVYQSGSAPAQGGHILKQGSASTRWALVEAAWSVVRQPGPQHAFYARIRARRGHGIAVVASARKLACLFWFLLTRGEDYAHQQPSLTAKKLRLLEIRAGARTLKGTPTGVWATRQAMREGERKLAEQAEASYQRMVSDWQAAAPKKVGASVTPGRASQKPSKGKVTRQTTSP

SEQ ID NO: 485324 - protein, 343 aa, unidentified
MKLSRVGVDLAKNVFQLHGVDRHGRVVWRRRLTRKQWLSALMAQADPGCEIGMEACGGAHHWARELQSRGYTVKLIPPQFVKPYVKSNKNDANDAEAICEAMSRPNMRFVAVKSIAQQDIQATHRIRAELMGQRKAKANQIRGLVAEYGLIAPLTLRALRSAIPHWLEDAENGLTDYFRSLLNGLWSDLVLLDDRVLEMDREIERLANSNEVTRRLQQLRGVGPMVATALVATVGTAEQYPKGRQMAAALGLTPRQNSSGGKQRLLGISKRGDAYMRTLLIHGARAVVSQAKHREDRLSRWVTDIATRRHPNVAAVALANKTARMAWAMLRHGTDYDPDFVMS

SEQ ID NO: 485325 - protein, 345 aa, unidentified
MNIIRVGVDIAKSVFHVHGVDRHGHTQWQGKYSRSKWLDALSRKVPAGAEIGMEACASSHYWARELQRRGYHVRLIAAQFVKPYVKSNKNDRVDAEAICEAMSRPNMRFVAPKTVAQQDIQAAHRIREELVGQRTAKANQIRGLIGEYGIIAPVGIQQLRRTLPGWLEDAENGLTDSFRVLLNGLAEDLRHLDDRIKALDDRITESVRQDPVAKRLMTLRGVGPLTASALSGALGDGKAFRKGRDFAASLGLTPKQHSTGGRDRLLGISKRGDSYLRKLLVHGARAVLRHVDSKDDGLSHWLKSLAARKHINVATVALANKTARIAWALVHSETDYDDSLAAGSM

SEQ ID NO: 485326 - protein, 479 aa, unidentified
MTTRRLVGIDLGIASAHTVRVLDEGGEPVAKRKAWPTTESLAAVETAALAGCPQGTRLEVVMEPTGPAWLPIAVFFDARGHVVHRVSSAKAADLRRFLSRHTKTNGIDADTLARLPLVDPGGLRPLVLPGEEAAALDRRVRACDRLTRQGAEHKVRLRDLVRQVMPMSPLGADLGAADLAVLERYADPNALVRAGLKRLTGVIVKASKNHQGADRAAEWVAAAEAAIELYAGHPAVAFCDLAAEIATEVRLLRATQNELATHATEREAAYRFVDPAGLARTLPGVAAIGGPALTAAMGDPTRFPNAKAFRSYTGLAPRASETGDTDRKGQPMSKAGSSLLRTTLVRAADHARKQDPQLARIYYVQMVERGKDHLGALCVVAAHLAERFWVVMNRQMPYVICDTDGRPVTADEAKAIIAEHWTVTAEVRARRRSRKMGKAPQQVLKAHVRSHTKGVDKRGDLPHHESFPPQSGHVNRRTA

SEQ ID NO: 485327 - protein, 312 aa, unidentified
MSEIIRIGMDTSKYIFQLHGVDASEQVVLRKRLGRNGMHSFFAKLPPTVIVIEACGAAHCLARELGKLGHTIKLIAPQLVKPYVERNKNDGRDAEGLCEASSRPRMRYVPVKTAEQQAALMLLGVRDQLVMRRTQLSNTIRGHAAEFGLIEAKGLDKLASLLAAIEQGDSVPVLARELFAMLARQYAQVQVELKAIEAKLLAWHRANALSRRLAEIPGVGPITAAALVMKAPDPHAFRSGRLFAAWLGLTPKDHSTAGKTRLGKITRAATRDCVSSSWSARPRWSSRRTGSTVGDRSGCSNWSSARRRSRPP

SEQ ID NO: 485328 - protein, 369 aa, unidentified
MLYLGIDQHKRQLTVNLRNEDGSVILKRQVSTQWEKVRTFFADLAEKTKSDDGFMAILEVCGMNPWLLAMLKEYGCREIVVIQPAKRSVQKTDGRDAAELSHLLWVHRHNFLGGECPLGVRRVLPPSPQEADDRQLTALRARLTRQRTAVLNGIHKLLRKHNLEQFQPTKEFQTKKVRAWLTELELPALDRLELNMLVSQWDLLDSQLDVVEAKIAERAVADEQVQLLESIPGVGHYSALAIHSRIGDIDRFKHADSLANFFGLTPGCNNSGENTKRLGSITKRGSKLVRYLLNQAVIKVLRFDSDMRTWFKRIKRRRGAKIARVAVMRRLTTILWHMLKKKQKYRYKAIVKRHEAFDAYAGTATVQGN

SEQ ID NO: 485329 - protein, 332 aa, unidentified
MQKDFYIGVDISKKTIDVAIYKKEKAGKGSACEKFQNSPDGFKEMKKWLRKCGVSLTSSLFCMEATGHYTYELCLFLEQQEVSYSVQSPLHLKRSFGLAHGKNDKVDAHRIAHYAYLHREDIKLSQLAANSIRKLKALMAERKSLVVEMARCKAQLKEVGCHSSSPGSIKRTKELLEFLETQVQDIEIDMAQAIDSDEELKSNYQLLLTVSGIGIVNAINTIIATHNFKMFDNARQYASYIGVAPFEHISGTSVRGKTHVEPGAKMLKADLTGAVRTCINHDKEIQKYYERKISEGKPYGVVANAIKFKLLLRMFAVIKRGTPFVKKADHLI

SEQ ID NO: 485330 - protein, 391 aa, unidentified
MIFIGIDIAKNSHFASAVNSDNEVIVKPFKFTNDDKGFNLFADTFKNFDLSNCLVGLESTGIYGDNLTTFLFSKGFKIGRINPIQTDSLRSSNIRKTKNDKIDTLLIAKCLMLGNYTLVTEKDIEIIKLRTICRFKFDVKKSQSKAKVQLVTCLDIAFPELSNFFNGNLHSKSSYALLTKYPTAKIIANTRIDALTNLLYSASKGHFKIDKAIALKALAKHSIAMDNPAIGKQIQMLIEQIQMLQKQIDLLDIDITNIMEKLNSPILSIPGIGIWLGAIILSEIGDITRFSSATKLLAFAGLDPSVRQSGNFNATNTKISKRGSKHLRFAINYAAELIIWNNDTFYQYYTMKLAQGKSYLNAIGHVAHKLNRVIFKSVSYTHLTLPTNSLV

SEQ ID NO: 485331 - protein, 340 aa, unidentified
MNKINTIAIDLAKNVFQICILSPDQKVLKNKQVSRAQLPLILAKQEKSIVAMEACYSSHYWARLFADMGHEVRIIPAQHVKPFVRGNKNDHNDALAIAEASSRPNINFVPLKTIEQQDIQALHRIRDKLISRRTSIVNQVRGLLSEYGVIMPQGLAGFTKHIALLLDPSDTRLTTRLKRQLAEVKEEYDNLSRRRLSIQKELDEYVLENVLCQRLMTIPGIGIINATALFAAVGNASQFANPRELSVWLGVTPKQHASGGKSFMGRISKRGNQYLRKQLIHGARTLIHRTKGKNDKLSVWVKQLVERRGVNKGAVAIANRLARLAWILLRRNEDYKAVPA

SEQ ID NO: 485332 - protein, 379 aa, unidentified
MPGLPDETPVMQNRTCVGLDVHARSVWACTVDDESGEMRTSRISPKTAEIVKWAQALPGEVEVAYEAGPTGFGLARALIAAGMQCHVLAPSKMERPSGDRVKTDKRDCEWIARLVRLGELPVVVIPSEGQEAARDLVRAREDVRGDLMRSRHRLSKLLLRQGIVYEDTAWTAAHGKWLRSQSFDKPGVQFAFDEAYDTVLTTLARRDRLDKAILTMAAEPAWAPVVARLGCLRGVGTLTGFGLAVEIGDWHRFTGNSIGSFLGMTPSEHSSGGSRSVGSITKTGNGHARRLLVESSWHHRKPYRLSAEMIRRRDGQSPLVRARADQANRRLNQRWRTFDARKKRPTVAAVGVARELAGWCWSLAVMDGEKDNSAMNRQR

SEQ ID NO: 485333 - protein, 343 aa, unidentified
MQAITTVGLDIAKSVFQVHGVDAAGKVIIRRQLKRRHVLPFFQRLPACVVGMEACATSHHWSRELGALGHTVRLMPPAYVKPYVKRQKNDAADAEAICEAVTRANMRFVETKTPEQQACLMLHRTRHLFIRQQTSVINAIRAHMAEFGIVARVGRNGVAELLAVAADPTDRRLPEVARTCVAALGVQLRMLKAQILEFDRRIGAWHRSNQTSKRLDQIPGIGPALATALVASVPDPKAFRSGRNFSAWIGLVPKQHSSGGKDRLGSISKQGDRYLRGLFTAGALAVIRYAKIHGTKHRPWLTALLARRPTKVAAIALANKLARMAWAIMAKGERYKEPAALAA

SEQ ID NO: 485334 - protein, 462 aa, unidentified
MRRPESYGLLGSRTAQSEVRPQSLAIRAPRVLVRVSDQGQQCRKGRYSLNQIACGIDWAEGHHDVALLDHEGQLLARRRIVESVEGFAELITLLAEVGDSTEDPIPVAIETPRGLLVAALRATGRPVYAINPMAVARYRERHSQSRKKSDHADAVVLANILRTDAPIHRRLPADTDLVRQIAVLARAHQDATWRRSRASNELRSLLREYFPGFLHAFAARTGKLTSPEARAVLGVAPTPAAAARLSKTQLVAALRRAGKQRGITTLAAQLQVALRRPQLRQPQLVEDAMGAQALALLATLNAECDSVERLGEATIAAFTQHPDHEIITSFVGLGDITGARMLAEIGDDRARFTDARALKAFAGAAPVTKASGRSISVTHRRVKNNRLAAVGFVWAFVAAGRDGPGRDHYLARRGHGDGHPVALRHLFNRMLGQLFHCLQSRQLYDPARAFPPRLADPQPVAA

SEQ ID NO: 485335 - protein, 321 aa, unidentified
MEEEKVYVGIDVAKASLDMAVHQCEQRWRFTNDDEGISQAVSCVKERCPILIVLEATGGIELPLTAGLAAAGLPVAVVNPRQIRDFARATGKLAKTDAIDAQVIAHFAAAVKITPRPLPDAEAREFSALLTRRRQVMGMITAERNRLRPTCSKVVRDLIKDHIASLEREVDKLDDSLRDSVRGSSVWREKDDLLQSVPGVGPVLSATLLAALPELGTLNRKQVAALVGVAPLNRDSGNFRGKRTVWGGRAKVRSPLYMATLAATQHNAIIRAFYQRLRAAGKENEVALTACMRKLLTILNAILKHRTPWGYTNSFVIGPCS

SEQ ID NO: 485336 - protein, 435 aa, unidentified
MRLKEYGRNANKRKEYVHQPDLLLVGVDVSKAKHNACMGTQTTMSCRKLEFTHTHEGFKRFEQTLRVHMVKTGRQRILVAMEPSGIYWQALYERLKSCDYEVCLVHCQAVRNNRKTMPDGTSKTDEKDAASVFDLLRQGKFFLPVDRDPELKAAYRLMQRHMALKKRVSQLRNQLRAAIHLAFPELNPLLKDLTQPTALRFLQANPTPESILRNGRTRFLEQWQPRQRCGQWRPETFHGIYDVAQASIGLQDPSRLDEFEITTLAGDLVDALTKAQLWLDKAIELLVHRADYQLLLQLPRIGKPTAAAILTAIGDIHEYQNGKQLVKLAGLDLRLFESGSSIRKLPKISHVGSAYLRYWLYHYAMRLIAHEPHFKAYYQRRKQQSPGKGSGQRALIAVCDKAIRMIYRILTDHAPYDPKKDKSIAEYYAAQRKAA

SEQ ID NO: 485337 - protein, 333 aa, unidentified
MVTAAIDVHKQVLQAVVLDGGTGVFVEERLGGREALADWAMRWRGRVSAVAIEATTGWRWVARELQACGFDVRLVDPGQAKALQGRKRRAKTDRLDARWLCLLLSKQMLPEAWLPPAEIQELRDRTRLRKALVDDRTRWAQRLHALLTQEGWPCRRERLLTRSGRRWASSLLLPASAGAQVALYLRLLETLDVEVAALEAELRRFARQDRRCRALEGIFGVGPILACHLLAEIGDARRFRRARQITRLAGLDPVVAESADSRRRGKLAKQGPPLLRWALVQAAQHAPRTTSPDRALYASASRRCGTQRAKLTVARKIGRRAYHVLRQLEEQAA

SEQ ID NO: 485338 - protein, 422 aa, unidentified
MSISKLALDASSQDYMNKKSVTYPVLKLYFGGVFMYLIGIDISKYKHDCFIATEAGIPIKAFSFDNDRLGFDLFLETLTSLDQSQEIRIGLESTGHYGSNLKQFMCASGYTYLEFNPYLTHMFSKALSLRKTKTDKVDAKTISSMLGSVDYKTLHTRFYHINELKQLVRYRHVQMMNRSKVLIEITNILDRIFPEFKPFFNERLSGTAIFILKKFKSRERISKLSNKDYESIKSYSKGKISYVRVQKLKSLALSSVGYETKSDLLLLKLAIKHYEDLSDTLECVDEEIISFMRDIPQTLTSIPGVNLISAAIIIAELGDFKNFTNPAQVISFAGLDTSVNQSGTMETRGHLVKRGSGLLRMTLWQITFSSLRLNPKLYDYYLKKRAEGKHHKVAMVHCVRKLIRTLYYLGVNQLTFDHSLFK

SEQ ID NO: 485339 - protein, 422 aa, unidentified
MERMIERCAGLDVHQATVVACILINERGKRPRKELRTFGTMTQELEALRDWLAVARVTHVGMESTGVYWRPVHAVLEEHFEVIVGNARHIRNVPGRKTDVKDAEWIADLVCCGLIRPSFVPPKPFRELRELLRYRRKLTEAQAAERNRLQKQLEIANIKLGSVATDVFGVSGRAIVRALIDNTTSPTEMADLARGRLRSKRDELTHALKGRLDDTHRFLLSMQLRRVEDIEQLIEILDQRIAEKLELYQAEMALLMQIPGVDWVVAAVLVAELGVDMSVFISVHHLAAWAGLCPGSHESAGKRRNTTARKGNVHLRTMLVGAARPAARTKGSYFKDKYYRLKARRGAKRAGVAIAHKILVAAYHMLARRVDYRDLGEAYLDRIDQTRTAANLKRRLERLGYVVSISPQNPGPDTSTPVPAAA

SEQ ID NO: 485340 - protein, 363 aa, unidentified
MTSMTTTTADVTGGVDTHGQTHHAAALDPVGRQLGDREFPTTPAGYRALVDWLQTYGHLERVGVEGTGTYGAGLTRQLRAAGVTVVEVDRPDRKARRAQGKSDPLDAYSAARAALARKATGVPKTQDGRVEAIRLLRVARSSAVKARSQATNQLKALLVTAPAELREQLRTLSNIKLIAACARLRPAGDIGDPEHATKTALRRLARRHQYLSEEISAADTELRTLVTAAAPRLMALPGVGTEVAGQILITAGDNPDRLRSEAAFAHLCGVAPIPASSGRTHRHRLNRGGDRGANNALYIVVLGRLRYDSRTRAYAARRTTEGLSKPEIIRCLKRYVAREIFTILTARAAGDPSRQAHPMSTAA

SEQ ID NO: 485341 - protein, 264 aa, unidentified
MDATTVAIDLAKDVFQVAVANRAGRILDRQRFTRRQFERFVDTLVEDTSVIMESCGTSHYWGRRMQARGLRVQLLPVQYVRPYVRRNKTDRADTDALLEAARCGEIRPVPVKTVEQQTLQAIHRVRTQCGRGQHTDARDRLEPCRDWMRAGDLRELAIEAGDLLLKTPRESSTGARRYLGRISKRGDVHLRCLLTHGARAVLRVALQLAARAPDRLTRLQQWAVSIATHRGRHKATVAVANKLARIVWAVWHYDVAFEPQPRVA

SEQ ID NO: 485342 - protein, 344 aa, unidentified
MDKFDVAGVEVSAKILVVALKVNGQLRTHEFANTAASHQQLIGFLLKHSRCVRVCLESTGLYGLDVALALHAEPEIEVRVANPRSVRHFAQAMMQRSKNDPLDALLLAEYAQRMPFQAWQPPSLPGRQLCALTRSIHQLTEMCTMQKNRLHAAAATATTPKFLIRELQRSLAQLQKSVQRLIQKALQLVGSHAQLRQQLELLDSLPGVGELSALYLLGELVLLSPDFSVREWVAYAGLDPRQYKSGDSVEKKIRISKVGNTHLRRALYMPVLVAARHDPHFRAHYRHLLAKGKLGMVALVALMRKLLHGIFGVLKSLQPYDGSKLFTLPLILDSKPTMKEKIAC

SEQ ID NO: 485343 - protein, 381 aa, unidentified
MDQKQTTQEKGPITKFPVLFVGFELGNSTWKMACSDGRKVRHVTVAARDLNQVERALLRAQDHFAMADGYSTVSCYEAGRDGFWLHRYLQDRGIDNVVVDSASLEVDRRLRRAKTDRIDAGKLLRMLIRYHGGEKQLWRVVRVPSREDEDARHLHRELESLKRERTRHRNRIHGILMQQGLCLPNPSKKRFLKDLEALRTWDGQKLPAGMKARLVRSYKQLRLVEDQISALATEKREQLKQVDNAKMRQVAQLLRLPGIGPVSSWAFVMEFFGWRQFRNRREVAALAGLTPTPYDSGRKLREQGISKAGNRRIRTLAIEIAWAWLRYQPHSRLSQWFSERFAGGGTRMRRVGIVALARRLLVDLWRFLEYGVVPEGALLTT

SEQ ID NO: 485344 - protein, 371 aa, unidentified
MGNNHRTKFVGMDVHQNSISIAIADDGPDGEVRLYGTIRNIRGAIDKVIRKLVSTGAELQFVYEAGPCGFTLYRHLTGNGFNCIVAAPSMIPKKSGVRIKNDTRDAIALARLLRAGELTPIYVPDTEDEAMRDLTRARNDARIAARKAKQRLHSFLLRNECIYPGKTKWIKTHFNWLAQLTMKHPAQQVALQEYIDAVNECTERITRLDEQILKAADEWRWAHTVKALQALRGVSLLTAVNMVAEIGDFNRFQNPKELMAYLGLVPSEHSSGDRIRRGGITKTGNSHARRICVESAWSYRYQARVTQLLLKRHEGLPRDVLQIAWKAQLRLCTRYRRLRARGKVTQVVIVAIARELVGFMWDIARRIPAVA

SEQ ID NO: 485345 - protein, 355 aa, unidentified
MNDEKYIGLDVHQATIVVAVMDSTGKLVMESILETKAATILQFFAGLRGTLSVTFEEGTWSAWLYDLLHSRVDKLVVCNPRKNALLKDGNKSDRIDARKLAELLRGNQLKPVYHGETGVRMLRELSRSYLTIVKDLSRVMNRLKAVYRSWAIPCAGRDVYYRRHRAQWLAKIREAGVRRRAERLYEQLDMLQHLRQQARRELLAESRKHAITAKLRQIPYLGPIRVALAVALIQTPHRFRTKRQLWAYSGLALETRTSAEYRFVEGQVRRSKKLLCIRGLNKDHNHDLKGLFKGAATMASVRPGPFQDFYQAALAKGIKPTMARLTLARKIAAITLTLWKKGENFDAEKLKSQAA

SEQ ID NO: 485346 - protein, 351 aa, unidentified
MPCKTEVAVARTIGIDTGKNTLHMVGLDQEGAIVLREKVSRTRIAARLVNVPRCLVGIEAGMASHHVARELLALGHEVKQVPPAYAKPFRQGHKNDFRDAYAVAEAVQRPSTRCVPVKTADQLDLQALHRVRSRLIGNRTAVINQLRGFLLEHGIPVRQGLRFLRQQLPQILAMRTDVLSPRMIRIIEELIGDWEHLDERIERVTDEIETLARADENCRRLMTVPGIGPIIASAMVAAIGNGAAFAKGRDFAAWLGLVPKQMSTGDRTILGRITKRGNRYLRMLFIQGARAILFRPAGWAKHSFGPWLAAAARRLHRNVLATAFANKLARIALTVLVEGRSYAARVEPRAA

SEQ ID NO: 485347 - protein, 410 aa, unidentified
MEVLYPVCCALDVHQASVTACLRAPGDGPQRRQQVRTFGTTTPELLRLAGWLTAAGCTHVAMESTGIYWRPVYNILEGRFELSLVNAQHVKMVPGRKTDVRDSEWLAQLLELGLLRRSFVPPAAQRELRDLVRYRKRLIEERAREANRVQKVLETANIKLASVVTTVLGVSARAMLKALIAGEQAPEQLADLAQRRLRRKRAALGEALTGRVTAHHRFLLDHLLRHIEFLDGAIAACDRQVETLTAPHAEALTQLDTIPGVARRTAEVIAAELGCDMTRFPTAGHAASWTGLCPGNHESAGKRLSGRTRHANRTLRQALVESARGAVRKRDSYLAAQYRRLVKRRGDKKAIVAVAHSILVIAFHVLRDGQPYRELGGDYFERLNADRLTRYHTKRLAALGYTVTLTKDAA

SEQ ID NO: 485348 - protein, 367 aa, unidentified
MSSVASAAGLIHLGMDTSKNTIVVATLLPGEQSPVTDRIVNEEAAIRRLIGAFADRSVLRCWYEAGPGGYELYRLLASMGVACQVVAPSLIPKGSSDKVKTDKRDSRRLARLGRAGELTPVRVPSAAEEAVRDLVRARDAMLADRKRAQQRLTAVLMRHGRIWRGATYWTAAHRAWIAAQRYGEPALAAAVGYYQATLQVREAELAAIEAELMPWAAREPLAGPAGRLGCYRGIAELGALTLAAEVVDWRRFPAARAFMGYTGLVPAEYSSGERTRRGHITKAGSEPVRTALTEAAWSYRFAPAIGAGLRRRQHGAAPDTLARSWKAQRRLHDRYVHLVHDGGKAAPEAVVAIARELAGFVWAEMTA

SEQ ID NO: 485349 - protein, 316 aa, unidentified
MQTFPNIGVDVAKDAVVVACAAQSFSTHSVTNQRTPLLAWLKSLPTGSRIGLESTGGYHELLADLAHAQGHVVFLLNPLDTKHYARAMGNRAKTDRVDAELIARLIAQEHTRLRPYTPPTADQRKLDRMIRRRANIVRIKSSLTLTMSNLSGFTAELKAVSNKLDALIAKIDSTMTAIAAHSPQHKEAQQRLQTIAGVGPVVGMALTNTLERVPFRNADAFVAFTGFDPRANDSDNKIGRRRLSKRGPAELRRLLFNAAMAAAKSKAWKPIYEHYRAHGWSTTAALVIIARKIARAAWSIHHYHSTFDPERITKNA

SEQ ID NO: 485350 - protein, 364 aa, unidentified
MTQGRGAEAQSNPVLQGVNMPVSEVDTFAGIDVSAHELSVALRRGQGQDKPAMAKFPNHPSGHKALVAYLLRGGGRVRVCLEASGNYSLDLALTLQAHRQVEISVINPRRARRFAESLGERSKTDPVDARVLCEYAARMPWVRWQPPSPVALHLRALTRAIADLGVIHTQQNNRAYAAAASQALPVLVVKEMQRHKKYLEQRMTRLRREAVRLIACDPELDRRFRLMLTTIGIAETSALQILGELAVLPDMLDARQWVAFSGLDPRLFKSGKSVEKRPRISRSGSRHLRRALYMPALVALRRDPYLRVFYQNLLARGKARLQAVVAVMRKLLHALFAMFRSNQPYDGSKLCAVDLAVHAIAACA

SEQ ID NO: 485351 - protein, 411 aa, unidentified
MRLFVGDDWAEDHHDIEVMDQAGKVLAKRRLPEGMAGMTQLHELTGRFVPEDAADAEVVIGIETDRGPWVAALVAAGYVVYPVNPLQASRYRERHGVSGAKSDQGDSHMLADMVRTDSHQLRPAAGDSPEAGAIKVVARTHKTLIWERTRAVQRLRHQLREYFPAALEAFEDLDAPDVLELLAKAPDPARAAKLTRAQVSAALKRARRRNIKDKTDAILAALRGEHLGQPPALTAAYAATVRSLIAVITTLNEQVKILEEQVRDHFGRHPDAEIYQSQPGLAAILGARVLGEFGDDPHRYADGKARKNYGGTSPITRASGKKKAVMARWIHNDRLLDALMSWAFSSLNASPGARAFYDELRARGLEHNDALRRLTNRLVGILHGCLKTRTLYDEATAWGHRENLPQSSVAA

SEQ ID NO: 485352 - protein, 391 aa, unidentified
MNRNTGMHAGQVIGWMSGLQVVGMDIAKSVFQLYTVDMKTGELRDKRLKRDKVLEYFRLMAPAMVAMEACGGAHHWARQLQKLGHQVRLVHAQAVRPFVQGNKTDVTDARAIWLAVQQSGMRFVAVKTEAQQAALTLHRQRQQLIKMITMQLNGLRGLLYEFGVTLPLGRKAMLAQVVGAIDSVAPVLPKMTVDSLLQQVQRIVQLRQAVDEVEVSLKQLISQDRQMQRALSIPGVGILSATAAVATMGDPHHFKSGREFCAWLGLVPRQEGTGGKVKLLGISKRGDKYVRTLLVHGARAVLLRKGQSSDWQTELQKRRHKNVAVVAQAAKIARTIWAVLAKDQDYQANHKSVRPQHSSAAAQEPSQDGSPTCPPRRSFVAGDARRRGQVW

SEQ ID NO: 485353 - protein, 410 aa, unidentified
MKSQLETLHKRVAGIDVHRMKHVVTVLVEDAGGNLTRDTREFGGFKRDLKALAAWLRELGVELVILESTGIYWKSLHARLEEVGLRIWVVNAHHVKNVPGRKTDVADSEWLAQLGRYGLVRPSFIPPKDLRELRLVSRYRRKMEATLAAETNRLHKILDDAGIKIGGLVSDINGKAARAMVDGLIDGLAPRELIQLSGRLKAPRETLLASLDGDLSARHRLVLEEIREHMRQLERHLEKLDAYLRDAMVPYAEAWSRLQTIPGIGEMSAAMILIEIGEDLSHFGNADRFASWAALCPGNHESAGKRKSGKTRKGNSTVRYLLCEAANGAIRTLSVFREKYRGLVVRRGHKKAIVAIAHKLIRTIYFMFTRRQAYHDSGFDYAAANVKKNAPRWIKALETHGYVVKLSAAA

SEQ ID NO: 485354 - protein, 419 aa, unidentified
MIPAVIERCAGIDVGRKFVVACLMVGDAKDEPTTTIRKFSTLNEGLRQLREWLQQNDCRYVVMESTGSYWRPIYNVLDDGQMQVILANSQQVKNLRGHKTDSNDSRWLAHLLRHGMIRPSFLPDRETRELRDLTRRRKQLVGCAAEERNRVQRVLQEANVQLGVVLSDVFGQSGLNMLDALMDEDASVEQIADLAVRQARKKIPQIQKALEGHQMSTHQRSLIRHSMQHLAFLEEQIEELDREIADKVNSSERLKPAVELVQSIPGIKQTSAAALIAETGTDMQQFSEAGKLASWTGVCPGNNESAGKRKSGRTTKGNPWARRTLVECAWSGTRKNESATKQLYERLKPGIQHKRALVATAHWIVLRVYETLSTGQPYQADPQPHLTIAKAQRLARHHSRRLRHLQKWLRTPDSRNAQA

SEQ ID NO: 485355 - protein, 343 aa, unidentified
MQTVTTIGLDIAKSVFQVHGVDAAGQVVVRRQLKRRYVLAFFEKLPPCLIGVEACASSHHWSRELRALGHKVRLMPPAYVRPYVKRQKNDAADAEAICEAVTRANMRFVETKTPEQQSCLMLHRTRHLFIRQQTAVINAIRAHLAEFGIVAPVGRNGVEELLGVVADASDKRLPEIARACLAALGAQLRMLKAQILEFDRMINAWHRSNETSKRLDEIPGVGPALATALVASVADPRAFRSGRDFSAWIGLVPKQHSSGGKDKRGGISKQGDRYLRSLFTAGALAVIRYAKIHGAKHRPWLTALLARRPTKVAAVALANKIARMAWAMMARGERYKEPVALAA

SEQ ID NO: 485356 - protein, 352 aa, unidentified
MKTGRKEIRTGGDLFVGIDLHKRTWHVTIETTDVELFSGSIPGEWEALHRLLERYRGCKITAVYEAGYFGFGLYDRLMECGIDCIVTPPSLIPREYGNRVKTDRRDSRKLAHLLAKGMLKRVWVPSKEERYHRQVSRRRRQLIGDRVRTQSRIKSELQFYGIDIGETKGKWGRIYLENLYRIRFNNRWMQESFDRLLDLYDFLDNQVEEETRLLKELSKTDLYRSRVEILLSVPGIGVIVAMEILLELQDVSRFRRAEELAAYVGLTPSQYSSADKIRMGRITGIGKTSLRAALVEASWKLITKDGMMKEKYERIKSRAGSKRAIVAIAHTLLLRTRRMLIDNTQYAVGLIS

SEQ ID NO: 485357 - protein, 362 aa, unidentified
MEFFSGLDVSMERTAICVVDDKGEVQMQTEVVTDPDAIAAALKPFLPRLRRAGHEAGSLSPWLQPELVKRGLPAVCLETRHVRAAMSAQRNKTDATDALALAHIVRTGWFRQAHIKTESCYRLRLLLTQRRNLKRKVLDLENTIRHSLKAFGIRIKGTGRTGFDAAVREAVADDALTSELMDAMLAARAMLWKQYRRLHDLVVKFVARHELCRRFMAIPGVGPVTALSFVTAIDDPSRFRRSRDVAAYFGLTSRRWQSGTSIDVQGRISKAGDGDVRRALYEAASALMTRFKGRDKVQTWGLALARRSCHRKATVAVARKLAVIMHAMWTDGTCYVGDAAASTSENQARAARKDGKLLGAMA

SEQ ID NO: 485358 - protein, 317 aa, unidentified
MAHLTHVGIDVAKDTLDVFLLQQKKAFTVDNLDAGLDQIIQELSTLERCLVVLEATGGYEIPVAATLYDAGFDVAVVNPRQVRDFARSVGQLAKTDRIDAEIIARFAQATQPLPKGAPSPERLALKELVTRRRQLVDMRSADKARLERVHSREVKRDLSEHIRWLDKRIGRVDKELGECVRNSPIWREKDELAQSVPGVGDTLSRTLLADVPELGRVNRREIGKLVGVAPMNRDSGRMRGRRAIWGGRGGVRSVLYMATLSATRYNPVIAALYQRLLATGKPKKLALVACMRKLLTILNVILKTGIPWSSEKTLQKA

SEQ ID NO: 485359 - protein, 341 aa, unidentified
MKKCNRIAIDLAKNVFQICIVNPSNKVIEAKRLNRRDLSNYMANQPPSRVVMEACYSSHYWGRELTRLGHAVELIPPQFVKPFLRGNKNDRNDALAIAEAADRPNITRVPIKTIEQQDIQSLHRIRDRLVKQRTQLVNQLRGLLSEYGIVTGLGHKAMCKLLAQLSDSSDSRLTAVMKYQVNLCRLEHHELSHRIDESNQQMNEIARHNPLCQILMSLPGIGIINATALVASIGNGSEFRNSRELAVWLGLTPRQHASGDKSISLGITKRGNRYLRKQLIHGARAAVSRCKKRDDDLSLWANRLVARRGMNKACVAYASRLARLAWVLLQRNETYQPRYSN

SEQ ID NO: 485360 - protein, 334 aa, unidentified
MSNVTTCGIDLAKNVFSIHAVDGRGVVVLRKTVPRARLAAVVAQLPACVIGLEACSGAHEWARRFAQHGHTVKLMAPKFVAPYRKSGKNDNNDAEAICEAVSRPSMRFVPVKSVEQQAVLTLHRVRLGFVEERTATINRIRGLLAEFGVVLPQRVVEVRRGAAATLDQLPSLAQRALRDLLAHVRVLDERIGEYERELEQHARHDERAKRIQKLSGVGPISASAIVASVAEGHEFKNGRQFAAWLGLTPKQYSTGGKTRLGRITAHGDAYLRTLLIMGARSMLQTALRRTDRLARWALGVRARRGYHRACVAIAAKHARIIWAMLAKSQPLQLA

SEQ ID NO: 485361 - protein, 346 aa, unidentified
MKYFIGLDIHSKSSTFAVVDQEGQCVLRKEVPTTEKSMESVINQINGERHLVFEECHLSQWVYIALREKVDKLVVCNPVYLAKKQGAKTDFRDALHLAQELRTNHVSPVYHDNSHWIQLRTLVSGYLDITGEIIRFKNRLKAVFRSEAIATDENNFYKSCREKASQLSNDSAKFVANNLFSQIEYLESEKEKYKGRFHHNQKTYKPIRNLMTIPGISLIRANIIVAIVCTPERFKNKHQFWGYCMLVRHIQESGGRIYGNKRIHGRKELRDIFIGAAESAMRSDSVLRDYYDALRAKGETHKDAKVALARKVASLALSLLKNNETYHDDWEDKLRKRTELRKKLIN

SEQ ID NO: 485362 - protein, 337 aa, unidentified
MKRYLGVDLHRTQFVVCTRWENGEQEIRQWRISELPKFVEQLRKDDQIAVEATGTTARFYDAVVKRVARVAVVNPHQFKVISESVKKTDRYDAQALALYLEKDLLPEVRMKPKQNRELMHLAETRDLLVKQRSALKGKINNLLAMQGIELKREALSSKIALERVLALPVSGMVQLELRVLVGQIRTLSESIAELDQRLEEEGQQLPGYENLTSIKGIGSLSATVLLTVIGKINDFADENKLAAYLGLVPRIANSNESEHSGRITKQGNKLARTALVQCGLSAKRYSPYLQRFYERIKQRRGGGKAKIALARKLVKIVYDTLKNQWVFEDFPSFTLAA

SEQ ID NO: 485363 - protein, 424 aa, unidentified
MKSTQNNKILQLTESTLIVGIDVGKETHYARAYNFRGIELAKTLRFSNTASGFESLDRWMDEIMQKHRLTDATVGFEPTGHYWFTLGDHLKRKGHRLGIVNPYHVKCTRELDDNSPTKNDRKDPHTIAMLVKDGRYRETYIPEAVYQDLREAVSEHERLKEQQSALSNQIQRWLDIRFPEFSEVFKAWTGKAALMVLKTCPTPEKIVSLGVDGVLQVWRKAMQKPSRTKAERLIAVARGSIGRVDGAKAAVVGLNHLLAQHQMSSQQSEEQETLLQELLLQVPNAAKLLKIKGVGMLTAAIIVSEIGDIHRFNDPKQILKMAGLALKENSSGKHKGKTTISKRGRRLLRKGLFQCMISILASNPEFRAMHQRNLLREKNPLTKLQSVIALCGKLVKVIYAILVKGVEYSPEKMMNDMTRSMKAA

SEQ ID NO: 485364 - protein, 383 aa, unidentified
MEALLYCCCGLDVHKDLIEACILRGEGLEPDAVRESFGTTKPELKRLTVWLSHNDCYSVAMESTGVYWKPIFEALELCSEYLENVWVVNANHMRNLPGRKTDVGDAEWIATLLRHGLLEKSFVPPAAIRDLRECSRLHRTFVQERCRYVNRLEKFLQAHGFKFSSVMKDILSVSGRKLLNILRDTGSLSEIDVIENCRRLRRSPEEISAAVCGNLSPAEQRLLKHLLHKLDSCQEDIDSILEDMRLLSQQFQEQLAIIDSVPGFDEESAMEIIAEISAAPQEHFSSGEKLCRWAGVTPRNDESAGKMKSRKTLHGNPYVKAILCQAAWAAVKVRNSPFHDWFWSHQHKLGQKKAIIAVSRKLLMLIYLLLDPEQLYQPPNQAA

SEQ ID NO: 485365 - protein, 423 aa, unidentified
MEELLIGIDWSQAHYDVAILAINGAILTEFRINNTAPDLKQLKEKIARFAVPPECCLVGIETHHNILFDFLLSCQYQVYVIAPNVVNSSRGRFSASGAHTDRTDARLIADLLRTDRQRFAPWRSDSPLLNQIKLKLNHIDNLTKTTIQHANRLEAILLRVYPQPLRTFSKLAIPIAMHFLLAYPTAAALKDLSKDEFRKFCRDHHSHPAAWIRNWYAALQQPTPEADPPLAEAYSGEIAFLAGLLLSLIEEKKRAVDETHALFLQHPDQVIFASLPGAGLLLRPKLLALFGEDRERFPSPQAVRQLAGTCPVTKQSGKKKQILFRKACNRDYRDTMQQYAMVSVQQADWAAAYYRQPRRVDITRTALFVVWLTAGRGLFGKCGKPASLITRRITCNKFTNIVHQPINSCSKLFQLLRVYLFRC

SEQ ID NO: 485366 - protein, 308 aa, unidentified
MATYVGIDVSKATLAVYMHPEARSVTLPNTPEGFQRLVDWLPRKGVENVLLEATGGYEREVMKALLVAGLPVTRVNPRRARAFAIAAGKTAKTDPIDAALLARMAELVKAPACAPDPLREELRVLVQRREQLTQHRDDERRRLRQATLPWVRDSLIDAIGYLHKQIRQVERAIADIVSRLNDALSQQLSAIKGFGHVTVASLLAYVPELGQLDRRQIAALVGLAPYNTDSGQRTGKRSIRGGRAPIRRVLYMACWSIVRHQPHFKARYAQLRSRGKCAKVALVACMRILIIRLNAMVRDQTEWRIDPA

SEQ ID NO: 485367 - protein, 297 aa, unidentified
MDIYVRPVGDYFSVENNSQGIKEALKRIKAYQPTRIIIEATGRLELPLACAATKANLPIVVANALQVHKFAASTGKLAKTDKLDAQMIAHYGEALKPRLTEIKADNIQQISDLLARRSQLIDIRTMEKNRDSIMPKEIKASIQRVIKNLQKEIVWVEEKLDKLIDETPDWSKTLAILLSVKGVGKVLAYTLLSDLPELGQLNRKEIAALVGLAPMNRESGAYRGKRRIRGGRARIRTVMFMAMMSTIQSNDKFKHEYQRLVAKGKPKKVALIACMRKMITILNTMVKNGELWDEKLA

SEQ ID NO: 485368 - protein, 409 aa, unidentified
MMKQNIIFGIDVSSKSSTVCVVIDRIKQGETFKITNDSFGYQDLLDRLNQYLITPLVVFEATGVYSLSLQAFLEDYHIKYLKLNPLKAKKLMDNNLRHNKTDKVDAYRLALIQFNAPQKLRAPQPKEYHELQNASRYYEELAQALIINKNQLHRNLQSAFPQIESILSTSSGRVYWTIVSLFPHAQYVLNHNENQVFQSLLAISGIGKQRAHYLTTRLYALARQAYPYDNESSITIRAIQRNIANLLSLSAERDNVINYMEKLAMQANARSLNIYESIPGIAKTTAVRLVAELGDLRRFDTSAQIDAFVGIDPGRYQSGEKDSHLGITKHGNHLARKILYRTITQMETVKATQPCHITDYYDKKKRSSNSRGYKKIAIASVHKLIRTMFALIKHDQLYDYNVATHNQRL

SEQ ID NO: 485369 - protein, 338 aa, unidentified
MKLYGAIDLHSTNNVTVVINEQDQVVYQKRLPNDLSLITQQLSSYRRSLQGIVVESTYNWYWLVDGLMEKGYRVHLANTAAIQQYNGLKYTDDDSDARWLAHLLRLGILPEGYIYPKQERAVRDLLRKRGQLVHHRTANLLSIQSLISRTTGNSIGAQYIKALNIEHVDGVLPNPDHVLALKANLAVMNSADAQIEILEKAVQDRVKLRPQFRFLKTVPGIGPILALTIMLETGEIERFAGVGNYASYCRCVGSKKISNGKKKGQGNTKNGNKYLAWAFVEAANFAIRFNSRIKSFYQKKKSKSHGIVAIKAVAHKLCRACYYIMKDEVPFDINKAFA

SEQ ID NO: 485370 - protein, 366 aa, unidentified
MKKPSTTALRRIRKLQDGQLTIGLDLGDRSSFYCVLDKAGEVILEERVTTNPEAMKKTFEKMPASRIALETGTHSPWVSRLLTELGHEAIVAHSRNVRLIGESRRKDDRLDAQALARLARIDPRLLSPIQHRSAQAQADLTVIRARYALVRARTALVCAARGLTKSFGERIRGRNPKGFGSATTETLGPQLQVALAPLLSALETITARIREYNVQIETLAEESYPETALLKQVKGVGTLIALTYVLTLEDPRRFRKSRDAACYVGLQPGRRNSGQSEPQLHITREGDSYLRMVLVQGAQHILGPFGEDSDLRRWGLKLAERGGKRGKRRAIIAVARKLAVLLHHLWISCEEYEPLHNTRKRRLAAA

SEQ ID NO: 485371 - protein, 482 aa, unidentified
MIKSVGIDLAGTGEHKVRCMDEGAQLCDGFDFQTTPEGLAKLEERIFQDGANPVIVFEPTGLSWFAVAVYLRARHPECRLVRTQARNVVALRKYLHRSSKSDKVDSITLAKMPFIDPERLNEVYLPPAKMNAILRLARQRRRLESDIAARKTRIISIIDGYLPGVRPAFSKLWSPQGREFLRTHLNPLAVVSDGEKALHCFLTQARSRGKKDAVESHQVYLACQNAATIYELSRSTGSIDDDFFAALQEEIGRELKLMEVEEAESESITQRLKDLYQELHPSDNLRTIPGVGEQTAPVFLAIVGDPARFHSQSAFANFNGVVPDSRQSADKEAKGRRMTKAGPAIMKWALYQSGQIGRRYDPQLAWVYHRQMVHHGKNHKQAMGAVMSHIGARILAVLQENKPYELRDIQGRPITWDEARKLILTNYQVPEEIKRERRRRKTADNSTKPRRKRGEMVTHRAHEAATAPQPVVATASPRNQFN

SEQ ID NO: 485372 - protein, 370 aa, unidentified
MQFIGIDLHTNKFTCSYRDEHTPPDAKSGKRTETFELTVAGLADFCQTLSCDTYVLVEATITTFSFVRLIRPLVREVIVANTYELKQISLARVNTDKIDAGILSRIAKMLVLSGEQPASVVAVPPVEIQELRGLFTTYRLYKKQIVQIKNRIHSLLKEKLYGFTQEEIFDRKSREKIRGIESGTALSFQLNELFGLLEYIEARIEPLKEQVMALAEPYRREIAILTSMKGVSVFMAIAVIADIIEVDRFKNSKAFTSYLRSAPKVSNSNTSVSIRGINKKGRKMSATLLTQSLNHMLAASKKLSRWYTRLARYKKAGLVRTGLRRKVFAEMYQMLKKGEYHYARDAKNHEAKMLQYERFLEKRKNLLESA

SEQ ID NO: 485373 - protein, 349 aa, unidentified
MHARSVVACGLDQDTGEVFQRRLCPDHREILDWLQSLPGRVAVTYEAGPTGFGLARFLLAAGVLCLVAAPSKLVRPAGDRVKTDGRDAAHLARLLHLGQIVEVAVPTVTQEAARDLVRAREDCRGDLMSARHRLSKLLLRQGIVYCGGQAWTGKHEMWLRGQRFDNPALRLAYEAALDAMVACVHRRDRLDEAITTMAADSEFTPVVARLGCLRGVSTLTAFGLAVEIGDWHRLTGRSIGAYVGLVPTESSSGATRVQGGITKTGNGHARRLLVEAAWHHRAPYRPSRDLRRRWDAATLTARDRAHAANHRLHARWAGFDQRKKRPVVANTAIARELAGWCWSLAVMPD

SEQ ID NO: 485374 - protein, 425 aa, unidentified
MNQDNQSFAAFIGLDKSDKKINVTLQRCSTARSERSIIQGSAEALHAWVAALCARFLHQPVAICVEQPAAGLIHALMGYDFVVLFAINPVTLARYREAFTPSRAKDDPTDADLLCELVAQHREQLKVWQPDDICTRKLRHLTQARRSSVNMRTRLSNQLKALLKGYFPQALELCGEDLTTPLACAFLQKWSSLQQLKKARPETIRRFYYAQNARRGDVIEKRLTLIAQAIALTNDPALIESSIVTAQALTLGLRAAHTAIARFDREIARTFTQHPDASLFAALPGSGTVYSARLLAAFGSRRERFESAEALLNFSGIAPVVKRSGQATKIHRRYARPIFLHQSFIEYANESIRHSLWARAFYQMHKAAQQSHWVIIRALAYKWIRILFRCWQERTPYDELRYLKSLQKHGSPLLQYLAQPNTQTV

SEQ ID NO: 485375 - protein, 429 aa, unidentified
MKIIYPRVCGIDVHKKFIVAVICISESVEPVYLKKRFSTFHNDLIRFRDWLIQNDCQNVCMESTGKYYIPVYNVLESHISNIVVANPKWVRAVKGEKDDDKDAKWIADLFKFGIVRSSFIPQKNFRILRELTRYKYKLVNMRSSEKNRYQNALTSGNCKLDMVFTDVFGKSASNIIDLILSDNPYTDEDILSKVHRNCKASSDMILDSINGTDLTPVQKSRIELVNDHIKQLSSNIQRLDKLIDLMIEPYKDYISFLCQIPGVSRNSAITILSEIGVDMNQFTSTRRLTSWAGLTPSSNQSAGKKKSVRISRAGVYLKPCLVEVAHAAVKDKSHPYYANKFNKISKRRGKKRAFIAIARKILVAAYHMLLTGEIWNPADLAEVETPVEQRIKYVKNNFKSDIKQLLNIGLTVEELTLMIQQNANIIATQ

SEQ ID NO: 485376 - protein, 316 aa, unidentified
MAAAEVFIGIDVARDSLEIALRPTGERWQLGNDANGITALLGRLRALNPVLIVLEATGGLELPVLAALGSAGLPVVAVNPRQVRDFAKAVGKLAKTDAIDAQVLAHFADAVRPPVRPLADAATQALAALITRRRQLVEMLTAEENRLRTAPAPVRADIQEHIAWLRKRLKGVDQEPKQAIRSSSLWREQENLLRSVPGVGPVVSATLLADLPELGTLGRKQIAALVGLAPLNRDSGAMRGKRTIWGGRATVRAALYMGALVGSRCNPVLRALYTRLVAAGKTRKLALTACMRKLLTILNAMLKHRTTRAASTPAGC

SEQ ID NO: 485377 - protein, 311 aa, unidentified
MKAQTFANTAADRKRLVKKLAAFPGITVCLEATGVYHLDVAIVLHDAGLRVMVLNPKAAHHFAKILLRHSKTDAVDADTLAQYAERMPYRPWVRPTHEALALRALARRIHALTRAKASAKNQRHALTFGGDTPKAVLRDVRLAIAQLEKRIDVLTREALAFIEAEASLKAPFALLLDVKGIGKTSAIALLGELLLLPAGLTHKQWVKFAGLDPRHVESGKSIHKQPRLSKAGNRYIRSALYMPALSAKAHDPYVKGYFEHLIALGKKPMQAVCAVMRKLLHALHGMLTRNQPFDNTRFYALGAGSTALNNC

SEQ ID NO: 485378 - protein, 450 aa, unidentified
MSKKPQVIDDEERERVHERVAAVDVAKDTGMVCTRLPHPSRPGARQSTVWTVRARMGAIRVLGRQLARDGIEIVTLESTSDYWRIWFFVLEACGLAVQLVNASQAKSLPGRPKTDKLDAMWLARLTEMGLLRASFVPPKAVRDLRDYTRMRTRLIQERTRCFQRMEKLLESALVKLSSVASKLTTLSAQDMIRAMIAGQRDPLVLAALARTAMRARHDDLVQALDGMFDDHHGELAGMLLDQITFLDQRIAALAARAASLTAAMPAAWGVDAGGTTGPDAGTGPDAPVLPAVARLAEVPGISPDLARAIIAETGLDMSRFPTAAHLVSWAGLCPSARQSGPRTRTGKKGQGDTWLRGTLGQAANGAARTHTFLGERYHRILRRRGKAKAQVAVARSILVIIWHLLKDPAARYTELGHGYYQGRLDTDRRLKNHIRQIQALGFDVTITKTA

SEQ ID NO: 485379 - protein, 388 aa, unidentified
MIYVGIDIAKLNHFASAISSDGEELIKPFKFTNDNDGFQLLISKLAPLDKDSLIIGLVSTAHYGDNLVRYLVAKNYKVCVLNPIKTSTMRKNNIRKTKTDKVDTYIICKTLMMQESLRFVTFYDLDLMDLKALGRFRQKTIKQRTRLKIQLTSYVDEIFPELQYFFKSGLHQKSVYALLKEAPTPEAIASMHMTHLAHLLKVNSHGRFDKEMAQQLRVLAQKSVGASDSSLSIQVTHTIQQIELLDSQLERVEAEMTEIMKFNDSVIMTIPGIGYINGGMILGEIGDIRRFSSPNKLLAYAGLDPSVHQSGNFQAQRTRMSKRGSRVLRYALINAAHNVVKNNATFKAYYDAKMAEGRTHYNALGHCAGKLVRIIWKMMTDNLEFNLD

SEQ ID NO: 485380 - protein, 343 aa, unidentified
MNVFIGLDVSLASTAICVLGPQGKIVEELEAASEPEALVRAMASLPYAVDAIGLEAGPLSQWLSKGIEEAGFDVVLMETRLVKAALKAMPIKTDRRDAQGIARLLQMGWYRPVHRKSVSSQEIRALLSARKSIQQAIINIELSMRGVLRNFGLKLGHVTRLRYEARVRELVADNDILSASALPLLRAREQLRTELASLDEKVLGLAEHDDVCRLMMTMPGVGPIVALTVRSAIDDPARFAKSKDIGPWVGLTPRRTQSGEMDIVGQITRAGDRGLRSALYQAATILMHRAAPNWLQAWALRVAHRRGSKRALIALARRIGVILHRMWMDGSPFRFTLNPGPTA

SEQ ID NO: 485381 - protein, 368 aa, unidentified
MKNLITSFVGLDVHKDSIAVGVAPAGREAPHFVGTVAPQCSALSKALGRLGRAKELQIVYEAGPCGYTLARELRSHGYACEVVAPAKIARRPGDRIKTDRRDALLLARTARAGELVSVMIPDERDEALRDLSRAREDAVRARLKARQQLKALLLRHGHRYTGKSSWTAAHERYLADLSFAQPAQQIAFAEYRSAVREAHERVERFTEALRGQLEHWRMRPVVEALMTLRGIDMIAAVTLVAEIGDFQRFSRPSELMGFLGLVPSEYSSGSTRRQGAITKTGNGHARRVLVEAAWNYLFPARVSRTLQVRQEGQPKSVRTIAWKAQLRLAQRYRHLSARKLALNKICVAIARELSAFVWDIARQVEPKA

SEQ ID NO: 485382 - protein, 400 aa, unidentified
MISVGIDVSKGKSTVCILKPYGEIVSKPFNITHTHKDLSELSSMLFRLNDEVKIVMEATRIYHLPVLTYLQEKGFFVSVINPYLMKSYRNESLRKAKTDKIDSRIIANYGIDHWFKMKEFQTSGEIYEELKLLGQQYRHYMKLHLLSLAELTHLLDLTMPGIKNLLASWNETNRKDKRSDFVERFWHYDVITSMSEQEFTEEYILWAKEKKYVPSQEKAKVIYTLAQESIPTLPSETSSVKMLVTEAVRVLKEVDATLGLILSRMQEIAKTLPEYSVVREMGGVGNTLAPKLIAEIGDVRRFRNGKALVAFAGIDPPPYESGQFVGCNRKISKRGSASLRKVGYETMRSLKMRSRPEDPVYRYVVKKESEGKSKKSAKIAGLNKFLRIYYARVTELYKNI

SEQ ID NO: 485383 - protein, 364 aa, unidentified
MPPITAINALEWRITVLSIVAEKYAYVIGVDTHARTHTYAIINTTTGARRGCEAFPVSTAGMKRAVAWIGRNTTGAVLAAVEGTGSYGASLTRTLGRENIMVVEVKPPRKEARAGVGKTDEIDATAAAVGILGKDLEQLLQPRSDGVRAAVSVLLASRRRVDQQRTASRNALNALARTIDLGIDARTALTDRQVAEISSWRARATDSIEQQVAREEAIDLARTIVAAQARLKQNKAQLADLNEQLAPGLQAQPGLGPVTTGTILTAYSHHGRFRNEAAFASLAGVAPLQASSGNTTRHRLNRHGDRQLNMALDVVIKSRMRFDETTKEYVQRRTAEGLSYREIKRVLKRYLARTIFRQLQQLAA

SEQ ID NO: 485384 - protein, 384 aa, unidentified
MERKSSTLFVGLDVHKDSIDIAVADAPRDAEIRHVASIKGDLASLDKALRRLISQGQVLHIVYEAGPCGFVIWRHLSAQGLHCEVVAPSSIPRAPADRIKTDRRDAMLLARLARSGDLAVVRVPDGVDEAVRDLVRAREDAVREQRNGRHRLKALLLRNGIPYTGKTSWTAAHLRWLSTVKLAHAAQQIAFQEYLHAITEASARIARLEQALREALPDWHLLPVVQALQALRGVQLIAAITLVAELQDFLRFESPRQLMAYLGLVPSERSSGPKRRQGAITKAGNSAARRMLVEVAWHYRADPRVSPVIATRQDGLPPAVTDIAWKAQLRLSAKFKRLCARRLLKTKAVVAVARELAGFVWAIGREVQLSGWQGVKPSAGATAH

SEQ ID NO: 485385 - protein, 337 aa, unidentified
MVYVGVDLHRKSSHVAVLADDGEVLASRRIASQPHEFLRVFGELEEEPVGVAFEATYGWGWFADLLQDVGIPAHMAHPLATKAVSSARVKNDRVDAKTLAHLLRTNLLPEAWAAPPEVRDARRLARSRISLARISSRLKCQIHALLADQAITPPLTNLFGPGGRRFLQTVHLRPIPQARLEANLRLVDLIGPELASADAELRALFRGDHRIRRLIPIPGIGFTTAAVITAEVWDVSRFPSPRQLCSWAGLTPTERSSAEHTHRGHISKQGSRWLRWAMVESASRPRLNDPSLRRFRDGIARRRGAKVAKVALARRLLTLCFYALRDEDGCRAYPVQP

SEQ ID NO: 485386 - protein, 316 aa, unidentified
MMIVGIDISKASFDAAWETDGQVHHQCYDYTDEGMARLLVQTPTAAHYVMEATGIYHARLALVLHASGRCVSVVNPLVIKRYAQMRLSRVKSDKADAELIQRYGEQHELSLWKPASAEVLELQQAHRWLDDLIRERARLANRQEAHAHHAQPSPFVARQMLAQQRQLDKQIKGCEQHLEVLVKKSFPELYARLLTIPAMGPKTALELIVITDGFSRFEDVKALCAYVGVSPTTFRSGTSVHGKGGIAKLGQGRMRQLLYLCSWTAKACNPACKALYARLKALGKPAKVINIAIAHKLLRQAFAVATTHSSFSAEYT

SEQ ID NO: 485387 - protein, 358 aa, unidentified
MNSHRIQDFIVEDKEIFVGLEDSKRTWKIAVRCEKMLIHQTSMEAKYPILIKYLRNKFPKCRIHLIYEAGFKGFNLYDQLTEDGIECVVIPPHIVTEPKVNKVKTDKRDARRLAKILENQDYKFGCHVPDKERREDRQISRTMEAVKKDIIRTRNRIRKFLDFHDIILPFKDSPKWGRFEFMALKNLALSDPLRKSLDILLEMLESLWKHAKDLRKYLHELCRKERYHKAYEIAKSMPGIGWYTAIRFVLEFGEDLSRFTSGKQIAGFVGLGCSEYSTGETENRGRITGVGSGFIRATLIENSWVAIRKDPVLLDKYNRVYRNSGSKKKAIVAVARMLIVRFRACMMSGKPYVIGVIQ

SEQ ID NO: 485388 - protein, 430 aa, unidentified
MYERVAGIDVHKKMIKVAIRSPGAKPWTRKTEILEYRTFYGVLQEMARELRRRGVTHVVMEASGVYTEPVYYALCEQDFTEVAVINPVHAKALKGHKTDAKDCARLAELFECGLLRGSCIPSAEQKEVRDLTRYRIKTVQARTSEIQRLGKALESAGIKLGSVASEITGKAATAMIEALIDGERRGGVLADLAIGRMRSAGKLADLSMALTGRFTGHHATLCRLHLDRINVFDDAVDGLDDRIAAGAARWQREAGLLKSVPGFGDVVSCAWLAEIGPAPHKWFSRHEKLASWVTLCPGNNISAKKRKHGRTGDAGTYIKPMLIQAAWSAIRVRGRLQARYNRLVRRFGGDKNPAAKKKAITAIAHTLLKIAYQVLKSGTPYQDLGADFYTRRNSPEERQKYLERQLQKLHPGCTITITISPPEAALPPGA

SEQ ID NO: 485389 - protein, 368 aa, unidentified
MAKSITYVGLDVHKDTIAVALAGSGLRGEVREHGKIPNTPAALKALTVKLAAAGREQRFCYEAGPCGYGIQRQLTEAGHECAVVAPSLIPRKPGERIKTDRRDAINLAKLHRAGELTAVWVPDQAHEAIRDLVRARQAAARTLRQARQQLSGFLLRHGRHYHRPAWTQLHRRWLASLKFDQAVHHIVLEDCIAAVEAAMARRDRLEAHIEAVLPEWSLAPVVEALQALRGVRLVAAATLVAELGDITRFTNPRQLMAYLGLVPSEHSSGRARRQGGITKAGNGAARRMLIEAAWSYRFPARIAREQLLRQERLAKPIRDIAWKAQERLCRRYRKLARTGKQPTVITAAIARELAGFVWAIAKQVQPMA

SEQ ID NO: 485390 - protein, 322 aa, unidentified
MAMLSFGGIDVSKDRLDVVVLPEEECSSVPNDAAGWAELVERLRGFSITAIGIEPSGGYERGAMRALLAAGMPVHQVNPFKLRQFARASGVLAKNDPLDARMIASFVTIMPTRPAQRQTPAAERLAEMLAIRRQLSTEKVAAENASRLLEDAMLQRLSRRRIVRLAADIDLLDKRMVEIVVTDDALVHRYRLLTSMPGVGAVLACTLIALLPELGRMSRKQVAALVGVAPYAFESGTLKGRRCIWGGRAHVRQVLYMAAMSASNWNLVLKAFHDRLTAAGKLPKVVIVAVMRKMITMLNAMVRDDVVWADRLSGRHVLPTAR

SEQ ID NO: 485391 - protein, 509 aa, unidentified
MKFSAGFLQWEPSEASRGYEFNRQTCDVLNQNLEPRDALCFLNEYSDEVWNNAVKKAHYKGFAEAKPASARSEGKENEEIAMTGRGSVEQEPEFVAFVGIDWADQKHVWSLQAADSSKRETGELEHKPEVVEAWVGELCQRFGHGAIAVAVEQVKGALVFMLRKYECLHLYPVPSTMSASMREALYPSGAKDDPRDAELLLDLLLQHRNKLRRLTPDDEATRRVQNLVEERRKLVEEKTAQLNRLTGYLKVYFPQMLEWFAKLDTKLGCEFLERWPSLEELQGASPAEVRKFFRQHRGRHPELTEWRLQGIGQAMPAIRDRAVIEAKRMVVQVIAQLLRTLLEGIATLDRKIAEAAEAHPDFFIFKSLPGAGAALAPRLLAALGSQRDRYASAEEVQKYSGIAPVTERSGKKKWVHFRWACPKFLRQSFHEWAGHSIAQSVWARAYYHQQRQRGKDHHAAVRALAFKWIRIVFRCWQDGAAYDENRYLATLAQRGSLLIPVPGAAATRL

SEQ ID NO: 485392 - protein, 363 aa, unidentified
MLNNKVAGIDVGASAHYVCVGSLSEESVKRFGTFTQDLEELADWLVSLGVVSVAMESTGIYWVNLYDTLESRGLKVCSANARYVRNVPGRKSDVADSQWIQQLHSYGLLIGSFIAEGTIRELRAYVRQRENLEKQKGIQVALMGKALQLLNIKLHQIGSATEIQTSMNIIRAIVAGERNAKELTKFRHPQMKATEEDFEKALQGNWRAEHLFSLKQALTMYDLIKEQMLECEKEIEKTLGEINGGLGDESRAKTTKVKQNEYAFDAKSYLKAIAGVDLTKIRGLDEKTILSILWETGTDLSKWKTAAHFTSWLGLSPKPKITGEKIVGHFRLSVANRANQAFRMAAWALNSSYRRFFEKNYIY

SEQ ID NO: 485393 - protein, 344 aa, unidentified
MEHFAGLDVSVKETSVCIVDDTGRIVREAKVASEPEALLAVLNNPSYRFGRIGLEAGPLSQWLYSALGEANLPVICVETRHMRAVLKAQINKTDRNDARGIARMIRAGLYRPVHVKTLRSQKLRMLLTHRKLLQSKAIAIENDLRGTLRNFGLKVGVVGAAKFEARIKQLVDNLPDLALLVEPLLVVRRVLREQIAILHRRLLDIVRDDEVCRRLMTIPGVGPVVALTFRATVDVPARFRNSRAVGAVLGLTPCRHQSGESDRTGAISKCGDEMMRVMLYEAAQILLVRSTRWSWLKAWAMQIARRRGLKKAIVALARRLAVIMHRIWVDGTEFRWARQEAAAA

SEQ ID NO: 485394 - protein, 342 aa, unidentified
MNYVGLDVHRDWTTIVALDPETGELVRFDRVANDRESFGQVLEALERPLQGIVETGPNVWAMYDEVSVHFDRLIVCDALEVKEKMPSRAPKTDRRDARNLALMLAEGRAPEPLWIPDLGTRDLRALTRGRIKLTQQMTQVINFIRSLCASFGQRCPYSSLHGAKARRWLEDRSLPPQAQGILEAFVSLLAHLESLVAQADEAVEAQVRERPDAQRLMTIPGVGAFIALSILAEIGDLRRFRDPKRLVSYAGLAPQVSQSGEHTHTGPLPHTGDPWLRYVAVLAAQAASRRKAVTAFGRCYWRVRLRHGPNPAKVATARKVLTIAYHLLKRQEDYREPARPVS

SEQ ID NO: 485395 - protein, 309 aa, unidentified
MLETVRISNDPEYLRLVMSRAGEAPEVALEACYGWYWAADALTELGASVHLAHPLGVKGFAYRRVKNDERDAADLADLLRMGRLPEAWIAPPASRELRELVRHRAKLVGLRTNLKCQVHAVLASAGVPVMSSDVFGPGGRELLERVALPAAMRAKTNSALRLIDAITFEIDTFAGLVTTPLHADPGYAAVQTIPGVGPTLGAVFVAEIGDVRRFRRPEQLASWAGLTPKHRESDTKVRRGRITKMGSKLVRWAALEAVQRVGPQTRIGAFRDQVAERRGRNQAKVAAARELIECVFYALRDHHVRRLAA

SEQ ID NO: 485396 - protein, 408 aa, unidentified
MEQLYVGIDVSSTKHAAYLMKPDGDKFSSFPMQNDRSGAKMISEKIVSALTKLGLKDVVIGMEATSIYGDNLVYALREDGNLGRFHRKIHVLNPKQVKNFKKSYPELPKNDPVDAFVIADQLRFGRIGKEVYMDDYRYKALQTLTRARFYAVQNLTREKERFANYLFLKCSGIAQSKDIPNTSATTLALMEHFETVDELANADLNELTAFVNRAGHGRFADPEATAKLVQAAARGSYRLPKTVNDSINQVMSASIAAMRALESQIRTLEKAIEKQFEIIPNTLISIPGIGKVYSAGIIAEIGDICRFTGQASVAKYAGLVWTQHQSNEFEAEDTRLIKSGNRYLRYYLLEAANSVRRCDSEFRRYYDLKFKEVNKHQHKRALALTARKLVRLVFRLLKDNRLYIPPEG

SEQ ID NO: 485397 - protein, 358 aa, unidentified
MKSKNNKLDFTGQIIYIGLDVHKKSWTVTIHYMGVILRTMSMPPIPEKLAGYLQKNYPNARYLSVYEAGFCGYWIDRKIRALGIENIIVNPADIPTKQKERRRKTDKVDSKKLARELSNNNLDGIYIPSRENESIRALSRLRRQTVKDQTRLKCRIKSLLHYLGIELPENSEMKYWSGKFIKYLTELEFDHKAMKLTLENLIESLRKERQILLKVIRDLREVVKGNERAGKIVKLLRTVPGVGFITAVTLYSEIMEINRFNKFDSLSCLIGFSPATNSSGEKEKVVGLSNQQNKYLRSMLIESAWTAIRIDPALTQVYGKLVMRMGKQKAIVRIAKKLLNRIMYVWKNEREYVLAVVS

SEQ ID NO: 485398 - protein, 343 aa, unidentified
MSDKLYFGVDVSKRWLDIAYYDGVDVDWKHGHIRVDNNEKGFAQLGRWLERLGVGKGTCIFCMEYTGLYSQEFRQWLERMKIVYGMVSPRKMHRFEPDLGENERALDRIKTDEMDSFRIAIYCKEHSMKIRRKPSHLPSDAYFKLKRLLAERRQYVKQSALYKQQLHDIGKYDTEASRHRKEAELASLTEKVLQTSKEMETIIREDADIRRNYDLLCSIKGIGLVVAAETIVLTENFTSITNPRRYACYVGIAPGRKESGVSIQGGDHVGRKGFTQAKADLSMAALHAIHYDKGIRAYWLRRKTEGKHSGVVLNAVKFKIVLRMFAVIRRRKPYVEMEEYGKK

SEQ ID NO: 485399 - protein, 321 aa, unidentified
MTSQNEAVCFGIDVSKHWLDIAEHPSAQVTRVDNTAAAIRGWLRTLPRGAQRIGCESTGSYHCTLVKLLIKAGHQVFLIDGFKLSRYRDTVGQRAKTDRHDARLIARYLAHEGTDLRPFSLPAPAVTELRSLLRRRATVVRSLGRIRQSMEDLPGFGREVRVALARLTALIKRFEQRIASLINESGWTEPYRRILKIEGVGALTAAGLCAVFHRAPFSGADAFIAFLGMDVTVRDSGKKTGRRALSKKGDSEMRRLLYNAAMAASRSTTWQPFYQRMLQRGFSRTQALVALARKLARVAFSVMKNAADYVPKQHENACGRT

SEQ ID NO: 485400 - protein, 351 aa, unidentified
MVTVGLDLHKRYLTACALDHAGTVVAEARRLDPSVEALGGWLGALPQPLTIALEAALYWHWLERQLTALGHRVVVAHPYQVKLIWQARAKTDPSDARKLAELARANLLPAIWIPDASTRALRQLLRGRVFLVRQRTVIRNRLHAWLTAENLRCPELDLLTRAGQAWLAVLELPAVVRRQVDLLLENQALLTTQIQALDRHIKDTVKRDAAAQRLQTIPGVGPFGTLLLQAEIGPISRFGSAQELAASAGLVPSTRSSGGKTRHGAIGRGNPWLKWLLIEALQSLKLAPGPVGDHYRKLLRAKGKPTATVAAARKFCTYLYWMLKEECSYTEWLRQHDRPEVRPVQPLGSAA

SEQ ID NO: 485401 - protein, 411 aa, unidentified
MEVVHARCAGMDISKKDAKVCIRIAGAGRRKTVETVTTWASMTNQVLALRDHLVDQQVTCVVMEATSDYWKPFYYLLEGAGFEVQLVNARHVKNLPGRKTDVSDATWLAQLGAHGLVRGSFVPPEPIRQLRDLTRTRTAITRERSREAQRLEKLLEDAGIKLSAVSSDILGVSGRSMLEALIKGDHDPALLADLAKRRLRNKIPELTEALTGRFNEHHAFLARVHLDLIDQHTAAINEVTARIQVMIEPFQGFRDLICTIPGISTLTADVVIAETGADMARFPTAKHLASWAGTTPGNNESAGKVKSSKTRPGNPYLQGALGAAAMACAQNPRTYYGARYRRIAARRGPQKANVAIQRSMLTAIWHMCTTGTLYDDPGADYFTRLHPDRAKKRALNQLEAMGYQVTLDHAS

SEQ ID NO: 485402 - protein, 417 aa, unidentified
MDTQFVKVAGLDVHLKVIQVAVRCCQESGKLFKQVRSFGTMTRDLRALADYLQALGVTHVVMEATGVLWKPVWNVLEGRFALLLVNPRHLKKVPGRKTDVTDAEWSAQLLQYGLLRGSFVPPRSLRNLRDLTRHRAQLAGEHTRVANRIHKLLEDANIKLGAVASDVLGKSGRKMLRALLNGQDNPEQLADMALGRLRKKIPQLKLALEGNCTEHHRYVLGRLLGHLGYLESQIREFGQRIGHRLHELLPASARDRLDNIPGINQTTIENVLAEIGIDMTVFPDEHHLVSWCGMCPGNEESAGRRLRSRTRKGNRWLRRALVEAAWAASHVKKSYLRAQFRRLAPRRGKNRALVAVAHSLLVIIYHVLKYNVEYRDLGPDYFDRLEPERLRRYLVKRLQHLGYDVTLSEKNPNDNAA

SEQ ID NO: 485403 - protein, 343 aa, unidentified
MVHYVGLDVSLKQTSICVVNQAGSVVREDVVDSDPEAIDAFVRSKAPGAVRIGLETGPTSTWLWTELKRLGLPVICIDARHAKAVLKLQINKSDRNDAAGIARIMQTGWFKQVRVKDLDSHSVRALLASRALLVKIKRDLENQVRGLLKNLGLVIGRAKFNVFAVRAEELVEGRPELTAAVKPLLEARKAIEQQVDDLDRKVLKLARCDTQVRRFMTAPGVGPITALCFKATIDDPTRFRRSRSVGAYVGLTTRRHASGEIDWSGRISKCGDAMLRMYLFEAAGVLLTRVPKWSALKAWGTRLVKRNGLRKAKVAVARKLAVILHRMWIDGTEFNWSTKKVAA

SEQ ID NO: 485404 - protein, 383 aa, unidentified
MRAVCGLDVHKDTIYLCILCETGEIIERVFGVLTFQLRDMRRLMQAYGVSEVTMESTATYWIPVWRVLEPYFQLKLVNPYFIRQLPGRKSDVKDAQWIAECTMKDLVRGSFVPPERIQQLRQYDRRIFDLDAEIVRKLSKLDGIMQRCNIRLSNYVSNTDTKSYKDVVDALCKGITDPEELVQKVHGRIVNRHRRETILASLTGVVSDAEKDTMRQLRREITLAEENKTECQEKMVSICRTHYPKEFERLMTIPGIKERAATSLIAEIGVDMTKFQTAAHLASWSGLKPRNDVSNGKYKSRRITHGNVFLRKTIIECAWAASRTKDCFFSRFSYHQTVVRKKNKMKVLVAVARKLLIAVWHVLHDGTDYVDFNPDCKSPANNG

SEQ ID NO: 485405 - protein, 311 aa, unidentified
MYYIGIDVSKKDLSVFDGKDLNFINQEGLRSFKKYLKKKYNLSEVAIIFEPTGVYSLCLKEFCAENSIKAYIVNPKRSHNFARSLGIRPKTDKIDARILYQFHKLINLKDIKIPRIDQQAKTLASYLTSYEFALKQRVSLSHHLESLRDKQLITLIKKDLKRAKKLEDKIFHDIKEYLSKNQNLKDDYQRLSTIPGIGEKAAIALLTLFKTYQGTNRAQITALAGLDPVKRESGTSVKHKVKISKNGKGIYRKILYLPTLCATVHNQKIRVFYQRLLANHKSKKLAVIASMRKILLIAHAMYRDKTEYVAV

SEQ ID NO: 485406 - protein, 391 aa, unidentified
MSMYFIGIDISKYKHDCCIISAANQKVVSKVIIKNNKAGFNELLTIIHSLANPADIRIGFESTAHYALNLELFLENSLLTFMEVNPVLIGEYKKSKTLRRTKTDSVDCESIARWLMTVEYKPHSKGFYHAYSLKSLTRLRDKLIRQRSFYLVKITNVLDHTFPEFKPFFNERLSKTALYLLENYGSAEKMARMNSASYEKLRSVSRGKFSPQQFLRLKELAVNTVGVNNSIFDVELNSLLSLYKSLVKEIDTIKKEINQLIEEVHPHYMSVPGIGPLSAAVIYSEYGDISNFTNPGQMLAFAGIEPGINESGTESHGGKMVKRGSSQLRYTLINCCLPLIRFDMTFATYYAKKRGEGKPHRVAITHVAKKLIRVIYALESQDIDFNAQELR

SEQ ID NO: 485407 - protein, 350 aa, unidentified
MKYIGCDFHPSFQQIAMLDQETGEVVERRLLHTEEARAFYEGLQGPVLVGVEASGNMHWFESLLASCRHPLWIGDAAAIARQEGRKQKHDRRAAALILKLMLENRFPRIWVPTVEERDLRQLLMHRQQLVRMRTRVKNQLQHIALNQGWQKKRKLWSEAGLELLRNLKLGPWTQLRRDTLLELLEELEEKIRPLDQAVAKEAEQREAARRLATHPGVGAVISLATVLTMGDVHRFADSRSWVSYLGLNPSEQSSGQRRRLGSISKQGNPFLRQLLVEGAATAARGDKDLARMYARLKAKKHHGVAKVAVARKLAVRLYWIARTKKSYPEVVRTQGSQSHPVVERKGRSLE

SEQ ID NO: 485408 - protein, 309 aa, unidentified
MNTQNKNIVAIDIAKSTLQVQTENSSFVIGNDKGGFKRLDKQLSKLSKPHVVCEATGGYERPLVRHLFEQEVSVSVVNPSTVRAFAKGEGIKAKTDPIDAKMLLKYGQTRELKPSSRPDPAREELAALMDRRSQLSGSLTREKNRLDKDPAFTRKLIEKSVRFLVKQIKEVDKRIEGILASNDSLTKLVDRMTEVKGVGKTTALTILAYLPDLDSLSRGQMVSLSGLAPFNRESGKTRSRAFIQGGRAKVRKCLYMAAQSAAQHNDVIKTYVTRLMDSGQPYKSALVAAMSKILICLRSLLMNPKFRLA

SEQ ID NO: 485409 - protein, 424 aa, unidentified
MNNTQNQKIAQVTDKTLIVGVDIGGEKHFARAILARGFEVSKKPFPFMSTEDGFDSFVSWAYNLADSHKLTKIMIAMEPTGHYWFTFAAFLKRYDVQVVLVAPQHVKHSKEMDDNTQEKDDRKDPIVIARLVPEGRYLIPYIPKDVYAELRAAFNRRCELVEEQVRIANRMIRWFDIYFPEYRKVYGRIDAKTGIMILKRAPLPADILGIGVDGICQIWKDAKVRGYGPKKAKQLFTAAEHSVGMKGGASVRWNLWQLLEEYELVERQLNDILQLIEGCLYQISGADKLLKVPGAGLITVAGFLSEVGDIKRFSDPKQIQKLAGLAVVENSSGKRKGLPGISKRGRSRLRWVLFQLARSMVMFNPEMKAYHQYYTTRKDNPLKKLQSLIAIAARIARIFYGMLKSGTEYDPTMVMKDFNKAVAA

SEQ ID NO: 485410 - protein, 319 aa, unidentified
MSIVGGLDIHRKQITFDCLDTDTGELRRGSIVPADRQHLADWLAEHSAGGAEAHLAFEGCTGWRDVAEELGRAGVYGHLAEAADTAALRGPKRHAKTDRADSQHLRQLLFDGRLPECWIPPAHIVEARALLETYHDLRVEHTAWVQRIHAVLFHQGAHRPGVGLRSVEGQAELAVICTRLHRELIDAARHLNGAKVLSARLYGVGPVTGLALTCWLGGAGWFSSARKAVQFAGLDVTVHSSDGKRSAGRLSRQGPAVLRWCLYEAGKTHARGSAPDHDYYAQAQQRIDGKRAALSEARKIVRQACHILTELGDDALTNV

SEQ ID NO: 485411 - protein, 348 aa, unidentified
MRFYTRTHKHYCGIDLHARSMYLCILDARGEILLHRNFKAEADAFLQAVAPYRDDLVVAVECIFTWYWLADRCAEEGIAFVLGHALYMKAIHGGKAKNDKIDAHKIAVLLRGGMLPQAYVYPKAMRATRDLLRRRNHLMHKRADLLAHIQNTASQHNLPPLGTRVDRKGERPHIPAHFPDPVVRRSIELDLALIAHYDELLGKLEQALALMAKGHDAFAYHLLRSIPGVGRILTLVLLYEIQDIGRFPRVQEFLSYARLVKCQKGSAGKILGHSGKKIGNVHLKWAFSEAAVLFLRGNPAGQQYVERLARKHGKGKALSILAARLGRAVYAMLKRREPFNREKFLAYS

SEQ ID NO: 485412 - protein, 340 aa, unidentified
MEQIIGIDLAKRVFQVHIVSVQGEKKVNKMITREKLMAFIAQQPSSRIVMEACGSANYWARQFSQFGHEVKQISPQYVAPFRMGSKNDKNDAIAIVEADSRPGMRYVPGKSVEQQDIQCLHRVRQRLMKNRTALINQIRGLGLEYGIAMPEGAHKITACLPDYLEDAENELTILSRQLFHEMLEELQSSQQRIKELDVRLAHISQQNEHTVRLESIPGIGPLGASALTVSLGDSSDFQNGRHFASYLGLVPKEHSSGGKVKLLGITKRGDSYLRGLLIHGARSVVYRVVNLPDERCSGLQCWLKGIITRSGVNKAVVALANKNARMAWALVNQKTVYIPK

SEQ ID NO: 485413 - protein, 345 aa, unidentified
MQRMYYIGLDVHKRTISYCVKDGSGAMHAEGALPATRGDLDRWMKTLPQPWTAAMEATVFTGWIYDHLRPHAAALKVAHPLMLRAIAAAKKKNDRVDAQKICDCLRCDFLPECYMATTAIRERRRTLRYRNLLVRQMVQMKNKISMLLMEAGVSYNKQRLHKAGYFRELLATNPDIPEGLRSLLRLCRETVVRLQKTESALVRSLEQDELLMDRVERLMTIPAVGPITALTWALEVGEVQRFSSIKKAISYCGLCGAEKSSGNTTQRTPLSKQRNKHLQTTLIEAGKMAPRYSPALALLYDREKQKGNANRATLAVARKLVAYLMAVDRGQRNFRVPETSNSIAA

SEQ ID NO: 485414 - protein, 351 aa, unidentified
MEEYIAFDSHKHYTWVEHEQVATGRVRQYRLQHAPGAIRRVLAGCEPGTPVALEATANWYWIVEEIEQAGLRPQLVHPRKAKLMMGLMNKTDKLDAHGMNRLQRNGTLPTVWIPPGRLREFRELTRTRVVLVAQRTRWKNRLTATLAKYGAPSSEYSDPYGKGAREELDSRIERLPEQTRWAARQMLAQLDTLSEQILQFEGRLKELVEVTPEMQRLMTLPGVGVILAATIALEIGEIERFPSAEHLASYAGTTPRVHASGDRVRYGRTRPDVNRYLKWAFAEAGNSVAVNHTRCPARHVSQLYLRLRLRKGHGKAIGAVARHLAEAAFHVLSRQEAYQDPMVRLGRTREV

SEQ ID NO: 485415 - protein, 343 aa, unidentified
MEHLAIDLGSRKSQICRRRSDGAVLEERKVETELLGEYFRRQTTSRVVLETCAESFRIADLARAAGHEVRVVPATLVKSLGVGARRTKNDRRDAQVLSEVSCRIDLPSVHIPSAEARERKTICGMREALVSARTQLINCVRGWLRTQGLRVKAGADGFADRVRQQHLLQRNVELPPYVEGLLSAIEHHDHQVREADKRLSKLAKADATCRRLMTVPGVGPVTAVRFAAAIDDISRFSSAHTVESYLGLVPGEYQSADKQHRLSITKAGSIRLRWALVQAAWSARRCRPNDPLVLWSREVEKRRGKAIAVVALARKMAGILFALWRDQTNYDQRRGAAPSVSPT

SEQ ID NO: 485416 - protein, 367 aa, unidentified
MNKSNTVTRSENETLKQKKLTIGMDLGDRSTRYCILDEAGEVILERSVPTTKKGMGQVFSAIPGSRVALETGAHSPWVSRQLTQLGHEVIVAHARNVRLIGESSRKDDRLDARTLARLARIDPQLLSPVRHRSAEAQVHLTVIRARAALVGARTALVNAARGLAKSYGERLRKCGTQQVRRDLAAGLSVELRAALEPLLEEIESLSQRIATYDRQIEQIAQKNYPEVSLLQQVKGVGTLIALTYVLTLEDPHRFRRSRDVGCYLGLRPGRRNSGSSQPQLHISKEGDRYLRTLMVQGAHYILGPFGEDSDLRRWGLRLAERGGKNAKKRAIVAVARKLAVLLHKLWVNGEVYEPLRNHPTTAVDAVA

SEQ ID NO: 485417 - protein, 364 aa, unidentified
MSESITFVAFDMHQDSITAAWLRPGAPDPETRTLPHEPKSFRRLVRELLAQGPARACYEAGPLGYEPQRQLTAWGLACEVIAPSLIPRRPGARIKTDKRDAKKLVKLYRSGELTPIRIPTPEEEAARDLVRCREACGVDAFRAAHRLRKFLLRHALRCPAGRPGTQAWWRWVHALRLPDPAAQRTLEEYTLAATTARARWRALDPEVTALATRAPWAAPVAQLRCFRGIDTLGAVSPHLEVFDWRRFGSPRPCMSLVGLVPSEHSSGARRRQGSITKTGNAHLRRILVEAAWHYTRRADRRAAVQRRQVGQPPAVVAVAQQAEQRLYRRFHRLVGRRKLRTVAVTAVARELCGFLWAAMVEAPV

SEQ ID NO: 485418 - protein, 358 aa, unidentified
MTTVSNKQKWFNTIRLTQDDDLYVGIDTHKESFHIALWLNDAPAIDFVATPQTDKLVATLEKLRPALRMVVYEAGPTGYSLARAMQNANLPVSVVAPSKTPRQSAPDSKTDSLDARKLAEYAAKGLLKHIAIPTKHQEAQRQLTRLRQQLVEKQRRVKLQIKSFLLQHGIAQPAGLSHWSIAAIEKLKSIRLSEPLRYCLDILIEELRFIADQIKLTELKIKDAFSEKPLSTTCKILATHPGVGQTIATQFAAEIFNPKRFSDKTQLAKYVGLAPSVHQSGQTLRDGPILKTGRPQLRCLLIQGAWIWIQKDRDAYKTFCRLIHNTGHKNKAITAMARKLAVHLWMMARDNKPYDAAA

SEQ ID NO: 485419 - protein, 358 aa, unidentified
MSIVAHLYSFFIGVDTHARNHVYSIVTNTGILVETRSFPTTSAGIKRALTWAGRRTSGDLDTLWVVEGAASYGAVLTGHIAAAGYPVVEAGRMDAKARHGVGKSDELDSRRIAASVLPLDADQLRWPRHGEGVRQALRVLLSARDAMSTERTRAINSLTALVRTIDLGIDARKSLTSDQVDEIAKWRTRNEDVDLSTAREEAIRLAKRVLALNDDLQTNHDRLTELVEASPAAPLLDEPGIGPFSAAVCFTAWSHPGRVRNEAAFAALAGVNPIPASSGNTRRHRLNRGGDRQLNRALHTVIMNRMVHDERTRNYVARHYGEEPTKKSKREIKRNLKRYLARRVYKILNALDTVPQPA

SEQ ID NO: 485420 - protein, 348 aa, unidentified
MKRLSYEGAKVSIGIDVHKNHYTVCCMVKSEIVQKVTMPPSGLKLLAYIRSRFVGAEVKTAYEAGFSGFNLHRVLESGGVANLVVHAGSIEVAVRDRVKTDKRDSLKLASLLECGRLKGIRVPSIEEEKSRLLHRTREQLVKDRSRAANRIKMRLYQFGLDVPKVITLKSLAKILESKDQGIELDYSLRKHISIWKSLNKDIREVNLFQTKRFEANTLFKIYRSIPGYGLQTACMLLTELGDMSQFRNERGLFSFLGLTPTERSSGEKEIKGHISRQGSSRLRGVLVEAAWATVKNDSYWKNEYQRRAARIGGKRAIVSIARRLVGVARALSLKGQLYQQRKICTEVS

SEQ ID NO: 485421 - protein, 471 aa, unidentified
MKRKTSPRSRSLEKRPSARPRQGLDPVHPNAAGIDVGSEMHWVAVPADRDPKPVRSFRSFTTDLHQLADWLAACGIQTVAMESTGVYWIPLYEILEQRGFEVVLVNARHVRSVPGRKSDLVDCQWLQQLHQFGLLRGSFRPTAEIVALRSYLRHREQLVKEAASCIQRMQKALVLMNVQLHTVISDLTGVTGMSILREILAGETDPQKLARHRDHRCKASAEEIAASLTGHYQPEHCFALRQTVELYDVYQEKIRACDDEIEAQLRELQAHCEPPATPRPAARTTKRPARNEPRFEIRSPLYVLCGGVDLTQLPGIGPYTALRLLSEIGVDMSRWPSENHFVSWMTLSPNQKISGGKILSSRTQPSANRAAKILRLAVMSSSRSDHALAAFYRRLAARIGKAKAITAAARKLALLVYRMLQDKLPYREQTAADYDARQKRRILRGLRRRAEQFGYQLIDAKTGELLGAAVS

SEQ ID NO: 485422 - protein, 296 aa, unidentified
MGLEGETLAEGQVRTTQQDIAEFFQALNAARVVVEVGTHSAWVREVICGYGHEVLVANPRLMEGSRRRKRKNDRIDANKLARLGRVDPQSLHPMQHRSAEVRQDLVMLRARDALVAARTELINATRGLVKSMGRRLPKCSSPSFAQKVEEPVPAEIREALLPLVRMTAALSDCIEGDDEKMEKLASEQYGHTALLRQVKGVGPITSLAYVLTLENPERFVKSRDVGPYLGLVPKQEDSGESQPQLGISRAGDTMVRRLLVGSAQYILGHSGPTRTYDGMGCGYVSAAGRMRRRERR

SEQ ID NO: 485423 - protein, 434 aa, unidentified
MPSPIPKGKGQPSLTLHRYGVGVDCHSRFFQVCVLIPDGTELVKIERKVPALWAELRAARAWLLHTLREHGIDVSPSDLRYTCESTGQYHMPLCLAWKGHPAIINPSDTGHVRRKTDRLDAGKLAQHSLHALWRESWMAPDEIQELRVLSNQRAKLVAERSRLTNRINSDMLRFGHVVGQLGKINGPVVRALIEDFCTNGSVAIHRDHFSDTRIPAGVVRVFDQRWKRVDALDQEIKMIEELCIKQVDDLTWRIGEGRTSSGRQLRSNLESIPGVGTQTVITWLGEIGDITRFDSVNKLLAYAGLDPSDEISAGKVTGAKTRKGNARLHGALRNAARAMLAHAPSCKFSMWARGYMGRHSRAGKSKAVHALARRVGKALYYCHLKNEPFDDSGYQALLSEFSYPFCPVEEMGLSPGVVRKLKGVFTTPYRSNGR

SEQ ID NO: 485424 - protein, 371 aa, unidentified
MEQSTTTYVAMDTHKSAISIAIAEDGRRGEVRFVGEIANRPEAVATMIERLAAKHGKLAFCYEAGPCGYGLYRQIVLLGHDCVVVAPSLIPTRPGDHVKTDRRDAVTMASLFRSGELTPVWVPEDAHEAMRDLCRARQAAMEALRRARQQVLSFLLRHGRVYSSGGHWTRKHRLWLSAQGFDHPTRQIAFEELVQVVDEAQARRDRLARQMQELLPSWSLANVVTAIQALRGVALIAAITLVAEIGDFHRFANPRQLMAYLGLAPSERSSGAKSLRRAITKAGNTRARRILVESAWTYRLPARVGAGILERNEALPQAIKDIAWKAQVRLCTRHRRLVRAGKPANVVNVAIARELAAFVWAIATNGPVRAA

SEQ ID NO: 485425 - protein, 392 aa, unidentified
MRISVGIDIAKEIHWVTAIDADGAVQIDRKLPNTPADIATLSDELTALRGTVRIGLDVIGGIAGLAQAMLAEAGFALVHVPGIAVNRARQGTVGGENKSDPRDARTIADQVRTRPDLRPIEPAAELDLEIRLLVSRRGDIVQAQTQRLSRMRDLLVGIFPGLEACLDLKAKGPLHLLTKFVTPAELRAAGKKRLVRHLQAAGGLPKVEDLADLVLIVAAEQTVAVPAEPMTARLIRELANEALASRTRLIELDRELETLLQRHPDAALIRSLPGMGAVLTAELIAEAGNLARFRSADALASAAGMAPVLRQSGRTRFLRRPNGGNKGLKRVFYQSAFCSLNHDDSRAFYQRKRREGKRHHQAVIALARRRVNVLWAVLNSRTPFQTGFKAAP

SEQ ID NO: 485426 - protein, 444 aa, unidentified
MLRFVGCDVHKRTAVFTILLEDGRLLATYTVPVTREALTAFAERQLTSEDHLVMEATTNTWAVAGVLRAFVGEIVIGNPLRVKAIAEAKIKTDKVDSRVLAELLRCDYLPRVWQPDAETQRLRRLTHRRAALVSDRTRLKNRLHSILHHCLIPLPEFDLFSKRGIAWLRAVPLSAEEGQARDSDLRLLEQTELEIAELETQLVRQAWQDEKVRLMMSIPGIDYTVAQTCLAAIGDISRFPNAKKLAAYLGLNPSTRQSGPHCYHGPITKQGNAHARWLLVQAAQHLGQYRGPMGQTMRKIIQRKNRSVAVVACARKLAVLLWHVLTTGEPFRYALPRTLEAKYSRLRVRATKQRRRGGVAKGTPRSARYGMGRTRAVPSLPQVLEGNGLPQIAPLARGEKVMLERKKLDAFYHELQTPSRIEANSQKAQIEEREEVPKTQLTQS

SEQ ID NO: 485427 - protein, 404 aa, unidentified
MSVHVAPVTSSTIVVAVDVGKTSAMLSVTDCARKRVFGPVEFSMTRSGLVATVHRVEAVVVASAQVKVGVEAAGHYHRPVLDYGWPTGWEVLELNPAHVAEQRRVVGRRRIKTDAIDLEAITDLLLAGRGQLITEREVLIGELSAWAGQRSRRVATRSATKNQLLAQLDRAFPGLTLALPDVLGTKIGRLITAEFADPARLCAVGVSRLIRFAAARDIQLRRAVAERLVTAAREALPTRDGVVARRVLAADLGLLADLDTQIETAERELAALLPASPYATLTSVPGWGVVRVSNYAAALGDPDRWPGPRQIYRASGLSPMQYESAGKRRDGTISREGSVALRRALIDLGLGLWLTEPTAKAYAAELRSRGKPGGIIGCALAHRATRIAFAMVRDHTSYDPSRWA

SEQ ID NO: 485428 - protein, 410 aa, unidentified
MEVVHAHCAGLDVHKDTVVACVRHMTDGKVTTTIKTFNTATQELLALSDWLSAEDATHIAMEATGVYWKPVWNILSDGEFELVLGNAAHIKNVPGRKTDVKDAAWLADLMAHGLVSGSFVPDQTTQEMRDLLRTRKQLVRERTSHTQRIQKTLECANIKLDSVVSNVIGVSGRRMLEALISGQTDPRELAAMAHGRLQATPAELEAALRGRVTAHHRFMLRLHLDQIDSFDEAIARIDKEVKDNDKNFRAAVELLKSVPGVGSLAAEVIVSEIGIEMNRFATAGNLVSWAGLCPKNDESAGKRRSNRLKAGAPWLKTTLVQCAWAAARSKGTYLHAQYVRIRARRGNQKAICAVAASILTTVYHMLKDGTFYEDPGPDYFDKRNKDQQANKLVNRLQNLGFNVTIQPAVA

SEQ ID NO: 485429 - protein, 353 aa, unidentified
MRRPKDKLIAGLDLHSNNVMIGVINQDGKRLAHRKLDCDLSQVVQFLQPFKPQLQSMAVESTFNWYWLVDGLRGQGYSIDLANPAKIEQYSGMKHVDDKDDAFHLADLQRLNILPKAHVYDPALRPVRDLLRRRTNLVHQRTALLLSFKSLYARTTGQTLGLAEVKKMEPKQAPKLYEHPANQLIAQVQAEHIQALDKSISRIEKAVLGCAREIPIYDKLLTIPGIGRILAMTITMEVGDVKRFKTDGDFASYCRMVDARRLSNGKCKAENNQKCGNKYLAWTFVEAANFSRRYDDACRRWYDRKAAKTSKVIATKALGCKLAKAAWYVMAGPCDYDAKRMFPELATKQMKAS

SEQ ID NO: 485430 - protein, 354 aa, unidentified
MQNDRQSSETVILGVDTHLDIHVGAVISQAGKLLGTHIIQTNQAGYLELLDWTRSFGSLERAGIEGTGTYGAALTRYLIKNSIYVVEVNRPDRSKRRLEGKSDPLDAENAARTVLSGSSKAIPKMQSGACEALRIISVARRSAVKACTQAINQLRALLVSAPQDVRDKLWKSKPHECVTACINSEVSEHSPLRIALCSTLRSLAKRWMALTEELNELDESLDKLTRKYASNLRSQFGVGPQTAATLLAVAGDNPERLKNEAALASLCGVNPLPASSGKTVRHRLNRGGSREANNALWTIALVRMRSDPRTRIYVDRRTGEGLSTKEILRCLKRYIVRELYPLILSDLAYANRRS

SEQ ID NO: 485431 - protein, 412 aa, unidentified
MQTLVECGCGLDVHQATVVACLLSVLKSGKVQKQMRMFGTTTRELLALRGWLLSQRCTHVAMESTGVYWKPVYAVLEAEGALEIVVANAQHVKKVPGRKTDVKDAEWIADLLCHGLLRSSFVPPKPIRELRDLTRYRRKLVESQAAERNRLLKLLESANIKLASVATNVFGVSGRLMLRALIEGKTTTREMAELAKGKLRNKISEQEPALEGKLEEHYRFLLKLQLERLEAAEKDLAILEQRIQEKLEPYVTQLALLLEIPGVDWTLAAVIIAELGVDMKVFGNVSQLASWAGVCPGNNESAGKRKGSRIPKGNVYLKTALVEAANAAARAKGTYLRDKFFRLKARRGYKRAAVAVAHKILVAIYHMFSHRVCYTELGDLYLDKLNKHHLTRNLVHRLERLGYAVTLEQKAA

SEQ ID NO: 485432 - protein, 350 aa, unidentified
MFVGIDVHKRAHAAALIDDRGGEIAAITIANSPDGFEQLHGWLADHDASNAVIGVESPGSYGRSLVAALAAGGFEVLHVPAWRTHRERPRQGPGKTDPGDALAIAQVVLRKRAELGSALEPALVRALSTLELQRRRFVRDRTQAIQRLRSDWTQFDPVAEASVIRCDRQKVLRKLKRIQLGDGIAERAAASGIRQLARDVEDLNRRIAKLDQEIAALLKEHGNPVADLHGAGDNIAATLIAHAGDVRRFKNAAAFARFCGTAPIPCGSGQTAGRHRLHRGGNRQLNAALYRIAIVQQRHHPAAKAFLARKATEGKTPREARRALKRHLANVIYRRLLTWADTCPSMNLLT

SEQ ID NO: 485433 - protein, 472 aa, unidentified
MSKGSGNGTTRGDRRRNARRERLRGLLPRDGAVIGIDLAEDKQAIAVIDHDVRVLARKTVRVKAFRLGEALDWAVAQARAKGFAHVTVSCEPTGPRWLQVQRLCAERGLPLVCIQPLVSHIAREQQDYTTHKTDESDCVMIARLAVELHCYVPEELDETWAHLRHLGRRRAQLITAATASMQRIQDFLSVAWPVVTETCARPLESKTWLAALQVVTSQCGADPGNLAGLGCETFTALVRSAVAGWGGKKAWGTICARIFAALTSTEGVVVASRRGLLRRCADELGDLQRTRAQLRAVEADMVAVLAELGLSRLADIPALSAVGAAAILAETGNLHRYDSSSSLVKHAGMSPSENASGTFDGDARISRRGRPGLRLTVWRAVWPMLRFNPVLAAKYQAMTSAADAAALAAGTHDGKGTRPATAAAAAARSRRAKARVACAASLLRWIYIIVVRGTSWDPAAASGAARHQAEAA

SEQ ID NO: 485434 - protein, 316 aa, unidentified
MSELVYMGIDIAKNSFEVAVTGELQTLNLANDEAGHAQLCQWLAPLAPRLILMEATGGYEQDLALALAGAGLHVSVVNPRQARDFARCVGKLAKTDRIDAQALRSFASMLDAQGHQPRALADDERRELTALVVRRRQLLTMLVSERQRLGVAHRKAKPSILAIMDAIAAQLHDVDDELKAHVQTHHADLAKLLTSVKGVGPTTACTLLAQLPELGQLNRKQITALVGLAPMNRDSGTLRGLRHIFGGRADVRRVLYVAALVGTRFNPVLKAFYAKLLAAGKAKKVALVACMHKLLVILNAIARTRSPWRDDFAERL

SEQ ID NO: 485435 - protein, 301 aa, unidentified
MIIGCDFHPSWQQVSWLETETGETGERKLVQASGDAEQFYRQLPVPSLIGVEATGNCHWRVDLLAEIGHELWVGDAAQIRASCVRQQKTDQRDAEHILKLLVEGRFPRIWMPSSEVRDLRQLLLHRHKLVTIRTRVKNELQHLCLNQGVQRKHKLWSKAGQQVLRELPLKPWAARRREDLLGLLAMLDQQMEPLDRAVKEEAQRDKMALLLQTQPGVGAVTALAYVLTMGDVSRFARGKQVASYLGLIPREHSSGGRQKLGAITKQGNRMLRTLLVEAAQMAVRCDPGLRREYLHRCHQKP

SEQ ID NO: 485436 - protein, 369 aa, unidentified
MGEYSEVFVAFDVAKTKHAVAIADGGRGSEVRFLGEVTNSPTAVERLIRKLSGRYGKLHFCYEAGPTGYGLYRQITALGHACLVVAPALIPKRPGERVKTNRRDAVTLARLHRAGELTGVWVPDVVHEAVRDLVRAREAASDDLRRKRQQLLSFLLRHGRVFSGAGHWTLAHRRWLAQQRFEHAAQQIVFQEAIDAIEDALQRRRRLEQQLALIVPSWSMAPVVDAYQAMRGASFLVAVTFAAEIGDVRRFETPRQLMSFLGLVPSESSTGATVRRSGLTLAGNRRARRALVEAAWTYRYPARVSETLRARLDGLPKAIRDIAWKAQVRLCARYRRLSHAGKKLPVVVAAIAREMAAFLWAIGCVVAPG

SEQ ID NO: 485437 - protein, 436 aa, unidentified
MIRLGPFLYLIYSIGGDYMSQELSTLYVGIDVSKESNYTYITNFNQSFHQSFNTKNNMHGAELIESNLIEILDDKNYTDIICVLESTGIYSAHIATYLSASENLFSYNIFVYCINPKISRNYRASFSDMDKTDPQDSYILADIARVGRTKSMTPFKGSQKLALQRLTRHRVHLAELLAKEKTYVLTNIYLKFSEFGKPDFKFTSNKWSQTAISVLEEFSSPDEIINTSLDDLVDFIIAVSKNRFSDPEDIAKTLKKAAKASYKLDRTAYEPINHAIASSLVIIRTYEAEIKKINKSIEILLKGFAVNEYTSLRSIPGIGPVYAAGIISEIGSIYQFDNEASLAKYAGITWRKNQSGNFEADDTSMTKTGNHYLRYYLIEAANLVKKYIPAFKDYYHKKFNEVTKHQHKRALALTARKLIRLIYGLMSKDQLFNKNY

SEQ ID NO: 485438 - protein, 351 aa, unidentified
MWIIGVDYHPSVQQIAWVDTETGEIEEQRLKHSGGEAERFYRDLKEKGFSVRVGMEATGHARWFERLLRELGFELWVGDAARIRAKQVKKQKNDRQDAQHLLKLLLKDDFPRIWVPTPENRDRRQLLLHRHRLVQMRTRVMNQLQAVAMNEGIRRKRGLWTRQGRAELESLSLPTWTSRRRQELLELVDQLDPSIDQLSQAIEQEAEQQPEVQRLMTHPGVGPITALAFVLVLGTPQRFSCGKQVASYLGLVPSEDSSGNRRRLGHITKQGNTLLRHLLGQAAQSVANSDEEWRRQYAQLAMRRNRSIAKVAMARKLAVRLYWMWRQGYDYQQWASSVRTWGKLEIAHGVK

SEQ ID NO: 485439 - protein, 420 aa, unidentified
MTPKNNSKIISVVHPICCGLDVHKDMVSACIIITRADGEETFVVKEFSTFTDDLYRLKAWLLRHACKVIAMESTSVYWRPVHNVLEDSLEVILVNAKHVKNVPGRKTDISDSMWLASLLRIGVLKASFIPEKRIRQIRELVTLRKSYTKSLADYKRRVHKLFATANIKIGSVVSDLFGKTGRNLIGTLMDTDTELKIEHVEQCAEGSLKQKVAELLRAIQGFFEAHHRFQLKMMMQTIEHLESEIEAITKRLDRILIPNQALMDQLDEVPGIDKKTAQSIIGHIGDTLTSFRSDKALASWGGLCPGNNESAGKRKSGRSPVRKHPFKELMIEIAWAAVRTKGSYYKDKYYRLKSRRGAKRAIVAVAHRITKAIYYIIKHNRSYIDLGEAYLMSKSKEKRIKKLKMNARHLGFSLVPADIN

SEQ ID NO: 485440 - protein, 357 aa, unidentified
MQTKTRTKARTSLRIRKNQNQPRRYLGVDLHRDSFLVCVRAGGEERLRRWSLGQVQEFARTLRAQDELAVEATGNTRWFCQQVAGRVGRVVVVNPHQFRVISESVKKTDRRDAALLAEYLEKDLLPEVRRKSALESELAQMAQARDQLVKMRTMLKNQLHGLFASYGVALPKKALASRRQRTALRGRSLSPLADVQRRVLLGQIEALDAGIAELEQALTEAARSLPGYEHLTSVKGIGSLGATILLSAIGRIEDFAEPGKLAAYFGLVPRVEQSNHTEHHGRITRRGNKLARTTLVQCALIAKRYSPHLRSFYERIQHRRGTGKAIVATARKLLTIVYYTLKNHWTFRDFTNFELAR

SEQ ID NO: 485441 - protein, 414 aa, unidentified
MNRARQWYAGVDWARDSHLVRLIDEQGRDIGEKIFEHSGQALAAMADWLIAQSGADDPGQLHIAIEVPHGPVVEALMERQFNIWAINPKQMDRFRDRYSPAGAKDDRRDGLVMASALRTDPHCFRRLGATDPVIIELREWSRIAEELGAERTRLTNRMREQLWRYFPAFLDLGADMEAPWLLELWQLVPTPDRAKRVRQGSIAAILKRNRIRRLDAAQALDILRQKPITVADGTTKAACAHITTLIDRIRLINRQISDAHQTLDSLTAKLGDDQEAQPGQPKQRDVDILASSPGIGTTVLATLLADATDALQRRDYHALRCLTGVAPVTKRSGKSCFVVRRYACHRRLANAVFHWARVAVQHDPASRTKYAALRARGHGHARALRSVADRLLRVICAMLRNGTNFSQTLALNAA

SEQ ID NO: 485442 - protein, 406 aa, unidentified
MEGPIITVDVSKGSCHYQPFIENGHPMRKPKQLSATIDGFQKLGQTIKDLEAKTEREDIPVIFEATGVYHRPLQEYLEDHKIRYYIISPLLSATYRKTDLHSNKTDALDCAHIAKAYYCKKELRQYQAQPQEYKRLYQLSRLYESELVHLRKRKVSLRSMLDIIYPRIDKTFKGNQNLYDPIPMEILKRYPHPSLLLSHREDTIVKAVGHRTDHLKGYTERIVHKIYEKAKECYSGCDINDIEVVKLPSLIENVQEQKKKCDSLLKEMIEIARTCPYFASVVSIVGIGENLAARIIAELGDVNRFDNRAAIVAYAGLNPKIQQSGDIDGLHLKISKKGNKHLRCLLYLGAQCNYRLRKEDPLYEFTKKKRQQTQCPLSSKAAYTASAHKLLVIIYSLCKNGTLYHS

SEQ ID NO: 485443 - protein, 370 aa, unidentified
MSIKRILAKTINTDLEYEVIGIDLAKSCVSAVLLSVDGEVIGIDRLNYQELEKIAQVLSPTTFALEPCAEMNYLVQKFEDWGHRCTVINGKHVQDYVESHFSNQKTDLNDAQALAFLARDSQLRTVTAKDREQQKYASLTTLREQYLKQYRQTIVSLKGICQAWGLSISKGISGKARLKDLIENHAEFPSELRAELINMVTHAQSAQRDLNNITKTLVELAKKDKACQLIQTVPGLGPICRCRLRATIGDIKRFKNPKDFPAYYGLVPRSIATGHNEKKGKITHRGDKTMRSLMVQGAGCVVIMATKGTLGSKQLTKWILKKQKEKMPWGKLVCAVAAKLLRIVRAILISGKPYNSKIAGVARCSLPQAA

SEQ ID NO: 485444 - protein, 324 aa, unidentified
MNSLGIDVSKVKIDVCLLVGNKIFSATFDNDSSGFEKLNAWLSKKAGDTATHVCMEATGKYQEPLAMSLHEAKYLVSVVNPVQIKSYAKMTLNRTKTDRSDAKLIAQFCQSHKPEAWTPKPSEIRELEGYLSLLNALKNEHTRWLNRLQAPAQTDEVLKLMQQHYDHLEAEIKQLEKRIHDHIQQHESLKVDAELLDTIPGLGPATIAWLLSIRLRTFDNAKAVTAYAGVCPAHNESGTSVKSPSHMSKVGDAQLRKALYMPILSALRHNPIIKAMRERLLKAGKKEMVIIGAAMRKLLTLAYGVLKSGKSFDPNFAKSNLKPA

SEQ ID NO: 485445 - protein, 478 aa, unidentified
MKKVSTEVAKQSRNISQQKLTIGLDLGDRNSWYCVVDEAGRIQLEQRVHTTAKALQEVFGAMPRSRIALEIGTHSPWISRLLSELGHEVIVANARKVRLIGESRKKDDRLDAQTLARLARIDPELLYPVKHRSAEAQADLMMIRARASLVRTRTGLVNAARGLAKSYGERLRGCNVRNLDPEKAENLSPELQQALEPLLAAIAEVSARIVEYNDRIEALAQTSYPQVELLKQIKGVGTLIALTFLLTLEDPHRFGKSRDVGGYLGLQPGRRNSGQSEPQLHISKEGDPYLRTLLVQGAQHILGPFGIDCDLRRWGTEAGRAWREEWKETSDCGDGKKAGSVAASPVGERRSVRTVAQQQPHNRGGSRVEQKDKTKIKTVPGREKSKNPKPSFGDCVNGLAQVPLSREPNHRAPIRWQHRLYRERPTCTERNESLLESADGSMATVVHSAGRRKKLVQPSQTRIDLTPTGLLMEGHYTF

SEQ ID NO: 485446 - protein, 433 aa, unidentified
MPTNHPYDLLIGLDRSDRTADLHLIDTRTGKVQKQTVATSPEALHDWLAGLRQDHPQDRVALCLEQPAANLIVFLETYSWINLYPINPISLQKFRETFVTSRAKDDGKDAQYLAELLLSHHDKLKPWQPDDSQTRQLQQLVLHRRAVVDQRTGLTNRLKALLKAYFPQALELCGEDLWRPLATAFLLKWPTLQSLKKARKESLKQFYYLQGSRSQTLIEQRLERIDKAVPLTDEMALLQSYTLRVHLICKELQLLLKTLEQFDQQIAKVFQQHPDRSIFEALPGAGPVLAPRLLASMGSERERFPRPGNLQCLSGVAPVTKQSGNKCSIHRRYCCPKFLRQSFHQYAKESILHSRWAAAYYGQQRNKGCGHHTAVRALAYKWQRIIWKCWQSHTVYKEAIYEAALKKSKSPLVSLLDQIELGKSPVKKGAKKS

SEQ ID NO: 485447 - protein, 411 aa, unidentified
MQVIYERCCGLDVHKRTITACRLRWLGSEWQKEIRQFGTMTKDLLALSDWLVKEGCTQVAMESTGVYWKPVYNILEGQVELLVVNAQHLKAVPGRKTDVRDAEWIAELLAHGLLRGSFVPPPSVRELRELTRYRSSVVRDRARTVNRLQKVLEAANIKLASVVSDIDGVSARLMLEGLVAGQRDTEQLASLAKGRLKEKHGQLVEALSCRLQPHQSFLIAEHLAQIDYLEGAIERLSGQIEEKLRPFEQQIGWLDTIPGINRRTAEVLWAETGGDMSRFASARHLASWAGMCPGNNESAGKRRSGRTRKGSPWLRHCLVEAAHGAAHTKNKYLRSQYHRIAARRGKKKALLAVGHSILVIAYHLLTRKQAYADLGANYFDERDRQAVTKRCVNRLQKLGYEISLEKLQMAA

SEQ ID NO: 485448 - protein, 311 aa, unidentified
MPRVIGIDIAKHTFDLATRQPNGNYRTKANLPNKKADFTVLRDWLNEHSEPGAWVVMEATGTYHEALAEWLLGQGYRVCVLNPAQIAHYARSQLQRVKTDKVDAKLIAEYGERHQDELRPWQPEPPAVKRLKALVRRLDDLREIEQMEHNRLEVVDANVKTSIESVLEHIGQEIKETLKAINKHIDNDPDLRGKRDLLTSIDGVADKTAALLLAELGDPQGFANSRAITAFAGLNPRLQESGSYRGQTRISKMGSSRLRAARDQRPDVQRSDQSHGRTAKREGQDRQADRLRSDAQAAEHRLWRLEIGPAV

SEQ ID NO: 485449 - protein, 324 aa, unidentified
MNAKNDPVYVGVDVAKATLQVHLREAQIEFKNTPAGHAELRQKLQSIAGAHVVCEATGGYEQALVQSLNQVEIPVSVINPAQVRASAQAKGQRAKNDPIDARMLTDYGQRYRPAPTPPVSKVQRQLVALTQWLKQLIEAQAVAKTQAEQHTEAFVRKQHQALIEHYGSQIEATEAQIKKLMEQDPVLKQRVECLDAIEGVGLRTAVLLLTHMPELGQLNRQQVAALAGLAPWTRDSGTMKGKRCIGGGRPEVRVALYMASLSVVRCNPILRAFYERLVGRGKLKKVALTAVMRKLLIYMNHQLKSLASQSASPEEQKKNQQKNS

SEQ ID NO: 485450 - protein, 388 aa, unidentified
MIYVGIDIAKLNHFAAAISSDGEILIEPFKFTNDYDGFYLLLSNLAPLDQNSIIIGLESTAHYGDNLVRFLISKGFKVCVLNPIQTSSMRKNNVRKTKTDKVDTFVIAKTLMMQDSLRFMTLKDLDYIELKELSRFRQKLVKQRTRLKIQLTSYVDQVFPELQYFFKSGLHQNSVYALLKKAPTPAVIASMHMTHLAHLLEVASHGHFGKEKARELRVLAQKSVGVNDSSLSIQITHTIEQIELLDSQLFHTELEMANLVTCLHSVIMTIPGIGFINGGMILGEIGDIHRFSEPKKLLAFAGLDPSVHQSGNFQAQRTRMSKRGSRVLRYALMNAAHNVVKNNATFKAYYDAKRAEGRTHYNALGHCAGKLVRVIWKMLTDEVEFNLE

SEQ ID NO: 485451 - protein, 405 aa, unidentified
MNAVGIDVSKGKSTVTIRRPGDMVLMPPCDIPHTQSAINALIEQIKSLDGETKVCMEHTGRYYEPVANWLSDAGIFVSAVNPILIRDFGDDSLRTPKTDKADSKKIARYALDRWAKLKQYGSMDKTRNQLKTMNRQFGFYMDQKTAMKNNLISLLDQTYPGANEFFDSPARSDGSQKWVDFVYTYWHVDCVRSKSLQAFTEHYRKWCKRNGYNFSASKAEKIYQSSSDLIAVFPKDDSTKTLIRQAVTMLNTASQTVEALRLKMDQTAATLPEYPVVMAINGVGPSLGPQLMAEIGDVTRFTHREALTAFAGVDPGKNDSGKHNQKSVRTSKKGSPSLRKTLFQIMDGLIKRSPMDDPVYAFMDKKRSEGKPYYVYMTAGANKFLRIYYGRVREYLASLEESKES

SEQ ID NO: 485452 - protein, 455 aa, unidentified
MSKETKKKTKQVSVLSMPIVHPNAAGIDISATMHAVAIPPGRDEICVREFGAFTEDLYFLAEWLKKCGITTIAMESTGVYWKPLYTVLLEYGFSVALVNARYVKNVTGRKNDMDDAQWIQKLHSCGLLNSSFLPDDMTESLRVLVRHRKRLIEDSSKYVLRIQKALELMNIKVHSVINDIMGKTGTAIIEAILRGERNPDNFMQYVDGRIKADHDTIRKSLTGNWREEQLFMVSENYELYKYVQQRIICCENKIEQYLQKQTAINNEGIIEALSREPEILSKKKKTKNQPLFNVKDYLMRIHGVDVTGIFGISENTALEILAETGTDLSKWETEDHFVSWLNLCPNSKISGGKLISSMIMKKKAGNATQAFRAAANSVQRSDNWLGDYFRRMKAKGGNKYAIVAVARKIAIIYYKMVRHKQGFKPVDADEYRKKYKSAKIAYLEKQLLKLKTVAV

SEQ ID NO: 485453 - protein, 455 aa, unidentified
MAKQKTGRTPAIETVNIGAAAVDIGSREHMAAVNPDVTDSPVRAFGTFTHDLHDLADWFKSHGVTSVAMESTGVYWIPAYEILEQRGFEVILVNARYAKNVPGRKTDVSDASWLRQLHSYGLLRGSFRPTAEIATLRAYLRQRERLVEYAAAHIQHMQKALMEMNLQLHHVVSDITGVTGMKIIRAIVAGERDLDVLASHRDVRCRASTETIKAALNGNDRAEHIFALTQSLELYDFYQTKMLECDRHLEATLAALGAVTEHDPSELPRPRTKTKQVSTPSFDVRAALFGVLGVDLTQIHGMGPSLSLKLVGECGTDLRAWPSAKHFTSWLCLAPGNKISGGKVLSSRTRRSSSRAAALLRLAAVTIGRSDTALGAFYRRLAARAGKAKAVTATARKIAVLFYNTLRHSMTYQDPGASHYEERYRNRVLGNLKRRAKSFGYDLQKMPMEADMAVS

SEQ ID NO: 485454 - protein, 391 aa, unidentified
MIYIGIDVAKDKHDCFITNSDSEVLFKAFTIFNNLDGFNDLYQKIESVMDDVTKVKVGLEATGHYNYNLLGYLIDKGLPTYVINPLHTNLYRKSLSLRQTKTDKVDARTIASMLMSDVNLKSYSDTSYHNEELKSLTRYRFDKVKERAKLKTSVSRLVCILFPELEKLVPTLHMASVYALLSEFPSAKHVATAHLTRLTNLLSKSSKGRYGKDTAITFRDSARASIGSNMPAKSLELKHTIKLIQELDSEIDEIENEIKIIMDEINSPILSIPGINYRMGAMIIAEIGDFNRFDSPDKILAYAGFSPSTYQSGQLDGAYAHMEKRGSRYLRYALYNATKYVCHWDPTFAAYLAKKRAEGKHYNVAISHAVKKLVRVIYHLEKTKQQYIKAA

SEQ ID NO: 485455 - protein, 363 aa, unidentified
MKKIFVGIDLHKDSLTYCVLDENGEELEVGRIATKTRKKIVEFVEKWHEPVFCAFEAVGFYRWLWLLLEGKVEGLYLADAVRLKAMQDPRKRIKNDFRDARHITRVLYRGELPTSFVLGEPLYSLRQRLRHRHDLARRAARTKSSMKRICLRGNLPGPKSLTGDRAVAYFDAYGDRLHEMDRERWLDLTDQLLILERQIQKVGRELHLEIESLPEIHENIQRLMTAPGVGLLTAATVLTETGGLDRFNEPEQLASYAGLAPRVYQSADTIHHGHISKAGPSNIRWVLQQASWVAFRTNPYCRKVHLKISKRAGKKKAATALARKLLIWLWVMHTTKSNWNKETDNPICSKSYRHTESLAEVAR

SEQ ID NO: 485456 - protein, 420 aa, unidentified
MPDDRCRLGSDDVVIGLDLASVEHQVVVLTADGQRLTRFKIPHSRVGLEELLRRTMPAALSRTGGSRVFAFEATGHVWEAVAYILRARGERYVVINPLTTFRVREARQLSREKTDLTDAEQIAELCRSGLVTRTQLEARPYLALRRAWGEYRRLREERARLKVLVAHQLYGLFPEFLRVWADLLQPGALAVLRTGLTPATMAALSLGEFVARVREHRAGRRVWRFKLAQVHRYAEQTIACPDGVDVLAREVQRAVARIDVLTAQMTTVATEVDALLADLEETPYLRTIPGLGWASVAGLLAHVGAITKYRHGRQLIKLAGTNPSRRDTGQTVGRGQTMSRRGRAGLREAMYLATISCLQHNPRIRAHYDRLIQRADRPLSKMQALGACMNKLLLYAFAVMSRREAFQLDHDWQRTMSRVA

SEQ ID NO: 485457 - protein, 346 aa, unidentified
MEKFVGLDVSQEATHVCVVDGKGETVWQGKCPSTPDAIAAAIKDKASGVARIGLESGSLSTWHWHALKAMGLPVICMDARHAKAALSMQVNKTDKNDALGLAQIMRTGWYREVTVKSFSSHQVRAMLGARAQLVGMRTDLINQIRGILKTFGVVLKGTSGLTFEKRIEEIMRDGAPVSDTLRALLEILRSIRKQVEKLDVQVREHARDSKVCRNLMSIPGVGPVTAVAFVTAVDDPAKFRKSKSVGAYFGLTPRRYQSGEVDQNGGISKCGDNLVRCYLFEAAGVLLTRVDKWSSLRAWGLRLAKRGGMKKAKVAVARKLAVIMHQMLLTGEEFRWSNPAAVTAAA

SEQ ID NO: 485458 - protein, 413 aa, unidentified
MEGLSPLYRRVAGIDVHKMLHVVTVVIEHPDGTIEQQSREFGGFKRDCHALTIWLLDLNVELVVMESTGIYWKSIYAHLEHAGIQAWVVNAHFVKHVPGRKTDMNDSQWLAVLARFGLVRGSFIPPQDLRELRLVSRYRRKLAAMRASEINRLHKILDDGGIKLGSVVSDINGLSARAMVTGLIEGKSITALLDMARGRLKLRREDLQAALDGDLSARHRFILEHIHEHIEILEHSLAELDAYLLAAMAPYQWAHRLLQTIPGIDQIASALILIEIGDDMTRFGNADRIAAWAALCPANNESAGKRKSGRIGKGSSVIRYIMCECANSAWKTKSSLASKYKSLMVRKTHKKAIIALAHKMIRLIFLLLTRKVAYHDPQIDYEAISAKKNAPRWIKQLKVIGQWPDNASTSATT

SEQ ID NO: 485459 - protein, 421 aa, unidentified
MDVLYTACAGLDVHKKLVVACVCISGDQARPHKEVRTFSTMTAGILALSAWLTQMGVTHVAMESTGEYWKPLYQLLEGNFTLLVVNAQHIKAVPGRKTDVKDAEWIADLLRHGLLHGSFIPPQPQRDLRDLTRQRTNLIADRATVVKRLQKVLEWSNIKLASVVSDVMGLSARAMLDAIIGGEADAEQLASLAKGRLRSKQAALIQALEGTVRDHHRFMLAQHLDQIDFLEQQIAALDTEIVARVTPAPMESDMSTEGGVAASAEGVGATPTPLANTSQAADGDAPVTWAEAVRIWDSIPGIGGRIAEQMVAEIGADMSRFPSAAHLASWAKLCPGNHESAGKRLSGKTGQGNRWLRSALIQAAHAAVKLARCARASAPQRSERSPTLRAHQTRHPAGLAPARGGKAHDHHIWHLICMLAA

SEQ ID NO: 485460 - protein, 333 aa, unidentified
MLPPNCGTATPYILRNTVGLDISKLTFDATAIVGNAEYSAKFDNDSKGLDQFSDRLKSLGCQNLHICMEATGNYYEEVADYFAQYYSVYVVNPLKISKYAESRFKRTKTDKQDAKLIAQYCRSAQESELVKRQKPTDEQYRLSRMIAAYAQIKSECAAMKNRHHAAKDEEAAKAYAEIIKAMNEQLEVLKEKIKEQTEKPKCKEGVKCLETIPGIGRMTAAVLFHHLTSSKFETSNKFAAFAGLSPQQKESGTSVRGKGKLTKFGNRKLRAVLFMLTMVAYRIRAFPDFIKRLEEKKKPKKVIIAALMRKLAVIAYHVHKKGGDYDPSRYKSA

SEQ ID NO: 485461 - protein, 337 aa, unidentified
MKYCGIDLHSNNSVVLVSDEEDRIVLQKRLPNDLGQIQATLEPHRDELAGVVIESTFNWYWLVDGLMDAGYRVHLAHPSAIKKYEGLKYSGDFADAGYLAQLLRLGLLAEGYIYPREERAARDLARKRMQLVRYRTAQVLAIENILSRETGARLSGEVVKRLTAEQVEELGFAPDVALAVEVNRAVSQTLGQQLEALEKRLKERVRLRGEFKLLKTAPGIGDTLATTIMLEMGTAARFAKVGNFSSYCRCVDSLRESNDKKKGKGNAKNGNKYLAWAFVEAANFARRYCPQAKSFYERKKRKSNGVLATKALAHKLARACYHMLREQKPFDVSRCFG

SEQ ID NO: 485462 - protein, 358 aa, unidentified
MVAKFYSGLDVGSSLCELVAFDESDQQVAAIQFSTSGTKLVTAIRKFRKSHPGEWWMAVEEGELAQWVADLVRPEIARVVVCDPKRNAWIARDPTKRDRVDAAKLAKLLKGGFLTEVFHSDQVDRVEFKRVVQHYHELTRTQAGVKCQIKSRLRTHGIIARGEGTFGTKARESILRQLPTPTAQDLVRQLYELLDQAGQTQEKARRLMLGLGRAFAEVARMQEVPGIGPVWACTFSAYVQTPHRFRSKRQLWRYCRLGITNRQSNGEPLGRQRLDGAGVGILKSLSYHAFCSAQRGDNEFSRHFEESLARTQNRTHARLSTQRKILAVLWAMWRRNEPYRPGGGNAEQPDAMNRAVAR

SEQ ID NO: 485463 - protein, 333 aa, unidentified
MNKFKHFLGIDVSKEFFDAVLILEGKKEHPVHNQFINNYKGIRALVKWLRDMGATGENTLVCLEHTGMYGKLIIKYLIGFNFSLWVEMSLRIIKSIGIQRGKNDKIDAERIAFYALKNVESAVIYRAPRQVVDKIRTLLSLRDKLTTNKLRLLQYDNEMVDFDKELTKISTKFNKNTLAGINKDLLSIEKQLDKFIKEDENLNKIFNQATSVTGVGKITALYLICFTNEFTMYSNPRQLACYAGVVPFEHTSGKSIKGRAKVHYMANKTLKKHLHLCAMAATNYDPEIKQYYQRKVEEGKSKMLVMNNVRNKLIHRICSCIKNEKLFEVKKID

SEQ ID NO: 485464 - protein, 421 aa, unidentified
MRRSWMKKTNMVKVGTLIVTVDIGMTNNHGYCTAADGRSSKTFKFENTRQGFDTLWSMVLASKATFECNEVIVGYESTGPYGEPLIHYLKQKPVTIVQVNPMHTKKMKEINDNSPLKTDSKDPRVIADIIRVGHALSVVVPEGDVAYLRRLNNVRERHVKERTALLNQLQQFVFLTFPEFTRVLKTIFSKTALYILKKYTTPASIGSANLEELGEEMRRISRSKFRTRDAEKLINFARTTVGIQEGLQGLILDIQHVLIQLEMLHGFIAAIENEMETTLKRIPYSRNLLSIKGFGIATVAGLIGEIADFTKFTTQSEITKLAGLNIYEVSSGKRRGQRRISKRGRSLLRKVLYYAAIQTVRKNGIMHDYYQKLIGRGMKKIMALVAVARKLLRIIFAIVRDHSEFITNYADQRNQVIKEAA

SEQ ID NO: 485465 - protein, 407 aa, unidentified
MAAVMIGVDPHKGSHTAVVIDQAEMVLGEVRVRASAAQVQQLLAWAAAWPERTWAVEGAGGLGHLLAQQLVAAGERVLDVQPKLAARVRLLDAGATGKNDPNDARSVAVAALRSAACPLVRADDHAAVLKVWAKRHRDLSRARNQVTCRLHAVLCELVPGGVSQQIHAAAAARLLEQIEPAGAVQAARRELAGEFLADLRRIDAQRGDTRRTLAAAVRASGTTVTEVFGVGPAVAAAVIGDVRDISRFPGPDCFAAYNGTAPAEMSSGNRKVYRLSLRGNRRLNHAIHMAAVTQIRYRHTKGRAYYDKKIAEGKTSKEALRALKRQVSNAIYQRMKADARRAGAGPGGHPGNGSVASAAGSHPEHRLFGPATPGPEPTLRPRPGPSKATRPGSSRRTGRSVPAHTSA

SEQ ID NO: 485466 - protein, 386 aa, unidentified
MQAPNVCTPTVGHIGTIFVAIELSQKSWLVTIHSPDRDRISRHKLEGGNHAGLLSLLEGIRTRASQKLGSAPAIVSCYEAGYDGFWLHRLLMAAGIRNHVFDPASIAVEQRGRRAKTDRIDGEQLLRTLMAYCRGEPRVVRIVRVPSPEQEDVRRTTRERDRLVKEQGAHTNRIKALLRLHGMAVGNPRRRDWLKWLSAQRDWQGQAVPQQIKVEIEREHARLMLVREQLAALEQQSAQAHPRPAAAEMARRRDILFKLKGLGPAFSGTLTNEVFYKDFDNRRQVGAYVGLAPSPWKSGGIDREQGISKAGNPRARLAAVELAWLWLRHQSNSTLTRWFLAYTAKASKRIKRIAIVALARKLMVALWRYLTTGLVPVGAVLKPVEV

SEQ ID NO: 485467 - protein, 459 aa, unidentified
MKKKKVMEMEIINTNAGGIDVGSRSHYVAVGQSLKDVKEFGVYAEDLTALCLWLLSYGITSVAMESTGDYWQNLYAELMKHGIEVVLCNGKFTKHPKGKKTDVKDCRHIQKLHALGLLTSSFLPGETTEKLRTYCRQRNNMLSLAATASRKMQKYLKFLNFRLDVVVKDVCGLTGLKIIEDICKGNLDPYLLAGHRHYNCKKSKDEIAKALHGNNREDFLFGLNQEFESYQFYQKKINSCDRAINKFIKEELKKSPAKAKLKTIEKPYKRLNKNAPAIKNLNQIAFQYFEGVDFMAIEGVSHATILSIMSEIGPDGFYKFPTSKQFVSWLRLAPNNKISGGKVLSSKIPKGSNRLKIALRQAANAIGNLKDTHLSDFFKRVAYRKGRQAAVSATARKLGVIIWTMATKKVPYKPPIEYLFLDQKRKLKMVTRIKKNIAKFDIKPEDIGLTNSLNPSPYF

SEQ ID NO: 485468 - protein, 319 aa, unidentified
MNATDAIFVGIDVSKAQLDVAVLPNGRRSRVDNDRQGAAQLIRQLEPIAPSLIVIESTGGYERLIITELLAVGLPVALVNPRQVRDFARGIGQLAKTDTIDAEVLALFAKHVQPRLLETTPKKQAELEQLVTRRRQLLGLRNTESNRLGTTVAKLARKSLKQTIALFDRQMAELDKEIARRIETDDDWRDKARLLRSVPGVGPVTIATLISQLPELGLLNRAEIAALVGLAPFNRDSGQARGRRSISGGRSGVRCALYMAALSARTCNPTLRPFTSRLEAEGKPFRVAITACMRKLLVTLNTMVKNQTPWNPKINLSIP

SEQ ID NO: 485469 - protein, 400 aa, unidentified
MISPQLQVAVDVGCRRHRVAVGDAAGELLEEFDVEHSVVGLADFFARIERLRVKFGWPVAVAMEGYNGWARPLDRQVLLRGWRLYNVNNLKLARYKEIFPAPSKSDAIDTRRMLELFRLRGQLRVARNVLQEVAAVPVENDKLKRLTRRRRQLVGEKGRVLNRLQADLQAVCPGLLAITGEADNLWFLSLLASREDLRKIAGLRKSTLLSLEGVGRKYASVIQAWQKQAVFSPEAEWVGPMIVIDAQRVLELKGQIQALDQAIAALVGRSEIARRLDTIPGFGNTCSGELAGEIGTLERFAGEASLAVYLGMATLDNRSGDAEGSKPPRQVNTRAKAAMMVAVARHVEQVPISRVFYEKKRAQGKTHNQAVRALGRHMVRVIWSMLKHGRDYQLRPAADA

SEQ ID NO: 485470 - protein, 363 aa, unidentified
MQDCITWIGMDVHKESIVVTAVGNDPERIRARFELSNTDKGINRLVAKIQEFGDVRCVYEAGPCGFELRRILDSRGIPCNVVAPSLIPKKAGDRVKTDRRDAEKLARLHRMGELTPIHVPSTTQEALRDLIRAREDAKEDALRRRHRLLKFLLRQGRRHEGKSWTQVHWNWIRSLKFDDANTQTVLAEYILALEQELERVRRFDLRIEEESRHPDIAPAVARLRTLRGVDTITAMTLISELVDMNRFSNPRELMAFAGLVPSEYSSGGRKCRGRITKTGNAHVRRVLVESAWHYRHSPTGAGPSIRKRREGQPPKVLEIARKAEMRLCKKYRKITGRGKSSRVAVVAVARELAGFVWAIGKNI

SEQ ID NO: 485471 - protein, 428 aa, unidentified
MKPEDIIRREQFCQIKSEIRGSSEYLVVGIDVAKDKHHAFMGTATGNSLLRKLVFENTLEGFRKLLERSEAIRIQNALNKVVFGMEPTGNYHKPLGAYLIGSGHHLVMVTGKAVKNNRELLDGRWDKNDIKDPANVADLICQGKCLYYDYPSASINQLRQLLSLRRRLKKEEHSLRMRIRNNLLALYFPELDRFYSACETESLAIVRWFLDPSMIAAMEFDEFFSLVTRTKRGIAQKQRLQKIHRLAAESVGCPMGPAAEFEAELLVVKLKEVRQQLKKIADLMEDFCLEFTEYSVLLTIPGFGPYISARVLASISNPWRFDSSNQLIKIAGYDLGAQRSGKRSDDAVPVISKRGNSELRYALYQAAHVASTRNSDFIRYFTRMLRGRERERGIKTKMKVKLAAKMLRIAWTLMKKKQGFDPDYLSTA

SEQ ID NO: 485472 - protein, 414 aa, unidentified
MEVLYPRCAGLDVHKDSVVACIRIASGGEVVTEVQTFNTTTASLVSLSEWLASNGCTHVAMEATGVYWKPVWHILSDSAFTLVLANAAHVKNVPGRKTDINDATWLADLLAHGLIRASFVPESETQDMRALLRTRKQLVREKASHIQRLQKTLEDANIKLDSVVADIVGKSGRAIIDALIAGESDPAKLAALADTRIRSSQNKLREALSGRIRRHHRFMLNLHLQQINALDAAITEIDREVDANLAPFRTGVELLTSIPGISTLSAQVILSEIGTDMSRFPTAGHLISWAGLCPGNDESAGKRRSTRLRKGAPWLKTTLVQCAWSASRKKASYTQAQFHRLRARRGAKKAVCAVAASILTAAYHMLKDGTQYRDLGPDHFNRRSKQQQTNRLLKRLADLGFAAELTPIPIAVSL

SEQ ID NO: 485473 - protein, 339 aa, unidentified
MAIVGGFDVHRAQITFDYLDGETGEVRTGRILPADREQLRSWLDRFKGRDDVAFAVEGCTGWRYVVEELGRAGIEAHLAEPADTASLRGSKRRAKTDKADARHLRQLLVEGRVPESWIPPTQVIEVRTLGRLYVDLMGQSRSWQQRVRAQLYHQGVPAQRSVFGAEGRDELAKVDLSPAGRQAVETGLTLIDGLNAQILALRSQLGAFARRQAGCRALMSLYGVGALTAPMIWAEMGDTRRFSSSRQAVRHTGIDITVWSSDGKRTRGHLARQGPPALRWALFEAAQSAAKKTSPDHAYYLEVRDRLGHNRACLSVVRKLARQTHHILRDLGDEAWAAA

SEQ ID NO: 485474 - protein, 422 aa, unidentified
MKEQEIRVVGIDCAEDEHVAVLLGKDGEFESRLSVVNRRDLVETGVAQLILEIGPNTQLVVVVESKRSHGRIVADAAAELGCEVWQVNTVALNHYRDLEGQPRKDDEWDAYLGARMVYLRMRGCRIATETTEEERILSRLTRIHSRATNDRKRVVARLRSVLLELAPETLHAAWEGPKVDRKAMLYLLERWPGFEGLERAQLRSIEKILRWCRYGSKATHVAKVIRMMARRISIAAEERSAFTLEINLLVQQIRTCNESADQLYAKISRRIERHPVGKKLLEMHGIGPVIAGVLVSELLPVARISTEPKSATYSGVTPIARKSGKSLDKDRLTQGVNKRVLHALYTSSVVAIKNSALDRAYYRKKLRGYAGHPKPHVAALIALSRQRHKLIYKLMTTDALYDNEILFARHLERMEQAHAAAA

SEQ ID NO: 485475 - protein, 345 aa, unidentified
MIEHTAEALDAWLTELHQKVKGRIAIALELKKGPVVYALQKYPFITVFPVHALSLARYRQAFSPSGAKDDPQDAELALELMLRYPQKIKAIEPDNADIRLLQQLVEQRRQLVEDKRRFVNRIINTLKQYYPQPLEWFSHRGSLLLCELIIRWPSLQQLKRARRDTIRNFLNAKGGRAMALTEQRVASIDNAIPLTTDPSVIEANALMAAALATQIKVVSEIIKTYDERIETLFDTLPDAGLFKSLPGMGPCMGPRMLAALGDNRDRFNSAEEIQNYAGIAPVTERSGQKSWVHWRWQCAKFVRQTFVEWAAKTVNSSYWAKLYYQGSEKRANLISLRSGHWRSNG

SEQ ID NO: 485476 - protein, 321 aa, unidentified
MAMKVQPVILGADVSKDWLDFHRYGGESVERIDNDRASINAFLQRYPSAALAVEATNTYHELLVDRASRVGWTVYLISGYQLKHYAASVGQRSRNDPIDARLIARYLAHEIAELRPYQPKSPKVQQLWQLLKRRALLVQTRQQLQQSLHGVPYLEQAKRQLSSRYAQVLLCIDRRLAVLARELGWQADLNRLKTLPGVAALTALALLVAYRAGTFIHHDPFIAYLGLDVRTKDSGYHKGQRKLTKHGDGEHRRLLYCAAMAAVRSHPYFRNRYQHLTERGLPTTAAYVVIARKLARLAFCLLRQQTTFDNNRLRNYPPTVA

SEQ ID NO: 485477 - protein, 326 aa, unidentified
MKKSIIIGIDVSSKTLDICIKDGETISSLVIKNSAKEIVRFLKPFAKQKVVVAMENTGRYNWPLYESLARYTFTVYVITPLHLKKSLGLVRGKNDKIDAQRILQFIVKNHDTLEPWECPSVTIQKLKILLTERAYRIKAKGQLLKMQHDYQLMKAAGLDKSLKTLSNNLVEELENQIGKLEEQIHELISSDNELNQQAKLIQTVPGVGKVLCWTMLSKTNGFKSIKSARKMACYSGVVPFDYQSGSSIHKKPRVSVFADKSIKTILHLAAMSAIRLDNDLRAYYLRKVMEGKNKMSVLNAVRNKILHRIYAVIRTQTNYQNNLILS

SEQ ID NO: 485478 - protein, 410 aa, unidentified
MGYETLIRRAHVMTKRNTLKSLPTDTEFRVVGLDLAKSDVSVAAIPVDDNTPSLVDRMTYADLLDWAGKISPTLFAMEPCNGYSLLCLQLENLGHEIKVISGWTVSMWINTHLSGQKTDLNDAIALARLAVSDAELTPIRHKSITEIRIQTVQAVRQQLMSQRSKSIVSFKALAQQWGIPCAAGHRNLKKLRESIEAKVDLITRPVANAMLFLLDAVKSLDRQIGQLNQTLQELVMSDERGRLLQSVLGVGTQISARVITVVGNIERFNSPRSLVAYVGVAPRNFITGHKNLTKKKHGNCPDLSHKGQGKISRRGDKLLRSLFIQGAACLYMQFCKDQLPECQLKRWILKQLAMQKPYGKLIVSLAAKLIRIVWAVLTYGEKFNIQKAGMTRSMWSEMALETPLNKEVPA

SEQ ID NO: 485479 - protein, 418 aa, unidentified
MESTAKTTLPDEPPNGVTGGIDWARDDHAVSIVDARGREVRRATIEHSAAGMRELLELLSRAGAREVAIERPDGPVVDTLLEAGITVVVISPNQLKNLRGRYGSAGNKDDRFDAFVLADTLRTDRSRLRPLLPDTPATATLRRTCRARKDLIAHRVALANQLRAHLRIVFPGVVGLFADLDSQISLAFLTRFDCQDRADWLSVKRLAAWLAAAGYCGRVDPAVLHGRLTGAPRGTTGDEGAANAHVTRALVAAITSVATQIKTLDAQIAEQLAPHADAHIFTSLPRSGTVRAARLLAEIGDCRARFPTPESLACLAGVAPSTRQSGKVKHVGFRWAADKQLRDAVCDFAGDSRRANPWAADLYNRAIARGHDHPHAVRILARAWLYVIWHCWQDGAAYDPANHRALQTLLNKDQDRAA

SEQ ID NO: 485480 - protein, 411 aa, unidentified
MRLFVGDDWAEDHHDVELMDSAGRVLAKRRLPEGVAGMARLHELIGQQLGEDAEDAEVVIGIETDRGPWVAALVAAGYVVYAVNPLQASRYRERHGVSGAKSDTGDAHMLTDMVRTDSHQLRVVAGDSADAGAVKVVARAHKTLIWERTRQVQRLRHQLREYFPAALAAFEDLDAPDALELLGKAPDPARAARLTRAQVSAALKRARRRDIPGKATAILAALRGAQLGQPPAITAAYAVTVRSLIAVITTLNEQVKTLQGQVEADFGRHPDAEIYLSQPGLGPILGARVLGEFGDDPDRYISGKARKNYAATSPITRASGKKKVVAARFIRNDRLTDALMAQAFAALTASPGARALYDAERARGTEHNPALRKLANRLVGILHGCLKTRTPYDEATAWPQREKIPQSDVAA

SEQ ID NO: 485481 - protein, 418 aa, unidentified
MAFKIFRKNCCGLDVHKTWIYACIGITDADNRTEYKQARFSSFSKGLQELSSWLAKYSCTEVCIESSGKYWIPVFNILERTCWVTLAHPKYTKPQKGNKTDRKDAKWICDLFMCDMIKPSFIPPPDIRHLRDLLRFRMKLTYQITGMKNRALNCLTVSNLKLDDVFTDVFGKSSRSIIQQILDHSGETFDVTPYIHKNCKHPVEEIQAAIDGAICPKQATKLKICLDFIDEQERRIAELDTEIFRLAEPYSSVLEFMRTVPGFSKEPLTAIRLLSEIGSDMSVFPTSKNLVSWAGCCPRNDSSAQKVKSTRISRAGSYLKPLLVQIANALLRSKEHPEFKERYRKIKTRRGHKKAIIALCRMLLTAIWNVLSKCEPYSAKGYLADKTTEHSVVISKAEGLALLRQRGYIFKDEVADFA

SEQ ID NO: 485482 - protein, 367 aa, unidentified
MTKVRTWVGLDVHAAKVVACVVDAESGEMSVRRLPGDTTKVVSFCAGLPGPTRVAYEAGPTGFGLSRALHAAGIGCVIAAPGKIERPAQDKVKTDRRDAERLVRLLMIDGLYGVQVPTSEEEALRDLVRAREDLRGDLMRARHRMGKLLLRHDVRYDGTSDTWSHRHRQWLSMVRLPERGAQATLLDYLGAIDALIIRRDQLEATIAELAPLSPWAEAIARLRCMRGIDTLSAVGLCAEIHGFERFEHPKQLMSYVGLVPSEHSSGQTRRQGAITKSGSQHARRLLLEAAWHYRHPPRLGTRLKARQVDQPATVIAIAWKAQQRLHQTWRRLDTKRRKRKTIVAAAVARQLAGFCWAIVTTETEHTT

SEQ ID NO: 485483 - protein, 348 aa, unidentified
MEKLIRIGMDTSKSVFQLHGVDSVEQPILRRKLRRGQVLPFFSDLPPAQVAMEACGASHYWARELQALGHEVVLIPPQYVKPYVQRGKSDAADAEAICEAASRPKLRKNFVPIKSTEQQAAQMLTKLRAQFIGRRTQLANSIRGYAAEFGLTAPKGLSRLRELLADIRADATVPDLAMELVEALAGELTRVDDQIATLDKKLMQLHRGNEMSRRLAGIPGIGPVGATLLSIKVTDAHSFKSGRNFAAWLGLTPKNHSTAGKNRLGVITRAGDEMLRSVLVAGATAVIGDLRRGGNRIWPWLKALIARKPPKLVAIALANKMARIAWKLMISGERYRPIGGSAPMAMPT

SEQ ID NO: 485484 - protein, 346 aa, unidentified
MRNHIENKRIKVLGIDLAKQTFQLHGINAQGHPVLQKKLTRKKLSAFIANLPPCLIGLEACGGAHHWGRVFTKLGHTVRLIAPQFVKPFVKSNKNDAVDAEAICEAVQRPSMRFVPAKILEQQDVQSLHRIRSQAVTRRTALANQIRGLLMEYGVIIPKGISYVRKEIPLVLEDADNALTPLFRELLNELYDEMVHLDERINKLEGKLETICTQNEDCQRLLTIPGVGLLSATALVAAIGDISVFKNGRELATWLGLVPRQHSTGGRSSLLGISKRGDCYLRTLLIHGGRTVVRVADKYQDRRSKWISDLDKRRGRNISAVAVANKNTRIAWTLLTNKTTYQANIA

SEQ ID NO: 485485 - protein, 354 aa, unidentified
MQSQIIATPKLFIGMDIHKKSWSVHLRTDLFDHKGINIPPEPEKLADYVTKHFSDHEVSLTYEAGCCGFSAARYFLNMGWQVKVVNAADIPRSNKQQYQKTDKIDCRNLCKQLQQDQLHGIYIPTEPEEQLKSLLRQRNQVVKQLRKAKSQIKGLLLFHGIAIPDQFDNPNWSRDFVVWLKNIQWAHNTGSACINSKLRVLEMLKNEYLQTSNELRAYCRKNYKKDYYLLKSIPGIGGLLSAAILAELGDIRRFNNEKEFSSCIGLVPGIHQSSETDIKMRLTPRCKSLLRSYLVESSWVAIRRDPEIQAYYRKHAGKNPKNVIVKVAHKICCRILSVIKTETPYQINYKSTKK

SEQ ID NO: 485486 - protein, 315 aa, unidentified
MAMLVCASKPIVGVDVAKDELVIYHAERDLQEAIPNTKAAIKKWLKALPTKVAVAIEATNVYHLLFADMAHESGCVVYMVGGYELSHYRKGVNVRAKTDALDARLLARYLKNEAEELHPWTPPSPLYRQLLSLFRRRAALVQARTSLTQSWANEALLKTSFAAQVKSMQRLEALVEKMIRSLLEKAGLLGALKRCMQVEGIGFLTAARLLTTFERGTFRGSDAFIAFLGMDLRVSKSGQKDGRRSLTKRGDSEARRLLYNAAMSASRTAAWKPFYEQQRARGFSTTQALVILGRKLARVVFALLKSQSEYQSKAV

SEQ ID NO: 485487 - protein, 388 aa, unidentified
MNVGADKSEPPTAIHTDLGAIFVSLELSRSSWLITSLSPGGGAKMSKHSVPGGDFAGLMERFAQLQGKAKLRTGQSFRIIVVQEAGLDGFWIHRALQNEGIESHVVDAASIATSRRRRRAKTDKIDGETLVRVLLAYKRGEPRVCAMVKAPTPDEEDRRHLCRERKALIAERVRHVNRIKGFLFSQGISRYQPLRRDRRQRLEELQTSDGRAFPQHLKALINRELDRLELLLKQIKTVEAARDALLAVEQTAMPAPAAMLLDIRGIGPEFAAILWSEGLFRHFENRRQIAAYAGLAPTPWQSGAVDREQGVSKAGNPRLRTTLIQLAWLWLRNQPRSALSIWFHQRVSRNGGRLRKTTIVALARKLLVALWKYVTAGVVIEGVTMKVA

SEQ ID NO: 485488 - protein, 355 aa, unidentified
MDSKKYIGMDVHKESISIAVMNGAGKIVMESVIETKASMILQFIDGLRGDVQVTFEEGTSAAWLYDLLKPHVTKLLVCDPRKNRSMREGNQNDKIDARRLAELLRLNHLNPVYHGEHGLRSLKELVRSYLTITKDLGRVMSRVKAIYRSWAIPCTGKQVYAPRHRAEWLGKITEPGVRRRAEFYYQQLDALRVVRQQVRRDLLAESKKHKTWKLLCQIPSIGPIRSAVLLGILQTPNRFRTKRQLWTYSGFGIETQSSADHRRINGQLERAKKQVSIRGLNRNCNHDLKNLFKGAAIVASSKPGPFQEFYTTLLAKGIKPEMARLTLARKIATIVLIVWKRGACFDAQYLKPQTA

SEQ ID NO: 485489 - protein, 410 aa, unidentified
METIVKRAAGLDVHKAQVTACVRVPGRGREREQEVAEFQTTVRGLLTLRDWLKAHRVTQVAMEASGVYWKPVWAILEDEFDCLLVNARHVKQVPGRKTDVTDAAWLCQLLEAGLLQRSFVPPKPIRALRNLTRYRKAQIGERQREANRLHKLLEDTGIKLDCVASDILGASGRAMLDALVAGTTDPQVLAELAKGKLRAKIPALKEALVGRFDRQHALIVSAILAHLDFLDEQIQLLSDEIEEQLRPFAAAIELLCTIPGVQRRTAEVIVAEIGTDMSRFPTDRHLASWAGQCPGNDRSAGKRRSGKTRHGSKWLDGALTEAALAATRTHDVYLAAQYQRLRPRRGHGRALGAVKHSIITGCWHMLTTGELYRDPGGDYFTRRDPERATRRLVAQLERLGHHVSLEAAAA

SEQ ID NO: 485490 - protein, 348 aa, unidentified
MKRYIGVDLHKNTFTVCYLSRKGKELKSFKVSKEGIEAFKQTLTRDDEVAVESTGNTGYFVREIKDRVGGVKIINPTQFKIISQSVKKNDKRDAKTIAKYLSKGLIPEVRMKSKKEAQLSSLIGTRDKFVKLRTALKNKIHNILNANGIVTKREIFASEKNLDRVLKYELDEDSLFELRIIIRELRNLNKAIEEIDEELKGRGKKLKGHKNLTNITGIGDISATIFLNTIGDINDFGGDHKLAAYFGIVPRVHISNKTAHYGRITKMGNKIARTALVQCALIAIRYNPYLRSFYLKLKAKKGSGKAIIATARKLLTIIYRTLKNDWVFEDFNNFKLTSASKGYHLSPA

SEQ ID NO: 485491 - protein, 452 aa, unidentified
MAKPTAHMRKKNKPATQVRPEPRPNAAGIDLGATVHYVAVPPDRDANPVRFFGTQTGDLHALADWLIACKITTVAMEATGVYWVPLFQILEDRGLEVCLVNARHVKNVPGRKTDVQDCQWLQYLHAVGLLHASFRPPAAVCAVRAFVRHRDSLVRTGCEHLLRVQKALDQMNVQLHRAVTDITGETGQKILEAIIKGERNPEALAQLRDYRCKKSVAEIAAALRGDWRPEHLFTLRQSFEAWQYHQKLIAECEAELRKQLDGLADQTKEAAPPPARRDKRCDAQTRQHLFEKFGVDLTAVDGVNVQTSYMFLSEVGPDLSKFPSADHFASWMGLCPDNRKTGGRPIGVSTRAVANRLATALRMAAQSLHRVESPLGDWFRRMKAKLGAPGATTAVAHKLARVLYAMIKHRKPFDPARLGNPVLRRARKENALRRAAEELGYTLQPLQAVAVS

SEQ ID NO: 485492 - protein, 449 aa, unidentified
MDVSKGYADFLLLDSNSEVLEEGFQLTDSKEGRQKLKELISQWQQQGLEELYCGVESTGGYENNWYAYLKGNFKESKVYVCRINPRGVKAVGDASLKRTITDAVSAENIACYLIGFPKKLDYGLQREPANEGFKDGRQHLTCVKMQQKQKVQLGNQLEKLLYQYFSEMLIYCRHGTPVWLLAMLSKYPTAATAVKAGITRLMAINSISESKAKAIIHKARESDQQVSAQIGHVITVTAKEILHKLGLIADEKKYLADLYKDTEEVVLLTSIVGIGVDSAVTVALEVEDVNRFESAKKMASYFGVHPTYKQSGDKVWGNHMSKTGRGEIRAILYMAVLSAVRFNPMLKAVYARFRAKRMNHKQAAGAVMHKLLRIIYGILKSKTAFNADIDEQNQQNAAEKQHANEQKDKADKKLKKQKKHRFQAISTNAPISHRAEQRIKKQIASQSSG

SEQ ID NO: 485493 - protein, 396 aa, unidentified
MTTIGIDIGGRTHVVARCRDGVARADREILRVSESRAGFAALDTWLERQPEPVTLVTMESSGHYWMPLAAHLRRRAVPVAVVNPLAAKYFARSRLGRTKSDPADARSLAEMAMRDTPPARDPLAGAELRQAARFAMTLVTEQAKACQRLIRLVELGFPELGELFDDPTCRTAREVLRIALTARAATRRRTATLANANAGPGHRRLGQARAERLQAAAADSIAVPELAAEVAFEVGLLLDQYDLLEGQIEAADRHVAELLDDELARRLRTIPGVGPSIVATLIAEVGDIGRFSDFDQLLAYAGVHPAERSSGRKGSNPETAWHMSKAGNSHLRAAAYRMAVVGVQHNPVIAAHYARKRAAGKSKMNALGHCMRKALSLVWGVWRNGQDFDPDWGVEA

SEQ ID NO: 485494 - protein, 351 aa, unidentified
MNLAGDADLIIGVDTHLDTHTAALCDARGRALSRLQVPATAAGYAQLLAWARSAAAGSRAVWAVEGTRHYGLGLARHLVSQGEQVSEIDASHHAGKRRAGKSDAIDAVRAARELLARPHPAQMRADGDREALRLLMTGRDNAIQSCKTARTALAAILVTAPAPLRERLRQLPRERRARECAALTCPEAADRQTRILHQTLIRLGQRIAALAETAADLEAQITEIVEEMAPGLVAAEAGLGALSAAQILLSWSHAGRIHSEAAFAMLPGTAPVPVSSGRTGRHRLNRLGDRQLNRALHIIAVTRMRCHPQTLAYVQRRRAEGKTDQEIRRCLKRYLARHHYRTLNSQISRPA

SEQ ID NO: 485495 - protein, 411 aa, unidentified
MDKIYDNCCGIDVHKKLIVACFRKGSRQEVREFGATTRELLELADWLRDGGCEMTAMESTASYWKPLYNILESSDLKAMVVNARHMKAVPGRKTDVKDAEWIADLLQHGLLQPSYIPDKDQRELRELVRYRKSLVGERTRELNRLQKMLEGANIKLSGTVSDINGKSARGILEYLLTGASIDGAKYDEMYERKIIAHNLKATKEQIIDDLNGVMSPLQRRMMKELLAHLDELNIHIKNLDDEIDNFMKPEEKQASQAIQDVTGIGNTSAQAVISVIGTDMGRFPTDRHISSWAGLCPGDNESAKKRKSGKTRKGNSLLRTTLITCAHAAVKNKKSYFHAQFMRISAHRGSKRAYVAVAHSMLIAIYHILKDGVAFKDLGADYYNQFNKERKINAYLKKLKALGWEVPAAAT

SEQ ID NO: 485496 - protein, 374 aa, unidentified
MGDYSEAFVGFDTSKLRNAVAIADAGRSGEVRFVGEIENTAAATAKLVRKLSAKYQRLTFCYEAGPTGYGLHRQIKDLGFECVVVAPSLIPKRPGDKVKTNRRDALSLAKLLRADELTPVWVPDGGHEAMRDLTRARETAMLDLRTKRQHVSAFLLRLGRPYPESRKTWTKPHVSWISSQNIEHPQQRLVLEEMMLAIRQAQERLARLEQAIAAAVPEWSLAPVVTALMAMRGIDLISATTLLAEIGDLSRFRTPTELMAYLGLVPSESSTGDTIKRGPITKAGNRRARRMLVECSWSYQHPPRVGQAKQPKVDAAPPAVREIAWKAQCRLYRRYRTLIRKGKLKTVAIVAIARELAGFIWAVARAARVAAAPA

SEQ ID NO: 485497 - protein, 343 aa, unidentified
MNEVITIGVDLAKNVFQVHGIDAEGGVIFRRQLRRGQMLPFFKKQPACLVGMEACATSHHWGREIEALGHRVRLMPPSYVKPYVKRNKNDMADAEAICEAVTRPTMRFVEIKTPQQQSVLMLHRTRHLFVRQRTTLINALRAHLAEFGIVAGVGRNGLERLLTVIENGEDDRVPPTARECLLALRDQLEMVKGQILDADRRILAWHRSSEVSQRLDNIPGIGPLIATALVASVPDPHAFKSGRDLAAWIGLVPRQTSTGGKERLGHISKAGNRYLRMLLVVGALSVIRRAQQVGYTRRPWLTKLLERRSTKVAAIALANKNARTAWAMMAHGTYYREPVSQAA

SEQ ID NO: 485498 - protein, 418 aa, unidentified
MKHQKMKWTYVGIDTHKDTHTAVFLDCFFQKLGELTFSNLPSAFDSFLSQAESLKANGTTLMFGLEDASSLGRTLAVFLINNKKPVKHVNSLSVARERKNGNITQKTDSIDAECTARVLLSKLDKLPFVSLQDKYWILRTLVVQRNQLVESNIRAKQTLHNLLTQHYPNYNKFFKCIDGKTSLAFFNAFPSPKYLENVTREELIAFLHIFSEKRLGSRKADVILSSVENISYDILEEHQKIRDDAIRCVIRQIEFYMEELKHIEHSMATYLQPLDCTLTSMAGIDTVSACQILSCIGDISKFKTPAQLARYAGIAPVTYASGKKDSQFADKRGNRELNALFFTLAVRLISPVGPNRKLINMFFYDYFKRKQAEGKTKRQAIKCVERRLVNIIWTMLTRNEEYVNPPVFDIPKNESVEK

SEQ ID NO: 485499 - protein, 341 aa, unidentified
MEQLSTIGLDIAKNVFQVHGVDEGGNVVVERRLRRAGVLDFFRRQPPCLVGLEACASAHYWGREIAALGHEVRLMPPTRVKAYVKWGGKNDRADAAACCEAVSRPSMRFVPIKTPTRQAVSLLHRSRRLLIEQRTRLVNAVRGHLAEFGIVAPKGTAGFARLLGETETSPSGALPAVARDALMALVEQWRETDRQIEILSARILAWHKHDSDSCRLATIPQVGPIVASALVAVAGDARRFKNGRQFAAWLGLVPRQNSTGGKERLGGITKAGDCYVRQLLVVAATGMIRRIRTNPALFPWFADLLNRKPPKQAAVALANKIARIAWALLARGGTYKAPQTA

SEQ ID NO: 485500 - protein, 310 aa, unidentified
MGVHVGVDVSKHHLDWAIGAEGEANRLPNSPAGVRRLVSGLRELDLASIVVESTGGYERLLTTALAEAHLPVVLVNPWRVRRFGEGLGILAKTDPLDARVLALYGERARPPRRPQASRKQREMADLVRRRRQLISIIVAEKSRLETASKAIRKDIEAVVRMLERRVAKLDEKIDRAIQDDDEKAALWSRLQSVPSVGPGVARALVVDLPELGQLTRRQICSLVGLAPFAKDSGKKIGARRIRAGRAAPRSALYLAAMNGARFNPVLKRMYERLLDAGKPKKVALVALARKLLTILNAMARDGKDWQEVHA

SEQ ID NO: 485501 - protein, 394 aa, unidentified
MSTVGIDIGAYQHAVAVCRDGGVEAERRVIRIGAGRAGFDELDRLLETVGPVERGVMESSGHYWFALASHLRRRALPVAVINPVASKYFARRRLQRAKSDPADARTLAALAMVDRPRTGEPLQGAELREAARFAMALVQEQARVCQRILRLVDLGFPELREAYEDPGCASALALLRLAPTARAAARRRPGTLARARTAGGAVVGPKKAAVLHAAARTTVAPPELEAQVGFEMALLIAQHDFLEQQIAQADERVAALLDGELVRRLRTIPGVGPAIVATLIAEIGDIFRFEDFDQLVAFAGVHAAERSSGKKGADPETSWHMAKTGNAYLRAALYRMALVGTQHNPVIRHHYERKRAAGKSKMNALGHCMKKALAIVWGVWRSDHDFVVPEGIPS

SEQ ID NO: 485502 - protein, 344 aa, unidentified
MEARVSVVGLDIAKSVFQVHAADADGNAVMRRKLKREEVETFFRKLPSCLVALEACPGSHFWARLLRDIGHDVRLLPAQYVRPYVKTNKNDAADAEAICEAVTRPTMRFVPIKEEIQQEVLVLHRVREMLIRQRTQLINSIRGHLTEFGIVGPNRAHKIGLLTKLIEDDEYDELPAVARHALRYLVEQLREVKSKLFRIDRDLMKVVKGSDACRRLMTIPGVGIVTATALVSSMREPSDFKSGRHFAAWLGLVPRQHSTGGKDSLGGISKRGDGYLRRLLIHGSRSIMRWRGRSWTWLAKLRDRRPANVAVVAVANKTARIVWALLMFGGTYGHPGEGATMRTA

SEQ ID NO: 485503 - protein, 447 aa, unidentified
MNSDWDVNRIKRFRQLKEEIRGSKDYLIVGIDIAKEKHNAFFGTAQGKTVWRRLHFDNNSEGFRKLYRQVEALKAEHDLKKVVFGMEPTANYHKPLGEQLIGCGEEVVLVSGNAVKHNRQLMDGRWDKNDTKDSANIADLISQGKCLYYDQPLMALRELRALLAFKRRLKKEEHSCKMRIRNNLLAKHFPEMDPYYKDTMQGLAVVRWRPDPREIANMEYEAFCKLVAPGRRTTEQDARLLAIWTKAHDSIGCEAGATLGFEAELMVSRLQEVRKAIKAVEAKIHEVCSLFPEYEYLLSIPGFGPDVASKVLGAIGNPFRFENGTQVVKLTGYDLCANRTGKGSDSAVPVISKGGKADLRYALYQAAQVASTSNKAFRDYYMNHLKGREREKGIKTKRRVKLAAKMMIIAWTLMKKKEKFNPDYLNPRNSKETPANSEEAKRPREGQ

SEQ ID NO: 485504 - protein, 349 aa, unidentified
MAMTIVEPAAGAVTGGVDTHLDVHVAAALDDIGGLLGVESFEASRAGNDKLLAWLVSFGAVAQVGVEGTGSYGASLARSLRAAHVKVVEVDRPNRQARRRTGKSDPADAVEAARAALSGRAQGAGKTGEGNVEAIRALVVAKRSARSTRIKSLNQIRHLGFTAPDELRDRLRGVTRDHLAGVAAGLRPLGGSDPVIAATKTALRILGRRVLALDEEMATIDALLGDLVTATAPRLLEVHGIGVDTAATLLVAAGDNPGRLRSEAAWAHLCGVAPIQASSGKVTRWRLNRGGDRQANGALWVVVITRMSSDPRTRAYVARRLHQGRSKREIIRILKRYVAREVFHHLPRS

SEQ ID NO: 485505 - protein, 445 aa, unidentified
MHTVRRLIQIREGVAAAWFTGTDVGLVSLLESEVIKMNTTTLFVGIDVSKTSNAVRFMDGGGDTLSMFTVPNNSDGAAKLQEKLRYTLLHTDFTKVTIGMESTSIYADHLAAHLRNDDFLRKWDCAVYVINAKNIKNFKKSYPDLDKTDGIDTLIIADYLRFDRLPKSIHHDEKYLALRNLTRARFQAAQNLSREKTRFLDTLFQKFSSLETSKVFSNTFGATALASACEFLSTDDIIYTPIGELADFVNQKGKGKFADPEAVAAALQAAARSSYRISKTVNDSLNQLLAIRLVGIRSIESQIKSLDNAIEAYMAAFQNVLISIPGIGPVYSAGLLAEIGDIKRFTGQATLAKYAGLAWAKHQSGSYEADNTKLIRSGNRYLKYYLLEAANKVRMHDTEFEDYYRFKYRETHKHQHKRALALTARKLVRLVYSLLDTSRIYTPRI

SEQ ID NO: 485506 - protein, 485 aa, unidentified
MVLGHVGESGETVEAVIPIERVSTTTYPNRRGIPMTIMEEAMAVRKRAVLELAHPNAAGIDIGSASHYVAVPADRDDESVREFKSFTDDLERLADWLVACGIDTVAMESTGIYWIPLFELLESRGFTVYLVNARHVKNVSGRKSDVLDCQWLQQLMSYGLLSGAFRPKDEICALRAVSRQRDMLLSYQARHVQHMQKALAQMNVQLANVISDIVGETGQKIVRAIIAGERDGARLAQMKNVRIRASEAEIAKSLRGNWREEHLFALRQAMALYDAYGERLAECDQQLEALLAALQPEAAGDPGKNRRRSRARNAPKFDVRAYLFGMCGVDLTRINGIDTTTALKVISEVGPDLSRFKSAKHFTSWLGLCPGTKISGGKVLSGASKRTANRAAQALRMAAAALRSSQSALGAYYRRLCARLDRPKAITASAHKLARLIYTMLTKGTEYTDQGQDYYEERYRQRVMHHLAKRAEKLGFQLTPLAVTT

SEQ ID NO: 485507 - protein, 326 aa, unidentified
MQSYLGVDVSKATLDVCLLLPTQKLRSKVFANDPQGFELLVQWLQTHAPGGPASVHVCMEATGSYHEALAIFLDERGVLLSVVNPLLVKRFAELSRQRNKTDRADARGLAEFCRNQRPERWEAPSPGLRALQALVVRLETLQAMRQAECNRLEVAHDSVADSIRSVLADLDAAIDQIKTQIARTVDDDPDLRRRAQLLQTIPGLGDRTIAQLLAYIGRPERFSSVKALAAYASLTPFIRQSGTSLQQRRGTHPSGHRQLKRSLYFPAMVAGRYNPLVAALWQRLKAQNKPGKVIVVACMHKLLAIAFGVLRSGKPFDANHLRPHQA

SEQ ID NO: 485508 - protein, 339 aa, unidentified
MTEVHLIGIDITKRVFQAHAINQNGETLWTKKLSRSQFERFIRETPTTTIAMETCGGAHHWGRVAQTVGHKVRLLPPQYVKPYVKRHKSDAIDAAAIAEAATRPGMSFVAVKTEAQQSRSARYRTRDLFVRQRTQLINAMRGQLLEFGIALPKGQNSVAPFLRDARNAIDEDVPPLMKPIAETYLRQILFLTDQIDDYEKALRKEARENTEMKRMQSMPGIGPITALAVEAFSPPMDDFKRGRDFAAWLGLAPRQNSTGGKRRYGRITKMGQRDIRRLLIIGAMSQIAASKRAPDRADPWLLDMLKRKPQLVVGVALANRMARRLWAMLYRPSEILLML

SEQ ID NO: 485509 - protein, 409 aa, unidentified
MDVMIERVAGLDVHQATVVGTVRVPAATGGRETVTATFGTMTPDLLALREWLQAYGVTHVALESTGVYWKPVYYMLEDAFTLLLINMKALKHVPGRKTDVKDSAWLAQLLECGLLQASFVPPPPIRELRDLTRYRVQQVRDRAQEVNRLCKVLEDAGVKLTSVLTDVMGVSGRAMVTALVQGTRDPAVLAELARGQLRKKLPALRAALQGHFRSHHAFLLEQILAKIDFLDETLERLTSEIETRVAPFAETLTRLDTIPGIDRIGAISVVAETGGDMSRFPSAGHLCSWAAICPGQQESAGKRRTGKMREGNKYLRATLIQAALGATHSKHTALQARYHRIKRHRGHKRAVAAVGHQILEIAYYVMRDGVTYQELGADYFDRRHTDRMLQRNVRQLETLGYRVTLEKVA

SEQ ID NO: 485510 - protein, 342 aa, unidentified
MDNLTTIGLDISKQAFHAVRLDEKNTVDLRRKFRRAQLATFFEKLDSCTVVMEACGSAHYWARKFEAMGHRVKLLPAQHVKAYLRGQKNDFNDALAIAEASIHGSIRPVMIKTVEQQDEQARHRMRSLLIRDRVALSNHIRSFLYERGIVFALGISNIDKQVPSILEDAENGLTETSRELLDRLYRQFKVLSDEVRWFTQTIEKRAKEDEVTTRLMELPGVGPIVSSALKSWMGDGKQFKRGRDASAALGVVPRQNSTGGKIKLLGITKKGDTYVRSLVIHGARAALMRAANKNDPLSLWVNRIKERRGYNKATVALANKLIRMAWVIVARGEHYRPPAIEV

SEQ ID NO: 485511 - protein, 413 aa, unidentified
MIAAVVECCAGIDVGKKVIVVCVLKGPANGDAQAQIRKFETINLALAQMRQWLMECGCTHVVMESTGEYWRPVFNILEEANTLQIVLANSQQVKGLRGHKTDPEDAHWLAHLLRHGMIRPSYIPPPPIRQLRDLTRRRRQLIGTGAQERNRIQKVLETANIKLGNVLSDVFGLSGQLMLEALLGGQSDLQKVAELAQRQAKKKIPQIRAALEGHRLSAVQGKLINLSLDHMALLEEQIAVLDQEIDQHLRTAELQPPHQLLQTIPGIKQEAASSVLAELGPDMKVFGSGAKCSAWAGVAPGNNESAGRRKRAPALRGNPYIRSTLVECAWSASRKKDSAFEHQYERLKPRLGHKRAIVAVAHSLLLVIFQVLSNREPYTGPGANPMPETQVAKLIRHHTRRLKTLRKRVRTQL

SEQ ID NO: 485512 - protein, 412 aa, unidentified
MVETIVERPAALDVHKAQVTACVRVPADGGGREQHVAEFQTTVPDLLALRDWLAAHGITQVAMEATGVFWKPVWAILEDEFELLLVNARHVKQVPGRKTDVSDAAWLCQLLEAGLLKASFVPPKPIRTLRNLTRYRKSQIQERQREANRLHKALEDTGIKLDCVASDILGVSGRRMLDALIAGTTDPVVLAELAKGSLRRKIPALRQALEGRFDRHHALWIGAILNHIDFLDEQISALSEAIEEEIRPFVAAVKLLCSVPGIQQRGAECIIAEIGVDMSVFPTSKHLASWGGQCPGNDKSAGKRRSGKSRNGSKWLDYALEEAAMAAIRASDNYLAAQYQRLRPRRGHKKALGAVKHSILCICWHMLATGELYYDLGGDYFHRRDPERQTKRLVKQLEALGHTVALQEAVAA

SEQ ID NO: 485513 - protein, 348 aa, unidentified
MAHFVGLDVSVKETSVCVVDDDGKVIWEQKVPTEPADIIALLTSLGETYGRIGIEAGPLSQWLVNALTVAELPVICVETRHMKALLTAQQINKTDRNDARGIAQMMRVGLFKPVHVKTLIAQEQRMLLTSRKLLQRKVLDLECDLRGTLRNFGLKVGIVGRSRYEARVRELVEGFPRLAAIAEPLLAVRRVMRQQLAVLHKMLLDTVRDDPVCRRLMTAPGVGAVVALTYRATVDQPQRFVHSRAVGAHVGLTPKRYQSGETDYDGGVSKCGDALLRTVLYEAAHSLLTHSGKWSWLKAWGVRVAQRRGIRRAIVAVARRLAVVLHRMWVDGSEFRWSKDNAAVPAVA

SEQ ID NO: 485514 - protein, 361 aa, unidentified
MDKYIGFDIDSNKTSVCIVQKGKADRYATIGPDVGSMSKFLVDQKKDGSRVHLTFEISGQAGFLYDSLVGCLDSIKVANPDKMTWIYRAGKKNDRIDARKMAVLLSIGEIPAVHMPSKEVRQWRMIVCHRRKLLGMLVMAKNRIRALLRGQGISRPLHKGGWWKISNRLWLKGLCGAGFDVNNMWRMQLSNLLDELQMNEKQIALVTDYLDQYLDKQAGGRLLMSIPGVGPRTAEAVLAFTDDVERFAGGKEYCGYFGVTPKLDESGNSRRLGHISKKGPSVVRWVLCESSWKVVRYSRSMKDFYERVMAGQKSRKKIAIVAVARKLLSIMRAMLLTGAMFEEGLVSSLDYGRIEGLKKTA

SEQ ID NO: 485515 - protein, 323 aa, unidentified
MTRRSTLGIDIAKASYQVSLRRADGKRRHKSCPNTEAGHAALLTWLAHHDGASVHACLEATGMYGDAVATALADAGHTVSIVNPAAVKAFAQSQLRRTKTDGVDADVLADFCAAMHPVPWTPWPVEVRTLQGLVRRRDAVQDMLTQERNRQQAGALAAPVAESLARMIEALATELADLDRQIHDHLDQHPGLRAQRDLLATIPGIGTATVARLLAECRAITAFDSARAYAAFAGLVPRERQSGTSRPRAHLSKLGAARLRYALYLPALSAMRFNPLLRAFSARLLAAGKHKMVVVAAVMRKLLHIVYGVLKHQRPFDPQALKA

SEQ ID NO: 485516 - protein, 407 aa, unidentified
MDVVIERACGMDVHKDNITACIMTPEGKEIQTFSTKTVFLIQLVDWIKEHNCTHVAMESTSVYWKPIVNLLEAEDIEFLVVNAQHMKAVPGRKTDVKDAEWIAKLLRHGLLKASYIPDRNQRELRELVRYRRSIIEERARQHNRIQKVLEGANIKLGSVVSDVMGVSARDMLNAIAEGEEDPEKLANFARRTMKKKKDELMLALKGYINSHQRLMLKTILKHIDFLTEQIEMLDHEVAGRVSSHQEDVERLDSIPGIATRMAEQILSEIGTDVKNQFPSAAHMCSWAGLVPGHNESAGKRKSSKTKKGNKYLRSALTEAAHSVRGSKNYLGALYRRTASRKGKKRAGIVVAHAMLRIAYYLLTRKKIYVDLGEDYFDKQRQQSIVRHSLRRLESLGYSVTLQEPEAS

SEQ ID NO: 485517 - protein, 358 aa, unidentified
MKKLYVGVDLHKRSCWVTVLDADGRLLESRRMGTGKQELEAYFGQLRKPAAVAVEATFNWYYFLNVMEPLGLELHLVHPWKTRAIAAARIKHDRLDSRVLAELLRTGFLAEAWIAPRRVREERQLLRYRVHTVQWATRAKNSIHGVLNRNGIRTPLRSPFGPKGRQFLKQVELARTDRWEVDGQMERLDLLGDQLAALDREIRQQAKASPVARALEQIPGIGPFIASLVMAEVGDIRRFPSAKQLISYIGLAPSLHASGEHRWGGPITKQGSSVLRWALVQAAHRAALHPRFYGFYQRQRERHGTSRAAVALARKLAVIAFYRWRHALRGAARPPQVERVRERTSGGAWSEHRPLMSD

SEQ ID NO: 485518 - protein, 368 aa, unidentified
MTVASMTYAPQSGQADACGEEVVLGVDTHKDTHVAAVLTAMGALLTSRCFPTTAAGYEQLLSWAQALGTLRRAGVEGTGSYGAGLTRHLRAEGVQVVEVNQPDKTTRRRRGKTDAVDAEAAARAVLCGRATATAKTGDGPVEMARMFKLAKDSAIKSRTQAINQLKAVLVSTDPALRESLSGLSTPKLIRRCAQLDTGVPTDATSAAAWTLRLLAHRIVGLTAEVGDLQARITNAVNTCTPRLLERNGVGPDSAATLLITAGDNPERLHSEASFAALCGSSPIEASSGKTQRRRLNRGGDRQANAALYRIALSRLRWDPRTRDYVDRRIAEGKTPREAIRCLKRYIAREIYQIIIQSRPNPTTVPSAA

SEQ ID NO: 485519 - protein, 385 aa, unidentified
MSSTDDPSQPTTVHPAPASIFASLELSRSRWLVTVMMPGGDKMSKYSVPGGDGGALLALLARLRARAERHAASPVGIVTIQEAGFDGFWIHRLLQANGIESHVVEPASIAVPRRHRRAKTDAIDGEALLRTLMAFQRGEPRVCSMVVPPSPEAEDRRRLSRERRTLVKERIGHVNRIKGLLAAQGIAGYEPMRQDRRERLEELRTGDGRPLPPRLKAEIGRQLERLELLGRQIAAVEAERGALVQEEAPAQTPAGLLMRLRGIGPEFATVLWLEGLFRRFGNRRQLAAYAGLAPSPWQSGTVKGEQGISKSGNPRLRTTAIELAWLWLRHQPETALSRWFQERVRSDRGRVRRVSIVALARKPLVALWRFVTDGVVPEGATLKAA

SEQ ID NO: 485520 - protein, 312 aa, unidentified
MEKLSYGGIDVSKDRLDVVVLPEERFFSVSNDAAGWAELVARIRPLAVSAIGIEPSGGYERGIIRALLAAGLSVRRINPNKLRQFARARGVLAKNDRLDARLIAEYVAIMPTRVVQRDEAVEKLAEVVTMRRQLRDEHVTVENQAAHIEDAMLRRLNKRRLARLEADTRLLDKRLAEMVATNAALAQRYELLTSMPGVGPVLAFTLIALLPELGQMSRKQIAALVGLAPYDFDSGKLRGHRSIYGGRMPVRNVLYMAALSGCRYNPALKAFHKRLAAADKKSKVVIVAVMRKMITTLNAMLRDNVEWQPKSA

SEQ ID NO: 485521 - protein, 343 aa, unidentified
MQAVTTIGFDTARSTFQVHGINWAGQTVIRLQLRRSRVLGFFKKLSPCVVGIEACASSHHWSRELKALGHTVRLMPPAYVKPYVKRQKNDMTDAEAICEAVTRAHMRFVPTKTPEQQSCLMLHRTRHLFIRQQTAVINSIRAQLAELGIVAPVGRKGVDELLNVVADPADKRVPDIARECLASLGAHLRKLKEQIVAFDRMIMAWHRSDATSKRLRYIPGVGPMLATALVASVADPKAFRSGRNFSAWMGLVPKQHSSGGKDRLGGISKQGDRYLRGLFVAGALSVIRYAKIHGTKHRPWLTALLARKPTKVAAIALANKLARMAWAMMATGERYKNPVALAA

SEQ ID NO: 485522 - protein, 429 aa, unidentified
MTPVINSQPEIAAWIGLDWADQQHVVCLAVTGSSQLETAVVDQKPEALQEWVSQLRLRFGGRRVAIALEQSRGPLIYALMHVDFLLLYPVNPQTLAKYRQAFYSSGAKDDPGDAWLLLDLLLKHRDHLRVWVPDDEATRCLELLVEMRRQLVDQRTALTNRLTGLLKGYYPQALEWAGELGTPRACDFLQRWPNLAALHRSSAGAIRKFYRDHGYRGAEKIEQRIAAIAQAQPLTEDSAVIVSSSLMAQALAGQIRDLAGAIEQFDRQIKERFGQHDDYTLFHSFPGAGPALGPRLLAAVGTNRDRFESALEIQQLSGIAPVTERSGQSCRVHWRLACPKFLRQSFQEFAAQSIHYSVWASAYYDQLRARGQSHHAAVRALAYKWIRIIFKCWKERTPYNEQRYLAALQRRGSPLWQAIAPQLVNADCE

SEQ ID NO: 485523 - protein, 338 aa, unidentified
MALWSGMDLHSNNNHLTIIDEERRRVYKRKLPNDLATITRELERFRAELTSVVVESTYNWYWLVDGLMDAGYRVQLANPSAIRPYSGLKHTDDDDDARWLAELAQLGILREGYIYPKADRPVRDLLRKRGQLVQQRTQNLLSIQTQIQRSTAKRLTADDVKQLNIDTLQTLVKNTDVGLAITSNLRVLQCLSEQIAVLERTVVERVKVREEFRLLQTIPGVGRILALTNMLEVGDIHRFPTVGDFASYCRCVGSARLSNGKKKGAGNVKNGNPYLCWAWVEAANFALRCRAPIERFYHRKLAAGHRVLAIKATAHKLCRAGYYVMRDHVPFDMAKAFS

SEQ ID NO: 485524 - protein, 344 aa, unidentified
MNKLRKYVGVDIASETFCAAIGQSNEGSWEIKVKATSFKNHYDSFSQFLNWLKDHGVEKRSSILCMEATGVYGEALAYTLVGNGYQVVVEAPLKVKKAFYPTGHKNDRVDSQQIAEYAYRFSDRIQLWQPKTVVIEQLKVLLTLREQLVTQKTSHHNANRALKRKVVRTPLAEQVHEAAIEQLEKHIQEVDQEIKRLIDEDPSSKELYRLFNSIPGIGPTLTPFLIVMVETAPEPYNPKTLAAYIGICPYEDSSGSSRHKQDTSRHFGPSAIRRLLHLAAMSVRQHCPLFERYFQRKVAEGKPKQLVLNNIANKLLRIVCAIARTRTPYIPGFRSVHPSLLSSN

SEQ ID NO: 485525 - protein, 356 aa, unidentified
MTTSDGATVVGGVDCHSRVHHAVALAQTGRRLGDRACPATAAGDAELLGWLRGFGTVAVVGVESTGSYGAALTRFLLEAGVRVVEVNQPHAHLRRRRGKTDAVDAEAAARKVLSGEATAVPKDSGGTVEAIRQIRLARRSAVSARTVALCQLGDLIVTAPAALRARLPRQSLRGQASICARLRPNRRALTDPVQAAKLALRTRGRRIEALDAEIARLDEHLEQLVHAVAPRTIALLGIGPQHASQLLVTAGQNITRLYGEAAFAHLCGVDPIPASSGKTTRHRLNPGGDRDANSALHMIAVVRLRYCERTQQSATRRTAAGRSKREILRCLKRYIAREVYRTLRADLADLVAAPAA

SEQ ID NO: 485526 - protein, 449 aa, unidentified
MAKKKRKYRKLERSLPVMRPNAGGIDIGATEIFVAVPADRDRESVRSFPTFTQDLHALADWLQQCRVDTVAMESTGVYWIPLFQILEARGIEVHLVNAQHVHHVPGRKSDVLDCQWLQYLHSVGLLRASFRPEHAVCEIRSLMRHRENLVQMACVHVQHMQKSLDQMNLQIHHVISDITGVTGLAIVDAIVAGNTNPKELAKLRDHRIKASIETVTKSLVGDYRPEHIFTLKQSLTAYRHYQKLIADCDQEVQQRVEAFQSNDDGPTAAADSSSATSPTAPSFDLHSHLERIFGVDLTAIPGFDVLRIQTIFSELGADMSPFPTDDTFCSWLNVCPKDGTSAGRRIRAPKVKTKNRVTQAFRMAALSLHNNKSYLGDYYRSQRARHGALKATKNAAHKLARIFYHLVKTRQPYDETVFAKLEARNQKHRLHKLQTLARQMGYSLVQANA

SEQ ID NO: 485527 - protein, 379 aa, unidentified
MEISSSTLPAVAAERATMFVALELSKSSWLVALHSPVADKVSMHRFVGGDVAGRLALIARKQTQAEARLGRTIRVLSCYEAGYDGFWLHRLLCARGIDNRILDAASILVDRRSRRAKTDRLDAAGLLRTLMALDRGESRVCGVVRVPSVAQEDARRRSRERTRLVVERGQHSNRIKGLLMTLGVRDFEPTRRDWQERLGGLRTADGRELPACLKAEITRECRRLHQVIVMIAEVEAEQAAALDAEEGRAAQLIRLRGIGLVSATVLADEVFYRDFRNRREVAGYLGLASSPWASGRVQRDQGITKSGNPRARRTAIELAWLWLRHQPGSLLTQWFRQRVGTTRGRMRRIMLVALARKLIVALWRYLSDGLVPDGAELKA

SEQ ID NO: 485528 - protein, 341 aa, unidentified
MKSNRTVVGVDTAKRVFQLHWVDMQTGEIVEVKLTRAKFLEHFANRTPCVVVMEACGGTQHWARRLRELGHDPWLLPAKMVRPFVRGNKNDSHDARAIWTAAQQPSVKTVAIKSEAQQAVLAMHRMRQQLVKFRTAQINGLRGLLTEYGEIMPKGRAGISRGIASALEQVVERLPAMVVETLREQWARIIQLDGEIGEIEGRLKLWHRSSQASQRVAEIPGVGVLTATAVVSAMGDPTAFKSGREFAAWLGLVPRHKGTGGRVRLLGISKRGDTYLRTLLIHGARSVLTNAKSPPEWAVRLAARRPLNVVIVALANKTARTIWALLAHDRVYQANFVSQPA

SEQ ID NO: 485529 - protein, 479 aa, unidentified
MNSKAKKTKKQAVINNSTLNILSKEEMARRIALVQEGMKASTWRELETNGKFTKNDKLTFISDDMLILGCDIGSETHYVRAIDSRGRELSKDALPFSNSSEGFQNAKAWALELAAANGKHQIVLGLEPTGHYWFCLAAWMVSNNISVVQVNPYAVKQTKELEDNSQRKDDRKDPKLIANLVKDGNYGMPYLPEGLYAEMRRLSMLRDQLTEDKTRNVNRLHREMKIYFPEYMDAFGKPDGAFALEVLKVAPFPEDIVGLGADGLKEIWHGAKLRGRGYSKAEQIVRYAEESVGLTQGTDGGRRAVRIFAEQIESLSETLDEIEAELHRKFREIPYAENVLEIRGIGENILAGILAETGDITRFDNAGEIQKLSGLGLVACSSGKHKGETKISHRGRKRLRYWLFQAAKSAVSHAEEFKELHAYYTTRKNNPLKKMQLLVVIACKLLRIIFTILRTGRRYDPGKMLKDIKRPGCAVARAA

SEQ ID NO: 485530 - protein, 340 aa, unidentified
MSNPAVIGLDIAKNVFQVHGADIDGRCVLRRRLRRSEVFMFFARLPEALIGIEACPGGHHWARELRSLGHDVRLIPPQYVRPFVKTNKNDAADAEGICEAVVRPNMRFVPIKSVEQQAAMMLHRTRALLLRQRTQLINAVRGHLAEFGLVARRGARNIRELADLVSNTSSEYLPDAARAMLVLLLEQVREAQVRVRQTEHALEAWAKQSDSCRRLMSIPGVGTISATALVLAMDDPKRFRSGRHFAAWLGLVPKQSSSGDRQVLGGISKRGDGYVRTLLIHGARSLTRWRRKSWQWLAELLMRRPTNVAAVAIANKTARTAWALLARGHQFQTMKTAEAT

SEQ ID NO: 485531 - protein, 407 aa, unidentified
MIFVGDDWAEAHHDVYLMDESGRRLGSQRLPEGLTGIRQLHELIAEHAEEPDQVVIGIETERGLWVGALTGAGYRVFAINPLAVARYRDRHHVSGAKSDTSDAKLLADLVRTDRHNHRLIAGDSPEAEAVKVLARTHQSLIWTRNRHTNALRNALREYYPAALEAFEDLAHGDALGVLGRAPTPQVGAHLDLAAIQSALKRGGRKRNIAARAHEIRAALRTEQLTAPAPVAAAFGATTGATVGIIAELNRQISELEASLDKHFETHPDADIYRSLPGLGVILGARVLGEFGDDPNRYTDAKSRRNYAGTSPLTIASGKKRAVLARHVCNRRLYDAIDQWAFCSINTSPGARALYDQHRAAGDLHHQALRALGNRLVGILHGCLRHHTPYNEHTAWAHRMPAGLPLVP

SEQ ID NO: 485532 - protein, 354 aa, unidentified
MKRTTKYVALDVHQATTVASVREESGRVIARSVLPTDPGALTEFVRGMRGARHVTFEEGTQAQWLYDLLAPLVDRVIVCDRRGAARQGNKGDQVDADQLSELLRRGALRAVYHGSADRATLKELTRTYQNLVEDATRVMLRLKALFRARAIPTRGTNVYQARARGQWLAQLGDQGARFRAAALYAELDVLRTLRPRAKAAMVTEARRDPAWHVLGTIPFFGPVRVALLLATMQTPWRFRTKRNLWAYAGLAVVTRSSADYALVAGQAVRRRRPPMTRGLNRNHNRVLKDVFKGAATAATARPGPLQDFYHNVMARGTREELARVTLTRKLAALTLRLWKKGERYDPTQLTTPAR

SEQ ID NO: 485533 - protein, 320 aa, unidentified
MPQQGRIVGIDVSKLKAEACIRSLQQRRCEPSTPQGEAALIAWLRANAVTLAVMEASGGYERGWAEALRKAGIAVRVVDPKRVRYFAKSAGRLAKNDPIDAEMIAWFGETFTAEAEPAHDPECAALDQLVTARRRLIGLATQVAQLAEHRQPRVVAQAQQAIGKIVKTQLAKLEIAIDAKIAANAAFRARAAIIRSVPGLGPHFTAGAIAWLPELGRISSKAAAALVGVAPYDDDSGERQGERRINGGRREIRDLLYMATLAAASRHNPVVKAYYQRLRAKGKKAKVALVACMRKLIVILNTMLARGQNWNPPAAAGVLA

SEQ ID NO: 485534 - protein, 391 aa, unidentified
MALYFIGIDISKYKHDCCIISAADQQVVAKFTFRNDREGFDTLVDTLQSFAEPMDVRIGFEATAHYALNLELFLENALLTFMEVNPALISKYRESLSLRKTKTDSIDCEIIARWLMTVDYKPHPKGFYHSYSLKSLTRLRDRLVRQRSLYLVKLTNVLDHTFPEFKPFFGERFSKTALYLLQNYGTAEKMSHMNSASYENLRSISRGKFSPQQFLKLKELARDTVGVSNSIFTTELNSLLDLYSNVSENISDIEDQIIKLINDVHPHFMTVPGIGPLSAAVIYAEFGDISNFSSPAKMLAFAGLEPKINDSGTENHGGRMVKRGSSQLRYVILNCILPMIRFDVTFAQYYAKKRKEGKPHRVALTHLAKKLVRVIFALERQQIDYDPALIR

SEQ ID NO: 485535 - protein, 342 aa, unidentified
MALDASTGQVWQRKLTPDPAGVLAWVSTLPGPVKVGYEAGPTGYGLYRFLNDHGVSCVVGAPSKLQRPHGDRVKTDARDSELLARLLKLDEFAEVTVPSVEQEAARDLVRAREDVRGDLMRARHRLSKLLLRQGILYTGGKPWTGVHDVWLRSQRFEQPARQTAYDAAYEAVVLTSDRRSRLDAEIEVMAADSSYTEVVHRLGCLRGISTLTGFGLAVEIGDWHRFTGATIGAFVGLVPTEHSSGRSRSQGSITKTGNGHARRLLVEAAWHHAKPYRAPGKVIRDRWDLAPAAARVRGHEGNRRLHQRWQAFNARKKKPTIANVAVARELAGWCWSLAVMDD

SEQ ID NO: 485536 - protein, 320 aa, unidentified
MQTPTEVLNIGADVAKDEIVVACSQGSFPVRKLANQRSALLAFLKDLPAGSRIGMESTGAYHELLADAAHKLGFVVFVLNPKDARHYAKAVGLRGKTDRVDAELIARMVAHEHTKLHPWIPPTAEQREMARLIKRRAKLSSLRQALAMSLKGLDGFATDLKALRARFDQVLVRIDQRVKALVEASPDRKQHVTHLRTICGVGPVVSAALVNTLERMPLKSADAFVAFTGLDPRPDDSGQHRGKRRLSKRGPAELRRLLYVAAMSAKKKQAWKPLFEHYRAKGLSSTAALVIMARRIARTAWSIYTYKTDFDPARLTKSLT

SEQ ID NO: 485537 - protein, 420 aa, unidentified
MKVHNIDNFAVLIGIDWADQKHDVCEYSLDSGKYKYSIIKSTPEALHDWAMSLKKRYPNQQIAVACELKKGPLIYALAKYNHLTLFTINPSAVAHYRKAFTPSNAKDDPSDALMQVEILTLHMDKLTVIEPESAAMRSLTQLVEYRRNLVQDSVNLSNKITATLKNYYPQALEWFKEKDTFIFCDFIIKWPSLTHAKRAKKQTLLDFFNSHNSHYAHVNEARIASIKNAMELTEDSGVIEPNQMLVEVLIKQFKVLLKGIETLDKAIKQAYKAQDDKVIFDSLPGAGPQLAPRLLVAFGNNRERYGDASELQKYAGIAPVIERSGKKMWTHWRYSCPTFLRQTFVEWAGFSIRYSFWAKAYYEQQKSKGKPHNSIIRSLAFKWIRIVFKCWKTSTPYDESKYLEALKRRGSPLLKFAINS

SEQ ID NO: 485538 - protein, 343 aa, unidentified
MGEISMIGLDIAKNVFQVHGVDASGTAVLQRTLRRGQVEKFFAQLPATRVGLEACGSAHHWARVISGYGHEIRLMPPSYVRPYVRRNKNDARDAEAICEAMGRPRMRFVPVKSAEQQAVLAVHSTRALLVRQRTMLANALRAALSEVGIVAAQGIKGLRELMQQLESASEKIPELMRGALLIMAQQWQQLDAAERALERQIKQAALADQDARRLMEVPGVGPITASVVLAKVPDVSVFRSARDFAAWIGLTGRDHGTGGKHRPGPISKQGDRMLRSLLICGASAYVRQQRVRGAKNPWLRALLARRPYKVVIVALAAKTARILWAMLSRGENYRDRASVPAAA

SEQ ID NO: 485539 - protein, 343 aa, unidentified
MQSITTIGLDLAKSVFQIHGVDSEGVVVVRRALRRSQVLDFFRQLPPCLIGLEACASSHHWAREIASLGHDTRMIPPVYVKAYVKRGKTDAADAEAICEAVTRPTMRFVPIKSVDQQAAGMLLRTRDLLIRQRSQLANAFRAQMSELGVVTALGMVSVAKLADKVRDPSLSMPAIARYALLEMTEQIDMLTSRIERLDEQILAGVKADETARRLISIPGVGPLIAATVRASVNDISAFKSGRDFSAWMGLTPRLLSSGGKEKLGSISKQGNRQLRTLLVVGASSIIKQAKRGSKLPEWLASLMTRKPYKLVAVALANKMARIIWALLAKGGVYRPPAQMAAVI

SEQ ID NO: 485540 - protein, 355 aa, unidentified
MTSTKYIGMDVHKESISIAVMNAAGKLVMECVIETKASTILQFIHGLRGDLHVTFEEGTWAAWLYDLLKPHVTEVVVCNPRKNALLKDGSKSDRIDARKLAEQLYMNRIKSVYHGEHGLRTLKELARSYLTITKDLTRVMNRLKALYRSWGIPCAGNEVYAPRHRSEWLSKITEAGVRRRAEHYYQQLDVLRLLRQEVRRDLLAESRKHKAWKLLRLIPGIGPIRAALLVALIQTPHRFRTKRQLWTYSGLGLETHDSAQYRVVDGQLNRSKKSVTLRGLNKDHNHDLKDIFKGAATRVSSSSGPLRDFYEALLAKGRKPTMARLTLARKIAAITLIVWKKEVRFDANYLKPQAA

SEQ ID NO: 485541 - protein, 423 aa, unidentified
MKKHIYKAVKINAVDREWLANEVRGKAVVVGNDVAKENHRAAVVLAETGRTVVTLAWQAPGEQRDFVALLRSLPASSLAVVVEPTGSYGDPLRWQLGEAGIAVYRVSPKRAHDASEVYDGVPSSHDPKMAAVLARMHRDGLSQPWPADDPVQRDLKAAIETLARYTGAAQQLQNQLEARLARHWPEVEALLALDSVSLLALLARFGGPETVAAQAGPARQLLHAKGGRLLSSAKVEAVLASAAQTVGCPPTAGERRALQDLATELLRQLAHEREAKRAVEKLAQAHAGIAAMAAVVGMTTAAVVFAKVGDPGRFPSAAAYEKAAGLNVKERSSGKYQGQRKITKRGPGSARKVLYLAVLRRIQKPGAFATWYERKVARDGGKTKLKAIVALMRKLIRALWHVGQGEAFDEAKLFDLRRLGLAA

SEQ ID NO: 485542 - protein, 357 aa, unidentified
MTIVAHSHPYVIGVDTHARNHVLAVLAAPTGELLDTAEFPTSKAGMTRAVAWAARRTGGDLATLWVMEGIATFGAQFARTVTEAGYHVIEAPRMGVHRGKGKSDPIDARRIAEAALPLEEHELRHPRADDGERAALRVLVTARDQMTDERTANVNALTALVRAVDLDIDGRRALTGRQILEVSRWRTREEPVAVTTARGEAIRLAKRIVALDEELSANAKSMTALVRATPAAGLLDKPGIGPVTAAVVMTAWSHRGRVRSEAAFACLAGVNPIPASSGNTVRHRLNRGGDRRLNRALHMATVSRMIHDADTRAYVERRRAEGRTNKEIRRSLKRYLARQIYRHLNTADLPPTSTCAS

SEQ ID NO: 485543 - protein, 417 aa, unidentified
MDTLFAKVAGLDVHLKSIQVAVRCRRESGKLDRQVRSFGTMTRDLRALADYLQSLGVTHVAMEATGVLWKPVWNILEGRFTLLLVNPRHLKRVPGRKTDVSDAEWIAQLLQCGLLCGSFVPARRLRDLRDLTRHRAQLAGEHTRVANRIHKLLEDANIKLGAVASDVLGKSGRRMLRALLDGQDDVDVLANLALGALRKKIEPLKLALEGHCTEHHRYMLGRLLSHLNYLEEQTDRFSEQIGHRLSELLSRSSFDRLDRIPGVNRTTIENVIAEIGVDMSIFPDEHHLASWTGMCPGNEESAGRRLRSRTRKGNRWLRRALAEAAWAASQAKDSYFRAQFRRVASRRGKKRALIAVGHSLLVVIYRVLKDGVDYRELGPDYFDRLEPERLRRYLVKRLQSLGYNVELSSRMPEESVA

SEQ ID NO: 485544 - protein, 346 aa, unidentified
MILDVDTHLDIHVGAVISQAGKQLGTHIIQTNQTGYLELLDWDRSFGILERAGIEGTGTYGAALTRYLIKNGIYVVEVNRPDRSKRRLEGKSDPLDAENAARTVLSGSSKAIPKMQSGACEALRIISVARRSAIKARTQAINQLRALLVSAPQDVRDKLWKSKPHECVTACLNSEVSEYSPLRIALCSTLRSLAKRWKALTEELNKLDESLDKLTRKDASNLRSQFGVGPQTAATLLAVAGDNPERLKNEAALASLCGVNPLPASSGKTVRHRLNRGGSREANNALWTIALVRMRSDPRTRIYVDRRTGEGLSTKEILRCLKRYIVRELYPLILSDLAYANRPLLT

SEQ ID NO: 485545 - protein, 414 aa, unidentified
MAKNDRIVVGGVDTHKDVHVAAVVDEIGRILGTSAFPTTAKGLTELHTWMRSFGDVGRVGVEGTGAYGAGLARHLGGEGVEVVEVNRPNRQMRRRRGKSDTVDAEAAARAALNGEATVAPKAQVGVVESIRVHRVAFVSARSHRTQVALQIRDLIVTAPPELRAVLGPLATEERVARCARFRLVGDPANPSVGVKIALRSLARRHEALTIEMAELEATLDRLTAVANPALRGAKGVGTDVAAILLTAAGDNPGRLRDEAAFAAMCGVSPIQASSGKIQRHRLNRSGNRQANHALWRIVNVRLTCDPASKAYLERRTAEGKSRREIVRCLKRYVAREIFRLLVVPEAVPAGADLRMARIARGLSMTPVATALSTSINAISRLERSVIFDTDLARRYESFLASISENEPHAVPAAA

SEQ ID NO: 485546 - protein, 367 aa, unidentified
MKQSSKIFVGMDVHKDSIDITVAEQGGEVRRFGEVSGERSALLKAVRKLTSRGGELVFVYEAGPCGFWIHREIAALGHACWVVPPSLIPQRPGNHVKTDRRDSENLARLARAGELACVHVPDVRDEAVRDLVRARDDAVIAQRRARQQLKALLLRNDIRYVGKTSWTSAHLRWLSELKLPQPAQQIAFQEYVDAITVATGRIGRFEQAIREEASTWRFAPAVVALQAMRGIQFVHAMTLIAELGDLTRFESPRQLMAYLGLVPSENSSGQRRRQGSITKAGNAYARRVLVEAAWAYRHPARLTRIIALRQEYLPKPVCDIAWKAQLRLCAKYRRLRARRVLETKIIVALARELSGFVWAIGQQVKPQ

SEQ ID NO: 485547 - protein, 375 aa, unidentified
MTKHSEVFVALDTSKLRNAVAIAEAGRAGEVRFLGEIENTAAATTKLVRKLEAKYERITFCYEAGPTGYELQRHIRGLGHECIVVAPSLIPKKPGDRVKTNRRDAVSLVKLSRAGELTAVWVPERRHEAMRDLTRAREAAVIDLRAKRQRISALLLRQGRPYPADKKTWTKVHMNWLASQRFEQPERGIVFAEMMFAIRQAQERVERLEQAIRAAVPEWSLAEMVTAFMAFRGIDLVSATCLLAELGDLTRFPTAPEVMGYVGLGCSEGSTGDKIKRGGITKSGNRRARRMLVECAWSYQHPPRVSIAKQANVAAAPAKVREIAWKAQCRLNRRYRVLLRRGKLKTVAITAVARELAGFLWAAARELSSPERVAK

SEQ ID NO: 485548 - protein, 351 aa, unidentified
MARIWAGLDVGVETTSLCVIDDAGAILQEGACATDLGCIHRQLRWLRRRRHAQVGIEAGAATLARGLRTLGYSVTLYETRQLSKFLRVRRNKTDAGDALGIAEAGRIGASLVSKVHLKSLECQLLQSRLTIRRHLVRQRVATVNLLCRQIESYGGRIAGPTRRLVLRSRVEAELNRLFGKQEGPVQNELRKLVAHCEDLIARQYAIDRELKRLATETEVCRRFMEIPGVGPLAALTFYAVVGDPDRFTPSTDVGSYLGLTPKLHQSGLSSRSGRISRMGNVAARTLLVQAAITFMRLGRTAGTELRSWTVSVEERRGRGRSRIALARKLAVIMVSMWKSGECFVARPAVES

SEQ ID NO: 485549 - protein, 325 aa, unidentified
MVIDGILGIDVCKNTLDVSISSYTKVRTKSFTNSPDGWRHLLDWLIAQKIQRVHACLESTGRYSLGIACALYEADHVVSIINPAQIRDFVRTKLGRNKTDGVDASHIREYCELFKPSPWAPPSEAHRRLGELQTIRSGIIAGLTEWKNRKNSGIVDAEAQALADATISHFTSQLGAVDKAIALTIDNDCDLQSKRDLLLSISGVGETLAGVVLAELPGPDVLRSSAEVVAYAGLNPRQHQSGTSIDRATRISKIGNAVLRAALYMPALSAMRYNSAIVALVTRLKSRGRLKPKQIVVAAMRKLLVLCFGVLKTGRPFDAAIAMGG

SEQ ID NO: 485550 - protein, 368 aa, unidentified
MEKFITFVGLDVHKNTIDVALADAGRNAEVRHYGTIGGGLGDLDRLVKKLSSPNKELHFVYEAGPCGYDIFRSLTDKGFDCAVVSPAHIPKKPADRIKTDRRDAMMLARLHRAGELTYVFVPRTDDEAMRDLTRAREDAKKAQRVAQQQLNGMLLRLGFRYPKDNWTKQHFLWLADQKMPMPAQQVVFQEYINAINETNARVERLTQQIETLVPTWRMAPVVKALQALRGVSLIVAVTTIAELGDLTRFDHPKKLMTYLGLVPSEHSSGEKTQRGKITKTGNGHARRVLVEAAQAYSHPARITRPLLKRQEGLSQDARDIAWKCQVRLCTRFRRLMAKGKNRNAVITATARELAAFMWAIANHTPIAI

SEQ ID NO: 485551 - protein, 376 aa, unidentified
MHKYIWVGLDVHKVTIAVAVAKGEEVPHSLGTIPNDPDAIAKLMRKLGPSARLRVCYEAGPCGYVLYRQLTAMGIDCAVVAPTLVPVRAGDRVKTDRRDALKLARLLRSGELTAVAVPDEAHEALRDLVRAREAAHKDLRRARHRLQKFLLRQGHRCPLRTKAWGVRYLAWVSGLHFAHAPQSVVHREYLAEVERLAERRTRLDRELEVALAQAPAAIQTVVRALQVLRGVAFVTAVTAVAEVGQFRRFTRARQLMAYSGLVPRESSSGDTVWRGAITKTGNAHLRRVLIEAAWQYRHQPRAGITIRQRRKGQAAALCAIAEKADHRLHLRYRRLLARGKSKGKGKVVTAIGRELLGFLWAVAVHAENGSTMPAAA

SEQ ID NO: 485552 - protein, 382 aa, unidentified
MSVYVGIDVHRKRSQVAVIDQDGQVLANRNVNNGVTPILSVIGGLPPGTKAAFEAAFGWGWLAGLLEDYGFEPHLVHPLQCKAIASARLKNDKVDAAILAQLLRADLLPEAWIAPLEVRQLRALLRHRAQLVRLRTLLQNRIHAVLADHGHDRPAGCWSGPGREWLASLDLPAISAEVIRDALALIDALESVIDRLDLEVRQHARSDPRVKVLTQLPGVGPFTALVLLAEIGDITRFASARKLASWAGLTPTVRGSDRTVRHGHISKMVCAGGMVPLRRPEVCDGGGWRIGFAPGSADVRLCRYRDGRELAWPDLACGPGEPARVAAPVPRRAGRGVRGRGVHRVALRGGGTAAGRDHSAPGRARRDGRPAGPQAPRQDGLG

SEQ ID NO: 485553 - protein, 341 aa, unidentified
MSLVMGMDQHRAQISAEWIETITGEISRARVAPADRAGVRRFLAQLEGVGLEVALEATTGWRFVVEELERIGADVHLAEVVQTSGLKGRGKRAKSDWADARHLRELLLIGRLPESWIAPAHLLDLRARVRCRHTLLHQRTEWQQRMQAVLYHHGAPHARGLLKLANRERVAALKLPPAAREQLTIALQMIDAIDLQLAPFDLALRAYARKQPGCRTLTDEIYGIGELTSVTILPELGDTRRFQNSRDAVRYAGLDVTVHQSDQRRAVGHLSRQGPPALRWALYEAAQAARRPGSPDRDYYEQLAARIGGNRACIAISRKLLKRSYHLLRALGDQALEPVTT

SEQ ID NO: 485554 - protein, 319 aa, unidentified
MSTMNQVYSDPEGKNIGVDVGKSQLDICIHERNEHWDTGNNPTDIRTLVSKLSRFKLARIVVEATGGYERDLVEACAERGLPVVVVQPMKIRNFARIKGVIAKTDKIDAQVIAEFAVTMKPEVRPLTSNNIRAFKELLARKRQLNEARTQELNRQHKASKVAQRSHAAMIKFLDKEIAWVNDKLAKAMNQIEEWQQNYELLSTVPGIGDGVTYTLLGELPELGSLTNREVGALCGLAPFNKDSGSMRGKRRIRGGRAPIRTMLYMAMLSAIQHNPVMRSFYLRLVVQGKHKKVAITACMRKMMTILNAMIRDQKPWQMT

SEQ ID NO: 485555 - protein, 412 aa, unidentified
MTHPKMQYTYVGVDSHKDFHIAVFIDCFFEKLGEIRFDNRPSKFEAFLEESRTFQAEGTALLFGLEDVGSYGRPLAVFLKANGQRIKNVNALLVKRERQNQNVSHKTDTGDAECTARVLLSKFGELSDAEPQDKYWILRTLVIRRDFIVKNNTSLKKHLHYLLMAHYPRYRDFFEDIGCMTSLAFFMRFPSPSALENTTFEELTGFLRDCSKGRLGAETAEKIWHSYEDTAVQYQEIRDAAVQSAIRQIQFNLKERERLEKSIALFLSQFDCPLTSMTGIDIITAAQLLSCIGDIKRFPTPAKLARYSGVAPVSYSSGKKDVQFVNKRGNRELNSLFYCLAVRLVATAGPNHKVVNHFFYEYYRRKLSDGKTKKQALKCVQRRLVNIIWTMLTNNEEYVNPPMYDAPKKKAL

SEQ ID NO: 485556 - protein, 345 aa, unidentified
MQSTVIAVDLAKTVFEIGVSHQPGKVLERHRVSRKLFPRFFAERPPATVVMEACGSASYWARRLRELGHEPVLLPPQHVRPYRRGNKTDRADVKALLEAYRDEEIRPVPPKSPMQQTLAALHRMRSAWVAARTARINTIRGVLRELGVVIPQGARRVVPQVWSLVEDAESQIGDALRPVLAEACQEIRDFETRIKAVERQLEQLADQTPVVTRLRTIPGVGLLTGTALVAFVGDVQRFPSGRHLASYLGLTPREHSSGAVRRLGRISKRGDTYLRTLLIHGGRSALLAASRTKDPDRLRAWAMELQGRSGHNKTAVALANKIARIAWALWRNGGEYQPAPLTMTA

SEQ ID NO: 485557 - protein, 322 aa, unidentified
MNKYKETFGVDISKDVFDVHGSKAGHNQYKNDEPGFRKFLKELPQSSLVVMEATGYYHYRLAQFLHKNGVSVSVVNPLSIKRFIQMKLAKVKTDKSDAKAICKYALINEVPLYNALTDTQSECLQLFRLLDTYLKQRTATKNKIHREAVLGIPSKFVYRSLVRNKKQLDKEVAAIESKILSLVKVDQQEQLTLLTSIPGIGQKTALFLIVVTDGFSKFETASQLCSYVGITPTIRESGSSVRGRARISKVGNRKLRNLLFLCSFNACKHNKACKEVYERIVNKGKSKKLALIAVANKLIKQSFAVAKSGRPYDETYVSILPG

SEQ ID NO: 485558 - protein, 347 aa, unidentified
MTLYCGVDFHSRRQTVCYCNSKDGEVKIKDLHHYEDDVRAFYEQFKNEQVIVGYETSGYARWFEQMLIELGIEVWVGDATEIARLGKRRQKNDRRDAEHILDLMLKDEFPKLYRQSEKSAEILRLLRQRHKLVKHAVMVKNSLRRILIETGLSFKEGLASKKGKQKLRDLKLPPLLATERDRWLELLVGIEKQIVELEQMLAAQANEDERVQRLLTHPGVGLLTALCIVHTLGDVTRFASVRKVAAYAGLEPMEHSSGERRRYGAISKAGSRLLRFLLGEAAHMAARSDDELKQFFRRLKPRCGTLKAIIATARKLLIRCFIMLRDEIDYAEFRRRGIETRSARVCT

SEQ ID NO: 485559 - protein, 412 aa, unidentified
MEQIHDRIVGLDVHRDQVTACVRIPGPRGGARTEKGRFGTTTGGLNALAEWLSGHAVTLAAMEATGVYWKPVYYVLEDRFQVWLCNAHHVKNVPGRKTDMSDAEWLADVAAHGMVRPSFVPPPPVRELRELTRYRKTQVDARAAEIARVEKVLQDAGVKLTSVASKVLTQSGRAMIEALIAGERDPAALAGLAKGKLRPKIPQLTEALDGHFGAHHAIVAARILTHLDSLDDAIAVLDGQIAARVAGRYQSAARLLADVPGLERRSIEVIIAETGADMSCFPSPAHLASWAGLCPGNHESAGKRRRVATTPGNQWLRRTLIESARAAARTRDSYFGAQYRQIARRRGPNKAAVAVAHSMLDVIWHMLTTGEVFTDLGADYFTNRQDKEHQTQRLVKQLEKLGYTVQLAAATA

SEQ ID NO: 485560 - protein, 412 aa, unidentified
MQKRENYLYVGMDLHKDTHTAVLVNCWNEKLDVIVIENKPSEFSKLAKRVNKKATALGLSPIYGLENAYGYGRSLAVWLIEKGYTVKDVNPSLAYDQRKSAPMMKKNDEHDAYCVATVLINQLHTLPDAKPEDNHWTLSQLVNRRDTLVKDGIRLKNGLHEQVSVAYPSYHRFFCDIDRKTALYFWKHYPSPIHLRNKPVNELFEEFKAIASNTTKRKIELIVECVQNDGDTIRDYQESRDFIIQSLARCLEQQKEEIALVDCEIENMLKYFDYQLTTIPGVNIATASKLIAEIGDIRRFPSADKLARYAGIAPIKFSSGGKGKEQSSKQGNRELHGLFYFLAVSMVTVPKTGKPNQPIFYAYYQRKISEGKTKSQALVCIMRRLVNIVYGMMKNKTEYRPFVVEDHVVEEQ

SEQ ID NO: 485561 - protein, 343 aa, unidentified
MNEYDGKQFVGIDLHRRHSVIVRQTSTGERLSAVRIVNDPDSLALQLEEAGEHPDVVLEATYGWYWAVDALQAAGATVHLAHPLGVKGFRYRRVKNDVRDAGDLADLLRMNRLPEAWIAPPPTRELRELVRYRAKLVALRSGLKAQAHAVLAKAGVLIAVSDLFGVEGRQRLARVPLGAAYAQRMSSLLELIDVLDTHERRFAEQIAAKLYDDRGYGAIQQLPGVGPVLGAVFVAEIGDVHRFADPSHLCSWAGLTPQHRESDTVVHRGHITKQGSKLVRWAAVEAIQRQPAGTKISVDRKRIEARRGKNIAKVAAARKLLTLVYYGLRDGHIRALTHQPAAA

SEQ ID NO: 485562 - protein, 351 aa, unidentified
MMIVGCDFHPSWQQVSFFDSETGEVSERKLVNGNGEAERFYRQLPPGSLIGVEACGNSQWLIELLQRLGHEVWIGDAAQIRASYVRKQKTDRRDAAHILKLLVEGRFPRLWTPSSEQRDLRQLLIHRHKLVEIRARGKNGLQHLMLNRGVQKKHKLWSEAGQKALRELALEGWARCRREDLLVLLAKLDGQIGELDQAVQKAAEKDAAAWLLMTQPGVGAITALAFAVTIGDAKRFQRGKQVASYLGLIPREHSSGGQQKLGAISKQGNRFLRMLLVEAAQSACRYDEGFKKEYQHRCHQKPKGVAKVAAARKLAVRLYWMMRTQTAYPEIVHNESSPRVPLVGERARPMD

SEQ ID NO: 485563 - protein, 297 aa, unidentified
MAQSRTRYVGMDVHKASIAVAYGAQDYGAEGISLGTVGTRQCDIDTRIRPLQAKSQPLVFVYEAGPCGYWLYRSLTTTGHGCRGVAPSLIPKKSGARVKTDRRDALQVARLMRSGDLTPVYVPAVHDEAMRDLSRAREATRHDRKTATFRLKALLLRHDRRSTGRATWGPAHLRWLREVVGPTPAQHIVFPEEVRAVTAHPDRRQRLAQERHAQGTAWRRGPVVDAVPALRGVQLTVAVTPVAARGALTRFEPPRQRMHDRGLTPSESSRGERRRQGGLTKTGHTPARRALVEGAWA

SEQ ID NO: 485564 - protein, 408 aa, unidentified
METLHRRCAGLDVHQKEIVACRRIVSGGKVRSELGRFATTTQGLLALSAWLAEARVTHVAMEATGVYWKPVWPVLCHDFSLVLANASHIRNVPGRKSDANDAAWIADLLAHGLIRASFVPPQPIQELRDLTRTRRALTREIVRHTQRIQATLEEANIKLASVISDILGFSGRRILKAIVAGESDPQRLAELGHSRLACTREELAAALDGRPRDHHRFLIGQHLKTIEQIEATIAEFDARLEAALAPFLDAAERLKDIPGFGGNVAQTVLAEIGADMAAFPTDDHLVSWAGMCPRLDESAGRKRSKRLRKGAPWLKPVLVQAALAAIKVKNSSLRARYFSLKPRLGHKKAIIAVAAAMLRIAYHMLKDGTFYQDLGPDYRGRRNPQRAAQNLAKRIRALGFEVELKRAA

SEQ ID NO: 485565 - protein, 400 aa, unidentified
MTGSRLWAGVDVGKEHHWICVLDTSGAVVLSRRCDNDEATIRAVITEIDALAETVSWTVDLTTAYVTLLLTVLADAGKPVRYLSGRSVWQASSVYRGGEAKTDARDARVIADQSRMRSDLPILRPDDELIRELQMLTGHRTDLVADRTRTINRLRQQLVAICPGLERVAQISSDRGWVVLLARYQRPKAIRRVGAAQLATMLTGAGVRHAESIARAAVTAAKAQTVRLPGEDVAAELVAELAQAVIDLDTRINAVDAEIEARFRRHPLAEVILSLPGMGFRLGAEFLAAVGDPALIGSADQLAAWTGLAPRPRDSGKRTGRLHTPQRYSRRLRRVMYMSALTAVRCDPASRAYYQRKRAEGKRPVQATIYLARRRVDVLYALLRDNRTWQPNVPVTAVAA

SEQ ID NO: 485566 - protein, 489 aa, unidentified
MLAELSAATAPCATAMHPQTPAALDRSLHYTICSPWQQTKERKTSMIANVAPEPAPEAPASALPLGEFACCIGLDWGDQKHATALQARGSHAIECAELPSKPEAVHQWLESLQSRFGGLPVAVALEASKGAIVDILLQYPWLTIYPVHPATSRRFSMAFAPSGAANDEPDAKNLLEILRFHRHRLRAVVPADEQTKRLAAQVQIRRNIVDQLTDLSNQLTSLLKSYFPQALELTGEDRLSGLSLAFLQRWPDLISAKKAKPETFRSFYYKHQVRRPELVQKRLELLRQARPLSQDPLLLEISLLSLPRLLAQIRVLQEHLEIMEKKIQESFAAHDDAFIFKSFPGAGASMAPRLCALFGRDRERWGDAAEMQKYYGIAPVIEASGKQRWVHWRWNAPTFQRQTLVEWAGLSVRYSLWAKAYYDQMSQREKPRSVILRALAFKWLRILFRCWKSRTPYEEAAYLKALQEKGSPRRGVACSPAPQKNRKNP

SEQ ID NO: 485567 - protein, 344 aa, unidentified
MDHFAGLDVSVKETSVCIVDDTGKIVREVKVASEPEALLAVLKNSAYHFKRIGLEAGPLSQWLFSALAEADLPVICVETRHMQAVLKAQINKTDRNDARGIGQMMRVGLYRPVHVKTPRSQKLRMLLTHRKLLQSKAIAIENDLRATLRNFGLKVGMVGKVKFEARIKELVETLPDLAALVEPLLIVRRVLREQIVILHRRLLAIVRDDEVCRRLMTVPGVGPVVSLTYRATVDVPARFHKSKAVGAVFGLTCSKYQSGEIDRSGRISRCGDEMMRVMLYEAAQSMLRSKKWSWLKAWAMQIVRRRGMKKAIVALARRLAVIMHRIWVDGTEFRWTREQATAAA

SEQ ID NO: 485568 - protein, 325 aa, unidentified
MRLTVGVDVSKAKFDAALLTSQGKYRSKVFTNNLEGFQAFLAWLETNAEAGNEVQACMEATGTYHEALATFLFDSRIVVFVVNPLRVKRFVESEGLRNKTDAGDAKALARFAARNELDAWEAPAMSVRVLQALVARLQSLRGMRQAEMNRLQVAHASVQGSIKAMVAALELQIEQVREQINQTIDDDPDLKQRKDLLDSIPGLGDGTIPTLLAYIGRPERFKTVKALIAYASLTPSIRQSGTSLDKRKGLHAGGCHELRKALFYPAMVAGRYNPVISAFWQRLKAQNKPGKVIVVACMHKLLAIAYGVLKSRRPFDASLALPQSA

SEQ ID NO: 485569 - protein, 393 aa, unidentified
MSEYIQKSFSTFNSDIQKFHDWLIEHECKHVCMESTGKYWIPIFNYLEHDIDVCLTHPKYVKAIKGKKTDKKDSKWIADLYKFDLVRCSFIPPKDFRQLRELARYRFKLVCMKSSEKNRIQNCMTVSNIGIASVLSDPFGKTATEITSYLLTHTADTINEKAVRKLIKRSAKAKSNEIIEAIKGYNIETDQAKKLELARAHLDYLDDMITQTEVELYVRIKPYYEFVEYISSLPGITELSATIILAEIGVNMAIFDDAKHLCSWCGLSPSSNESAGKKKSVRIAKAGTYLKPMMVQCALAAVKSKKQPYFAIKYHRIKKRRGHKKALIAIARMMIVSIYHMISKEQAFNPIDYTELLDPHFHQSKVVLNESNVFIYLESQGYGTSLLVKCNDN

SEQ ID NO: 485570 - protein, 429 aa, unidentified
MKIIYPRVCGIDVHKKFIVAVICISESVEPIYLKKRFSTFHNDLIRFREWLIQNDCQNVCMESTGKYYIPVYNVLESHISNIVVANPKWVCAVKGEKDDDKDAKWIADLFKFDIVRSSFIPQKDFRILRELTRYKYKLVNMRSSEKNRFQNALTSGNCKLDMVFTDVFGKSASNIIDLILSDNPYTDEDILSKVHKKCKASPDMILDSVNGTDLTPVQKSRIELVNDHIKQLSSNIQRLDKLIDLMIEPYEDYISFLCQIPGVSRNSAIIVLSEIGVDMNQFTSTRRLTSWAGLTPSSNQSAGKKKSVRISRAGVYLKPCLVEVAHAAVKDKKHPYYANKFNKISKRRGKKRAFIAIARKILVAAYHMLLTGEIWNPADLAEVETPVEQRIKYVKNNLKSDIKQLLDIGLTVEELTLMIQQNANIIATQ

SEQ ID NO: 485571 - protein, 469 aa, unidentified
MKRKSRRAKCQKGSPFSGDLQLIEPDAAAVDVGSRSHWVAVNPQRDPNPVREFGTFTADLISLADWLAQCEAKSVVMEATGVYWVSLYELLERRGFKVYVVDAHTVRHLPGRSKSDVKDCQWLRRLHSYGLLRGSFRPPAQIRQLRNYLRSRTKIVEAAAQQQLRMQKALTLMNIHLHHVISDLSGLTGLSIVRAIVGGERDPNRLARLRDPRIRASKETIQKSLEGNWQEELLFDLKIALESYDHFQDQIAAYDEQIRQELKEVQSKVDLAHEALPAARLKACRKRPGMSQQDQLDLREELYRISGVDLTRIDGISLQTAQKVFFEIGTDVSAWSDEKKFSSWLGLSPNHRISGGKVLKRSSRKVVNPLSVALRLAARTLRNSHSALGANFRRLIAKIGMPKAITAMARKLAVLLYRMLKYGTQYVDKGMQHYESKYQETKLQYLRAQAAKFGMILLPKQAAATHVAS

SEQ ID NO: 485572 - protein, 461 aa, unidentified
MPHSAGKGSRGKPASPGALSRINPNAAGIDVGGSSHYVAVPEDRDDQPVREFAAFTGDLYQMADWLAACGIETVAMESTGVYWIPVFQVLEERGFEVKLVDARQLKRVPGRKTDVADCQWLQQLHGFGLLAGAFRPDDQICVLRSYMRQRAMLVSHASQHVQHMQKALVQMNLQLQHVITDVTGATGMRIIRAILAGERNPDRLALLRDPHCKNPLATIAKALHGDWREEHLFALQQALELVEAYQAKIAACDERIQAHLQTFEDRSQGDPPPKGRRPRADRHDLAFDATTELYRMTGVDLTAVAGLEAHTALKVLSETGLDMTKWRTSKHFGSWLGLAPNNRVSGGKVLGRRTTPNANRAAAALRVAAQTLHHSRSASGAFLRRKAAQLGMPKAITATAYQLARTIYNMLRFGTDFVERGQDYYEHRYRQRVLHNLTRRAREMGYCLVKHHDLLPQPALG

SEQ ID NO: 485573 - protein, 328 aa, unidentified
MKTNLRFIGIDVSKDTLDIGIYSEEEKSTVIKNNKKAILKYFNTLLSNKNVSHVCIENTGKYSWVLMELLPELDCYFYVVNPLHLKRSLGLIRGKNDKIDALRIAEFIKKNYEEITPYISQRLELNLLQILLSERRFKVKQRKQLKTKNKENSILSNKTIAKTLTKKNDKLIKELTKQITELEREIKQLISNDEPLKTLNKQLKSIPGVGDILCWNVLVKTNEFKTITDPRKLACYAGVAPFANTSGISIFGRNKVSNYADKGLKKILHMGALSAIRLENDLAYYYHRKVEEGKNKMLVLNAVRNKIIHIIFALIKNQEFYNNRLVMS

SEQ ID NO: 485574 - protein, 368 aa, unidentified
MSDVITYVGMDAHKKDLFIAMLVGNQTAPVTWQLANEPNAVRRLVRKLERDAPGPVRVCYEAGPCGYALQRQMTTPQVRCQVIAPALIPRKPGEPIKTNRRDARKLAELLRAGLLTEVRPPTPEEEAVRDLCRARDDAREDFQRCRHRLGKLLLRRGLHYSGRNWTRAHRRWIDSLEWTQPAERMVVDDYLLAVDQLEARLIELDARLAEMAETDPYRERVGWLRCFRGIDTLTAILILAELHDFRRFQSPRALMAYVGLVPGEDSSGEKHRRGRITRTGNALVRRLLVEMAWHYQHRPSIGVALTRRRKGQPGRVIAIADKAQQRLCRRFRRLAEQHKPAPKVAVAIARELAGFLWAALQPAPMSVS

SEQ ID NO: 485575 - protein, 356 aa, unidentified
MQQVSTGVVGRRGMSEGLTLGLDLGDRTTHFAVLDVQGQIVERGTVATTREAFCQRFAKLPPSRVVLEVSTHSPWVSALFGQLKHAVIVANARAVKAVTSNPRKSDRVDAELLARLGRVDPELLHPIEHRGEEARRDLAMLRARDTLVRARSMLINSARGLVKAGGARLPKCEAEAFHRRAAEAVPAELRLALEPMLEVSASLTQQIRVYDRQIKAMLVRHPVTQVLRQLRGVGPLTSLAYVLTIDDPQRFARSRMVGPYLGLVPRRRQSGDRDPELHITKTGDTFVRKLLVECAQYMLGPFGEDCDLRSWGLRLAGEGSTARKRRAVVAVARKLAVLLHHLWVNGEAYEPLRQAA

SEQ ID NO: 485576 - protein, 341 aa, unidentified
MDKFIRVGIDLGKGYFQVHGLRVEDGSAVNRKLSRSKMRPFFASIAPCRVGMEACGSAHYWARELVAMGHEVVLMPPGYIKPYVKRGKNDAVDAAAICEAMSRPDMRFVPIKSAAQQAVLMQHKTRELLVKQRTMSVNALRSHLAEFGLVVAKGIGRIDELSELAENDPSLPPEAREMAKLLTLHIEGLTRSIDATERKIAKAAAGSKTTRLLDRIPGVGPLTASAIAASVPDPGVFKSGRDFAAWLGLTPKQNSSGGKAKLGAITKQGNPYIRRLLVVGSTSVLRHAGKRKGALAEWIAALRARKPERLVAVALANKLARTCWAIMITGEFFRHEAFAKA

SEQ ID NO: 485577 - protein, 415 aa, unidentified
MKKHNNSAKKSEPTSKRTKSLGPARRDTKEVLAELVAKLKEKLDSKKVAATSGEEDERGELRPNLDRLTVGVDLGDQWSHYCILGLEGERLAEGQLRTSEEDFATFFQGLNAARVVVEVGTHSAWVQEVIRGCGHEVLVANPRLMDGSKRRKRKNDRIDANKLARLGRVDPESLYPIQHRSREVRQDLVMLRARDALVAARTELINTTRGLVKSMGTRLPKCSSRSFAQKGEEAVAVEMREALLPLVRLAATLSADIKEYDKKIAELGREKYGHTALLRQVKGVGPITALAYVLTLENPKRFAKSRDVGPYLGLVPKQEDSGESQPQLGISKAGDTMVRKLLVGSAQYILGPFGPDTDLRRYGLRLCERGGKNAKKRAAVAVARKLAVLLHRLWVSGEVYEPLHHAKSVPIAAAA

SEQ ID NO: 485578 - protein, 313 aa, unidentified
MGVALLRSKESEETAATFTNTRPGHKALLAYLLRGNQLVRVCLEVTGNYSLDLALTLQAHCQIEINVVNPRRARRFAESLGERSKTDPVDAHVLCEYARRMPWVPWQPPSSTALHLRAVMRAVEDLNSILTQEKNREHALAASEALPSLVLRELKRHQRYLQSRLERLRREALRLVARDPKLVRHFQLMQTTPGIGENSALQILGELAVLPDMLDARQWVAFSGLDPRRFKSGTSVEQRPRISRAGSRHLRRALYMPALVALRHDPYLGSFYQHRQRELGIKLPHAVAFVPQSEIHYFSRCGVQHRQRLLASV

SEQ ID NO: 485579 - protein, 413 aa, unidentified
MAEETFAWFVGVDWGSEKHQACILDPQGGIVGEREFPHSGAGLAELGEWLLSTGGAASTVAIAIEVPHGPVVDTLVDLGFVVHTINPKQLDRLRDRFSVAGAKDDRRDAYVLGDGVRTDRRLFRRLHVSDPRLVELRAWSRLAEELQEERVRLSNRVHHQLWRYYPQIQKLTDDLAAPWFLELWTIVPTPAKAGQLRKSTVEQLLKQHRIRRVDAETVLRTLREPAIKVADGVAEAASIHMRSLVARLRVVNRELREAEGKLDKLCTALGETAAVSGDCLQRQDVLILKSMPGIGRINLATLLCEGSGPLCSRDYAALRTLCGAAPVTKRSGKSHTVIMRYAAHVRLRNTVYHWARVAAQHDPKSRSRYVALRQRGHSHGRALRGVADRLLGVACVLLRRQTLFDPQFGRPAT

SEQ ID NO: 485580 - protein, 388 aa, unidentified
MIYTGIDVSKDEHDCCIADSDGVVLSELFTIQNNRTGFDALFQKLTDCSKDLSIIKVGLESTGHFSDNLLEFLITKGLNTTIINPLHTSLYRKSQSLRKTKTDRVDARSIVKMLRTEDLKPHFPTSYHVRELKSLTRYRFSLVQRRAKLKTSYARLCVILFPELEKLVPNLHLTSIYALLFELPTARAIADCHLTRLTNLLSSASKGRYGKDKAIEIRDAAKASIGTYSDVKALELQQTIQLIRMMDTQIEQVEAKINPIVDALESPIMTIPGISYRMAAIIIAETENLTHFGSAEQMLAFAGLEPSVYQSGQLTSTHAKMVKRGSKYLRYALFNAAKYVCRWNTAFRVYLAKKRSEGKTYNVAVSHAAKKLTRVIFHLVKTNQPFVS

SEQ ID NO: 485581 - protein, 454 aa, unidentified
MHTIRPNAIRVKRFRDLKQDLRTCRDRLLVGIDIAKRQHVAQVRLAHTQVLDKALGISNTQAGFAMFWAHLQTRQRESGVSELVCAVEPTGTYHEALAQFLEAHGADVVLVSNTVAHHNRRTLDGTWGKSDPKDAHNLCDLLERGHVLFYSRPDAPIAALRRLVRLLRHARTDLAACKARFRNTLLPALGPAGEPLPAAVAAALPVPLQALLPAAQRRALPAGAAGLPPALAFECTDLAARLLSVQARIAPIEAELVRLATPLPAATLLRTIPGIGPTVAAILLAEIGDIAWYTKFSQLRKLAGLDIIWVATGNWTGTARISKCGRPLLRWALYQAALGAARTPQWRTRRETLLAKRQGDRFAFLKANIEVAAKLLRIVWRVWRSGRPYEPARGEGDPAATPPAAGPPRDPTLGYGAVTDRGTSGQPGWSSFGHPALVLETRYKPEGLTPSRRS

SEQ ID NO: 485582 - protein, 449 aa, unidentified
MKKHDLKQRGLPVIHDHAAGIDIGSRFHVVAVPAELAKESVQTFQAFTSDLERLANWLVNLDITTVAMESTGVYWIPVYEILEAHGLQVVLANAREARAVPGRKTDVNDAQWIQRLHACGLLRASFHPDREISALRSYLRLRERHLDYAAAHIQHMQKALTHMNLQLHHVVTDITGVTGMRIIRAIVAGERSPSVLAAMSDTRCKAGIEVIQASLVGNYQPEHVFALTQALSMYDAYQAQLEVCDQQIAQTLITLSQEKTSPTEPLPKPRHRTRQPNALNFDVRTLLYQLVGVDLTQIHGIGPYLALRLVAECGTDLSRWRTCHHFTSWLTLAPGCRISGGKVLSAHTRKTKNRVTAHLRLAAVTVGRTNTALGAFYRRLAARIGKAKAVTATARKIAILFYNAMRFGMNYQDPGADHYEQKYRERVVKGLYRRAAELGFTLQPAEGVS

SEQ ID NO: 485583 - protein, 390 aa, unidentified
MIYVGIDVAKDKHDCLISDSDDVILFEPFTISNNSFGFDELFSKLETCSESLSGIKVGLEATGHYSDNLLEFLISKGLNTIVINPLHTSLYRKSLSLRKTKTDTVDAHSIVTMLRTESLKPYSQTSYHVRELKSLTRYRFSLVKDCSRLKTSYARLCVILFPELEGLLPSLHMVSIYALLSELPSAKAIADCHLAHLISLLSKHSKGHYGKDKALEIRNAARNSIGTHSQVKSLELQQTIALIQMMEKQIIQVEAKINPIVDSLHSPIMTIPGISYRMAAIIIAETENLTNFDSAEQVLAFAGLEPSVYQSGQLTSTHAKMVKRGSKYLRYALFNATKYVCRWDEHFGQYLAKKRGEGKAYNVAVSHASKKLTRVIFHLVKTNQVFISRA

SEQ ID NO: 485584 - protein, 311 aa, unidentified
MGIDVSKEFLDAARSDLPSPWRSANNPAGIEALVRQLQKLQPACIVVESTGGLERALLNALLDADLKVALVNPGNVRHLAKALGFLAKTDAIDAKVLALFAEKAAPRLLEKRSETQAELDALVTCRRQLVKSKTEQNNRLGTTASKNARKALQAVVATLEKQIARLDARIRDHIDSNDQWKHLDQIIQSAPGAAGVLASTLLGQLPELGKSDHREITALVGLAPFNHDSGKLKGKRSIQGGREAVRGVLYMATVCAMRCNPVIKTFGDRLLQAGKPWKVAVVACMRKFLILLNTMVRENLQWNQLNLVKNA

SEQ ID NO: 485585 - protein, 433 aa, unidentified
MHETEDEPLFADRAAGIDIAKAGIEVTIRVPSDARRGRRQQETRSFATTRRELLSLADWLRAWGVTKVGMEATGDYWKPVCFVLESQGFGCELYHAAQVKALPGRPKTDRADSVWLARITERGSLPSSFVPPEPIRRLRTHTRYRRHLTQARTAEKQRVEKLLEDGHLKLSSVISGIHGVSGRAMLEAIIAGERNPTVLAQLARGTMRGKIRQLEEALGCSFLTEEHTAILAMMLAATDYCTAQIDELTARIEVLAEPYLHQIEQLDAVHGAGIISAQDVIAEIGADMSIFPTAAHLVSWARWCPQVSQSGGRRKGASATGRGNPCLPAALGEISISASRTQSFLGTRYRRLVKRMPKKKALVATGNSILTIFHALLSDPQATYHDLGPGYYEQRMNTRRQARNHIRGPERLGYHVTIQAINPDTGELLTATA

SEQ ID NO: 485586 - protein, 382 aa, unidentified
MTGTEPHAWGTGLMDDITFVGLDVHKATVCIAVAEGGRGGEVRQLGVFENRPEILSKVVSRLSKGGRRLSFCYEAGPCGYGLHRLLTGYGHECIVVAPSLIPMKAGDRVKTDRRDALMLAKLHRAGELTAIWIPDAAHEAMRDLVRARATAVRALAKARQHLQGFLLRHERIYHGARAWTLAYRRWLTTVRFEHPAQQIVLQDYIHAVQEAETRRDRLTQQIEELLPNWSMAPVVAALQSMRGVALVVAVTVVAEVGDFRRFANPRQLMAYLGLVPSEHSSGSSVRRGGITKAGNALARRVLIEGAWTYRMSARVSRKLHDRLEGLPAAVRDIAWKAQLRLCSRYRRLAATGRPKVVVTSAIAREMVGFIWAIARLAQPAPV

SEQ ID NO: 485587 - protein, 350 aa, unidentified
MAQNKAGVILGADTHKRFHTVAVIAETGRELASASFDASARGYREALSWAESFGEVLRAGIEATGSYGAGLSGHFKKSGLEVLDVYSSDKKRRRLQGKDNDKDAFQAAQAALSYTRCASAKDRSGDLEALRLMESAYGQLVKQRTATINTLKASLLALQDQTRVRLEELSTAALVKCCAAFRIPKDIECAKDRTKLALRSLAKTIEALDREIAVLDKEIECLARTLLPHTMALKGVGCHGAAKLAGAAGENIERMKSEAAFSMLCGTSPIPASTGDTYHHRLNRGGNRAANCAVHYMALTRMRHCEKTRAFIAKKMSEGKSKKDAIRSLKRYLAREVFSALKKDLAPLST

SEQ ID NO: 485588 - protein, 316 aa, unidentified
MLASPPFAGIDVGKRFLDLGFEPAAKPLRVGNDAAGFAALVDALRRRGVSRVAIEAIGPYSWPLAATLVAEGFEVGVADPRQVRAFRTAEGRIAKTDRLDAGLIARFARAMPDRLHPAPEPETLALRALSTRRRQLTELIAMEKTRLGQAFDETLAASHRAVIAALEAACAEVEGRLEATIAADPALARKREILVSMPGIGPRIAGVILTDMPELGTLDRKAAASLAGMAPHPRQSGPLPGRNAISGGRPSLRSAFYMAGMVAARYDPRFKASYRAMRDAGKPPKLAIVATGRRLVTIANALLREDITFDRSRFAS

SEQ ID NO: 485589 - protein, 400 aa, unidentified
MDERQRFSWFLGIDVSKETFDACCIPSHGGRLFNLSASMDRKGFEELIKQLSALSIPQESVLVGMESTACYHINLYSFLISLGYTVMVINPLLISNFVKLQLRKTKTDKKDASVIAQFLLLNRDSLSPTILCSDVSDLRDLSRQRESLVDQMSSTKSEIKRLLTITFPELEQRAGVFSKSMLRLLCQYPSAASIKQAKRSKIAKILIPGSYGKQTHASVDRILKAAQISIGTSSATKEIILRQKASLLIQLEEHLQELTDILIELCQEKIQGDMDILTSMKGIGEKSAMNFLIEIGGEIKQFESHKKVIAMAGLDPALYQSGKIDRKGKISKRGNRHLRRVIWLMTTKVIQFNERFKQYYLRRTKDGLPYKKAVLATAHKLIRVMFAMLRNKTLFDPRMN

SEQ ID NO: 485590 - protein, 397 aa, unidentified
MYIVGIDIAKRKHEAAVIDGEGTVIIKPFSFTNNCSGYNRLLAMLAKAKLPLDEVSFAMEATGHYWLALFTRLQKEGFRVQVINPVQTNSIRSFYIRQAKTDPRDALLIAEVIRFGHFSESTLHPENIYELRELCRGRHAIVSMQADVKRKVVALLDQVFPEYETAFTNLFGDTSMAILQTCPTPKELSEMPFEELCHLIEVSSHKRFRMAKARELQELARNSFGFAMAGDVFSTMIRLYAKHLDFLKQQVREMDRKIAEIMDTLDTPITTITGIGPTLGAYILSEIGDISRFSSAAKLAAYAGIDPTMRQSGEYNGVRNRMSKRGSPYLRHAIWLATSSAVLHDPALKLYFQKKRDEGKPYMASVGHACRKMVSIIYAVMRDNKDYTPCIPNEISA

SEQ ID NO: 485591 - protein, 412 aa, unidentified
MLFVGDDWAEDHHDIEVVDDAGEVLVRRRLPEGLDGVTLLHSLVAEQMPDDGADLDPGETAAMVKVGIETDRGSWVAALVAAGYEVFPINPLSVARYRERHSTSGAKSDAADAHLLAEIVRLDRAHHRPVAGDSVEGEAIKLTARTHQSLIWDRTRHLLRLRSTLREYFPVALQAFPDLDAPEALELLGRAPDPDQAARLSTATITAALSRARRRNVEDRAEDLRNLLRTQELRQPHVLQDAYAAVVASEVAVITALNTQIGRLGAVVGEHFGRHRDAEIYASLPGLGVILAARVLGEFGDDPHRYRDAKSRKNYAGTSPITRASGTKKIVLARYARNRRLGDALQQWAFCSMRGSPGATAYYQQLRARNIGHHAAIRQLANRLVGILHGCLKTNTTYDENTAWAHIQNPAA

SEQ ID NO: 485592 - protein, 313 aa, unidentified
MLATLGIDISKADFHVELSVNEKLRHRRFVNRKEGFKELSVWLARHKAESVHACLEATGRYGDELALHLYQTGHVVSVINPAQIKAFGQSELLRNKDDRPDAGLIRRFCEKQQPAAWQPPSTQLRELQALTRHLENLHDTRRQQVNRLEGVNNQAVLKSLRKLVAHLQIDNDPDLRRQQQLLSSIKGIGKLTAAKLLAEIGDISSYKSARQVAAYAGLTPRNNRSGTLHGKTRLSKTGNARVRKALFFPAIVAKQHNPIVRAFCERLSRHGKNKMQIVGAAMRKLIHIAFGVLKSGKMFDPTHELCSVPPLVF

SEQ ID NO: 485593 - protein, 424 aa, unidentified
MEVLHPRCAGLDVHATSVTACARIASGTSIAYDHLTVPTTTRGLLALDEWLTGHACTHVAMESTGVYWKPVWHVLEDHFTLVLANAMHIRNVPGRKSDVNDATWIADLLAHGLIRGSFVPPAPIQALRDLTRTRRQLVHEMSRHVLRLQKTLEDANLKLTHVISDIVGTSGRAILTALIAGETDPERLVDLTSGRLKAPRATLVDALHGRMTDHHRFMLHLHLTQVDAVQHAIDEVEARIGAALGPFQSAVTLLTTMPGISETTARVLVAEIGTDMTRFPSVGHLISWAGLCPRLDESAGKPRSTRTRQSAPWLKATLVTAAWAASRKRDSYLHAQFLRIMNRRGAKKAIIAVASSMLTAAYFMLRDGAVYEDLGPHHFAHQDKERLTKRLLQRLQQLGVVVKWRPHDFNNRGYAPSFTLESCA

SEQ ID NO: 485594 - protein, 422 aa, unidentified
MLAESHDEEQIIARVAALDIGKAELVCCVRVPAPAGGRRRLQEVSTHSTMTRSLVELANRLVEMGIERVVMEATSSYWKPVFYLLEAHGLAPWLVNARDVKHLPGRPKTDVLDAVWLCKVAERQMLRPSFVPPWPIRRLRDLTRYRTDLVSARTAEKNRVEKLLEDACIKLSVVASDIFGVSGRAMLGALVAGERDPKVLAQLARARMRGKIDRLEQAFDGHFSDHHAFLLSRMLSRIEALDADIAAVDVQVEAQLAPFAEAAARLDEIPGIGPVAAAAIIAEIGVDMSRFPTAGHLCSWAKFAPGINSSAGKTKRSASSGHGSPYLARVLGEAAVGTSKTNTFLAARYRRIARRRGQPRAVVAVGRSILVIIWHLLKDSDARYQDLGADHYQRHVDSAVKKRGHIRQLEALGYTVTLTPAA

SEQ ID NO: 485595 - protein, 411 aa, unidentified
MDVLYPVCCGLDVHKKTITACLRFPSARARAEEVRTFGTTTRELLRLADWLTAAGCTHVAMESTGVYWRPVYHILEASFEVLLVNAQHVKAVPGRKTDVKDCQWLAQLLEHGLLRGSFVPPAPLRELRELTRYRRQLVQEHAREANRVQKVLETANIKLGDVATDVLGVSGRAMLQALIAGERDPERLADLARGALRQKAEALREALVGRFTLHHAFMLQGLLDHIEFLDQQIARFDERIEEQTRPFGPAIERLDTIPGVGRRSAEQILAELGDDMRRFPTAAQAASWSGICPGNHESAGKRRNGRTRKGNAWLRSTLVESARAAVRNRGCYLSAQYHALARRRGDKKAVVAVAHSILVAAWHILRDGVEYHDLGPDHFDRLNRERLVQYHTRRLAELGLTVQLPGAQATA

SEQ ID NO: 485596 - protein, 317 aa, unidentified
MTESVKVNVGIDVSKDFLDVHVGDVALRRVPNRSSGLSVLKRILSRYTVSLVLLESTGGYENLAVTYLQSLGYDVCVINPRQARNFALSMGRLAKTDKIDAQILCRLADVIDASPERSRFVKPLTDERRQRLVSMVRRRRQLCDLMIAERNRRAKTDVYGSESISTVLDFLTDEVSRIDRDIAAHVGSCFSDISSLLQSFTGIGPVTASTLLGELPELGKLNRRQITALVGVAPFNRDSGYMRGRRRISGGRSGVRNVLFMAVLSAVRFNPVLKAFFARLVAAGKPKKVALVACMRRMVCILNAMLRDGSRFEVAVR

SEQ ID NO: 485597 - protein, 461 aa, unidentified
MQTLFSRVCGIDVHKDMLAVCVLIYGKGKEPEARQKEFATHQKALTNLRHWLSSQKVTQVAMESTGVYWKPVWYALEGHFQLLLANPFQVKALPGKKTDKRDSHWLAELLAHGLIAASFVPPEETRALRDLTRYRVKLSEEMNRIQNRIHKILEDASVKLDTVVSHILGGTGRSVIEGIIESRESPAELAERAQGSLRGKRAQLELALHGRVREHHRFMLQQLLEDLRFVEAKILRLDQKLAASMDLELVSRLCTIPGVDVITAWTLLAELGTDMSVFAGSKKAASWAGLCPGNKESGGKRLSGRTRKGNRWLRRALCQAAWGASRQKDCFLNAFFQRHKARHGAQKAVIATAHRILVIAFCILRDGTTYQERGGDFYDQLHAARTRQRLLERLRRLGVAVTVSFPAPAQAPASMPGSKRKRGRPCKCVERHLPCPHRLEQPTNSVATPPVASPGVCATSE

SEQ ID NO: 485598 - protein, 344 aa, unidentified
MNHYAGIDVSLELSSVCIVDASGKVVRETKVETRPEALVKFFKGFDLPLTRIGLEAGPLSHWLYAGLTDAGFETTLMETRHVKAALSAMTVKTDRRDARGMAQLLRMGWFRPVHAKSAGSQELRALLVARKQLQHKLTDIELSIRGILRGFGLKVGKVTDKSFEVRIRKLITGHPMLEQIAEAMLVARTTLLEQFNKLHKAVLKIARHDDICRRFMTTPSVGAIVAITYKSALDNPHRIKKSRNAGPLFGLTPKRYQSGETDVTGGISRVGDEMVRTALYEAANVLLSRVTRFSALKYWGLEVAKRRGTKRAKVAVARKLAVILHRMWIDGSTFRWSKTKAVHS

SEQ ID NO: 485599 - protein, 365 aa, unidentified
MQEKNGIVGIDAGKRHMEVVRLYRGSEEIQRCNLSTNETGRNRLKKWLKANDTVLIEASSGTFLMAKEIKKEVGSDVIVLNPGDLAIIYKSLKKTDKEDALKLARLGLWIPREKLPEVPVPTDEEEDYRRLLSENTFYSEERTRLINRLHSVFHQAGYTELKKKDLKTKETREKSLVILSQRYSEEAKRLIKRIEVIEDDLEVLKDQMTDVLSSHLEIASLYMSMNGIGPVISMALLSHLGYFERFSKAKQVSNYVGLTPKVDQSGETEKRGKTSNRGCRQIRRVIVQGAWAHVRSKKSSPLKDKFERIRARSGKYTAIIAVAREMLEILFHMVKNHEYFRGTTQSEIDKKLVSYGLLKMSDQGA

SEQ ID NO: 485600 - protein, 367 aa, unidentified
MTVTIVDAARPVTGGVDARRDLNVAPCLVTGGVDTHLDLNVAAALDRVGGLLGVAEFPATLAGHRELLGWLAGFGPVARAGVEGTGSYGAGLARFLRRAGVEIVEVDRPNRQARRRSGKPDPLDAIEAARAALSGRASGAAKSRDGTVEAIRALVAAKRPARSAKIQALNQIRHLSFTAPGQLRQRLAGVSRHHLAARAAGLRPATGAGADPVVAAAKTALRLLGRRVLALDEEKARIDALLTGLVTQTAPGLLAVFGAGVDTAAAVLVTAGDNPGRLRSEAAWARLCGTAPIPASSGKVTRYRPGRGGDRQANRALWGIVITRLGNDPRTKAYMARRLAEGRSKPEVTRVLKRYVAREACHRLPRP

SEQ ID NO: 485601 - protein, 420 aa, unidentified
MDEITEEPAALTERVAALDIGKASLTACIRVPHEDKPGARRQEVRTYATLTPALLELRDWLVCQGVTLVVMEATSAYWKPPFYLLEDDIECWVVNARDVKNVPGRPKTDKLDAVWLARLAERGMLRPSFIPARPQRQLRDLTRYRRTLTQERTREKQRAEKLLEDAQIKLSSVISDIFGASGRAMLDALTGGQTNPHELAALARGSMRAKASVLKEALTGHFTDHHAFMLGMMLDRIDALTAQIATLTTRIEQAIAPFAAQVAQLDEIPGIGTVAAQDLLAEIGADMSRFPTAGHLVSWAKFAPRARQSAGRSKAATTGQGNPWLGGTIGEAAAGAARTKTFLASRYRRIVRRRGKKRALVAVGNSILVISWHLLSDPSAHFTDLGPDWHDRLAPLRRKRQLIAELERLSGKKVTLHDAA

SEQ ID NO: 485602 - protein, 455 aa, unidentified
MYFEKRDLPQYNSIVLVRARKAQIPIGECLYMKRTQNEKILQIKNETLIVGVDIAKRIHHARAFDNRGVELGKLLKFENSAQGFAAFDAWLAKIQQKHGMTEAVVGFEPTGHYWFNLGDHLAECGHKLAILNPYHVKCARELDDNSPSKSDQKDPKTIAMLVKDGRYRDVYIPDGDYQELREMVRERERLQERLGSLSSQIIRWLDIYFPEFVTVFKDWRGKAAWIALRRFSTPKRMAEVGAQEILLAWREEMKRPSLKKAEALCSTAEQSIGRTQGSGAAVRSLQNIMTEYELLTMQMEQLEEEMQECLFRIPHAAELLAIKGVGMVAVAVFVSEIGDIRRFKDPRQLIKYAGLNLRTNSSGEFKGKTKISKRGRRRLRHALYKAMIPILATNEEFRSLHQRNLTRTQNPLTKMQSIIALCGKLLRVIFALLTKGVEYEPSKIKVVTTDVAQAA

SEQ ID NO: 485603 - protein, 355 aa, unidentified
MNQEKYIGMDVHDATISAAVKNAQGKLLMECVLETKAATILEFIQGLRGTLALSFEEGTSATWLHDLLKPHVSRLVVCDPRKNALLRDGNQNDRVDARNLAELLRTHQVHAVYHGKHGTRTLKEVGRSYLALTQDTTRVMNRIKSVYRSWAIACAGTSVYSRRHRAEWLAQLVEPGVRIRAEHLYQQLDSLEPVRQAARRELLREGRQHAAVKLLRQIPAIGPIRSALLVAILQTPHRFRTKRQLWAYSGFAVQTYDSGEYRVVRGKLHRNRERITVRGLNRNHNHDLKNLLKGAAISAIERPGPLQDFYAARVEKGMRPSLARLTLARKIAAITLIIWKKGASFDPKQLQRQAA

SEQ ID NO: 485604 - protein, 364 aa, unidentified
MRTGIQVVAGVDTHADTHYAAIITTTGEHLGAAQFPTTPAGYAALTGFITCHGPLARVGVEGTNSYGAGLARHLRAQGIAVEEVIRPARQVRRLKGKSDPIDAYQAAHTALTHENVVTAKTADGTVEAIRVLHAGRRSAVKARCGVMTQLKSLLVTAPDRVRDAWREVGKRELIDGLAALRARSGDTVVEAATRATLKRLAVRYRQLSEEIMADDTDLDQLVQATNPGLLAAHGISTITAAQLLITAGDNPDRLHTEGAFATLCGVAPIPASSGKTTRWRLSRGGDRGANNALYTIVLSRMANDRRTRAYVTRRTREGKTTRDIIRCLKRAVARQVFHLLTHPQPAIAVTGLRTARKRLEAPQV

SEQ ID NO: 485605 - protein, 348 aa, unidentified
MLIIGCDYHPGFQQIAFVDTETGECGERRLTHREEAEQFYGTVKERSVRVGMEASGHARWLERMLRDWQFEVWIGDAAEIRTKRVRKQKTDRQDAQLLLRLMVEDRFPRIWVADAENRDLRQLLWHRHRLVQMRTRVMNQLHVVALNEGLRRKKALWRPAGRNELESLQLAPWASRRRQDLLDILDQLTPKIQELTRALEEEVEKRPVTRRLMTHPGVGPLTALAYELVIGTPDRFHCGKQIASYVGLVPSEESSGDRRRLGHISKQGNVLLRFLLVEAAQVTVRSQPEWRSRFFHLALRRGRKIAKVAMARKLAVHLYWMWRQGRDYNQFEKLGSHAGAPGNRHGAQ

SEQ ID NO: 485606 - protein, 365 aa, unidentified
MNVINIGIDLHKHQFTCYFLCKNEGKYFKYETKKEGYDLFKNDLNKMQTEGFKIRIAVESTGNTRYFKKEIEKLGIEVKVINTLHFKVVNQTVNKTDKKDAKIIAEFLSKDMLPLVNLSSEKSEKLKRLISAREILVKTKVKLKNQIHGFLLSFGIESKSGQLNSKKGRNIVISQIEEADNKMIIEILVDNINKLENQIKEINEKLEEMTKSDRSVEILKSISGTGTITAVSVRAYIDDIKRFSRFNKLSSYCGVVPVVKCSDEKKYYGGITKRGPKELRTAIIQMVLGMIRCKDERNNRFMVMYRNIKKIKGSGKALIAVARKFTKLIWTLLSNDFEYDKNKLSLIEDVKQPDPVLLESFEQVA

SEQ ID NO: 485607 - protein, 363 aa, unidentified
MTAKSITAATHSPIVVGGVDTHKDLHVAAVVDSSDGVLGVEFFSTTRAGYRAMLAWMRTFGDLRRVGVECTGTYGAGLLRFLDTAGIEVLEVTAPDRTDRRKRGKDDTLDAQSAAHAAFAGIRTVTPKTRDGMVESLRVLRTARKTAVSARRIALQMLHAQIVSAPEELRDQVRNLTRMQLIRTVAAWRPDPQGFRDTTGATRIAMRSLARRYLELHDEIADLDVPIRTLVEELAPTVLARPGVGVESAAQPLITIGDNTARLTSEASFAMLCGAAPLPASSGKTNRHRLNRGGDRAANSALHMITISRMRIDPTTQAYVARRRAEGKTKMEILRCLKRYIAREIYYLLKARDQQISLAQIAA

SEQ ID NO: 485608 - protein, 353 aa, unidentified
MITIGVDAHKRMHVALALDDAGQELGHWRGLNSAAGWQSLARWAGELGCPRQWAIEGAWNYGRGLAQQLVVVGETVYEVNARWTALGRRSARRPGKTDRLDAHAVALLARREASTLPRVSPEDDTAILALLTTEREAALGEATRLGNQIHALLMQLNPEYHDRLPSLRSRAGLDTLETYPSPGGSLIQNERAAAVRRLATRLRLTLTQAEELARQIAAYAEAGFAPLARLCGINLLTAGMLAGILGPGRRFSTDAELAAYAGAAPLEASSAGSTRHRLNRGGNRRLNAILYRIALTQAHYSPEARAYLDRRVSEGKSRREAIRALKRFIVRAIWRLWQECETSPVSSPVENVA

SEQ ID NO: 485609 - protein, 511 aa, unidentified
MVRKCPFGSVVLGVATGRLVTQCDPVHENANSMLLSCVRNNRIYREKGNGMGQRKRHRKKRVKGFLEKVNLYAAGIDIGSKNLFVAVPEELDEQPVREFLCFTGDLHRLADWLVKIGIQTVAMESTGVYWIPVYEILEERGLEVLLVNARHVKNVPGRKSDVQDCQWLQQLHTYGLLEGAFRPPEETVALRNYMRQRETLIQGASDQLRRMQKALRQMNLLLDNVISDISGTTGMAIIRAILAGERDARRLAKFRDGRCANDEETIAASLEGHYKEEQLFALKQSMELYDFYQQQIQACDERIEKQLQKIDTKGDGGAPPSKGKRKNKSSFSFDLRSKLYRMTGVDLTQIEGFNETTALKILSETGTDMTAWPTEKHFCSWLGLSPGNKVSGGKILKSKTKPTASRAAGAFRIAAYTLFNSKSALGAYYRRQRSRLGAPKAITATAHKLARIFYSMIKNGAEYVKRSLDEYERQYRNRITRNLKRRAAEMGYELVNKTEYLDKSKHLLSTT

SEQ ID NO: 485610 - protein, 439 aa, unidentified
MHKEVEELPPAPTAPIWRIEECMARSRKCRSGAHTRREAMGLTATAKRGANLKSKGRAAVGIDPSRTALQVSLLFPRAGKPRNKTLPLGPAAVKRLEELLRGVPATIAMEGSHSTGQLFLLEVLKQGHDVREVHPFVSKRFREALSEDHTDRKDAEGLAVLARWKADLPPVRFAEAQATYKRISRLRQRLVRDHARYLNRVHAVLSETYGVTYKGLFKNLASKKALRFFQQYPTINDALRGDPDAPLQVGPQAWERLRRAGSWWETTYLRCLRTEVRTLAAHVLALHDRIAEVGREMAKAPRTRNLETLLSLPRLGVATAMTIVGNSGDFSRFGGNVDRYVAYAGLAPASHQSGAGEPSGRPRCRYNRYLKNAFMFMAFNRLQVDQRAREYYQRKRQEGKEHWTALRALARYLCRWVFRILTGKTPTQQGGAAPTNPHP

SEQ ID NO: 485611 - protein, 403 aa, unidentified
MNNVAGIDVSKGKSMVSVLRPFGEVVAKPFSIGHTGSELKELADYLKSLDGETRVVMEHTGRYYEPVARFLHEEGIFVSAVNPKLIKDYGNNTLRKVKTDKADSRKIARYGIDNWAELRQHTPMDTIRMQLKTLNRQQSLYAKTKTMMKNNLIALLDQTYPGVNALFDSPVREDGSQKWVDFATAFWHVDCVRNMSLTAFAERYRKWCKRHGYNFSQSKAVEVHTGAQDLIAMLPKDALTKTMVRQAIDALNAVSASLERLKAEMQALAAQLPEYPVVMAMHGVGDSLGPQLMAELGDVTRFTHRNANTAFAGVDPGADQSGTHEAKSTRVSKSGAPELRRALFLVMDCLLKTQPQDDPVYRFMDKKRAEGKPYLVYMTAGANKFLRIYYGRVKEYLASLEGN

SEQ ID NO: 485612 - protein, 461 aa, unidentified
MRRSTLESVPAVPNAAEREFDWYVGIDGGGATHQVCVLDAAGRRAGERAVAHAGADLAALAAWLHEVAGPSLARVAVGLESRHAGPVALCLEHGAAVFAINPKQLERFRERASAAGAKDDRRDAYVAASALRTDRGAFHRVTPDDARVVALRELSRTADELREDARRLSNRLRAQLERYFPQMLTLVPAADEPWLWTLLERVPTPAAAARVREAAVARVLTAHRIRRVSAAEVLTALRAPALVVAPGTVEAVSAHVALLVPHLQLVSEHHRRCLAQLEAAVAALAGPGPGADPPSRPAPNAPPDAPPDAPPDAPPDAPPDAPPDALGTAVRLVRSLPGVGGVIAGALVAEAAGALLAGDYHALRTQGGTAPVTKQSGKQRLVAMRHACNQRLRTALYHWARVSTQHDAAARQYYATLRGRGHSHPRALRSVADRWLRILTAMLATGTPYDSTRFASGVATP

SEQ ID NO: 485613 - protein, 346 aa, unidentified
MEYIAMDVHKKYTWARVENTQGDRLYESRLAHSHGTIKNFVSRWTAGSPVAVETVGNWYWVVDEIEAGGGKPQLVNARLAKLMMGMVNKSDKLDAKGMNRLQRTGTLPTVWIPPSLVRDARELPRTRMVLSRQRTQLKNRVHATLGKYGYTVEGASDAFGKKGRQIVAELMAKLPPHTEQALERVLDQLDHVCENLKLIEEKMMEVFAPCPQTTWLKTLPGVGDILAVVIWTEIGTIERFGRAEQLASYCGLVARENSSGGKIRFGAVRRDVNVYLKWAFVEAANSALLNAERCGYDHIGRLYQRIKTRRGHGKAKVAVARHLSEASFWMLKKGESYREPMSSTQR

SEQ ID NO: 485614 - protein, 312 aa, unidentified
MITLGLDPHPGSHTVVALDPNGASLATLTVLNTPEGLSQLHQFAIPFSTRRWAIEGAGNHFVAIFVGQLLDQGEMVYSIPPSLTSQYRARRGRKKNDVVDAENVGRALLANPQLIALHSGMEQRELQELTRAQRRLSEQLKANRGALQELTAESPVREIIQQVITTLVRQLAILERQIRTVVNAVMPSLLDLPGVGPIVAGVLLAEAGDARRFASPHHFASYCGAAPVERGSGENRRMQVNPGGNRRFNWALHIVALVRLRMDGGRSKRLFDKLQKGGKTKRSALRLLKTYIARELFRALRQTHLAVARHVR

SEQ ID NO: 485615 - protein, 352 aa, unidentified
MYQYFVGLDVHKQVIAYCIKAADGTIVNEGSIKARRFDIDQWVRSIPGPWRGGLEATMFSHWIYRRLAPHAARLELGNPARMKAICSGKKKSDKLDARTLADLLRCDMFPVAYVMPPELEGLRRQLRFRRLVVQETTVFKNRTASLLMETGIEYEKRRLHGKRYFQKLLTDNEFIDSELRPLLQHSRKQIESLEGMHEQILATLTRHPQLKQRVLALSAIPGVGPVTALTWALEVAEPQRFPSIKKAISYAGLCSALRESAGRIQRGPLSKHRNKHLQSALIEAAKIAPIWNPTLRAVHEKAKQKGNANEATIAVARKLVAYLLAADRAFHTTRLSAAKPAGVCSGMADLSK

SEQ ID NO: 485616 - protein, 343 aa, unidentified
MDIVVLGIDLGKNSCSLAGLDKSGRVILRRRMRRSSVESFVAGVERCVVAMEACCGAHHLGRVFAAQGHAVRLMSPEYVRPYVKAQKNDELDAEAIAEAATRPTMRFVEVKSQAQSDVQALHRARERLVSERTALINHLRALLLERGIVAPQGRRKLEEELSVFADEDGIEALSPRIRLLIEELRDEWRGLDKRIAAFDAEFVRMARQNDAVRRLMTIPGIGTINATALAAAVGDARTFGRGRDMAAWLGLTPRQMTTGGKPRLLGISKRGNRYLRKNLIHGARAVLPYLAERETSLGRWARALLARAHKNVVVVALANKLARVAWAVLAHGSIYEAGSEATV

SEQ ID NO: 485617 - protein, 353 aa, unidentified
MGRQDFISIILYDHANTNFIGIDVFKLNIHIYQLEIKEYLSIKNDYKVLLKFFKKFNKSSFFVYEPTGVYSKNLEKVFNDLWLQHFQVHPNDMHHLVKSLLGLNKTDKIDSKHIAQIWKLLYTQYQDLWWKNKFITPVPNYINQINHHMSQIRFMKKEISRAKNWIECLLNNPYESKTALGTYNKVISDLEKSIEKLEKEIDNLLNKNELHGKIENIKTIPWIADTTALELFVFFISLASKWMKKEDHKKVIAYSGLNPIENSSWTSLHKEKISKKWNKNVRKALYLPWIQRSQLCEKEKYKNTTIGKFCVRMKNKFTTAKNKRWKSVACAVAKKLLHTAWAMFCDNTQYSFV

SEQ ID NO: 485618 - protein, 336 aa, unidentified
MVVLDADGKVILETMVPTEAAAIIRLMQSLSGPLRVTFEETTQAAWLYEVIRAHVTEVIVCDPRRNKLLEDGSKADKIDARKLADLLRAGLLRSVYHGHEATRNLKELVRAYETLSIDTQRTMARIKAIYRARGVRTAGRGVYQPKQRERWLELLPEAGIRQRAAWLYEQLEQLRPLRRKAKEAMLAESRRHRAVSLLRTIPQMGPIRSAFIVATVDTPHRFRTKRQFWSYVGLAVVTHMSSEYEMTAGRVVRRRKPVATRGLNHNCNRRLKEGFISAATGGSLHEPYKPFLERLKQDGMRAEMARLTLARKIAAVALIVWKKGVAFDPKKLNCTT

SEQ ID NO: 485619 - protein, 418 aa, unidentified
MEVLHERCAGLDVHKKTVVACVRLARDGGVEKEVRTFKTTTADLLALGEWLDGHDVNHVVMEATGVYWKPVWHILDDGDRELVLANAAHVKNLPGHKSDVSDCDWLSDLEAHGLIRGSFVPTRQTQELRGLLRTRKQKVRERSSNTLRLQKTLEEANIKLDSVISNVIGVSGRRMIEAMIGGETDPVALAALADRRIKAPPEVLCEALRGRVTGHHRFLLGLQLEHIDALDRMIDKIDQQIDASVEPFRAAAGLLTTISGVNQLAGRAIVSEIGIDMSRFETAGHLISWAGLCPRNDESAGKRRSTRIRKGAPWLKDILVQCAWAATRTKATYLHAQFVRIRSRRGPKKAIIAVAASILTAAYHMLKNGVPYRDLGPQHFHSRNKQAQAKRLLARLRDLGFTAEFDSLKPIPDAVVSY

SEQ ID NO: 485620 - protein, 312 aa, unidentified
MKAFVAMGIDVCQARLDVCRSDTGEVRAWRNEAADIERLLEGLREAPVDLVVCEATGGLERLLVGGLLAAGVSVAVVNPRQVRDFAKASGRLAKTDRLDAAVLAAFGVALQPQARAPKDALTQRLSDLLTRRSQLVEMLAEEKNRRLRAPQVVRASLEQNIVWLERQIAALDEEIDHTIKASPAWLEKLNLLSGMKGVGPVLRAALLAWLPELGQLNRRQVAALAGVAPFARDSGTMRGQRSIWGGRQPLRNVLYMGALVAIRWNPVISRFYGQLVARGKPKKVALVAAMRKLLVIINAIFRSGIAYQHADS

SEQ ID NO: 485621 - protein, 408 aa, unidentified
MHVVHPICCGIDGHPAQLTACLRRVQDDGTIHTEWRDFGTTYDQLLACRAWLDEQGCPIAVLESTGVYWKPIYHVLAETLEVVVANARSVRQRPGKKTDKADAAWLAELLAHGLIDPSFIPPPAIQALRDLTRTRVALVQTRTQVQNRISKMLEDTNIKVAHAMSDLFSKSGRRMLKALCEGERNPKKLAAFALGTLRRKLPELELALTGQFTTHHGRLIQGELELMELLERQIAELDEQIRQATEPFAAQLAQLQSLPGVQAITARDIVAEIGTDMSRFGSATRLASWAGIAPGNNESAGKRRKGRTRKGNRYLRRVLVQCAWAARKTPTFLGRTFRRLESRLGRKKAAVAVAHKILVIAYHLLVNGTRYDESRYSRQDVRKVEREKKRAIEALESLGYNVTLSPVT

SEQ ID NO: 485622 - protein, 362 aa, unidentified
MTNFIFAGCDLHEETLVNRIAIGQEPSERKIVGNSRAGREKLIAALKRESDKHGGARIIFGYEASGQGFGLHDQMVEAGIECYVLAPTKMESSVKQKRNKNDDRDAERILKRLRAHKLAGEELPSVWVPDPQTRDDRETVRARQDLGDKLSSVKVQVRSLLQRHGIEKPTGVGKPRTKSHQQWLEQLSCDSQQGIGVRTALGSLLRQVRHLEQEIQQLDEAVDQLSRKPHRQAVVDALDQETGIGRLTATAYAVEVADFTRFRRGRQIGAYWGMTPSSDESGEVNDRKGHITRQGSPRIRKLLCQATWYRVQKDPQVRAIYQRLVIRNPKKKKIAVVACMRRLAVRLWHIGRQAQLAMKEAT

SEQ ID NO: 485623 - protein, 313 aa, unidentified
MSQESVFVGIDVSKAQLDVALYPSQERMVFAHTEEGLGRLVDRLKPLSPTLVVLEATGGLEMDVVAALLTGELPVVVANPRQVRDFAKATGQLAKTDALDAQILARFAESVRPEIRPRKSAETQDLSALVARRRQVLNMITAETNRLRTAPSCTRKNLEAHIAWLKKCLKELDKELGQTIRRSPVWREKDEILKSTPGVGRVLATTLLADVPELGLVTGKEVSALVGVAPMNCDSGQFRGRRIVWGGRAHVRTVLYMSTLSGIRCNPVLRAFYQRLRLAGKEHKVAMTACMRKLVVTLNAMMKNHSYWSPTHA

SEQ ID NO: 485624 - protein, 343 aa, unidentified
MQTITTIGLDIAKSVFQVHGVDADGHVVVRRQLKRRYVLAFFQKLPPCLVGIEACASAHHWARELQALGHTAKLMPPAYVKPYVKRQKNDATDAEAICEAVSRPNMRFVETKTPEQQSYLMLHRTRHLFIRQQTAVINAIRSHLAEFGIVAPVGRNGVDQLLGVVADAGDKRLPEIARACVAALGAQLQTLKAQVLQFDRLITAWHRSSEASRRLDAIPGVGPALATALVASVANPKAFRSGRDFSAWIGLVPKQNSSGGKDRLGSISKRGDRYLRSLFTAGALAVIRYAKIHGTKHRPWLTSLLARRPTKVAAIALANKIARMAWAMMAKGERYKEPAALAA

SEQ ID NO: 485625 - protein, 317 aa, unidentified
MPQGTCVVGLDVAKSKVDACIRSMGLRLSRPSTPEGEAELLAWVRANRVGRAVMEASGGYERCWAKALRAAGVEVRIVDPKRIRHFAKAAGRLAKNDPIDADTIAWFAEAFPDADAQPHDAAREELDRLVQARAALKDEEDRIKQQREHRPPPVVAQALAAVAKAIRIERRKIEAAIAAKIKANPAFARRAEIIDSVPGLGDQTVAGVIAWLPELGHIANEAAAALIGAAPYDDDSGGRKGARHIKGGRRKLRNLLYMPVMGAATQHNPVLKAYYARLRARGKEAKVALIACMRKLIVILNTMLARDETWNPARAAA

SEQ ID NO: 485626 - protein, 340 aa, unidentified
MEKASMIGLDIAKNVFEVHGRSAAGEVVLRRSLRRGQVEKFFAKLAPAVIGLEACGSAHHWARVLGKLGHQVRLMPPAYVKPYVKRNKSDAIDAAACWEAVGRPDMRFVPVKTVDQQAALSLHRSRDLLVSQRTQLGNALRALLSEFGIVAGKGKAGLARLVDELRAGTLDLPADAVVAAMALADQRAALDAAADALERRITAQAKADEKARMLKTAPGVGPLSAHATLATLPDPSLFKSGRDFAAWLGLTPRLSGTGGKTRTGRITKQGNQPLRRLLVLGATAWLRQVKARPEKGSPWLRGMLARRPSKVVAVAQAARTARILWAMLSHNQPYRAPAIG

SEQ ID NO: 485627 - protein, 314 aa, unidentified
MKITTVGIDLAKDIFRVHGCDARGRVVVSKSLTRQELRAFMAKLPPCLVGMEACHTAHYWAHELQKFGHQVKLMAPKFIRPYVKNNKNDTRDAEAICEAVTRPIMRFVPLKSRAQLDVQAVHRVRQQVVRERAALANQLRGFLAEHGIVIRKGFAAVKHAVPDIIEDSDNGLSGLMRELMRDLQERSKLAEERLHRYDVRVAELVQQDERCQRLAELPGVGPLTATAVVASVGNAREFRSGRELAAFFGLVPRHRASGRRTIMLPIGRCCDHYLRTLMVQGARASLRYIERRRDPRGVWANRLRLSVVPTSPRR

SEQ ID NO: 485628 - protein, 462 aa, unidentified
MARRKRKISSSADVLPPQLATANLHAAGIDVGAEEHWAAVPPCDDPQPVRRFGANTADLDAVADWLWACGVTTVALESTGVYWIPLFELLETRGFQVLLVDPSKMPRNGRPKTDVHDCQWLQRLHTYGLLSACFRPEDQVVVLRSYLRQRATLLADAARDIQHMQKALTQMNMKLQHVVSDITGVTGLAIIRAILAGERDPTQLARLRDPRCKQDEAAIARALQGNWRDEHLFALQQALERYEFQHRQLAACDARIAAHLATFADQSHGEPLPPKRGQRRRHRNRPAFDPREPLHRMTGVDLTRIEGIDETIALIVISEIGLDMSTWPSEKHFTSWLGVSPQRRLSGGQVLRSRTRPTTNRAAAALRLAAASLHHSQSALGAYFRRMKSRLGTSKAITATAHKLARLIYSMLKHGTAYVTQGLEAYEQQYRERVVRNLSRKARALGFELVKPVEAPAETALA

SEQ ID NO: 485629 - protein, 335 aa, unidentified
MNKSKEKKEVIGIDVSKSKLDVTVHTTQVYFKCENNKKGINKMIKDIYKQSSFNQENILFVFENTGIYSYELAAILNEKEIPFTMVSGLEVKRSLGIVRGKSDKADSKSIALFGYQRREELKPSIMPSKNVEKLQKLLNLRRKLEKHLAGHKSYTKELKSVLNKKEHKVIFAETEKQMKALKTSIKNIEKEMFDIIKSDENINKNYKLMTSIKGVGKITSMLVIVCTANFTKFDNHRQLASYCGIAPFEHSSGSSVRGKTKVSNLAYKELKSVLTMAALSAIQHNNEIRLYYERRIKEGKNKMSTLNIVRNKLLSRMFSVVKRGTPYVDLTKYAA

SEQ ID NO: 485630 - protein, 413 aa, unidentified
MEILYRVCCGLDVHKKTVAACLRFASPTGPRAEEIRTFGTTTGELLRLADWLAMTGCTHVAMESTGVYWRPVYQILEGSVELLLVNAQHIKTVPGRKTDVKDCQWIARLLEHGLLRASFVPPTPFRELRELTRYRRQLIEERAREANRVQKVLETANIKLGDVATDVLGASGRAMLKALIAGERDAHKLAALARGLLRKKEVQLREALVGRVTDHHAFMLQSLLSHIEFLDQEIALFDARIETQTRPFTAALERLDTITGVARRSAEQILAELGDDMSRFPTAAHAASWTGICPGNNESAGKRKSGKTRKGNRWLRTTLIECARGAVRARDSYLAAQYHRIARRRGDKKGIVAVGHSILIVAWHLLRNGGSYRDLGHDYFDRLDRDRLVRYHTRRLTELGVVLPPPSPASATA

SEQ ID NO: 485631 - protein, 340 aa, unidentified
MSIVTLGVDLGKTVCSLVGLDAAGKVVMRKRLRRAGLVAFVLNLDRCVVAMEACCGAHHLGRVFDGAGFDVRLMSPEYVKPYVKAHKNDDRDAEAIAEAATRPTMRFVRIKTQEQSDVQSLHRARSRLVSERTALINNMRSLLLERGITVAQGRKKLEAELIVFADEEHPDISPRIRGLIEDMRAQWRSLEARIAAFDKEFMTMAREDVAAQRLMSIPGIGAINATAFVAAVGNAEAFRRGRDLAAWLGLTPRQASTGGRQKLLGISKRGNRYLRSTLIHGARAVLHRLINEPSQLGAWLRDLSARAHKNVVVVALAAKLARTIWALLRKEQGYQRVLAA

SEQ ID NO: 485632 - protein, 424 aa, unidentified
MKVTYQTCCGVDVHKSFLVATIVKTTGGIEPSYQKKRFSTFNNSILEFKQWLLDNHCHDVCMESTGKYWVPVFNLLEDKINVVIANPKWVKAVKGNKDDTKDSKWIGDLFRLGLVKGSYIPCKKVRILREYTRYRYKLVSCRSSEKNRYQNALTVCNVALDSIVSDIFGKSSTSIIDYLLEQSGTSINHEEIASKLLRSLKSKEDAVIESVEGYQMTDAQKYRMHLVRAHMDYITAEINDVDKMIENMISSNPDFENAVQFLCTIPGVKRDSAITIISETGTDMSQFSSSKRLCCWAGLTPGSNESAGKKKSVRITRAGVYLKPALVQCAHAAVKSDKSPYYKKKYESLVKRRGKKRAIIAIARMILTAIYQMLSTGEQWNPSDLYKIDMPVALVEKQKAKAIKQAKKLLQREGLLPPDEPLAS

SEQ ID NO: 485633 - protein, 343 aa, unidentified
MLYLGVDVHKRSCWVTVLEADGEEREQRKLSMDRVTLREYFGRISKPAKVAVEATFNWYYFLNVLEPLGLELHLVHPQKTKAIASARIKHDKLDSRVLARLLHAGFIAEAWIAPQGVRELRQLLRHRTRTVRGATRAKNSVHGVLNREGIEAPIEALFGAKGRAFLEEVKLRELDRWEVEDQLQRLDLLEKQIGELDREIRQRGRANRAAQALETIPGIGPFIALLLVAEIGDLSRFPTPKHLVSYVGLAPSLYASGERRWTGEITKQGSSLLRWALVQAAHVAARSPRFVGFYERLRERHGPAKAAVALARKLATLSFYRWRAAEVRAPVSLAATSSGVHLG

SEQ ID NO: 485634 - protein, 380 aa, unidentified
MNATTVGIDLAKTVFAVCEGDSRGHGGRSSILKQGEFLKWLRTLPAGTVVAMEACSSAHSWGRTMKALGLEPRLIAAEFVKPYRKNQRVKNDSRDAEAVLTALHAPGMRFVTIKTEEQQQRLAWHRLREGWKAERTALFNRIRGLLTEFGIVVEVGSAKIRRKLAELEGDDAYPESLRLMIQSVREQVAVLDRRLAECEREIDRQSRSDPVVSRLRSRPGIGPLTADAIVATVGDARQYKNGRQFAASLGITPRQHGSGGKTHLGAITRRGDSYLRCLLVQGARCVLQAALRLHKNKPDTLNRLQHWMVKLNDRVGYHKAAVAIANKHARQVWAMLTRGEAYNPDAYKDWEAAHANVRPGDIREASDYDLSTAALASASV

SEQ ID NO: 485635 - protein, 521 aa, unidentified
MPRPRNARSTKPRKAFVLQKPNGQLVPRVQRVGPEHFGILAVDCAKARSRYFLADFYGRTLLEPTTLPHNRGDFQAAIDRIRQAMRQHELKDLVVALERTGEYHRPVQHAFRQAGFETRLVHPFTSKQYRQPADPGNKTDDTDLAAICRATTHGFGLLEPTWPDAYVTLQLLRRHRRDLVDKNTILQCQIREVLHAAMPGYAECFCHLWDDSPAPLLFARHTTSAEAVRQAGRAGLQPLAVQAGLHCRSETFHKILAWAEQAPPGSEHFLDRRRILTALDDDRLTKTREILELERALAHLVVPMPYVLLMAIPGINVVTVADLAGELGPIALYLNANAITGRAGLMPSRSQSDAVDCANGPLRRRGNRRLRAVLMQTADNLVHCNHYFSARADQWTRAGKDPRWVRVKVAKIFSRLAFAVVAGKQLFPHPCCQPRHYIVGKLLAFHSEHGTDPMALRQDLEAAVEQLPPQSRAAEAEPLQKELDAVARRRGPQPLAEIIPLVLARLAGRVVQSKPSESAGP

SEQ ID NO: 485636 - protein, 375 aa, unidentified
MTADLQEQGYVNATVLYMALELSNTKWRLAFGDGTRQRQVVIGAGDIAGLREQLAKVKEKWGLPPETAVVSCYEAGRDGFWLHRQLAALGIANRVVDAASIEVSRRARRAKTDRLDARALLAKLIRYERGERGVWRVVRVPEVEWEDLRQLHREREDLLNERTRHRNRLSSKLVAQGIRLPLRKDFVARLEEVRLFDGSELPEHLKAGLIREWERLQGVQAQLRAVEQEIGALIETADRTQAVRALMVLTGVGWVGAWVLVMELFGWRELTNRRQLASLAGLVPVPYHSGHMERDQGISKAGNRRVRALMIQLAWLWLRYQPDSKHSRWFEERFGGGSKRQRRIGIVALARRLLIDLWRFVDAGVVPQGARVKVA

SEQ ID NO: 485637 - protein, 357 aa, unidentified
MQTKTRTKARTSLRIRKNQNQPRRYLGVDLHRDSFLVCVRAGGEERLRRWSLGQVQEFARTLRAQDELAVEATGNTRWFCQQVAGRVGRVVVVNPHQFRVISESVKKTDRRDAALLAEYLEKDLLPEVRRKSALESELAQMAQARDQLVKMRTMLKNQLHGLFASYGVALPKKALASRRQRTALCERSLSPLADVQRRVLLGQIEALDAGIAELEQTLTEAARSLPGYEHLASVKGIGPLSTTILLSAIGRIEDFAEPGKLAAYFGLVPRVEQSNHTEHHGRITRRGNELARTTLVQCALIAKRYSPHLRSFYERIQHRRGTGKAIVATARKLLTIVYYTLKNHWTFRDFTNFELAR

SEQ ID NO: 485638 - protein, 314 aa, unidentified
MSSLVFVGIDVSQARLDIAVRPGTSFSITHSESAIAALVEQLCALSPTLIVLEATGGMEIPLTSALATAGLPVVVVNPRQVRDFAKASGRLAKTDALDAQMLAQFAEVMRPQPRPLPDAEARALAALLTRRRQLVEMLTAEKNRLLSAAAPIRKRLRSHITWLERELQYTNTNLAEAIRQSPVWREKDELLQSVPGVGPVLTSTLLASLPELGTLTNKQIAALVGVAPLNRDSGTLRGRRTVWGGRAQVRAVLYMGAIVAARFNPVIRVFYQRLQRAGKAKKVALTACMRKLLTILNAMLKHRTPWREVEAHHA

SEQ ID NO: 485639 - protein, 386 aa, unidentified
MQKNDLSRSLVAFDQNSTLVAVVELSLKTWLVAGLVPGLTRQPLKKQSADPDALAKLLQRWRDEAIKAGCTITRIVVAFEAGRDGFWLARWLLARGFEAYVIHPTSIPVSREHRRAKTDRLDTQLLMRAVLGWLRGEAKHCSMAAIPTLAEEDARRPNRAHETLVGECTRIVNRMKAILIRFGIRNFNVKLRKAAQRLETLRGAEGELLPPNTLAELRREMARLAFIKEQIKEIEKARLAELKRAPREGTHPMLLILARVLGIGVETADMLVHEVLSRNLRDQRAVARYGGITGAPDESGSKRREKGLAKAGNARVRRGMIQLAWRWLMFQKASALAQWFEARTEGARPGVRKTMIVALARKLLIALWRFVTTGEVPAGAVLRPAT

SEQ ID NO: 485640 - protein, 318 aa, unidentified
MSDSVFIGIDVSSQTLEVASSDQARTWQVANDVSGIERLVSQASTLAAALVVLEATGGYEFEAACALQAAGLAVAVVNPRTARDFARAMGALAKTDALDARMLAAFARVLHQHPERERFVKPLADAELQQLQALVLRRRQLVQMLTAERQRLRLAHAAARPSIERVIEFLKQELGDSEAAVAAHVQRHHAELAQALASVPGIGAASVAVLLAELPELGKLDRRRIAALVGVAPLNRDSGQMRGQRSIWGGRADVRRTLYMATLVAVRHNPTLKACYDRMLSAGKRKKVALVACMRKLLTMLNAIAKHGSIWNPAMHSA

SEQ ID NO: 485641 - protein, 315 aa, unidentified
MVEQVVVGIDVSKAKLDVAIVPGGEQFTVSNDRHGIGELLRRLSPLAPSRVVLEATGKLEQLAVSELAAAGLPVVVINPAQVRHYAKARGKRAKTDPIDARLIAEFARDLEPELRPLPDAETQALAALCQRRNQLLEMEQMEKSRLQRAPQANQKSIKAMLRFMRRQIEQVEKQIEHSIRNSPLWQAKRELLESMPSIGKVNSSTLLARLPELGQFTRQKICALVGVAPYDDDSGQWHGRRHIAGGRAGVRQVLYMATLSAVRCNPALRTYYQRLLGRGVEPKAALIAVLRKMLTILNAMVRDNTPWRPLCPTHA

SEQ ID NO: 485642 - protein, 363 aa, unidentified
MKRCGKPSGKKKRSSKPKEATMKVEKDLYGGLDLHGDNVFCTLMDEQRRVVFERRLPNDLETIREALEPFRQRIRVLAVESTYNWYWLVDGLRKLGYEVKLANPAKMQENIGLKFANDKTDARFLARQMVNGTLPEGYIYPVETRGVRDILRRRMRLVHARTGEWLSLEGLVARHTGRDMNVKELAECEIGEILTGQPHALLMAQANFRHLDFLKKEIHALEKAVLEELPDHGAYQRLMTPPGIGRVLAWTILLETGPIGRFKRAGNYASYCRAVKSEHTTNGKKKGEGNGKSGNKYLAWAYVEAANLSVRYSPELRAWFQRKVARSGKRVIAVKALANKLCKACYFILRDGVDFDVKRLVGG

SEQ ID NO: 485643 - protein, 402 aa, unidentified
MNCVGIDVSKGKSMIAVMRPFGEVVVSPFEVRHTANELSELAGLLKSLDGETRVVMESTGNYHAPVAWLLHDAGLYVSVVNAMLVHDYGNNSLRRAKTDKKDAVKLANYGLDHWLTLPRYVPEEDTRLMLKTCYRQYQQYSKVQTMLKNNLISLLDTAFPNANRLFTSPPRADGSEKWVDFVATFWHCECVCGLSEKAFTAKYQKWCKKHGYNFSEDKALDIYASAFAHFGVMPKTDTAKLLVEQAISQLRATSAALAALKQKMQSLAASLPEYPVVMEMFGVGPTLGPQLMAEIGDVRRFHSKKALVAFAGIDAPPYQSGQIDVRSRSISKRGSASLRRTLFLVMGVLLQCAPMDEPVYQFMDKKRSEGKPYRVYMMASANKFLRIYYASVKAYLDSLEHD

SEQ ID NO: 485644 - protein, 329 aa, unidentified
MKLYVGLDVALEETSLCIVDSEGVTVREVKVSTEPEAIRSALEGSADRLDRVGVEASSLGIWLYRELQPAGVPIIVVEARHMRVSLSTMRNKTDRNDARGIAQMMRLGWYRAVHVKNIDMQKMRSLLANRKLLKRKLIDVENHIRGTLRAYGLLMGGVGRGGYEARVRELLEHSDPVFSVVIEAMLDVRRAIFEGYKRLHRVLLQVVQHDAVCRRLMTVPGVGPVAALSFKVGVDDPRRFARSRTVGAHFGLTPRRHQSGTSIDYEGRISKQGDVAVREALCEAAASLLLRVRKWSALRAWGLRIAKHAVRDRRGRAQARRHPAQNVGQ

SEQ ID NO: 485645 - protein, 384 aa, unidentified
MNEHILYVGLDTGKNHIDVAVAEPLPGGDVRYWGKVANEGAAVDRLIRRLQREGRQLKICYEAGPCGYGIHRRLNAKQGVSCEVIAPSLTPRRPGVRVKTNRRDCLTLVKLLRAEELTAAWVPDAAHEAMRDLIRTRSAAVEDLVRCRQRIGGFLLRQEIRYAGKPWSKKHRVWLGRLELAAPAHRLMFGELLEALDQAQARRDRLTDHIAELVPSWSLAWLVEALQALRGYRLINAASLVAEIGDPRRFASPRELMGYLGMVPSEHSTGETVQRGGLTKTGNRRARKVLIEAAWTYARRAKVASTRAGRHPSAVRAIAEKARHRLSGRYRRLTARGKLGVVAIAAVARESLGFIWAIAQAAGPADIIERRRPARGAGRGSDSR

SEQ ID NO: 485646 - protein, 329 aa, unidentified
MIIIGCDFHPGFQQIAFVDTETGDCGEQRLEHCEGAQKFYHDLATQGKKVRVGMEASGHARWFEQLLEGLNIELWVGDAAVIRAKRGRKPKTDRQDALHILNLLLTGDFPQIWVASWENRDLRQLLWHRHRMVQARTRVMNQLQAVALNEGLRCKKKLWREHGREQLEAFRLAPWASRRREDLLELLDRLNPTIAELTQAIEQEAEKCPQAQRLMTHPGVGALTALAFVLIIGKAERFQCGKQVGCYLGLVPLEDSSGDKRRLGHITKQGNSLLRFLLVEAAQVTSRTIPEWRSKYLHLTMRRGRKIAKVAMARKLAIRLFWRMRQGWN

SEQ ID NO: 485647 - protein, 509 aa, unidentified
MRPLAKRSRPVKAIPFGRLVFEVRGPDRIGAFQSACMKTKKHSQSSRGPKASRQHKSKKQSLKVIHPNAAGIDIGATEHYVAVPPDAVPAGASNVKTFGCFTEDIDAMVEWLKACGVDTVAMQSTGVYWIVPFQKLEAAGIAPVLVNAQMLKLVPGRKSDVQESQWIQQLHAYGLLAASFRPNDATCRLRTLVRHRANLVSGGAEHILHMQKALTQMNIQLHQVVSHLTGETGLRILRAILSGERDPYKLVKLRDAQITRSTEAQMIKALRGDWRPELLFVLAQSLQAWEFYQEQMKACDLQIEEHLKQMPSAPPAAAKAAPAAADPLASSNLRPKAKQSRKRNDPEKDLGPELARICGTDLTAAHGLRLLTVLTIISETGVDMNKWRSAKAFASWLGLNPNNKVSGGRILSSRTRKVVNRVSTALRMGAVGVAETQTWLGSFHRRMRAKLGPASANTATARKIATVVYHLLKYKEPFVDRDLAAYEARVYRHKLARIKKQAKPSDMSS

SEQ ID NO: 485648 - protein, 392 aa, unidentified
MVCVGIDVAKDKHDCFILSSEGEVLADVFTIDNNLDGFETLLQRIRSCARPTDNIKVGLEATGHYSYNILGFLLDKGLATYVINPLHTNLYRKSLSLRQTKTDRIDARTIASMLMSNVDLKSYTDTAYHNEELKSLTRYRFGKVQERAKLKQSVTRLVNILFPELEKLVPTLHISSVYAMLSEFPGAKQIAVVHLTHFKTVLSDASKGQYDRDKAVEIREAARCSIGSAMPAKSLELQHTIRLIRELDKEIGEIEAAIKAIIDEMAPPILTIPGISYRMGAMILAEIGDFSRFDSPDKLLAYAGLSPSTYESGKLKATGTYAHMEKRGSHYLRYALFNAAKYVCHWEPSFAAYLAKKRAEGKHYNVAISHAAKKLVRLIFALQTSGRTFQPS

SEQ ID NO: 485649 - protein, 339 aa, unidentified
MELYAAFDLHGNNNFLALIDSNGRRIFGKRLLNDRERILEVLRPYQKDPMGIVVESTYNWYWMVDALKEEGYSVHLANPSAIQQYEGLKHTDDEHDSFWLAELLRLGILPEGYIYPKEERPIRDLLRKRGHLVKLRTSLIISLQNIISRNCGMKLNANEVKGLKEDRVHPLLRDNEDLALAGKVSKEAIDFLTRQIRTIERVVEGRIELKSSYGYLLTLPGVGKILALTIMLETGPVSRFAKAGNYVSYCRKVSSHWTSNEKLKGSGNKKNGNRYLAWAFSEAAELARRYYPEPRAYYQRKMQKTNFMVAHSALAHKLARAAYYVMRDQVPFRPEKLFS

SEQ ID NO: 485650 - protein, 313 aa, unidentified
MSQNNTAIVHVGLDVAKLSLQLHLAGRFHSLANDRKGHAQLLKLLRGHAGAHVVCEATGGYEQPVVRVLQAADIPVSILEAGRVRHFARAQGQRAKTDPIDAAVLTHYGVTFKPTPTPAISAQQQRLADVSQRRRQLIHTRTMESNRAEHYTDPLCVRQHRQLQKTLEKQIEQCDQAITTLIAEDAGLAQKAKRLETIAGVGPVVAATVLAEMPELGKLNPQTAAALAGVAPYNRDSGALQGGRHISGGRRPVRCALYMATLSAVRHDRILKEFYTRLRTAGKKPLVALTACMRKLVVLMNRLLKNDKFQLAN

SEQ ID NO: 485651 - protein, 379 aa, unidentified
MQKEEHYMESILYVGMDVHTSNYTLCTYSIEDDREFGLVKFEPDYLNIVRYVKRLKEHHGQETRIICGYEAGGLGYSLYRSLTANSIECVILAPSTMPKAPNERKTDYRDAAKIARCLAYNSYRSVYIPDAEDEAVKEYIRMRDNTKDHIKQLKQRILALCTRWRKEFNGTKKCWTVAHMKWLQHLEFDNPVAQEAFDEYVIQLNEANARLKRYDERIEKWADLPRYAEKVARLTCFCGIKTHVALATIAEVSDFNRFPNANRFASYLGLVPGEYSSGNNINRLGITKQGNSHIRKLLTEAAQCYARALPGRPSAELLKRQRGNDPKVISYANKGNERLKRKYRSIAARKPRPLAVIATARELACFIWGMMTDHLEQVY

SEQ ID NO: 485652 - protein, 391 aa, unidentified
MIYVGIDVAKDKHDCFITNSDGEVLFKPFTITNNLDGFNELYQKIESVTEDATKVKVGLEATGHYSYNLLGYLIDKGLAAYVINPLHTNLYRKSLSLRQTKTDKVDARTIASMLMSDVNLKSYSNTSYHNEELKSLTRYRFDKVKERAKLKSSVSRLVCILFPELEKLVPTLHMASVYSMLSEFPGAKHVASAHLTRLTNLLSEASKGRYSKDTAITFREAARASIGSNMPAKSLELKHTIKLIQELDSEIDEIENEIKVIMDEINSPILSIPGINYRMGAMIIAEIGDFSRFDSPDKILAYAGFSPSTYQSGQLDGAYAHMEKRGSRYLRYALYNAAKYVCHWDPTFAGYLAKKRAEGKHYNVAISHAVKKLVRVIYHLEKTKQQYIKVA

SEQ ID NO: 485653 - protein, 364 aa, unidentified
MVRKSQATRRLSTLRRRTMENCTYVGLDLSKTSTMATAVDPLGHRIRQEKLGVSDEELLRFLGEIPGPKQVVMEACNVWEHTYDAAASTGAEVLLANPLKVKLVSKTTLKTDKVDSEKLALLARLNAIPESYAPSPEQRALRRLVRERVFYHAKWKAVASHTYALLLQKGIPYRPEILTRRRLRGELRVHNIVEVNRGLDTLEKIEEISVPLDREIHRAYLASREAQLLATIPGVGEFTSMTLVAFLCPIERFYSLDAVVKYCGLCPSVRQSGERAFHGRLVWDCNVILKWVLIEGQWNVRLRERKGDVSRVARRVARRGAANDGAVAAARKLVRICAAILRRGTPYQPESPGSSSRQVGHAAS

SEQ ID NO: 485654 - protein, 407 aa, unidentified
MTAPYCVGIDVALHAHRISVLGPDGEAVGPSFTIEATQEGCTELVQTLRARGAVPAATLVGLEATGHYWENLEASLVQAGYRVLLLHALQTRRYRDVLRRKAKTDDIDAYVVAGLLRSGSAEGCFVPDEQIQSLRELARLRARLMRERQDYLRQLVGQLDVVFPEHRTVLGDVSTVRARRLLAGFPTAHHLAQAPPAALRRMAPRGFSLQDATTLRDRARGSAYSGKAAHARGQVVRTLLTQYERLTTAIAELDQAVEALLPPTDATGGPSDATLLQTLPGVGPHTAGTLLGELGSFTRFANARALVAYVGFYPVISQSGERSALPYLSPVGSRIARHVLYLAAVNAVRRSAEWRALYRRKTAQGKTAKQALIVVAVKWLHTAYAMLKHRAPYDPTRLAGLTATLST

SEQ ID NO: 485655 - protein, 431 aa, unidentified
MKGGDFMKNNILSTLYVGIDVSSKTNVLCALDFEGNKLLNLKALNNQPGAESILDSIIRCLDSNGLKYVVIALESTSFYSTHIANFLASDELLLAYKPLVYCLNPKTVANYRKTFVDMDKTDPLDAYVIADFVRCGKITSKPWRGSQFLALQRLTRHRLHLIEGITREKAYMVSNIYLKFSELTVLDKEKRPFSNTYGVTSSAILTEYLSLDDITYSSIEDLVAFIREKGKNRFSDPEMTAQVLKKAARDSYRFDKVLYEPLNVAIASSFNVVKALEDEVKTVDKTIERAIKGINPTEYQSLMSIPGVGPVLASGILSEIGTITSFDSHNSLAKYAGLTWRVNQSGNYSSDDTRMTKTGNKYLRYYLIEAANSVRKHVPEYKENYYKKYSEVTTHQHKRALALTSRKFVRLVFGLLTKNQIYSSDKVGDIN

SEQ ID NO: 485656 - protein, 371 aa, unidentified
MADYREAFIGIDVAKLKNAIAVAESSREGEVRFWGEVDASDASMRRIIQRIAAKFDRVHFCYEAGPTGYGLHRLIRSLGHECVVVAPSLIPRKPGDRVKTNRRDALALARLLRAGELTAVWVPDEGHEAMRDLVRARAAAVETLRVHRQQISAFMLKHSRIYPRKKGWTMRYLRWLQEQQFDHPAHQIALQEMVEAVRVSKERVERLEKVIEEFVPTWSLAPVIRALQTLRGVDLIVAVTFATEVGDVSRFESPRQLMGYLGLVPVERSTGATVRRGGITKAGNGRVRHMLVESAWTYRHPPKVGTRKLYLMEQAPSKVREIAWKAQSRLTSRYRMLATRGKRTTVVCTAIARELTGFMWAVAREAQAIKS

SEQ ID NO: 485657 - protein, 406 aa, unidentified
MRFYNQQHRFYGGVDLHARTLSLHILDATGKSVLAKTIPASPDAFLQAIAPFRDGLAVACECMFAWYWLADLCTEQAIPFVLGHALYMKAIHGGKAKNDPIDAHKIAVLLRGGMLPQAYVYPRGMRETRDLLRRRTFLVRKRAEALVHLTNTNSQYNLPPFPKKLAYAANRAELSLPDRFTDPSVRKNVELDLALIDTYDEQVGAVELYLTRTAKVDDPQAYARLRSVPGVGPVLALVLLYEIHDIRRFPEVGQFLSYARLVRCTHESAGKKQGTGGNKIGNAHLKWAFSEATCLLLRESEPAKRWLARREKKHGKARALGALAARLGRAVYHLLRKHEAFDSKRFFASLPTAGGGGLAVSSWCPPAAAEGQCRSVPGSWWPNWGQVWASVPGVGVVWDTEPRGPP

SEQ ID NO: 485658 - protein, 363 aa, unidentified
MTVYIGVDFHPYEQSVALADDRDGEIRYRRFLHSDKQSLKAFYRKLGEDAVIGVEATGCLWWFEKLLATNGQQLRIGDPRMIRRAALSRHKNDFRDAETILDLLMRGQFPAIMPRSEQSREVLDLLHYRQSLVRKRTSIANQLQAFARNKGLGKFHMSAAKTRKKLVDTPVTEVEQLLVSSRLLLFDEITAQMKALEVRLAKLAEEDERVRLLMTHPGVGVINALALVHTLGEVRRFRRKEEVVAFVGLDPLEKSSGQKKRIGQISKHGSRLARHLLGQAAQACRDQRIRTFYAQVSRRRGRPKAKVAAARKLLINCYLMLREGIGYEEFRRRGEVGLCEGSGELRGNATVSEGLRARPAISG

SEQ ID NO: 485659 - protein, 410 aa, unidentified
MPFQAAPVTSSTVAVAVDVGKNEFAVSVTDASRARLLKSLTRQPMTAPALREVTAAITAVLADGARVKVGIEAAGHYHQPLLSPAVWPCGWELLELNPGHVTEMRKVLGKRTIKTDVIDLIAMTEVMLAGRGQPVSVRDAVLTDINAWSAHRTRRVQSRTALKNQLLGQLDRCFPGLTIALPDVLGTKVGRLIAAEFPDPARLAALGPSRFIRFGATRGLQIRKPLADRVTASARDALPMPGAQAARHVLREDLALLCVLDSQIATADAELGQLVPASPFRTLTTVPGWGAIRVGKYAAAVGDPSRWPSHKQLYRAAGLNPMQYESAGKRRDNVISREGSVELRRALIDMAYGLWLQDPASKAYARQLKARGKPGGIIACALANRANRIAFALVRDQGDYDPTKWTLQED

SEQ ID NO: 485660 - protein, 419 aa, unidentified
MSFKILKFNCCGLDVHKTWIYACVGITDSNNRTEYKQARFSSFTKGLNELCDWLAKYNCKDVCMESTGKYWIPVFNVLERHEIWVTLSHPKYTKPMKGNKTDRKDAKWICDLYMCGMVKPSFIPPADIRGLRDLVRYRFKLTCMITGEKNRAQNCLTVSNLKLDDVFSDVFGKSSHSITEQILQHPGELFDVAPFVHGRCKTPVEEIQAAVDGAVSKEQAVKLRQCLDHIDELQKHISEVEQEILRLCDKYEAALNLIRTVPGFDKNPMTAIQVLSEIGGDMSVFPTAKHLVSWAGCCPRNDKSDRKIKSTRISHAGSYFKPVLVQVANALIKSKKHPEFTTRYKRIKARRGHKKAIIAVCRMILTAIWHILTDLKPYTPDGFLESRPVNKEKVLTTSQALNLLKQRGYLIKDDPLPAS

SEQ ID NO: 485661 - protein, 379 aa, unidentified
MEVFIEKCAGLDVHSETIVACVIKGTREDELYTETETFPTLTKDLFRLLKWLETHEVTHIAMESTGVYWKPVFNILEDFFDITLANAQRIKNVPGRKTDVSDAEWIAKLLRHGLIEKSFVPPVNIRELRDLTRLRKKWIGHLTSEKNRIQKVLESSNVKLSTVISDVFGVSGRRLLNRLIEQGYVDEDDVEKDIHGKLAPKKQRITDSLFGTINEHQIFLIRQSWQHIQYLETLISEIDERVDQLLQNYQEELQLLITIPGISKDTAAVIIAEIGVDMGQFPTSQHLASWAGVSPGNHESAGKRKSTRTVKGNPHIKSAMCEAAWAVSRSRNRWLANKYWSLAARRGKKKALVAISHRMLRVIYSMLLNKEAYKEPQII

SEQ ID NO: 485662 - protein, 341 aa, unidentified
MKHFVGLDVSMKETAVCVVDDAGQRIWEGCVTSSADAIAAIIWEKAPDLVRAGMETGPQAVWLWHSLRERGIAVDCIHARRAAAALKLQANKTDRNDAFGLARLVHSGWYEPVAIKSFDRYRMRAVLTARERIVRMSTMMINQIRGLAKTFGLALSAGKGQVFEQSVRRALPDDDVLRDLFECLLSVLSGLKDQRRAFDRQLARFAREDVTCRLLTSAPGLGSLTAIAFVTTVDDPARFRSASDVGPYLGLTPKRYQSGEVDIGGRISKAGDRLTRKLLFEAATVLLFRASPSIALKQWGLRLNARSGSWKARVALARKLAVILLTMWKTNTVFENRSLAA

SEQ ID NO: 485663 - protein, 369 aa, unidentified
MSKAITSFVGLDVHYDSIAVGVAPTGREPPHFVGTVAPNWAPLCKALSRLGKRESLQIVYEAGPCGYTLARQLRAGGYACEVIAPAKVARRPGDRIKTDRRDALLLARAARAGELVNVTIPDERDEALRDLSRAREDAVRARLKARQQLKALLLRHGRRYSGRSSWTAAHERYLACVSFQQPAQDIAFAEYRSAVRDTHERVERLTEAVRSQLAHWRMRPVVEALMSLRGIDLIAAVTLVAEIGDFARFARPCELMGFLGLVPSEYSSGGARRQGAITKTGNSHARRVLIEAAWNYRFPARMSAVMQKRQQDQPKAVREIAWRAQLRLAKRYRHLAARKLALNKICVAIARELSGFVWDIARQVKPLGT

SEQ ID NO: 485664 - protein, 412 aa, unidentified
MELLHRRCCGLDVHKETVVACLRLVSDGKVTTEVRTFQTTTADLLRLSEWLAANDCTHVAMEATGVYWKPVWHILDDGEFELVLANAAHVKNVPGRKTDVNDAMWLAELLAHGLIRASFVPDAQTQEMRNLLRTRKQLVREQSSHVLRVQKTLEDANIKLDSVLTDLMGKSGRAMIEALIAGETNPAKLASLADRRVKASPEEFREALRGRVTKHHRFLLRLHLNQIDALDAAMATLDAQVEANLGPFRTAVDLVMSIPGIKNLGAHVIVSEIGIDMSRFPSDAHLISWACICPRNDESAGKRRSNRLRKGGTWLKTTLVQCAWAAVKKKDSYLQAQFYRIKARRGPKKAIMAVVASILTAIYHMLKDGTMYKDLGCNHFNRRSTDQQKTHLIKRLADLGYTVEIKPVVAMA

SEQ ID NO: 485665 - protein, 357 aa, unidentified
MKEYISFDCHKHFTLAEREDRITGRCRQTRIEHRPGAFKEFLKHCEPGTPVAVEAMGYWYWIIQEIEEAGFVPLLVHPRKAKLMMAMINKSDKLDVHGLNRLQRNGTTPTVWVPPRELRDQRELTRGRMVLSHHRTRLKNRIHATFTRYGRLFKETSDLFGKKGREQLSKELAHLPDHTRWMTQVMLNQLDQTEEQIAQVEKRLEAVLRASPEMALLRSLPGIGPILAAVIMLELGQIDRFEAADHYASYAGTTPRLWASADKRRHGKLRPDVNRYLKWAYIEAGNSVALNSERTPARHVSRLYRRLKQHPGHSKAIGAVARHLAEATFHVLTRKETYRDPALQRGRAKQELSASKS

SEQ ID NO: 485666 - protein, 444 aa, unidentified
MAMRKRDDEVFPNAAGIDIGASSHWVAVPRHLAEQTGCEPVREIGAMTDDLNALADWLLACGVDTVALESTGVYWIPVYEVLEQRGLKVWLVDARQMKYVPGRKSDVQDCQWLQKLMSLGLLRAAWRPDGEVCVVRAVARQREVLITDQATWVQRMQKALVQMNIQLTEVLGDVMGMTGQAIIRAIVAGERDPKMLARHRHCRVKASAEDVTKALTGNWRDEHLFVLGQALAMYDDIARRLGECDAKLQTLLGERGRARVDLGRVPKAGSKSRVEFDVRQSLANWAGVDLTRINGLGVTAVMKLLTEIGPDVSRFASVKHFCSWLGLCPGTKISGGKVLSSGTKRSANRARQALKMAAMSLSRSDSALGAFYRRLSGRMDKPRANTATAHKLARMVYFMLTRGEQFVDQGQQRYEDQQRQRSIAALKRRAAALGFQLNPKTVPV

SEQ ID NO: 485667 - protein, 343 aa, unidentified
MKASIIGLDIAKSVFQAHGADANGKCVFKRKLGRSEVSAFFAKLDPCEVVLEACGSAHYWARVISRIGHDVRLVPPDRVKSFVKKGKKNDAVDAAAICMAATHPDTMCVPIKSEEQQGILSLHSTRALLVKQQTMLSNAVRALASEFGLIAPLGTRHLPELMAKIETSADLPAAMKQSAMLLFEHYEKVAQSIDTLEVQIRARAKSDEDARRLMTIPGVGPITASLIVASVADIGSFASARHFAAWLGLVPRQHSTGGKTRLGRITKTGNRQIRTLLVLGATAMLHRVHKWDSAAGQWLCELMARRPRRLATVALANKMARIIWALLSRKEIYRPAGVSVSAG

SEQ ID NO: 485668 - protein, 441 aa, unidentified
MQILFSRCCGIDVHKDSVTACVLIYAEGQEPEVRKKEFPAHFKSLGNLRFWLMAQKVTHVAMESTGVYWKPVWQALEGHFELILANPFQIKTVPGRKTDARDSQWIAELLAHGLIRPSFVPPRATRDLRDLTRYRVKLVQERNRVHNRIHKVLEDACIKLDTVASDILGATGRAIIQAIIAGQEHPDWLADKARGKLRGKRAELRLALRGRITDHHRLLLRELLEDLEFVERKISRLETEIATQVDHGKLDRLCSIPGVDLITGCTLLAELGSDMSVFNSPHHAASWAGLCPGNHESGGKRLSNRTRKGNQWLRRALCQAAWAATRKKNSYIAAFFYRKAGKHGMRKAIVATAHKLLIISFCILRDGTEYQELGDNFFDRLHPERTRNRLVRRLQRLGLEVTLQPRSGTPAALEPPDRSTIRKRGRPCKCTERGIPCKHVP

SEQ ID NO: 485669 - protein, 342 aa, unidentified
MKREIYIGVDVSKNWLDLAYYDGVEIDWKSGHIRVDNNKSGYRRISLWMKKLQIAKESALFCMEYTGLYCHNFRVWLESEGITYGMVNPRKMHRFEPDLGEGEPALDRIKTDEMDSFRIAMYCEKHSRKIKSSPSRLPGPAFFNLKRLLAERRQYVKHSVLYKQQLHDISAYDTEESCKRKQAGLKSLSVLRRQTDIEMRKIIKSDEAIYKNYKLLCSVIGVGLVIAVETIVLTENFTAITNPRKYACYVGIAPGRKESGISIRGGDHVSKKGFKQAKANLSLVALQAIRHDSNIRSYWLRRKADGKHTGVVLNAIKFKMILRMFAVIKRQKPYVEMDAYMK

SEQ ID NO: 485670 - protein, 414 aa, unidentified
MDDTPGDVDPMGAGYRLGSLRATISGSAIMTQQSHVTASNGLDYERTLIIAVEVSSRSWVVAAQVPGLQKGVKQQLAPRADALMAAVEGYKRRAAAAGMAVDRVIVAYESGGSGFWLARWLQQRGVEVHVMQPSSVPVDRRMRRAKSDRIDADMLLRTLLAWLRGEPRVCSMVPVPDEATEDARRPRREREELIRARVAIVNRIEAVLTVLGAGDYNPLRRDCRERLGQLRTALGQPLPPHARAQIERLLARLDLIREQVADLEAQRDRAVEDEAAGQAERMIQRLARLRGIGVQTATVLVHEAFVRRFRNARALGSYAGLTGTPYSSGGTHREQGISKDGNRRLRATLVELAWMWLRYQPGCALSRWFHDRLGGSRGRLRKVMIVALARKLLIALWRYLQDGAVSQGMELKPA

SEQ ID NO: 485671 - protein, 324 aa, unidentified
MSDSIVGIDVSKETLDANCARGQRKQAKIFANSPDGWKLVLSWLKAMGSKQAHVCMEATGRHSLGVALALYDAGHVVSVVNPTQIRDFARTKLGRNKTDKVDAALIRDYAALFNPAPWTPPSPAMRRLCELHTVRAGIIGSRTEWKNRLGSGLGDSTATGLAAMTIEHFTHQLETIDRAIGETIDQDATLRGRRDLLLSVNGVGETLAALLLVEMPGPEVLRRSGEMVAYAGLNPSHHRSGSSIDRPTRISKIGNATLRSSLYMPALSAMRFNPAVAALVARLKEAGRLKPKQIVVAAMRKLLVICFGVLKTGKPFDPAIAMPA

SEQ ID NO: 485672 - protein, 375 aa, unidentified
MVRVQMVEVPEQGGHQAHRPLPGSEVMLAIDLSRSKLVYCLRWDGAEQRRLSTPAGMEHVRAVIEQYRGCQLHVVYEACGFGYELAWWLQAAQIPTTVIAPSRVERVPGLAVKTDGLDVGKMARKLEERQLRGIYIPPRALHERRQLGRTYAQCVQERKRAQIRLRSLLQEQGRLGPPPAEGWPAYTRWLATQALPPPVQQCVQSLQRVRAIADQEAKRLHSELRQLGRHPDYALLTRALSAQPGIGPLSAIRLVLELGDMARFASAGSLPRFLGLTPSEYSSGEVVRRGHILKCGPGALRALLLQCAWAAVGKAKEPELRAVFERLAPRIGRKRAIIAVARRLAIAVRRRWLAALSQPVERAAPAAHERPRRPL

SEQ ID NO: 485673 - protein, 388 aa, unidentified
MERFVSLDLDTKTAFVSTLDPATGKTSQFRISTAPNELEKFKKTLRPDDILCMEACPGSRRVYRQLKSAVAEAHMINPTIFGAILDAHKSKNDRNDSGLMGKLHMAGALPTVWVPDEQTQDERQYMAHRMDLDGDRTRTRNRIISIFLEHGFAHRSDELLKMKADCLLHEVRSSLPEQALESLASKLRQLAWIESEIRLVDARITATPPSKPELIKIASTLPGVSYVMAFAIGAAIGDITRFKTPNSLPNGAGVTPSLHSSGPGKPKHGRIKKRGSQLLRWAAIEAADNARRVPGRFRNLYRRLIRKGKHHSVALVACARELLVVLWHMLTKHEEYKELPIETQQRKQKRRAKQLEEATQVLKTCPSARTTINSSLIPITNALQSLPS

SEQ ID NO: 485674 - protein, 354 aa, unidentified
MKKGYQRGKEFTRGSKVYVGIDVHKDSWHVTAVTEGEEVLNGRLPSQYPVLRKLLDRFAGREVKVAYEAGPCGFWLHDRLTGDGIETIVVPPSLIPLESGNRVKTDKRDSRKPAHLLEKGMLKRVFVLSEEERMHRELVRTRRQLMEHRADVMKQIKSKLLFHGIEYAYRSWNSQFIRWLRELIDSHRVFAISLGFMIDIYEHLTDQLKKITKQVFLLTKNEKYARNISLLCRIPGIGRLIAIEILVELQDMKRFKSAERLASYIGLTPSEYSTGQYTRQGRITRCGNTRVRTCLVEGSWVLIYRDPVMKNKYEKLKIRKGAKRAIIAIARNLIIRIRSMVLNNEPYYIGSVAR

SEQ ID NO: 485675 - protein, 435 aa, unidentified
MEYKPEPGYKPECKPESPPILAWIGIDWADQEHHVCLQVVGSTQVEHQVVPQRPEALQDWVQRLRARFPQGRVAIALEQARGALIYALMSYEFILLYPIPGKTLADYRKAFFGSGAKGDPTDAELVLELLRCHRDRLHLWTPDDAPTRQLGLLNEQRRKFVDERTALSNRLGSLLKECFPQALDWVGDLGKLPASEFLAKWPSLTAVQKARPVILREFYLRYFRPRPEELEKRLAEIRQARPLTSDPAILESHALIVPLLAAQLQTLLASIAQVEAALAKLFSQHPDHDLWEILPGAGKALAPRLLAAFGSDRQRYQDAAELQIFSGIAPVTASSGRSRWVHWRWACPKFLRQTFHEFAAQSIPRSTWARAYYLEQIRRGKHHHAAVRALAFKWIRILYRCWQDHTPYNEEKYLQALARRGSPVLAHIQNLQAAG

SEQ ID NO: 485676 - protein, 381 aa, unidentified
MTTPATRNVQERPTEGTLFVAFELSEKTWKLGCTTGHGQKPRERTVPARQQERVLDEIAHAKRRMGLPDTAPVVSCYEAGREGFWLHRFLQGHGITNHVVDSSSIEVNRRRRRAKSDGLDVRKLLSMLLRYAHGERQVWQVVKVPSVEAEDQRHLHRDLETLKQERASTMTRIEGLLSSQGLRVTSLTKLPEQLEALRLWDGSPMPPGLRRRVMRVYAHYTFLSEQIAAVEVERRAQLQTSADASIDKIRQLMQLKGIGINGAWLLVMEFFGWRAFKNRREVGGLAGFTPTPYQSGESAREQGITKSGNRHVRWMTTELAWSWLRFQPDSALSVWFRERFGSGGKRLRRMGIVAVARKLLMALWRFLETGVLPAGAVLKEA

SEQ ID NO: 485677 - protein, 345 aa, unidentified
MVVLGADLHKRSHTVVVIDATGQKLAERRVAATVEGHLELRRWAAQWPERTWALEDCRHLSRRLEADLLRAGEAVIRVPPKLMAGARRSTREPGKSDPIDALAVARAALREPDLPVATLDGPERELRLHVDHREDLIGERTRHEQRLRWFLVELAVPEPAPRSLGRIVVQAAVEAALAGRAEPVARFARDLLARIRELSVAIRALEREIELLVRRLAATLLTLPGCGALTAAKVVGETAGVSRFRSKEAFARHNGTAPVPVWSGDTTRHRLSRGGNRQLNAALHRIAITQMRIDERGRAYLDHRRQAGDTKTEAIRALRRRISDEVFRRLHADEAARAVALAAAA

SEQ ID NO: 485678 - protein, 343 aa, unidentified
MDYYAGIDVSLELSSVCILDASGQIVREAKVASEPEALATFLACLNLPLTRVGLEAGPLSQWLHAGLVQAGFEVVLLETRHVKAALSAMIVKTDRRDARGIAQLLRMGWYRPVHCKSPPAQEVRALLVARKQLQAKMRDVELSLRGLLRGFGLKVGEISKGQFATRVRTLTAGHEMLERIAEAMLRAREALQTEFARLHRAMLAIARENEVCRRLMTVPGVGALIAVTFTSAVDDPERFARSRAVGAHFGLTPKKYQSGETDITGAVSRVGDPMVRTALYEGAHILLTRAVRFSALKRWALEVAKRRGMRRAKVALARKLATVLHRLWVDGSEFRFGRDVAAA

SEQ ID NO: 485679 - protein, 354 aa, unidentified
MTKITKLDFGGEQIYCGIDVHKLSWRVNIRSEEFELEDYSQQASEEVLVSHLRKNYPGAAYELVYEAGFSGFSLQRSLQSKGINCIVINAADVPSSDKDKRRKSDCVDARKLSKALVSRSLKGVFVPQPEMEHIRTLVRQRNKLVEDQTRCKNRIKHLLLFSGLKVEENDSWSGGYIKRLEALDCMTIPLRQALDLGLQEYQSIRKLTLQATRQLRVLSRQEPYNKIISLLRSVPGIGLINAMILLSEIQDMGRFKTLDKLCGYAGIVPDLHSSGDEQSVRGITHRSNHYLRVAIVESSWSIIRKDPAMLMYYKEYCKRMHPNKAIIKIAKHLLSRVRFVWLNEIPYQKGRIDF

SEQ ID NO: 485680 - protein, 348 aa, unidentified
MTMLADAADAVIGVDTHTDTHTACLLDHLGRQVATITVPADPRGCAMLLAWARNQAPGPRLAWAVEGTRSHGLGLLRVLQASGQTVVEAGRPARASKRPGGKSDPADALRAARDALAAGKLAQPRSDGEREGLRILLAARAQATAARTAAVNTLKALLLGAPDNLRQPLRGLSTPRQARRCRSLRVHASQPVNEQILRAELRRLATHIGAWDRELRANKAQLRQLVTQIMPALLDQPGVGPMSAAQLLVSWSHPGRFRSEAAFAALAGVSPLEASSGKITRHRLNPFGDRQLNRALHVIINWRMLHHGPTQAYLARRAGHKTEREIRRCLKRYAARQLFRLMETASAT

SEQ ID NO: 485681 - protein, 375 aa, unidentified
MKNNNLLVSGIGESQASIEQKNSRLLKLGLDMHYRQVTVAIQEEDGRIKAVGKMGHEAFVSWLEKKRKEGWEIYSCYEAGASGYWLHRLLVEMGVKNLVVVPKAMDQAGQKQKTDRRDAGELCDALDRYLRGNGKALSAVAVPTVEQEEQRALIRYHRQIMADRSRYEARGKGLLCAQGIEVQGKWWQAKGWKELPHDPRLKDWMKEQLEGWRGKLLGAEQQQQKLRCRIEALAPAMLPKGVGAYSAVVLEYEMKGLGRFKNARAVSSYTGLCPGIHSSDGRGKEGSINRCGNAVVRWNLVEMVWRLLKWQPDYEPVRQLAAGLVRSKRAKKRLVVKAARQLAIDLWRLRTGQTTPQKLSLVMQCNPMKSERASR

SEQ ID NO: 485682 - protein, 416 aa, unidentified
MQVLYPRCCGLDVHKRSITGCCLWFNNTRQLQEETRQFGTHTTELRRLATWLREHEVKKVVMEATGSYWRPVWNLLEMEGFEQTLANPQHMKAVPGRKTDKKDARWSADLFQHGLIAPSFVPTQQMRHLRDLTRIRTKVMQDHTRVVNRIEAVLEDTNIKLSSVVSDIMGVSAQAMLQGLLNGERNTAKLAELAQGRMRPKVPQLKEALEGNLQPHHEFVLKRLFMQSRFLQQQQRAVDREIEHRLDDEMRQAIALWDTIPGVDENIATTMAAEMGIRTEQFADGPHLASWTAMCPGNHESAGKRKSGKTRKGNRWLRGALTQAAWAASHTKGTYLSGLFRRISARRGAKRAIVAVGHSILISAFYMWKNKQPYKELGDAYLDKIKPEKTANRLLKRLAKLGYVVAVTQVPTPQAQ

SEQ ID NO: 485683 - protein, 411 aa, unidentified
MNFIGIDWKDKGYTVRIIDEEGNELSGSFEIERKKTGFSGLIEKIRQYCDNDNEVLIGIEKERDPVVEYLLAFGYKVYLVCPNMIKSLRKRHSISGQYTDQLDSYVIADAVRTDRKRLTMIEPRSDKIRKIEFLMRHRNKAVDDKRRLTNRLTSYIKEYFPAFLDFFNDITCSTALSFLKAYPTYRNAKKLSKEEIRAFLREHNYYKESGVLRICKAIEEGQVKIDPIVIDERSRSALLLIRRIEMLNEEIDEYERELKEITEDDKDAKIFRSIPGAGDTLTPALMVVFGEKRSRYEDAEEINSLSGMVPLTKQSGNWETHLFRFGCNHFYRDILTSLAYSSLTKSEWARAYYDRKRVEGKSNYHALRCLGRLWTKVAFALWKKREKYVEDKHMAAIQRHRIRNKLARKSA

SEQ ID NO: 485684 - protein, 410 aa, unidentified
MSRIIAGIDVHKKLLVVVIADLAALDVTLHSRRFGTGSGELKHLSAWLMQHGVTEAVMESTAQYWKPVWMELEPHMQLHLAQAQSNKAPKGRKSDLADTKRLVRRFAAGELMLSFIPEPEQRTWRMITRGRLQLIRERVQLQNQIESLLEEGRIKLSSVITDLLGASGRRILRAMAKGETNAETLAALGDPKLKCGKPILVDALTGSMGAIHCRLLTQQLERIDLIDRQIEELNNQVATQLRTYQSAIARLIEVPGIGPEAAQEILAEIGPEAAAFPSAEQLASWIGVCPGSSESAGQNHSGRSAKGNRFMRRLLCQAAQAAVRTNGSQLQAIFKRLVVRLGYVKAVWAIAHRLCKIVWKILHKGAKFIEFSEARNPNAIQRAINRHLKALRRLGFPIPISTPTPEPQRG

SEQ ID NO: 485685 - protein, 339 aa, unidentified
MKDIKILGVDIAKDVFQLCGIDEWGEVIYTRRVKRAQYVSTVASLKVGCVVMEACGGANHWYRTFMGMGIPTQLISPQHVKPYVKSNKNDRNDAQAIAEAASRASMRFVRGKTVEQQDVQALLKIRDRLVKSRTALINEIRGLLQEYGLTMARGAKRFYEELPLILASEAVGLTPRMKRVLNCLYTELLNRDEAIGDYEEELKAVAKANEDCQRVQSIPGVGYLTALSVYASVGDIHQFHRSRQLSAFIGLVPRQHSSGNKEVLLGISKRGNVMLRTLLIHGARALLRHVKNKTDKKSLWLKALIERRGMNRACVALANKNAPIIWALLTRQETYRCGA

SEQ ID NO: 485686 - protein, 420 aa, unidentified
MIGNRTSVGLDVHARSVVACGLDGQTGELFEHRLTPDHGDVAAWVRSLPGPVGVTYEAGPTGFGLARFLAAEGIGCLVAAPSKLQRPSGDRVKTDVRDARHLARLLHLGEIVAVTVPSVEQEAARDLVRAREDVRGDLMSARHRLSKLLLRQGIVYYQGQPWTGVHDRWLRSQSFTLPGLQLAFDIAYDTMLTTVARRDRLDGAITTMAGDSEFTPVVTRLGCLRGVSTLTSFGLAVEIGDWTRLTGRSIAAYLGLVPTESSSGGSRSPGLDHQDRQRPRAPAADRGSVASPPALPPPRGGPAPPPAAGHPRGAGPRRAGQPAPGRPVGGLRCPAQAGGGGQHRHRPRARRLVLVTGRPGRLTPVVELLVGSRCPALSPLIVLPRSSASTSFVLASLRALHVDSSHTVQLPAGDRGHGGV

SEQ ID NO: 485687 - protein, 339 aa, unidentified
MLKRKFTLGCDVGSSTIVCSVLETLEKMILEPKEFANNFAGFERCISWLKSSDLKAKDVLVCMEHTGVYSESFCYYLYDQKIKVVIESGAKIKKSFKLATHKTDEIDSIAIAEYAIRYADRLIAWEPRQSAVESVKSLLSSRELFVKHRTAQKNALSAYKRKVVQNELIREEYEKSIQGLNQTIKNLENEIESILKQNEHWIAVIKIIKTVKGVDKLLPYNMFVISNAFSMKLDYKKLAAYLRICPYQHSSGTSIKKKAKSPKYGPKIMRKLLFLAAKDACQYDEYFRAYYARKDNEGKCYFVIMNNVGNKLLKIICAIINSGKPYIPNYRSVNPILVK

SEQ ID NO: 485688 - protein, 391 aa, unidentified
MPKPQQRQPDDLSRSLVCVNMDTTLIVVIEMSQSSWLVAGIVPGIERQPLKKMKPDETGLLALLYRWRDEASTAGHTVSRIAVAFEAGRDGFWLARWLRAHAIDAYVIHASSVAVSREHRRAKTDRLDTELLKRAFLGWLRGERGHCKMVAIPTSVAEDAKRPNRERENLVSEQNRIVNRMKAALTRLGIRGFNPKLKKAPERLEGLRTPEGEAIPPNTMAELRRDMARRQFVRKQILEIETARQQHHAKGSGDGPHAMVRLLARVIGVGIETADMLVQEVLSRNLRDRRALGRYAGLTGAPDESGAKRREKGLARSGNARVRRGMIQLAWRFLMFQKDSALAQWYRARTENAASSRKTMVVALARKLLIALWRLVRDGVVPDGVVLRPAQ

SEQ ID NO: 485689 - protein, 344 aa, unidentified
MDHFAGLDVSVNETSVCIVDDTGRIVREAKVASEPEALLAVLANPAYRFKRIGLEAGPLSQWLFSALAEAGLPVICVETRHMRAVLKAQINKTDRNDARGMAQMMRAGLYRPVHVKTLRSQKLRMLLTHRKLLQSKAIAVENDLRGTLRNFGLKVGIVGKLKFEARIRELVESHPDLAVLVEPLLVVRRVLREQLGILHRRLLTIVRDDEVCRRLMTTPGVGPVVALTFRATVDVPARFRNSRAVGAVLGLTPSRYQSGESDRTGAISKCGDEMMRVMLYEAAQSMLVRSTKWSWLKAWAMQIARRRGMKKAIVALARRLAVIMHRIWVDGAEFRWSRQETAAA

SEQ ID NO: 485690 - protein, 385 aa, unidentified
MRQLNDLSRSLVTLEQDATLIAVIEMSLSSWLVAGIVPGVERQPLKKLAVDESALLKLLHRWREEAEKAGHVIKRIAVAFEAGRDGFWLARWLGARDIEVHVIHASSVAVSREHRRAKTDRLDTELLKRAFLGWLRGERDHCKMVVIPTINDEDAKRPNREREGLVGEQNRIINRMKATLIRLGIRGFNPKLKKAAERLEGLRTPESEPIPPNTLAELYRDMERRRLLRDQIRQIEDARLARFEQAPNDGPHAMMRLLARVMGIGIETADMLVQEVLSRNLRDRRAVARYAGLTGSPDESGRKRREKGLARSGNPRVRRGMIQLAWRFLVYQKDSALAQWFRTRTENARGTRKTMIVALARKLLIALWRLVREGVVPDGIVLRPA

SEQ ID NO: 485691 - protein, 315 aa, unidentified
MASAAEIFVGIDVAKTWLDVAVHERETFFRVRNEEHDIAKLVMWLKATEPALVVLEATGGFEKMVALELANAGIPVVVTNPRRVRAFARSTGRLAKTDKLDARLLAHFGFAVRPEPRALPGENEERLTGLLTRRRQIVDMLTVEKNRLQTVRVEMRADIEEHILWLQAKLVKLDEAISQFVESEPAWKEKDTILQSVPGVGPVTASTLLAMLPELGKLNRQQIAALVGVAPVNKDSGRKQGKRRVYGGRAAVRSVLYMAALSARKFNPVIREFYERLIKQGKEKKVALTACMRKLLVILNAMLRKNQPWQMQTVK

SEQ ID NO: 485692 - protein, 390 aa, unidentified
MIYVGIDVAKDKHDCCILGPDTEELFQVFTIRNNSDGYGELFHKIESVSKDKSQIKIGLEATGHYSYNILGSLLDHGYHTFVINPLHTNLYRKGQSLRKTKTDKVDARSIAEMLVTDKTLKPYTGTSYHSEELKSLTRYRFELVKERAKMKTSVSRLVNILFPELESLVPTLHMNSVYRLLQELPGAYFIASSNLTHLKALLADASKGRYGREKAIEIRETAKSSIGSPMPAKSMELRQTIHRIDTLTSDIKEVEQSIQKIMDECGSPITTIPGIKYRMGAMILAEIGDFTRFSNADQVLAYAGLSPSTYQSGKLISSYARMEKRGSKYLRYALFNAAIYVSGWDERFRLYLSKKRAEGKHYYVAISHVIKKLVRTIFRMEITHTSYQPL

SEQ ID NO: 485693 - protein, 314 aa, unidentified
MQDYALLIGVDVAKAEVVICGTPGRLRLTIENRKTAVARWLKTLPPGTAIAMESTGAYHLLLATLARAAGMRVYILNPKLVWFAARGQGRRAKTDRIDAEVVRDYLRDNIERLHLWSPGTPLQSEIERLLRRRHTLDKHQTATAMSLSGIGGLAAEVKKLVDAFQAMLDAIDIRVQLLLEQDEQMRQKQLLLETVVSVGPVASASMTCVFARIPFSRSDSVIAFAGLDPRAKDSGKKRGERHITKNGPAHLRRTIWLCGFSACHSKLFKPHYQALRARGASTTEAIMILGRKILRIAWAIWVSNQPFDPARYQS

SEQ ID NO: 485694 - protein, 399 aa, unidentified
MGERSARAWAGVDAGKGHHWAAVVDEAGTTLWSKKIVNDETAILTALGEILELAEQVHWAVDISGTASALLLALLAAHGQQAVYVPGRTVNRMAGAYRGEAKTDARDAYVIAETSRQRWDFAAIEVPAQLAADLALLTAHRSDLVADRVRMINRLRDVLTGIFPALERAFDYSAHKGALVLLTGYQTPAALRRRGRARLTAWLANRSVRGADAVAATALEAAEAQRTVLPGEDVAAAIVADLAAQILALDDRLKRIDKQIRDTFRAHPQAEIIESLPGIGPILGAELVVAAGDLAAYADAGHLASAAGLVPVPRDSGRRTGNMHRPKRYSRRLRRVFYMSAQTSIMRDGPNRDFYLKKRAEGCKHVQAIIALARRRVSVLWALLRDNRIFTPVLDAQAA

SEQ ID NO: 485695 - protein, 352 aa, unidentified
MRPFTTTTCDISIGLDLGDRRSYLVALRRNGELVDERRIPTTPTGIRKYFEGREPVRVVVEAGGQSAWVSSLLTDLGHDVVVANPIAAGKLLKANGRKNDRVDALSLAEYGFWNTRKLRPIRHRSRESQVDLMVLRARDSLVAQRTKAINSVRSFAKMFGVRFKSCDADNFHQHVPSELPADVRMGLQITIDQIESLTKSIKAYDQRVRELIKKHPKTNQLRQVHGVGPITALAFILILDDPKRFSRSRKVGSFLGLAPSEHSSGDSNPQLRISKAGNPFLRRLLVTAAQHILHRGPDCELRRYGERLAVLGGKRGKKRAVVAIARKLSVLLHRLWDSGVPYDPEYAQARTA

SEQ ID NO: 485696 - protein, 400 aa, unidentified
MMTPDDIDVWVGLDVGKSAHHAHALDHDGNTLYDKPLKQDEKAIRTMLGKLSKHGRVLLVVDQPNTIGSLPLTVARNMGIAVAYLPGTAMRRTAQLLPGDAKTDRRDAHVIAWAALKLPETLRDAGPDDETLAALKLLAGHDEDLAHESTRHVNRLRSLLLQTHPAFERALKGERITRDATLALLERYGGPMGVKRAGIEDVKDWAKSNGLRAGRIIDDMFKAIGEQTVTVPGTLMAETIIPSIAHDIKTIRDRRREVGRQVEKLLEGHPLLTVLTSMPGIGVRTASNILLGIGGDIANFKSSAHLAAYAGISPVTGQSGTSIKGERPSRRGNKRLKNALWQTAFVASTKHPPSVAYYKRKREQGKHHNAAIICLARRRCDVIYSMLKNGTLYQEPALVA

SEQ ID NO: 485697 - protein, 366 aa, unidentified
MKRLVLKEGGKQAQRAQPRAPAVGEVVILGVDLSRSKWVYACRWGGHEQRRFGSPGELTHLQAVVREYQQRGCDVHVVYEACGFGYQIAWWVEAHKARVIVVAPSCVEKAPGAQVKTDGLDAGSLALKYERGMLKGIYIPTREQHEYRQLSRTYGQALKDRSRQQVRLRLLLQEHGYTPPAAGSSWGALERWVSAQQFAPPLGLCVTELMGLRTSAGSSARRLANELRAVGRLPQYVELGKALAAQSGVGRFTAIRFVLEVGDIHRFATADSLPNYLGLAPKEYSSGDMVHRGRIRKCGPGSLRAWLVQCAWAAVRADKDGPLVECFKRLEPRVGRKRAIVAVARKLALRLRARWLAFEEEVQQAA

SEQ ID NO: 485698 - protein, 335 aa, unidentified
MQIYGIDLAKEKFDVSFFDLTSKKVSNHPSHKVVKNNFKSIGRFLETLPSDAILVAEHTGVYGDTLLKCCMDSNVKIAFVGGYVIHRYRATPDRAKTDVLDCALLRDFGERYPDKLKYKTFPEEALYELRQLARHREMLVEQRKQLITADKSEDCRPVRSLAVKRSMDRIKEMLDTEIAETEKEMLKVINGHDSIHHNYELVKSVDGVGLITAVELLVKTENFTKITTARQYSAYAGTAPYEKSSGKMDKGAHISKIGNRRSKTLLYICAESARLHNKEIKLYYERRTLIDKKPRHYVLNAIANKLLRIIFTLVEKGEYYDANFIRQDPRVVKYN

SEQ ID NO: 485699 - protein, 345 aa, unidentified
MRFAGVDTHKRYSTIVLTDETGKRLARASLQNNLAAFQNFFGRNSEPTRAVLEAGRTWGIIYDLLESIGVQAVLANPLKTRAIAEAKIKTDTIDATTLADLLRADLIPEVHVPSVDVRAQKNLLRQRMWLVGLRTMAKNRIHHILDRNHAAMPTCSDIFGKAGRQALAEINLSPPDDLLLNAHLELLDQVQHHITDSERWINKALCDNGDAATLRSIPGLGKIFAAVVALEIDDIHRFRNPGKLCAYAGLVPSTYASGGKVHHGRLLPSCNRWLRWAYCEAAWIAQRTSPYCHAYFERMKWRKGANSANVALARRLCEITWYCLTQKRPYEERMTLTERTCPAAF

SEQ ID NO: 485700 - protein, 344 aa, unidentified
MDATTVGVDLAKNVFEIALSNERGHIVERQRMNRARFDRFFSNRPACRIVMEACGSAHHHARRLSSQGHEVVLLPAQYARAYVRRNKTDAADAAALIEAARCPDIRPVPIKSVDQQALQQLHRLRSQWMGARTARINFLRGCLREFGVSIPMGAQRAIQAVRDALSSQDGPVPILLHSSLIEILSEIELLEQRCKQIDRELGHLNEHDPVVERLLQIPGVGPLTATAMRASVVSIQRFPSGRHFASWLGLTSREHSSGERRRLGRISKQGDPYLRTLLIHGARAVLLAARSAQRRGVPLDRLRTWALDLQERRGHNKAAVALANKLARIVWATWRYERNFTSRS

SEQ ID NO: 485701 - protein, 322 aa, unidentified
MFTERTSVGLDVHARSVVAHALDVQTGEIFKARLCPDPAEVTGWIKALPGPAAVIYEAGPTGYGLARTLLASDIRTVVAAPSKLQRLSGSRVKTDAIDAEHLSMLMRLDAFMAVTVPDELTEAARDLIRAREDCRGDLMRARHRLPKLLLRHGIVYSGGQAWSNAHDAWLRRQRFDSLLLQAAFDEAYDNVITITARRDRLDDRIQTMAADGPYTDAVRRLGCLRGISTLTGVGLAVEIGDWTRFTSNSIGSFVGLVPSENSSGQSRSLGPITKTGNGHALRLLVEAAWHHQHRYVAGKTIRGRWDLVSPAARARETWATAG

SEQ ID NO: 485702 - protein, 402 aa, unidentified
MTYDYVIGMDACKYFHHAYVLDIDGTQVLSKRINQNEQSLRALFSAFSAHDHKVLVVVDQPNNIGRLTVAVAQDIGIDVRYLPGLAMRQLSRIHAGNAKTDIRDAYIIAHAAKNLPESLRSVDRVEEAFLQLKVLNGIDEDLARSYTRLINQIRSALVGCYPQFEQALRGQIIPRKWVLHLLARYGGPTKIKRLGKAKAAAFARRYKARNPEPVLDAIFAAISEQTVTIASAHYAEMGVAMSAKDALLKLEHRQQIEKEVIELINDIPHTQFLLSMPGIGPKTAAQILMTAGDMSDFPSAGHLASYAGLSPRTNQSGTSIMSNSLNRAGNKKLKNALWQSSFASIRFHERSRQFYERKRREGKRHNAAVVALARRRLNVLYAMMRNHEHYHDPAPSQEDLAA

SEQ ID NO: 485703 - protein, 347 aa, unidentified
MNYCGIDLAGVSSYAFVTDEKGNKLWSGPIATEKVAFERLVKKFAGGGLSIAIEAGNQTAWVHEELVKLGAEVTVVHPTKVKLIAESRRKTDKIDAKILCELLRLNALPHPVHMPGPEARELRGLLVARRQLVSARSKLSNVVRGMLRQTGVRLPAGGLSTLVGWKRLLAAGFEQEHLLLIVSAYYDSFRALTKSIRELDQQLAQHEKNEPRAQRLKTIPKVGRIASLTFLAAVDDVKRFSSSRKLVGYSGLAPTVRQSGERTEYGAISREGRSELRAVWVQIAHLVARDKTKATQPLRTWFNQVARKRGKKTALVALARRLLVIAYQLLRTEQDFDVGRLKKKRAA

SEQ ID NO: 485704 - protein, 423 aa, unidentified
MNEQTLCVGADVHLDEIVLRAVDKTDGHEVLERFHVTNNLPGAQRAASTLAQAATQHGYTRLEIGWEATGLLWVPFHRFLSTCPLLQPLTPALVCFNPKLVANFKDGLVLRRPKNDDRDAWDVAARVRFGEWPVSYVPADFWQGLRRLTRYRYELARNLSREEMRFQSYAFLKASDWKRVKPFSDLFGATSIALLTEFTIAELTTMSHDQLVDLITHRGHGRFDDPTATARAVQEALHSSYPIDPQMDQMVTATLAAGWDHIRYLKRLMKRQDQHIARYITPVPNPLITVKGLGAVITAGILAEVVDITRFPEHKHVAQYIGLTWEKRSTGNFVSQNTRLTKVGNVHLRYYFILGAEQLRRHNLEYQAYYWRKYQEVAKYQHKRALVLTARKFVRLVHALLTKNQPYVMRQVAPESEVSIESV

SEQ ID NO: 485705 - protein, 489 aa, unidentified
MKIQPATKAQKDKKASKKASGKATPGKWDEMNRQQRREMMRKMQSEDLSLEVVHPHAAGIDIGKESHYVAVPPSRDPQPVRCFGCTTAELKRMAEWLKQCAIRTVAMQSTGVYWIAVYDILEEAGLEVYLVNAGETKNLPGRKTDVQESQWLMKLHTYGLLRNSFRPSQEIRTLRTYWRLRQDLVRSTGRHIQRMQKAMTQMNIQLANVISDISGVTGQAMVKAILDGERDPRELAAYRDCRVESSEEEIAQALEGNWQQDQLFVLRQEQAGYEFCQKQITECDQQLAQYLAQLEDRTQGATLPAETRKGRRKKKKGNPQFNLREELFRMTGTDVTQIDGIDVMTVMTIVSEVGWDMGKWKTENHFVSWLKLSPDNKISGGKIIGKGRMLTNNRATTVLRMAATTLRESDSYLGAQFRRFRTRLGPAVATKAMAAKLARLVYRMLRYGMKYVNQGAEFYEAQHRKQQVIHLKRKAAQLGLQIIEVAAAA

SEQ ID NO: 485706 - protein, 345 aa, unidentified
MNYYAGIDVSLKESCVCVLDAGGKVIRETKVASEPEAIIAWFAQLGLAMELIGLEAGPLSQWLFAAMKQAGLAVELLETRHVRNALKTMTVKTDRKDARGIAELVRIGWFRPVHCKSISAQETRAILTARKLVDTKLHDVEMSLRGILRGFGLKVDKTTATSFAARIRELVDGHPTLQGLVDALLSIREVLLREFKGFEKRVRTMARHNEQAKLLMSTTGVGAIISLTYAAAIDDPARFESSKVVGAHYGMTPKKYQSGQTDYNGRISKIGDASVRRALWQAAHVILTRSVKDLALKTWGLSVAKRKGMAKAKVALARKLAVVMHRMLVDGKSFDPALPKQAAAA

SEQ ID NO: 485707 - protein, 370 aa, unidentified
MHDNHPATLFVALDLSRSSWVAAVHAPHAAGKVSRHKLAPGAEGLLALIERIRAQAERALGAPVRVASCHEAGRDGFWLHRVLQKAGIDNRVIDPASLLVDRRARRAKTDRLDAEALLRALMALCRGEPRVCAVVRAPSVEEEDARRTTRERANLLKERVRHVNRIKGLLATQGIDDYQPLRPDRLERLGTLVTGDGRPLPERLAAEVRRHLRRLELVLEMLEEVEAERDRATAAAPGKAALLLRLKGIGPEGAAVLCAELFYRPFANRRGVAAYAGLAPSPFASGDSCREQGIGKSGNARVRRMMVELAWLWVRLQPESALGRWFTARVGSAKGRVRRIAIVALASKLLVALWRYVETGLIPTGAVLKA

SEQ ID NO: 485708 - protein, 337 aa, unidentified
MSQDQTSICVVDESGHVLWQGKCATTPEAIAATLRTRAPQGDRIGLESGPLSIWLCHELTALGLPVVCLDARHAQAALSLQLNKSDANDARGLAQIVRTGWYREVVVKGLDGQRMRALITARAQLVALRVDLGNQIRGLLKPFGLLAGKGVGKTFAEKVRSLVPDGPLHEVAEALLRAWEAVNKEVATLSRRLVAEARQDETVRRLMTAPGVGVLVALTSVSTIGDPARFTHSSSVGASVGLTPRRFQSGETDDTGKISRCGDRLLRTYLYEAAGIILNRVSRWSALKAWGMRLAKRIGHKKATVAVARKLAGILHRMWRDSTEFRWSSKEAAVATS

SEQ ID NO: 485709 - protein, 331 aa, unidentified
MKYFGIDVSKKKVDCAWVRDLASGKIKTRVFDNTPRGFQNLLAWASGQSQVPIEDLHFSLEATGVYHEALSQALYEAGAQVAVLNPLQVKRYAESLGRRSKTDKKDSVVLARYGATQQPRRWQPEPAEIRVLKALLSRLEAVEKDLQREHNRLEKTEISQAGPEVVLSIQTMLGHLETEKKRLLQHIDEHIDQHPGLKSDRQLLESIPGVGPVISRYLMALLRSRDFESAPQAAAYVGLVPLHHQSGSSVRGRSSISKTGNATLRAKLYMAAVVATQHNATIQVHYRRLVKNGKAKMTALIAAMRKLVHICFGVLKHQTPFQAQAPMRGGA

SEQ ID NO: 485710 - protein, 349 aa, unidentified
MQKKSQIRSIGIDLGKTTFHLVALGIRSQILVRKRFSRAQLLAYTANLPSTLMGMEAGVGSHFLGRALREQGHQVRLIPAQFVRPFVKSNKNDYRDAEAIAEAVERENMRFVPIKTEDQLDLQALHRVRDRLVARRTSVINQMRAFLLERGISFRKGPASLRRQMPEILENADEKLSARMRCLLDFLWQEWKGLQEQIESLNTDLEQIASSDASCVRLQQIPGVGPLVSTAVVSAIGNGAALKKGREFAAWLGLVPRQWSTGGKPKLLGISKRGNPYLRKMFIHGARAAVLRVKREGSSLGKWMSGLETRAARNVVIVATANKLARISWAVLASGNDYHPSYKAVVVSN

SEQ ID NO: 485711 - protein, 500 aa, unidentified
MKTKRSKAKIRAGRRGLSVTASEPEQKLEILKPDAAGIDCGAQEHYIAVPPDRVRAGQPTVRCFSAFTEGLHAAVDWLKQCRVSTVAMESTGVYWIPLHQKLEEARIEVYLVNARHVRHVPGRKTDVQDSQWLRQLHRFGLLNASFRPDDIICRLRSLHRHRDNLVSSSASEIQHMQKALQEMNLHLHHAVSDITGLSGLRIIEAILGGERDPEKLVKLRDRRVSKSTPEQMKAALEGDCRPEHLFVLSQSLQAYRFYQARIEESDREIEPLLEKLAQQVEAASGNVNLDALVPSVLKGGSTTPEQLRQAKPASGPKSKRKRQPRANEPKIELAYLLERICGIDLTQVVGLNVLNVLLIISEIGVDMSKWRSAKAFCSWLGLCPGNKISGGKVLDSRTRQVVNRVADALRLAAQLAGRTQTCLGIFYRRKQAHLGAPKATTATARKLACLIYQLLRNKRPYQEPDPVIYQLRLQKSAFTRLQKQAASLGYTLLPTALVPA

SEQ ID NO: 485712 - protein, 351 aa, unidentified
MLADQVDYVIGVDTHCDAHELAVVAASSGGVVARSSQRANPRGYGEAIRFAAAHAPGVRVWAIEGSGHYGAGLARYLAVRGEAIVEVGRAPRSGQRLEGKDDRLDAVRAARAALGSDKLAAPRTGERREALRMLLSTRRSAVEVRRQSLTQLRSMIVTAPEELREQLRALPAQQLLTRCGRLRGPRSGSPDKLAAVLVLRTLAHRIQAATDEATTLKREILGHVRALAPQLLDEPGVGAIVAAQLIVSWSHQGRVRSESAFARLAGAAPIPASSGHTTRHRLSRGGDRQLNRALHTVILYRRRHDPTTKSYIARRVAEGKSTREAVRLLKRYLARHLYRVLNQTAKPATTT

SEQ ID NO: 485713 - protein, 355 aa, unidentified
MKRTTKYVGLDVHQSATVASIRQEDGRVIARGILPTEEHAFLEFFRGMRGSVHVTFEEGTQAQWLHDLLVPRVDHLIVCGRRKEDRLSNKGDQVDADELSELLRRGGLRPVYHGSPHYATLRELTRTYQNVVDDATRVMQRLKALFRARAIKAPGKRVYSPAYRQEWLAKLPNPGVRFRAETLYAEFDVLRQIRPKVKDAMIAEARRDPAWSLLHTIPFFGPVRVSLLLATLRTPWRFRTKRNLWSYCGLAVVTHSSSDYTFVDGRPARRRRGPMTRGLNRHHNRTLKSVFKGTATAATGRPGPLQDFYLELLGRGMREELARVTLARKLAALTLHIWKTGEPFDPTKLTLQAHE

SEQ ID NO: 485714 - protein, 344 aa, unidentified
MTIIRVGLDTSKSVFQVHGADEQERPVLRRQLRRGQIEKFFAKLPPTRVGLEACGASHHWGRVLRDLGHEVMLIPPQYIKPYVKRGKNDVIDAEAICEAMSRPGMRFVPIKSREEQAALMLLKVRDLLTKQSTMLSNAIRGHAAEFGVIGAKGPQKIKELLERIAGEANMPEPARELLNDLASQLAAVEVRLAALEAKLMAHHKADPRSQLLATIPGVGPVTAVNITLKVPDATVFRSGRHFAAWLGITPREHSTAGRQRLGKISRQGDEGLRRLLVLGATAVIQQVERRRKAKKTSGNDSPWLLQLLARKPRKLAAIALANKMARTIRAMLVSGELYRRPQAA

SEQ ID NO: 485715 - protein, 334 aa, unidentified
MENIALIGIDLGKNSFHIHCQDHRGKAVYRKKFTRPKLIEFLATCPATTIAMEACGGSHFMARKLAELGHFPKLISPQFVRPFVKSNKNDFVDAEAICEAASRPSMRFVQPRTESQQAMRALHRVRESLVQDKVKTTNQMHAFLLEFGISVPRGAAVISRLSTLLEDSSLPLYLSQLLLKLQQHYHYLVEQIKDLESQLKRKLDENEVGQRLLSIPCVGTLTASTISTEIGDGKQYASSRDFAAATGLVPRQYSTGGRTTLLGISKRGNKKIRTLLVQCARVFIQKLEHQSGKLADWVRELLCRKSNFVVTCALANKLARIAWALTARQQTYEA

SEQ ID NO: 485716 - protein, 399 aa, unidentified
MLAVGIDISKSKSVAAILNQDGSMHTSPFEFHHTQPELDAFIKYILNSNQSATILMENTGHYHYPVLKAFREAGLPVCMVNAYQIKKFGDMDLRKAKTDKKDAVRIARYALEKSYSLVPYTSMEQKYEDLKFLARQYNQRMLTLKTNKVFLLNLLDETMPGITNILPLTTRTPETSLSVLFINRFKSYDRIKKMRKSRFLDAFEKIARKSRNRQTKTYGLAIYEAALRNITTRGENEYTLAAQDQCLELVCESQKAADSIIPKMQTLAETLPEYAVLRSMAGVGNRLGPLILAEIGDIRRFRSGKALNAYAGNDAPPYQSGTFESHNRHISKRGNAALRKYCFEVMQALKLTRPQNDPVYLFLLKKEQEGKPYNVAKMAGVNKFLRIYYARAMETLKQQ

SEQ ID NO: 485717 - protein, 364 aa, unidentified
MKNVITYVGIDAHKKDLFIAMLIGTQETSVTWTVPNETQAVRRLVRKLERAAPGPVKCYYEAGPCGYTLQREMTTERVSCHVVAPALIPRKPGERIKTNRRDARKLGELARAGLLTEVRPPTPEEEAVRDLCRARDDAREDLQRCRHRLGKLLLRRGLHFPGRNWTRAHRQWIERIEWGHAPTGVVANDYLLAIDQLEARLTELDAALTAIAETAPYAEPVGWLRCFRGIDTLTAILLLAELHDFRRFHDPRALMAYVGLVPGEHSSGEKHRRGRITRTGNALVRRLLVETAWHYQHRAGIGPALTRRRKGQPSRVIAIADKAQQRLCRRFRRLADHHKPAPKVAVAIARELAGFLWAALQPAK

SEQ ID NO: 485718 - protein, 313 aa, unidentified
MNYAGIDVSHKELVIVVSVQGKAHKAKTFENTASGHKAIIQLLSKLKGESRACIEATGVYHFDLAVALSRAEGIDVMVINPKASHNFAKVLMKRSKTDAVDAEILAVYCERMPFEAWQRPTDERIALRALARRIAALTKLKTQTKNQLHALKATEETPVLVLEYTEELINVVDKQIQAHRDSARQLIQQHDELAEAFALITGIKGIAVASAVQMLGELMILPKDMSAKQWVAYAGLDPRQFESGSSVTKKPRISKAGNKFVRRALYMPALVATCHKPHINDSRQRFKEDTGCMRGHAQTFTRHPWHAESQKRI

SEQ ID NO: 485719 - protein, 366 aa, unidentified
MDQYYVGLDVHSRQSTFVIQDAEGQVVAQGTVPTTRAAFARLRATHHLPLGTPVALETGTVAFFAAQQLAAVGLAPVVVDAHEVRLKAHRPFQKSDRRDAVELCEGLRRGSYRTLVHVPPAPVQRLRATLARRRHCVRLQSAQVTTTKALLRGAGLGHLSRSLGSEVGWTKVLAALAEHPEMAAAIAPHRALWRCAREQVLALEAALAPQQVPFAEPLRRLQTIPGVGPIVATTAVAVFSDIGRFPDAKRAASYAGLVPATYQSGARDAHGRITKRGAAELRAMLVEAAHHASRPTHPLHPYFAPLCARRGYKLAVVAVAHRLCRIMYAMLRDGRDFDVAKLAVERGPFVRRVVRLYRRTPARATT

SEQ ID NO: 485720 - protein, 345 aa, unidentified
MIVIGIDPHKASITAAALGPTSQTLDHKRLAMSTKTAAHLLVWATAWPERLWAVEGAAGLGHGVAQQLIAAGEKVVDVPGKLAARARLLGSGSASKTDLADAVSVASVAIHNAKLTVVCAEDHTMVLRLLSDRRDDVVTQRTRTMNRLQVLLRDLVPGGAPRELSTTTASTFLAKVRPLTATDEQRKLIARDLLEDLRRADRQLKALAKVINAKIALSGTTLPEIQGVGAILAAKILGHAGDVTRFESRSHFASYTGTAPIEASSGDIRRHRLNRAGNRQLNTALHTAAIVQTRDGGLGRQHYDRKLAQLKTPKEARRSLKRQLANVVYRHLLDDHQRLHHHTTP

SEQ ID NO: 485721 - protein, 403 aa, unidentified
MYNAVGIDVSKGKSTVAVLQPGGTIIKKPFNVDHTSSGLKELSNYILSLEGDTKAVLECTGRYHEPILRTLSEAGIFISAVNPHLIKNFGNNTIRKVKSDPADAKKIARYTLDNWADLQEYSSMDTTRTQLKTLNAQMDFFTKQKVAAKTNLISLLDMTYPGVNDLFSSPAREDGSEKWVDYVASFWHVDCVRKIGLKAFAERYKAFCKREGYNFREAKAKELFEASKELVAVFPKESSYKLLVEMGISQLRIATENTTRIRNQMNELASTLPEYETVMSMCGVGPTLGPQLIAEIGDVSRFTHREAITAYAGVDPGVDESGQRIYKSNHASKCGPARLRKALFLVMSVLLQTKPDDPVYHFLEKKRSEGKPYNVYMTAGANKFLRIYYGKVKAHLATLPKPE

SEQ ID NO: 485722 - protein, 327 aa, unidentified
MKKNPAPVYVGMDVAKATLQVHLNGHQFEFKNDSKGHAKLSQKLTKLTRPHVVCEATGGYERPVVAACHKAKILVSVLNPAHTLAASQAQGKRAKTDPCDAAALTDYGQRFQPEPTAAVAPAVRQITELTLWLKQLIDNCAVVKTQAEHHANSFVGQRHQELLAHYQSQIQTVEKEIKKMVQAQAPFQQRVDCLTQIEGIGFRTALLTLVFLPELGSMNRGGTAALAGLAPWTRDSGTMKGKRCIGGGRAQVRPVLYMAALSASRCNPVLAPFYQGLKKREKPSKVALTAVMRKLLIHMNSQLKKLAAKPVNENSGKSNKTKKSLAK

SEQ ID NO: 485723 - protein, 435 aa, unidentified
MQLEFAAHIGIDWAEHKHYWQLATAGLALREHGQLDHTPHAIDLWASELRVRFPDRSIAVCLEQSRGPLVYQLTKYEHLVLYPVHPATIAAYRQAFFPSGSKGDPGDAALLLEILLHHRDRLRRLDADTAATRLLQMLTELRRKLVNERTRESNRLTAWLKMYFPQPLDWLDNIDAPLGCAMLERWPTLQQLQRTRPETIEQFFRQHNSRSQQRIAERLEAIRLAIPAVHDSALLEAGAAATRGLVALLKTINAEIACLDQEIGELVPKHPEAYLFQGLPGAGPALLPRLIVAFGTRRDRFQSAAELAAYSGIAPVTRQSGNCQSVQFRHCCPHFLRQTFHEFAAHSIAKSTWARAFYEAQKSKGKRHPAVIRALAFKWIRILFRCWKDGKPYDEQHYLRALQQRHSPGASLQNDPSATTALSGHPSHDSNSISE

SEQ ID NO: 485724 - protein, 410 aa, unidentified
MKQKACGIDVHRDVLVATILDQTGQKQTQTFTNSQIDMEQLKNWLQTNNCPDIAMESTGSYWTTLYTILEDADLKPVLANAYQVKAIPGRKTDQKDSEWLAHLHRSDLIRPSYIPTRPIRELRELARTRVRYVENRTQYKNRCQKLLSKNNMRLSSVLSDIFGVSGKEILEGLMAGKTVEEILNATQNKHLKKRKKEIIDAAKGALSEVDLFLLKEMTQTINALTVQIHNIEHHMAKLVDRRALEIICSVPGVGKLSGATILAELGDVTRFSSGGQVASWCGLAPSVSQSAGSTKIGGITKRGSRWLRRVLVEVAHVAVRMPCRFRDMFWRIVNRGKCRNVAYVAVARKLLTVVWHLLFNDEVFVEEGFSKKSTVVLGQSAVVSVGEGLSLDDVAGILGCTMKAVFVDGG

SEQ ID NO: 485725 - protein, 358 aa, unidentified
MQKYNISFKGQKIFIGIDVHKKNWDVAIALEIGIIKRHTQKPSAKELFDFLKKHYPDGDYLAVYESGFSGFSTYYALKEVGIDCIVIHAADVPTTQYEEVMKSDRLDSIKLVKSLKAGLLKGIYIREKENIDDRAVIRIRKTIQKELSRYKIRVRHILHSNGVQLPDRFEKPGSLWSRAFIKWLKEDVTLLSSTRNSLDLLIRQVETIRKTLLEATNMMRYMSQTERYKHKFDLLTTVPGIGVTVAMCILTEVYDIRRFHNEKQFAAYLGLIPTCHSSGEKVIHGEMTFRGNKQMGPMLIEAAWTTISRDAGLGSLYLRYKERMKPQEAIVRIARKLSNVIFAILKNETEYIPYQTGK

SEQ ID NO: 485726 - protein, 348 aa, unidentified
MIESKLTVIKYFIGIDVSKATFNYCLRYAGGNVLNGRVANNVESIKEFVLKLREISGFKLGYAIFGMEVTGVYGLMLLNTLTKMKAKIVVEPSIRIKNSLGIIRGKNDKLDAARIARYLIKNLQELKLWVPRRKIIDELSSLSTLRERMVKVGVIITTPLNEDTNFIDPAISAANINLCNPSIVQIEDLITNIDIKIKALYTNDDHCNRLMKIMLSVMGIGEVTALQILIHTNEFKTITTARTFASYCGVAPFEYDSGTSVKKKARVSHLANKRIKSLLHNGVRTCIGHDPSIKAYYRRRVDVDKKNKMSVMNAIKFKLICRVFACVRVDRFYEKGYVSLKPVTNKLR

SEQ ID NO: 485727 - protein, 351 aa, unidentified
MKILALDLGNYKTVGCEYERASGRHRFRVAATTPSGLRQLVQEVKPDRVVIEICSIAGWVSDLMRGMGIEIQVANTSDDSWRWRKVKKKNDRQDALKAARLSAVNQIREVYIPRIDVRQWRALIAYRQQMVWRRTKIKNHIRDLLLREGQILPRGQKCWTQLGIATLTAMARPFTEVGPEELWRAELGLELAQLGEVQQKVEAIEEKLNAIGAADARVQLLRTIPGVGPRLSEAIVALLDDPERFGKVGQVSAYIGMVPKELDSGETERRGRITRHGNRLVRSLLVEVAWAGLRHNPWVRENYQRISGGKKSRKKIAIVAVGRKLLVRCWAMLRDQKPWRYEIKIDTRAAA

SEQ ID NO: 485728 - protein, 348 aa, unidentified
MKQVCTIGLDIAKHVFQVHGVDSNGTQLFNKKISRSNMKAFFANTPPCLVGIEACGGAHYWARELQKLGHTVKLIPPHIVKPFVMRSKTDAADAQAICEVVRRPGTKFVSIKTEEQHDLTTLHSIRGRLIAERTSLVNQTRSLLYERGIIFNQGIPSFEKGMKEVLANTGLLSEFFMHLLQEQWSEYIAINERIESLTKHLAEIAKGNEDCRRLMKIPGVGPLTATAVVGKYGKAQEFKNGRQFSAFLGLTPQEHSSGGKQRLLGISKKGDSYVRKLLIQGARVICMVWNAEESVPDSDRRKLWLQEVMRRRGKFCASVAQANKTARILWNVLAKGEEYDARKHAIAA

SEQ ID NO: 485729 - protein, 350 aa, unidentified
MSEHITIGMDLGDRHHIIIIFDQKGNEIACKRITNTKLALRRYFQRYTGATVALEAGTHSPWISRELQQLGLVVYVGNPRKLRLIWDSHDKSDERDARILAMVCRVEPRLLWPVQHRNAQAYNDLELIKARDMLVQTRTKLINHVRCVVKSHGERLPSCSAASFAKRAAGLLPAQLTDALSYLIDTIADMSQRIVQLERKIEQLSKKRYSETQGLRQVAGVGPITAMAYVLTIEDPSRFSKSRMVGAYLGLTPRRDQSGASDKQLRISKAGNRYLRKLLVNCAHYILGRFGPDCNLRRFGLAIAARGGKNAKKRAAVAVARKLAVLLHRLWTSQQHYEPFYTVVSNRKAA

SEQ ID NO: 485730 - protein, 367 aa, unidentified
MNKSSKAFVGMDVHKESIDWAIAERDGEVRSFGRTGGDLTAVARTVRKLVASGKTLVFVYEAGPCGFGIHRWLKVQGHECWVVSPSLTPKKPGERIKTDTRDAIKLARLARAGELTAIYVPEAADEALRDLVRAREDAVAMQRQARHRLQALLLRNDIRYVGKTAWTPAHQRWIARLKLPYAPQQIAFEEYVQAVQEATTRIDRLTAAIQAAVSTWRWQPVVAALQAMRGVQLIHAVRIVAELGDLTRFGTPRALMGFLGLVPTEHSSGGKRAQGAITKAGNRSARRALVEAAWAYQHPARITPIIARRQGGVPKIVLDIAWKAQLRLCARFRKLAVRGVNRNKLVVAVARELAGFVWAIGQQVRPV

SEQ ID NO: 485731 - protein, 337 aa, unidentified
MKFCGIDLHSNNSVVVVSDEEDRIVFNKRLPNDLAQIRAVLEPHRPDLAGVVVESTYNWYWLVDGLMDTGYQMHLAHPSAIKKYEGLKHSGDFADAAYLAHLLRLGLLAEGYIYPREERGARDLARKRMQLVRYRTAQILAIEGILMRQTGTRMKGEAVKRLTAEQVDGFAFAPDVSLAVEANRAVSQTLSQQIAALEKRLKQRVILRPEYHLLKTVPGIGDVLATTIMLEAGTINRFTQVGNFSSYCRCVDSLRESNGKRKGEGNTRNGNKYLAWAFVEAANFALRCCPQAKSFYDRKKSRSNRILALKALAHKLARACYHMLRDQKPFDVHLCFG

SEQ ID NO: 485732 - protein, 403 aa, unidentified
MFDTEDVGVFLGLDVGKTTHHGHGLTPAGKKVLDKQLPNSEPKLRAVFDKLTAKFGTVLVIVDQPASIGALPLAVARDAGCQVAYLPGLAMRRIADLYPGEAKTDARDAAVIADAARTLPHTLRSLELTDEITAELTVLVGLDQDLAAEATRTSNRIRGLLTQFHPSLERILGPRLDHQAVTWLLERYGSPAALRRAGRRRLVELIRPMAPRMAQRLIDDVFDALDEQTVVVPGTGTLDIVVPSLARSLAAVHEQRRVLEAQINTLLEAHPLSPVLTSMPGVGVRTAAVLLTTVGDGTSFPTAAHLASYAGLAPTTKSSGTSIHGEYAPRGGNRQLKRAMFLSAFACMNADAASRSYYDRQRARGKTHTQALLRLARQRISVPFAMLRDGTFYEPRLPQATAA

SEQ ID NO: 485733 - protein, 354 aa, unidentified
MSKDIILTVDYHDRACVIRRLDRGADREQVFTEIPTTAASLGQVVDQARRDLGRRGRVVWIQESTTGWARVRELLADRVEFNLANVLQMPLPPKARRRKTDKVDTARMQREYLAGTLPLAYQPPAAWRQLRRLVAYREGLVSRRTAVRNWIDRYLAHETWFDRTGLWSPRGQRRLRALLEGWPRTDRVILAEKLDELARLEGQLGVALKELVAAYRDCAEARRLDAILGIDVVSAVSIVARIGPVERFGNAEALIAFAGLAPGIQESDRTRRDGRIGGGGTDRHLRHYLIEATVWARKLPRYQTTYERMKKRRGSKVGRLVVARMLVRSIYKVLKDEVAFDPGVPPRTTPAAAR

SEQ ID NO: 485734 - protein, 452 aa, unidentified
MAKRAKKRCEQLPILHPDAAGIDVSASELFIAVSPDRDPQPVRSFPTFTRDLNALADWLQQCGIRSVAMESTSVYWIPVYQILESRGLEVCLVNAQHVKNVPGRKTDVSDCQWLQYLHSVGLLRASFRPPGIICAIRSLWRHRSSLIQMAAEHVLHMQKALDQMNLQIHRVLSDLTGMSGLRILEAILAGERDPVTLARLCHGGVKSSEDTIAKSLEGDYRPEHLFALRQSLAAFHYYQQLVVEVDQEIQGQLGGLGTAATAEPTVPKRTKASAYQRPRYEPKTFDLRSELYRVFGVDLTNVPGISSITAHTLLCEIGTDVSRFRNASAFASWLGLCPENKISGGKVLYTKSRRVRSRVATALRMAANSLHHAKNYLGEFFRHITRKLGKPQAITATAHKLARIVYHLLSTKEAYNETVFHRCDEEVLRRAQFRLRRQAAQLGFQVIPLQNG

SEQ ID NO: 485735 - protein, 350 aa, unidentified
MLIIGCDYHPGFQQIAFVDSDTGEFQEQRLPHREEAEKFYRNLAGQGMKVRVGMEASGQARWFERLLAELNFELWIGDAAKIRAKRVRKKKTDREDARHILKLMLKDDFPQIWVPSWDNRDLRQLLWHRHRMVQMRTRIMNQLQAVALNEGLRRKKRLWREHGRQQLEGIRLAPWASRRRRDLLELLDRLNPTITELTQAIEQEVEKYPAAQLLMTHPGVGALTALAFVLIIGEPERFECGKQIAAYLGLVPEEDSSGESRRLGHISKQGSGLMRFFLVEAAQVTVRSDTEWRNKFFHLAMRRGRKIAKVAMARRLAVRLYWMWRKQWDYEQLKKFGPHAGKLGTGVGVE

SEQ ID NO: 485736 - protein, 449 aa, unidentified
MPLSTLPRFLLFRLPTLAAQLEEEQTMEIMYERVAGLDIHKATIVACVRLGAGRNVTRECRTFDTTTDGLRALLAWLEECRCSHVAMEATGVYWMPVWKILGEGDFALIVANAAHIKNVPGRKTDLNDAMWIADLLACGLIKPSFVPEEDVQELRSLLRTRKQLGREQTRHVQRIQKTLAEANVKLDSVLSDIMGASGRRIIEAMIAGVRDPRRLAALANTRIKATPKQLYDALHGRLTDHHRFLLTLHLRQWDNLDATIREIDQEVEARIARMDEEVKADEAPFRDLIGLLCTIPGVSTLSATTILSEIGRDMSRFPTAGHLVAWAGLCPGQNESAGKRKPARLRKGAPWLKTMLVQCAWAAKRKKDSYYKAQFFRLQARRGPQKAICAVAASILTAIYHILKNGTEHHDLGADHFNRRSTEGQTKRLVAQLTRLGFEVQLQRTAEAA

SEQ ID NO: 485737 - protein, 416 aa, unidentified
MNAVGIDVSSRKSTVAVLRPLGEVVCLPFDVTHDIAGLASLVEKLKALDGETRVVMEHTGRYYEAVEKALHEAGLFVCAVNPLLIKEYGANSLRRVKTDKADAVKIARYALDNWADLRDFTPMDAIRYDLKTLNRQFQLASKQRTASANNLIALLEQSFPGIRKCFDSPVRSDGTQKWVDFAHSFWHVDCVRKQPFPAFCERYRKWCKRHAYLFKLSNAEEVYALAKRAVVLTPKSKVVKVLVQEAANQLSSISRSVEVYRAEMDRLAAMLPESPVVMAMYGVGKSYGPQLMAEIGDVRRFERKQALVAFAGIDPMPNQSGDKNVRSNKSSKRGSPYLRKTLFNVIRTYLQCAPQDEPVFQFLNRKRAEGKPFYVYMLAAANKFLRRYYAKLRDYFASLDTLQPVAPIPTILKAAL

SEQ ID NO: 485738 - protein, 341 aa, unidentified
MEEYIGLDVSMKETAVAIRRAGERIWRGKCASDPSIIAELIRKRAPSVKRVVFETGPLSVWFYHSLRAEGLPAICIDARHAKAALDMATNKTDANDADGLAQLAEVGFFREVRVKGFDSMLTRTLLAARTRLVRITTELSNQIRGVMKTFGLLVPAGKGSTFEKNVRSLLADQDRLASIVLPMLEAWRGIRVRAAELGRQLVRDARQSRACRILMSIPGIGAITATSFTTAIEEPDNFRKSRSVGAWIGLTTRRYQSGEVDYDGHISRRGDRPLRGLLYEAAAVILTRSSTHSTLRTWGLQLRERIGFKRAAVAVARKLAVIMHTMLKTGELFNPTAGAAA

SEQ ID NO: 485739 - protein, 316 aa, unidentified
MNTKTNQSINIGVDTGKFQLDIYIRPLDIYFTVSNDEKGIREAVNKIKKHKPERIIIEATGRLEMPFIMACAKADLPFVIANPVHVKRFAGAIGQRAKTDKLDAKLIAHYGEAIKPPLSQLKPETMQLMSDLVARRNQLLVMQTMEKNRLQILPKELAMTITPILTAFKNQINKIENKIVKLIESCPEYQAKNHLLQSMKGIGKIAAASIISNLPELGYMTNKQASALVGVAPINRESGRFKGLRKIQGGRHQVRTVLYMAMMSAIQSNPVFKGQYEKLVSAGKPKKVALIACVRKMIVILNSMLRDGVMWEAPKV

SEQ ID NO: 485740 - protein, 347 aa, unidentified
MRKIAYLSMDVHVRNCVLGDMNGNGKFLGNRAFTTSENNIIDALQAIKAKRKYLVIEAGPLANWVAQTATPYVTQVFISDPRENALIYKSSLKKDKIDTKKMCRLLRLNEFKEVYRPENDQRAIFKAAVQHYIDLRDQLTAIKQKTKAMFRQWGVIDVFTKSIYSTSGRKKFLIQVKQRPIYLQLKRLYALMDLTAAMKQDAKKTMKSLGRNYREIKEFIKMPGIGTVGAYTYDAYIQTPHRFEKTNRMWRYCQMGVTDRSSDGKPLGYKRLDKAGNGELKALSHRAFMVAMKTDNEVKRFYLNSLRATHNQVHARLNTQRKILSVMLSIWKKGKAYRPELFLDPSI

SEQ ID NO: 485741 - protein, 346 aa, unidentified
MIVIGCDFHPSWQQVCWVDQATGETEEKKLVHASGDAERFYRQLSGPALIGMESTGNYQWFLEMVTAAGHQLWVGDAAKIRASDVRQQKHDRRDAALLLKLLLEGRFPRIWVPSSEQKDLRQLLIHRNKLVRVRAQVKTELQHLALNQGVHKKRRLWSAAGQMLLRELPLQPWAGRRREDLLQLLDLLGQQIAPLDLAAAQAAKENPAAKLLMSQPGVGPVTSLAFVLTMGDVSRFPRGKQVASYLGLIPREYSSGGKQRLGSISKQGNRFMRMLLVEAAQIAVRCDPGFRNEYLHRCHSKPKGVAKVAAARKLAIRLYWMLRTQKPYPEIVHVESSSRVPLVSES

SEQ ID NO: 485742 - protein, 428 aa, unidentified
MAHCVALDKVLAVGVDPHRESLDVVGIRFPEEILWDEGFDNCRAGHHALWAQARALAAEHDLSLVIGIEGGKNYGYTLGHFLTDRGCSVKSVNPLMTNRQRQFYGQDKTNRLDALATAAIVFRAYDQLPDLSPIEEAYEATRELSRYRTQLVKEQTSAINQLHRHLANQYPAYKSFFSKVNVVSALHFWATYPTPAHLQETSPEALADFFYQKSNHRLGKDASRRKADKIFRHLNDSPAQTLPLLDEVLATIISDMARRLLHLKRSIDSLDAELEKSLTATGQKLDSFQGISTALAGVLVGETQDTARFDHNKDRFASYNGTAPASRGTGNHVRQVENRWCNRRLKTAFDRVALNARRCEPLSTAYFQACLDRGLSPRQAHKCLMRRLSDVLFAMMRDKTAYDPEIHRRKQALHKAKEKSVAPAVTGG

SEQ ID NO: 485743 - protein, 427 aa, unidentified
MTASTQLMPDTVCVAIDIAKRYHDVLVRWPDGREKVLKMPNTRAGHDDLIQFLQQQDVPVLAVLEPTADFHRPIAYRLAQAGISVHLASSLAGARVREALYTSWDKHDRKDARVLMYLLTQGITHPFHDPLREGYFDLQEISNTYQQVARARTRCQHSLVNHYLALYFPEMERYLSASRAHWFCHFLLAFPTPANIIALTREAFVEAAWESVGRKVAKQQFLEGIYEAAQTSMGLPVVPDSPAVHTFRLQVKQYLSLTEQRQALEAMATTCLRDNKDFARLQTLPGVGPIIALMILAESGDLRRFSHHRQYLKFCGFNLAASQSGNTCSRYRLAKRGNARLRYAYWLAATVAIRMRENSFHTKFDRYVGKDPTDGDLKRKGLTAVAVKMARVAHALIKHDVDYRGYHEYCIPGGGTSLQSRRAARTP

SEQ ID NO: 485744 - protein, 407 aa, unidentified
MNHVIALDVSKGKSSIAIYNGHKQCEFEGELFHTRIDFEQLHQKIEEIKTLDGQAPEIVFEATGVYSKPIEKFLCDYGYTYYRMNPLEANIQMASMRRHKTDISDAHELAKTHFKNDRKTTYVQEEYYEQMRAITRYYDEIDEEIILLRSRMHAILQLSFPELERHITPSSALFLNLVQLYPHPALLKEHSKTVIKNRLKSNTRKNLSLERAEKKAFELLEVAENSYPAIAPSDIRCHQVRDYARRIADLMEKKDQLVKQMVVMSEERKEYTVLRSIPGIGDTTACRLIGELGDIRRFKNAKQINAYAGIDIMHYQSGHTQYQDHINRRGNKKLRKILYFMICTMLMAKGKPNHFVDYYYKLKTQPQRKPHKVAIVACINKFLKVTFHLLTHGILYDYESALPAQKS

SEQ ID NO: 485745 - protein, 343 aa, unidentified
MSNVTLLGIDLAKDVFQLHGVNEHGKKVLGRKISRSALPNFIANLPPCKIAMEACGSANYWSRKFMSYGHNVSQISPQHVKPFVQGNKNDKNDARAIVIASLQDDMPTVSTKSIEQQEIQMLHRYRESLVQDRTALANRIRGYLREFGLFICIGLSQVRKKVPLFLEDAENELTFEMREIIANCHKKLLDLDQEIERYTQKIERFCEQNAMCRQLMKLPGVGPMTASIVHATVGDPGNFKNGRHFSAFLGLVPKEHSSGGKQCLMSISKRGDRYIRSLLVHGGRSVVKTAGKKDNYLGHWVQRIHKEHGYNKAAVAVANKNARHMWAIMSYGDKYVDHLKLCA

SEQ ID NO: 485746 - protein, 377 aa, unidentified
MKAPSTRPAAVLGLDVGKSSHWACLIDRDGEVLASAPVRNREAELDALFASAPAGTLVVVDQFRNIGSLAVRRARAAGLAVAHLPGLAASRAAGLFAGEAKTDERDAAVIARTALGVPDSLSGVPGRGEALEAARALSSQRDHVVACATRDKNRLRAVLLESCPALEAAVDLSDRRWLELLAGFGGAWGIARSGAEGPRAAAAGEAAAASTAPPPALVEAENRQVRFLAARISEALDEAGALEAETAALLEGDETYACLLTVPGIGPRTAAQLAVSVDIGRFPDHDHLASYCGIAPRVRSSGTSVRSVRASRRGDARLKSLLIFSCNSLVRSSGRYGEYYRACRARGMGHGRALKAVARKRLRAIYAVMRDRVPYRE

SEQ ID NO: 485747 - protein, 342 aa, unidentified
MYYIGLDVHKKTISYCVKDASGQVHQEGKVGATRWELDDWMKTLPQPWTVAMEATIFTGWIYDHLLPHAQQVKVAHPLMLRAIAAAKKKNDRIDAGKIADCLRCDFLPECHMASTAIRDRRRTLRYRHLLVRQMVQMKNRISGLLMETGVSYNKQRLHKVRYFRELLSTNEEVHESIRPLLRLSRDSIVRLQKTEYALVSSLERDPLLAERIRRLRTVPGVGPITALTWALEMGDVSRFPSIREAISYCGLCGDEKSSADKMTRTPLSKQRNKHIQRVLVEAAKLAPRQDHDLALVYETAKQKGNGNRATLAVARKMVAYLLAVDRGQRNFVPAEAHRSVAA

SEQ ID NO: 485748 - protein, 446 aa, unidentified
MARKRKTHGQGRMTPPVMEPDAAGIDVGATEIYVAVPSDRDAEPVRCFETFTTDLMALADWLQACRIRTVAMESTGVFWIPLFQILEDRGLQVCLVNARHVKNVPGRKSDVLDCQWLQYLHSVGLLHASFRPRGAVCALRALLRHRDSLVQMSSQHVQHMQKALNQMNVQLHHVISDITGATGLAILDAILAGERNPETLAKLRDRRIRASAQTVAKSLVGDYRPEHLFTLRQSLAGYRHCQQLIAECDREIERQLAEFESQGEPPEAVQKSASGRQAEQNLAREHWRIFGVDLTAIPGIRSPTIQVLLAEVGPDWSKFRNASAFASWLGLCPHSEISGGQVLSSRTRKVNNRAALALRLAARSLHHSHSYLGEYYRRMRAKLGAPKAIVAAAHKLARILYHLITTRQPYQESIFAELETRFRQRAQARLEAQARALGFRLAPVEG

SEQ ID NO: 485749 - protein, 327 aa, unidentified
MTASVSSDNHIFIGIDVSGASFEAAWHRGGSTQYENRPDAIAAFVARLGGEKQIIRIAVEPTGGYEKPLVKALRGAGLPVEMVHTSRFAAYRTLVGVKAKSDTSDARLLAAYAAAPAEVRGRKADYVEIPQDAVREHLAELAVRRDQLKRMIHAESCRLATVRSNDIREQIAAHLEALREAGRKLHVAMMQLVRERTELRNAKRLLRSIKSIGDKTALTSLALVPELGLISNKAAAALIGVAPFVHRSGTMNAPAHIHGGRAAVRNAFYMAAVTASRHNPVLAPFYDRLIAAGKPPKVALVAVMRRLVVYANAVLRSGQSWKAAQTP

SEQ ID NO: 485750 - protein, 341 aa, unidentified
MSEVSTVGIDLAKSVFQVHGSDAGGGVVFRKKLRRDQVLAFFSQLPACVVAMEACASAHYWAREIAAFGHDTRLIPPAYVKPFVKRQKNDMADAEAICEAAQRPTMRFVQGKSAEAQASAVVFRTRDLLVRQRTQLINALRGHLMEFGYIVRQGVGHVGKLVDIVGDLASDIPAEARPVLAVITDSLQVLQSHIALLDREIASRAKTDPVAKRLMTIPGVGPVIATALVALAPAAVTFRRGRDFAAWLGLVPRQHSSGGKERLGRTTKMGERSLRRLLIIGASSATKAAARDPDNASAWLAGMLARKPHMLVTVALANKTPRIVWALIAHGGSYRAPARAV

SEQ ID NO: 485751 - protein, 348 aa, unidentified
MDTRRYIGLDVHQANISVAVLDSTGKSIIDCVLETKAATIVEFIRGLRGSLSITFEEGTSAEWLHGLLKPHVAHLIVCNPRKNALLKAGNKNDRVDARKLANLLRAGRLSPVYHGECGLRTLQELARSYLTITKDLTRVMNRLKAVFRSWAIPCAGQTLYSPRHRSDGLQKLPEPGVRRRAEQTYEQLDNLMTIRRKARIELLAESRKHPATHLLQGIPRVGPIRAALLMALLQTPHRFRTKRQLWAYSGLALQTQISGEYRLSGGELQRGKKPFVRGLNINYNRDLKAVFKSAATRGGRSSDAFGFFYQGLLDKGMKPSLAHLTVARKIAAIVLKVWKKGERFIRHK

SEQ ID NO: 485752 - protein, 404 aa, unidentified
MIFVGVDWAEAHNDVAVMDDSGILLARGRFGVGVAGLAQLHTLVAEHAQEPEQVRVGVEIDRGLLVDSLVGAGYQVYGLNPLAVSRYRDRHTTSGAKSDAGDAKLLADLVRTDAHNHRPLAGDSDEASAIRVLARAHQGLVWTRQRQMNGLRSALRDYFPGALDAFGADLASPDALAVLDIAPTPEAARALSQAKIASALGRAGRARNRERRAAEIQQALRAEQPHRAGVVADALGAAARARVGVLVSLNQQIAELEAALSEHFDRHPDAEILRSLAGLGPVLGARVLGEFGDDPNRYADARSRKAYAGTAPITKSSGRSLIVLARIARNRRLADACERWAFCSLTASPGARRYYDQLRARGKTHSQATRQLANRWVGILHACLERRQVYREEVAWPELLRLAA

SEQ ID NO: 485753 - protein, 356 aa, unidentified
MDHYAGIDVSLQQSSVCVVDAAGRIIREAKVASEPEAPVRFFRELGVPLARVGLEAGPLSQRLHAGLTGAGLEAVPLETRHVKAALSAMIVKTDREDARGIAQLLRMGWYRPVHRKSPDAQEVRALLAGRKLLQAKLRDVELSIRGLLRGFGLKVGEVSKGRFAARVNELVAGHEMLEAVTGAMLRAREGLRAVIGAMLRAREGLRAEFARLHRRMLAIVRDDTVCRRLMTVPGVGALVAITFKAAVDDPGRFRTAEAVGAHFGLTPKRYQSGETDVTGGISKVGDATVRTALYEAANAMLTRTSRVSALRRWAMEVARRRGMKRAKVALARKLAGVLQRMWANAADFRWGEEAAA

SEQ ID NO: 485754 - protein, 403 aa, unidentified
MNNVAGIDVSKGKSMVSVLRPFGEVVAKPFSIGHTGSELKELADYLKSLDGETRVVMEHTGRYYEPVARFLHEEGVFVSAVNPKLIKDYGNNTLRKVKTDKADARKIARYGLDNWAELRQHTPMDTIRMQLKTLNRQQSLYTKTKTMMKNNLIALLDQTYPGVNALFDSPVREDGSQKWVDFATTFWHVDCVRNMSLTAFAERYRKWCKRHGYNFSQSKAVEVHAGAQDLIAMLPRDALTKTMVRQAIDALNAISASMERLKAEMQALAAQLPEYPVVMAMHGVGDSLGPQLMAELGDVTRFTHRNAITAFAGVDPGADQSGTHEAKSTRVSKSGAPELRRALFLVMDCLLKTQPQDDPVYRFMDKKRAEGKPYLVYMTAGANKFLRIYYGRVKEYLASLEGN

SEQ ID NO: 485755 - protein, 453 aa, unidentified
MGQSKQSSMPVVHPNAAGVDIGSQFHVVAVSPDRTDEPVKTFKSFTGNLHAMAHWLKCCGIETIAMESTGVYWIPAFEILESYGFEVFLVNARKAKNVPGRKTDINDAQWLQRLHQFGFLRASFHPSSNIAELRAYLRQRERLLDYKASHIQHMQKAMMQMNVQLHHVVSDIAGRTGIDIIRAIVAGQHDPKELVKFRNNRCQNPVEVMIDALTGNYKAEHLFALKQSLELVDFYVEQLKACDQVIESKLKQLQEMVEVPQKPLSKRKKTGYCANAPEFDVRGALYNFLGIDLTEIHGIGPSLALKLVAECGTDMSRWPSSKHFTSWLCLAPGNKISGGKVLSRRTRRSSSRAAAHLRLAATTIGKTDTALGAFYRRLSARAGKAKAVTATARKIATHFYNALRYGMKYVDQGASYYEELYRNRVLGNLQRRAESLGFTLQEKPQVISTAGVS

SEQ ID NO: 485756 - protein, 366 aa, unidentified
MKKISTVQVLGNEILQEQKQTIGVDLGDRWSFYCVLEEAGKIILEQKVATTPEAMKQTFAKIPRSLIALETGTHSPWASRLLTELGHEVLVAHAQKVELITKSNRKDDRHDARTLARLARIDPELLGPVRHRSAKAQIHLTVIRARAELVSARTALVNAARGLVKSYGQRLPKCGTQQVNRELAAGLSTELREVLEPLLQEIESLNERIKEYDERMEKIAQEVYPEVSLLKQVKGVGTQIALTYVLTIEDPYRFEKSREVGCFLGLKPGRRNSGNSEPQKKISQEGDRYLRTMMVQGAHYILGPFGEDSDLRRWGLKLAERGGKNAKKRAVVAVARKLAVLLHRLWVSGEVYEPLRNSQKAMQAVA

SEQ ID NO: 485757 - protein, 387 aa, unidentified
MPQPNDLGKSLVALDQDSTLIAVIEMGQASWLVAAIAPGLNRHPLKKIATDAEQLLQVLGRWKKEAETAGRTIKRVAVAYEAGRDGFWLARWLRAHGIEAYVIHPSSIPVSREHRRAKTDRLDTELLKRAFLGWLRGEPDHCSMAAIPTLTEEDAKRPGRERENLVGERTRIVNRIKAALARLGIRNFKPMLRSASQHLETLRTPEGAVLPPNTLAELRRDMARLRFVKQQIKEVETARLERLQRAPGEGSNVMIHLLTRVVGVGVETADMLVQEVFTRNLRDRRAVARYAGLTGAPDESGKRRRERGLAKSGNARVRRGMLQIAWGFLVHQKDSGLAAWYRARTADARGATRKAMIVALARKLLIALWRLATTGEVPSGLVLRAAA

SEQ ID NO: 485758 - protein, 357 aa, unidentified
MNEYIAFDSHKHYTLMERQNAQTGRTVQQRLVHQPGALCAGLRGCAAGTAVAVEATGNWYWIVGEIEQAGLRPLLVHPRKAKLMMGLINKTDALDVHGLNRLQQNGTLPTVWIPPASLRDLRELTRTRLVLVASRTKLKNRLQATLAKHGLSLVASDPFGVRARAQWTPHLAALPEQTRFVTGQLLEQLDFLQQQIATQEARLKALLQVTPAMQRLTSLPGFGLILATTVALEIGDIHRFATCEHLASYAGTTPRVHSSGDKTRYGRLRADVNRYLKWAYIEAANVVSLKQKPWATRHVAQLYQRIRQRRGHAKAVGAVARHLAEASFWVLRRDEDYREPARPGKEVSQPGSSATTA

SEQ ID NO: 485759 - protein, 427 aa, unidentified
MKQEDISRIERFRQFRKQIRGSDKYLTVGIDVAKSKHYATFATTQGRIGQKGLVFENNASGFEHLLTQVQFYQDRDGFEQVVFGLEPTSVYQKPLAEFLIQQDYLVVYVTNEAIKDNRRTLDGRWDKHDKKDSANVADLVGQGKCQYYDLPNIHLRDIRNLLLLRKRLKKQLHGCRIRIRNNLVAQYFPELDRLWHQREAENLAIVRWCLSPAKINQLRFEDFFQMVTTGKKGLRQYQRLRKIWEMAPYSIGCRPGQTLELEAQIMVGLVEYIKKQLDQVQKMIEDLCRSFVEYEYLLSIPGFGSYIAATVLAAIGNPLRFNKASELIRLAGFDLSAKRSGKTSSSAVPVISKKGKVELRYALYQAALIASSRTPRFKAYYHRVLEGRQREKGIRTKMRVKLAVKLLVIAWTLMKKREYFDPDCITI

SEQ ID NO: 485760 - protein, 386 aa, unidentified
MADGKVATTIRTFSTATQELLALSDWLSAENATHIAMEATGVYWKPVWNILSDGEFELVLGNAAHIKNVPGRKTDVKDAAWLADLMAHGLVSGSFVPDQATQEMRDLLRTRKQLVRERTSHTQRIQKTLECANIKLDSVVSNVVGVSGRRMLEALISGQTDPRELAAMAHGRLQATPAELEAALRGRVTTHHRFMLRLHLDQIDSFDQAIARIDKEVKDNDKNFRAAVELLKSVPGVGSLAAEVIVSEIGIEMNRFATAGNLVSWAGLCPKNDESAGKRRSNRLKAGAPWLKTTLVQCAWAAARSKDTYLHAQYVRIRARRGDKKAICAVAASILTAAYHMLKDGTFYEDPGPDYFDRRNKDQQANKLVNRLQNLGFNVILQRASA

SEQ ID NO: 485761 - protein, 402 aa, unidentified
MQRTAGLDLASEEHRLVVVAEDGSRLDERRVSHTEDGIAMLARRLHELQVARVAIEQPNGLVVERLLDAGIAVVPVHPNQLAAARDRYRTGGKSDGFDAYVLAELARTDMHRFRPLEPDSDETKALRALTRTREDLVEQKVALANQLRAQLDAFWPGAKRIFAEVDSPIALAFLDRYPSPADARSLGAKRLAGLLARNGYSGRRDPSELLDRLRTAPQGRAGEAEQEARRTIVLALVAALRPLVEQIRLLTGQIAGALRAHHDGPIFLSLFRDPKSVVTAAELLAEIGDNRARHRTSSSLEAIAGQAPVAVESGKKKVARFRWACNKNLRDAVSVLADSSRHHNPWAHDIYQRARNRGHDHPHAIRILGRAWLRIIWRLWQDHTTYAPARHGSLNRLLATKG

SEQ ID NO: 485762 - protein, 421 aa, unidentified
MIEAVLECCAGIDVGKRFVIVCVMTGPADGEALEQTRKYGTNTGDLENLRDWLKACGCTHVVMESTGSYWKPIFNVLEPTPGMQVVLANSKLVKNLRGHKTDPSDSRWLAHLLRHGMIRPSFIPPLAIRELREFTRRRKQLIRAGTQERNRVQKILEDANIKIGNVLSDIFGLSGQLMLEALVEGKATAGQIAQLAQKTARRKIPQIQAAIERHRMTDTQRILIRFSMAHLAFLEEQIAELDQQIVRHIEQTNLQRPYALLQTIPGVKKLAAAAIVAELGTNMDVFGTSRRCSSWAGLCPGNNESAGKRKRSPVLRGNPWLRTTLIECAWAASGKRRSAFQARYQRLAPRIGHKRAIVAVAHSLVLTVFDVLSRDQPYTGSGADNMPATQLQRLIRHHSKREATLRRWLLRTSKNSAFRVT

SEQ ID NO: 485763 - protein, 402 aa, unidentified
MNCVGIDVSKGKSMIAVMRPFGEVVISPFEVQHTASELSELAKLLKSLDGETRVVMESTGNYHTPVAWLLHDAGLYVSVVNAMLVHDYGNNSLRRAKTDKKDAVKLANYGLDHWLTLPRYVPEEDTRLLLKTCYRQYQQYSKVQTMLKNNLISLLDAVFPEVNRLFNSSPRADGSEKWVDFVSTFWHCQCVSTLSLKSFSARYLKWCRKHGYYFSQEKAFEIHSKAQSCIGVMPRNETTKLLVQQAIAQLKATSAALAALKQEMQSLAASLPEYPVVMEMFGVGSTLGPQLMAEIGDVRRFHSKKALVAFAGIDAPPCQSGQMDIHSRSISKRGSAALRRTLFLVMGIYLQSAPLDEPVYQFMDKKRSEGKPYKVYMMASANKFLRIYYASVTAYLNTLARI

SEQ ID NO: 485764 - protein, 340 aa, unidentified
MSEVTTIGLDLAKHVFQVHGVDASGAVVLRKQLRRGQVVAFFAALPRCLVGLEACATAHHWARELQAVGHEVRLMPAQYVKAYVRRNKNDAADAEAICEAVGRPSMRFVAIKTPEQQAALLLHRGRERLVRQRTSLVNALRAHLAEFGVIAPQGLHNVARLVAIVRDESDTRLPDLARQVLQVLATQLEQLTAAVAAIEQQLMVWHRSNPASQRLASVPGIGPIIATALAATVVEPIGFKSGRQFAAWLGLVPRQHSTGGKARLGGISKRGNRYLRRLLINGASANLLRSKATNADPWVIGLRRRRPSLVVAVAVANKTARIAWAVMRRQENYRHRAAAA

SEQ ID NO: 485765 - protein, 417 aa, unidentified
MARISREEKEIIMKVYIGIDWSENKHDVCFLDEVGEVLLVKQIAHTIAGFRQLEQACQSLGVGRQEVIIGLETAHNLLVDYLWDQGYEQIYVLPPSAVKSAQKRYRQSGAKDDRWDAHLIANLLRTDQRCYTPWQPDQALTRQIRAEVRFAQQLGQEVVRDGNRLRSLVLRYYPAALDAFPHLDSVVFLAFLQTYPTLSQAQALTFEQLKVFLREHHHTQVRSWPTIYAGLYADHPVSNPDLDAAYAPLAVAQARILETLIRSRQACLTRLDKLFQLHPDHAIYDSLPQAGTLLAPALLAKLGDDRARFPTPAVLQAVAGTCPLTKRSGKHSYVLFRKACDRDFRHIVQQWARLSLDASPWAATYYHTVRPHCQTDNDAVRRLANRWLEILWRLWIDRKPYDEAFHLKQHTLRNQNH

SEQ ID NO: 485766 - protein, 343 aa, unidentified
MQAITTIGLDIAKSVFQVHGIDAEGKVMLRRQLKRRYVLAFFQKLPPCLIGIEACASSHYWSRELQALGHSVRLMPPAYVKPYVKRQKNDMADAEAICEAVTRANMRFVPIKTPEQQSGLMLHRTRHLFIRQQTSVINAIRAHLAEFGVTAPVGRKGIEELLRVIADPSDKRVPDVVRACLAALGSQLISLKKQILDFDRMIMAWHRCDQTSKRLNCIPGVGPLLATALVASVADPKVFRSGRNFSAWIGLVPKQHSSGGRARLGSISKKGDRYLRSLFVAGAFAVIRYAKLHGTKYRPWVAALLARRPTKVAAIALANKLARMAWAMMATGERYNYPASLRV

SEQ ID NO: 485767 - protein, 356 aa, unidentified
MMIIGVDYHPSFQQIAFLIEETGEYDEQRLNHEGGEAERFYRDLKRKGIRVRVGMEATGYARWFERLLAELDFELWIGDPAEIEAKRVKKRKTDREDARLLLRLMREDRFPRIWVPSPENRDLRQLLWHRHRLVQMRTRIMNQLQALAMNEGKRWKSKLFSQQGRVAFEKLALGPWASRRRSELLELLDRLNPSIEELTKAVEQEVKKRPEALRLMTHPGVGPITALAYVLIIGTPERFARGKQVGTYVGMIPIEESSGDKQRLGHISKQGSSLLRYLLVEAAQAAARFNPHWRRRYIHLAMRRHKSIAKVAMGRRLGVRLYWMWRNGCDYSPSFEFGSYAGQLGRGGMVGSSTPR

SEQ ID NO: 485768 - protein, 342 aa, unidentified
MSVYVGIDVHRKRSQVAVIDQAGQVLANRNVPNGAEPILKVIGGLPPGTPAAFEACYGTSWLVELLEDYGFDPHLVHPSRCKAIASARLKNDRVDAAILGQLLRADLLPEAWIAPPPVRQLRALLRHRVALVRLRTRLRNRIHAIVADYGYDRPAGGYWTGPGRAWLASLELSAVSRELTGDYLGLIDALQERIDRLDWEIRQRARSDPRVKVLTQLPGVGPFTALVILAEIGEVSRFASARKLASWAGLTPTVRGSDRVAHYGHISKEGSAWLRWVLCEAAQTAKRSPEFAPAFQRIAKRRGKKIATTAIARKLAARAWHLLTDAEPAAAPPPAPPRTAAQ

SEQ ID NO: 485769 - protein, 426 aa, unidentified
MKNTQNEKISQIKITTLVVGVDVAKETHYARAFDYRGIELSKLLRFSNTAEGFQRLEEWMQNISEQHKKTDIIVGFEPTGHYWFNLGDYLKDKGHKLAIVNPFHVKRTKELDDNSPTKNDRKDPKTIARLVKDGCYREVYIPEDVYQELREAISERDRLVQRMSSISNQVTRWLDIHFPEFNTIFKDWRRKAALQILRNFPTPEKIIAAGAVKIEGTWRESMKRTAGLKRAQELVKTAEASIGRKTGLTAAEASLQNLLNEHDLYRQQYEQLEQLMLELLQQVPNAEKLLELKGVGLITAATFVGEVGDIRRFQDPRQIQKLAGFNLVENSSGKHKGKTRISRRGRRKLRHGLFMAMITILATNPEFRQLHQKNITRENNPLNKMQSIIALCGKLIRVFYALLRTGNNYSAEKMLGDIELGMKAAA

SEQ ID NO: 485770 - protein, 338 aa, unidentified
MTLYAAIDLHSNNHYLCVIDGKDKRLFEAKFDNDASLTIQALKPFKRRLEAIAIESTFNWYWLADALMEAGFEVQLVNTAKVIQYEGLKRTDDKYDAFFLAHLMRLGILPTGYISPVEQRGLRDLLRRRMRLVQDRTRYINSLNTQYQRQTGLHLSCNKINSKLFRLPVVGDLNVQLAMKANLNMSKALKVQIKLLEKSIMSQVKECSEFNLLKTTNGIGDVLAETILLETGDINRFNSPGDYASYCRCVDSCKSSNGKKKGVGNRKNGNKYLAWAFIEAANFAIRYNAKAKKFYECKKRKTNNVIALKALAHKLSRACYYIMKQGVPFDESKIFGRV

SEQ ID NO: 485771 - protein, 362 aa, unidentified
MQYIAFDAHKHYTLASVEREDGRLVREQQIPHERGALQAFLQGCDPESPVAVETTGNWYWIVDEIEGAGCLPRLVHARKAKLMMGMINKTDKLDARGLHRLQRAGTLPAVWIPPSALRDQRDLPRTRMVLVRQRTRLKNRIHAALAKYGVSRSDVSDLFGRQGTRWLQEHLGQLPPQTAYAAQRVLEQIETLDRQVAQLEQRMSELFTPTAELELLRSLPRVGFILGVVILLELGDVRRFPRSAQLAAYSGTTPRVHASGGRTRYGPLRPDVNRYLKWAFVEAANIICRRRARAPDRHVCQRYARIAHRRGHQTAIGAVARHLAEATYWILTKEQAYREPQSRPPQGPAAGIVHGGVSAPMP

SEQ ID NO: 485772 - protein, 352 aa, unidentified
MLIIGCDFHPGFQQIAIFDNLTGEMREKRLQHRTEAEQFYRGLAGQQVRVGMEACGHYPWFERLLEELGIELWVGDAAKVRASVVRKQKTDRKDAEHLLKLLMQDRFPRIWVPSLEVRDVRQLLVHRHKQVQARTRTKNQLQAMALSQGVQKKQKLWTKAGRAELEQLPLLAYAAQRRKKLLEALDELEAEISELNRRVEEEAGQRPEAVLLMTHPGVGPVTGLAMVLTLGPAQRFESAKQVGSYFGLIPSEDSSGGKQRLGKISKQGNSFLRFLLVEAGQTAARYDPQLKRFYKRLAMRKNRSVAKVAVARKLATRLYLMLREGWTYAQLNQAVMQVSPSHPVVEQNKPIA

SEQ ID NO: 485773 - protein, 381 aa, unidentified
MTTAVTHKTHVHTTEATLFVAFELSEKTWKLGFTMGHGQKPRERNVTARHQERVLDEISLAKHRLGLPETAPVVSCYEAGREGFWLHRFLLAHGITNHVVDSSAIEVSRRQRRAKSDGLDVRKLLSMLIRYEQGEHQVWQVVKVPSVEAEDQRHLHRDLETLKRERASTTTRIQGLLSSQGIQVSTLAKLPEQLDTLRLWDGTAIPPGLRRRVLRVYAHHTFLNEQIAAIEAERRAQLQTSSDASIDQIRQLMMLKGIGINGSWLLVMEFFGWRAFKNRREVGGLAGLTPTPYQSGESAREQGITKSGNPHVRWMITELAWSWLRFQPESALSVWFRARFGDGGKRLRRIGIVAVSRKLLIALWRFLETGVLPEGAVLKEG

SEQ ID NO: 485774 - protein, 324 aa, unidentified
MNDTVVGIDVSKKTLDVSYAQGQRKQARIFENSADGWKQMLSWLKAKGSQPAHVGMEATGRYSLGAALMLHDAGHTVSIINPVQIRDFARSKLGRNKTDKADAALIREYTTLFRPQPWTPPSPAMRRLCELQTVRAGLIANRAEWKNRLSSGLGDSTAIQVAKATIDALSSQLAVIDTAIAETIEQDGDLRGRRDLLLSVVGVGDTLAALLLAEMPEPGVLRRSAEMIAYAGLNPSHHRSGTSINRPTRISKIGNATLRSALYMPALSAMRFNPVVAALAARLKSACRLKPKQIVVAAIRKLLVLCFGVLKTGKPFDPTIAMPA

SEQ ID NO: 485775 - protein, 404 aa, unidentified
MGFFVGVDWASQAHAVCVIDETGRRCWQGPVTHTGEGLAELLAHLRGFARRGAVRIALERPSGLLVDTLVNAGFEVVPIHPNALKASRPRYSAAGGKSDPGDAFILADLVRTDGHRFRPLHTPADNTRALRALVRGRDDLVTQRVALANQLRTLLERFWPGAAAIFADIDSPITLAFLTCYPTPDSAARLGEKRLAQFLAQHAYSGRRPVGDLLRRLRTAPPSRVAAAEAQASGQVVRALVEVLTRLVTQIQQLSAAIAAALAEHPDGPVLQSLPRTGTVNAAQILAELGDDRARFPTDAQLAAEAGLVPVTHASGKHHAVVFRWACNKRLRQALSTFADNSRHASRWAALVYTRARARGCRHQHAVRILARAWARVLWRCWQDRTTYDVARHRAAAVLTIAEG

SEQ ID NO: 485776 - protein, 387 aa, unidentified
MPQLNDLSKSLVALEQDATLIAVIEMSQSSWLVAGIVPGVERQPLKKLTTDQDALLQLLHRWRKEANEAGHVIKRITVAYEAGRDGFWLARWLRAHEIEAYVIHPSSVPVSREHRRAKTDRLDTELLKRAFLGWLRGEPKHCSMAAVPTIADEDARRPSRERENLVKEVTRLVNRMKANLARLGIRGFRPHLAQAAGQLQTLQTPEGTAVPANTLAELRRDMDRLRFVKQQIKQIEAARVQRLESEPGERRHAMVYLLARVVGIGVESADMLVQEVFSRKLRDRRAVARYAGLTGAPDESGNKRRERGLAKAGNARVRRGMIQLAWTHLLHQKDSVLAQWYRARTADARGRTRKIMIIALARKLLIALWRLVTTGEAPAGLLIRPAA

SEQ ID NO: 485777 - protein, 363 aa, unidentified
MTMAMLRVGLDVHSRETAAAVLDPVSGEVTVRTLTGRPSSVLEWLAALPQPFQAVYEAGPTGYGLARAAKGRGLDVVVCAPGHVVRSTLDRVKTDKRDAIRLARLLLAGELRQVRVPEPAEEQLRDLVRAREDVRVDLMRCRARIAKFLLRRELYYPLPGNTWTKRHRNWLRSLRFGDRASELAFADALHAHDSMLARRGELESALEEIALSSWCAETVARLRCLRGISSLSAIGLACEVCDFGRFTHPRFLASYLGVVPSEDSSGEQRRQGAITKAGSKHARRLLVEAAWHYRRPPRVSHELTVRQRGQHPRVIEIAWRAQRRLYQRWQSLEHGRGKRNTIVAVAVARELSAFCWEIATLDT

SEQ ID NO: 485778 - protein, 353 aa, unidentified
MLIIGIDPHKSTHTATALDPVTNSEVGTLRIEASVFDYRRLMTWAKAWPQRRWAIENAQGLGHHVAQWLLALGEEVVDIPTTATARVRELSRGGGRKNDRIDAAAAASVAALQGDARPVRAESTADSLALLDERRVNLSQSRTRAINQLHALLRELMAGGAPTSLTAATASKVLSGFRPRTATDRVRVALAKDSIADIRRLDQQLAASIASITAILDEHGTRLRETDGVGPVLAARLLGRTGTPSRFASEASYANYTGTAPIQIASAETDRHRLSRYGDRQLNSAIHTIAMVQIRMPDSLGRAYYNTKIDEGKTPRAAARALKRHLARHLWRVMLADEKRSTRKVAETAAHTT

SEQ ID NO: 485779 - protein, 372 aa, unidentified
MNKKLIYVGLDVDDTQYHGAAFDKETGEIVSFKCRPTLKGLVSQLEKIQKYFSVESLKLCYEESYIGHCLQRDLMQAGFNCDVISPGSIPRKGSKAIKTDRIDALDLAQFYANDLLTIVQIPDAETEKDRDLLRSRQQLMKQQNDLRRHIQSLLRRNGLHYKAETNNKTHWTKHHYCWLERTVEGCSGSLGTNLQLLLRQLKSINEIVGAYSEEIELMAKQPNYQQAVSALTCYKGIKNLFALTMITEIGDVKRFAHPRQLSAWVGMDIREYSSGGKHHRFGITRQGNRYLRTAFIEANQRAYRTTKLSREIKARRVNTNPEYIVIADRCLKRLSKKGNRLLEAGKHPNKVKVACAREMIGFVWESLNKVAA

SEQ ID NO: 485780 - protein, 423 aa, unidentified
MTSMTVALPLTNPPLPAEALVAGVDTHKDTHHVAILDHVGRPVADREFRADGRGYAEIITFLRGHGNVDRVGVEGTGSYGAGLSRALATAGMTVIEVARHDRQARRRRGKSDPLDAHQAAVTVLADTDTAIPKSGDGAVESLRILIGERRSAAKARAQVMNQIHALLITAPELVRHAFRALTGQRLVNTLAKTRPGTGGSGDPDVVARQTLKRLATRYLTMQAEIDIIEQQLGLLVRQVNPTLLSLGGVGPVTAATLLVAAGDNPERLRTRATFAALAGVAPIPASSGQRTRHRLSRGGNRHANAALHRIVLLRMRHREPRTMAYFERRRAEGLTNRDIMRCLKRHVANEIYAALLNPAADNPTGHELRAQRQQIGIPISILAATLGVPYQRLRRLEIGIRADPELEQRASLALAQLSPPETA

SEQ ID NO: 485781 - protein, 415 aa, unidentified
MKKHNNSAKKSEPTSKRTKSLGPVRRDTKEVLAELVAKLKEKLDSKKVAARSGEEDERGELRPNLDRLTVGVDLGDQWSHYCILGLEGERLAEGQLRTSEEDFATFFQGLNAARVVVEVGTHSAWVQEVIRGYAHEVLVANPRLMDGSKRRKRKNDRIDANKLARLGRVDPESLYPIQHRSREVRQDLVMLRARDALVAARTELINTTRGLVKSMGTRLPKCSSRSFAQKGEEAVAVEMREALLPLVRLAATLSADIKEYDKKIAELGREKYGHTALLRQVKGVGPITALAYVLTLENPKRFAKSRDVGPYLGLVPKQEDSGESQPQLGISKAGDTMVRKLLVGSAQYILGPFGPDTDLRRYGLRLCERGGKNAKKRAAVAVARKLAVLLHRLWVSGEVYEPLHHAKSVPIAAAA

SEQ ID NO: 485782 - protein, 461 aa, unidentified
MNRKVPNGKQKSSVQKNMDWKALEIVHPDAAGIDVGGSEHWVAISPDRDPEPVRRFGCFTADLREMGRWLVEKGVRSVALQSTGVYWMPVLEMLEQQGLEVYLVNARHTKNVPGRKSDVQECQWLLKLHAFGLLNNSFQPSDEIRIARTLWRHRSHLVAEAGSVMQRVQKVLTEMNMQLSNVLSDLSGVSGMKIIEAMLQGERDPWELAALAEPGVQATSEEIAKSLEGNWREELLFLLKQHVELYRIYQRKITDCDLQLQKHLRSFGSKVELTMQPLGPRPKGKKSSRNAPSFDLRRELYRITGIDWAQINGIDVLTAQTVMAEAGADLSAFPSEKQFVSWLGLSPTNEQSGGKILHRRTRKVVNRASVAFRNAAVTLLRSQSYLGAQYRRLRTRLGAPKAITAMARKLACLYYRLVKRGQQYVDKGTEYYEARYREQQIRSLAKRAQKLGLQLLIPTTA

SEQ ID NO: 485783 - protein, 392 aa, unidentified
MEAGTSQPHSPTAIRTDLAAIFVSLELSRSTWLITSLSPGNGEKMSKHSVVGGDVTALLGRFTQLQEKVRSRTGNQVPIVSIQEAGLDGFWIDRVLKANGIESYVVDPASIATSRRRRRAKTDKLDGEALVRALLAFKRGEPRVCAMVNAPSPEEEDRRRLCRERKVLIAERVKHVNRIKGLLFGQGISGYEPLRKNRRKQLDELHTGDGRPLPTHLKTQISRELDRLELLLEQITAVENERDTLLAAQKDSVAATLIPTGAMLCEVKGIGLEFAAVLWTEGLFRHFDNRRQVAAYAGLAPTPWQSGTIDHEQGVSKAGNPRLRTTMIQLSWLWLRHQPQSALSQWFTARVQSSGGRAKKSAIVALARKLLVALWKYVIAGVVIEGAVLKTA

SEQ ID NO: 485784 - protein, 387 aa, unidentified
MIYFIGIDISKYKHDFCIISNTGEVIVENSSFENNQKGFQTLIHLLEPYNKQSVRIAFEATGHYSLNLELFLTNQGYSFMKMNPLVVHNYLKARSLRRTKTDKADSKTIASYLMSVQYIPNSTLLYHTYTLKQLCRSRETLVKERSKIAVLLTNQLDFAFPELKPFFQNKISATLLYILEKYKNASHIALMKDYESLRKVSHGKFSYAKFAKLKELAKSTVGYHDENSDLLISTYVSLYNELSNKIDPIDKQISTIIKELNPRILSIPGIGVISAASIISEYGDINNFSSPAKMLAYAGLEPSINESGTLQSNGKMVKHGSGHLRYALMNIAMIILRHSPCFCDYYLKKRSEGKCHRVALSHVCKKLIRVIYSLEKYNHIFDPSLLK

SEQ ID NO: 485785 - protein, 412 aa, unidentified
MRRVIGIDIHRTFGEVVIWDSGVLRHAGRIDMTRTGLEGLGKGLKPTDEVVIEATGNCMAVARVLSPFVARVVIANPLQVKAIAHAHVKTDKVDAGTLASLHAAGFLPEIWTPDVATERMRRLVARRYQVVRHRTRIKNEVHSILHAHLIPKCPHADLFNKRGREWLSRQPLPDDERVAIDRHIRELDRLEEDLVGLDREIAQGSLESSEVHRLLTITGINLAVATGLMAAIGDIQRFKSPQKLVSYFGLNPRVRQSGLGAAHHGRISKAGRSHARAMLVEAAWAAAKAPGPLHAFFVRIRATRGPQIAAVALARKLVVLCWHLLTKKEDYLWARPALIANKRRTMELQAGLPQKKGNRRGPAYAYNVKELRDQERAVAEQAERTYERFVEGWKSRRPKDRVRERLNPTRLE

SEQ ID NO: 485786 - protein, 408 aa, unidentified
MRSAGPRLVCDHITVALDLAAREHQVVIVDGTGKRLTRFCIAHSRAGIAELLRRSRPERWSAEDRLFAFEATGHVWEALARHLEAASESYVIVNPLATFRLREARSMDRTKTDRTDAEQIAELARSGMVTSTRPLTGPYLGLRRSWGEYVRLRFEAARLKGLLRQQPFGLFPELLSVWSEVSTPGCLAVLRLGLTPAQIAAQTPSEFLGRVCSAQQGRRLWRAKVIAAHEKAARSVVEGEGLAAMAAEARRIVARYDLLAGQLAELRAEIEALLEQIEEARWLATIPGLGFVSVAGIIAHVGPLERYRSGRALIKLAGTNPSRNETGERRGGAQVMTHRGRSGLRQVVYMANGLVSGAQRAHPRALRPPHQPARAALEQDDRPRRLHEQAAALCLSREDSCLRVPHFT

SEQ ID NO: 485787 - protein, 356 aa, unidentified
MPSTFQRHPTPGVVTVGVDTHADVHVAAVVDGLGRLLGSLAIPTTVEGYAELLAWAEGFGQVGCFGVEGTGSWGAGLSRWLTTNGQAVVEVPRADRARRRRKGKSDTLDAEAAARAALAGLDVVIPKRQDGPVEMIRALRVARRSAMKARIQAGNQLLGLLTRAPEELRARLRKLRGRSLVEAALRLQPAAGVPASVTAATEVALWELAGRWHGLDGELTRLDELLGALVKKLAPDLLALPGVGTETAAALLEAAGDNPQRLTSEAAFAHLCGAAPLPASSGKTTRHRFNPGGHRDANEALWRIVLVRMKSHAPTRAYVARRTAEGLSKREIMRCLKRYVAREVYRYLKPTGQVHE

SEQ ID NO: 485788 - protein, 347 aa, unidentified
MGVYIGVDFHARKQTASYLTTEDGEIQRVELEHEKDYVRAFYEQFRGQKVIVGFESSGYAAWFEELLEELEYETWIGHAAAIRKFAQRRQKNDRRDADLILELMVRGDFPRLHRYSRESREMLQQLRYRQRLVKMRTMVINSLRFMVGSRGVTLRGTLQSRPGQARLMQVTLPGPLGQQRDELLRLLIEIQQKVETVEEWLKQKAETDPRVQRLRTHPGIGLLTGLGLVVTLESIERFGHSRKVTAYVGLDPVEDSSGERRRMGSISKQGSRLLRLLLVEAGQVAARRDAELGQVYRRVTLRRGHATAKVAVARRLLVRAFIMLRDEIDYAEFCRRGVAARSARGSA

SEQ ID NO: 485789 - protein, 343 aa, unidentified
MEQYVGLDVSLEPTSVCVVDGSGKTLWQGKCASTPEAIAATIRAKAPAVVRIGLESGPLSSWHWHELRKAGLPVVCLDARHAKAALALQLNKSDRNDARGLAQIVRTGWYREVAVKSVDSQLVRSMLTTRAQLVRMRVDLANQVRGVLKPFGLIAGKGGGQPFVERVRTLVAGGPLQEVAEALLSAWRAIGEQIAALGRRLVAMARRDEAVRRLMTAPGVGVLVALTYVSVVDAPERFARSSSVGAYVGLTPRRYQSGEEDHTGHISRCGDKLLRTYLFEAAGIILHRVSRWSTLKAWGTRLARRIGTRKATVAVARKLAVILHRMLRDGGEFRWSAKEVQAA

SEQ ID NO: 485790 - protein, 400 aa, unidentified
MSERQARVWAGVDAGKGHHWTAVVDESGATLWSKKVDNDESAILTALGEILDLADQVHWAVDISGTSSALLLALLAAHGQQAVYVPGRTVNRMSGAYRGEAKTDARDAYVIAETARHRNDFATIDVPAQLAADLALLTAHRADLVADRVRMINRLRDVLTGVFPALERAFDYSSHKGALVLLTGYQTPAAIRRRGRARLTAWLANRGVRGADMVATSALEAAQAQQTALPGEDVAAQIVADLAAQILALDDRLKRIDKQIRETFRSHPQAEIIESLPGMGPILGAEFVVAAGDLSAYADSGHLASAAGLVPVPRDSGRRTGNLHRPKRYSRRLRRVFYMSAQTSIIREGPNRDFYLKKRGEGCKHVQAVIALARRRASVLWALLRDGRIFTSAPPVTHAA

SEQ ID NO: 485791 - protein, 456 aa, unidentified
MASPLRLAPSPAAPGPDGILRDEPSPEGAPPRMDKGGRARRRRGSRSTLDREWLMSVSTFVGLDIGAEAHVLAAVDGQGTVVQRPARLAEDASGYAALDATLARLGPPGEVLIVCEATGHYWQNVVAHLWAGGWRVAVVNALRTARYAAEALVRTKTDPADALLLAQYGREKRPAPATPTDQATRELSELVRLRTRLLQDFQDRLKQLHRVVDLTFPEFTRHVRTLDSELAVAILARYPTARALAQVAPGKLARLVTDGRHHVGAELAQALTAAAKASVGAHHGEPYARQVRYACEDLTTLRARLRELEDELRGLVAQHAVGQHLVTIPGVGPITAACVLAEVGDFTRFPDAATLASYRARSAGLVPALRHSGKKTPLRAGCYPVGNARLRQGLYMATLSAVRFNPWLRAFYHRLVARGKPKLLALTAAMRKLLSAMHSVARRQQPFTLPLTPDHA

SEQ ID NO: 485792 - protein, 379 aa, unidentified
MTMGEFFRQCVGIDISKDKFTACLYMYDRASDEGCCTKSINFANTKSGFNQMVRWSRKEAIKGYSLTYLMEPTGVYYEHLAYHLHKIGQTVYVVLPNKARQFCESEGIKTKTDAMDARCLALMGCVSRKLKAWSPPAAIYRELRQMTRFHADLWEVRTSVTNRLEALRHMEGLSKTVRRNCEKLIEEIDTLIEKNDKAIMQKVAEDKELEARVKRIATAKGLGEATIVCVIAETEGFHLIENRKQLTSYAGLDVEARQSGNDDPRHRISKKGNAHIRAALYMPALVAIRYNRQIRAAYGRVCQKHPKEKMIGVAAAMRRLLLLIYTLWKSGEVYDEMRDTTRTPRKKSPELEHGPKDSITTTEEHVDWNAVGENGQALF

SEQ ID NO: 485793 - protein, 461 aa, unidentified
MIRRLVGVDLGIASAHTVRVLTEDGREVCRRRCEPTVDSLRRVETAALAGAPAGTVLEVVMEPTGPAWLPIAVFFTARGHRVFRVSSGKAADLRRFLSRHAKSNGIDADTLARLPLVDPAGLYPLELPGTEAAALDRRVRATDRLTVLAAQHKVRIKDLTRQLLPCSPLTGDLGVADLAVLERWADPRALLAAGPARLTALIVKASNGHLGADRAQQWRAAAAAAVELYGDHPAIAWTDLAAEVGTEVRLLRATQAELAAHARERETAYRYADLGGLARSLPGVGDVGGPVLVAGMGRPGRFPNGAAFKSYTGLAPRAAETGNTDRKGQPMSKAGSSLLRTTLIRAADTARKQDPQLARIYYTQMVERGAEHLKAVCVVAGALAERIWTVMNRQMPYVICDIDGTPVTPEQAKQIIAQNFTVPDEVRRRRRSSKTPSRKPAQQPTISSKGGRPLSKPHTAA

SEQ ID NO: 485794 - protein, 441 aa, unidentified
MAVINPNACGVDVGSKMHYVATGQGSEEVKSFGVYTKDHQEMVVYLKSKGVRTIAMESTGNYWQTLFAALEKAGFEVFLVCGNQTKNVKGRKTDVQDCQWIQWLHSVGMLSNSFIPNEHVSHLRIYSRQRLKYIQVQTRIINQIQRDLRAMNLRLEVALNDITGKSGRAIIEAILSGERNPRSLAGLSDYRVKKSKEEIALSLEGNWHEGYLFVLRQHYDEYVQNLARIQACENEIEKILKNCLACSEIDPKDAPRHKKALKKNKNKPEIDFQAYSFQYFGGVDLFAIEGVNQNTVLSVITEVGTDITKFHSAKAFSNYLHLCPNQKVTGGKVISNHTKRGTNPLSQALKSVANVIGGLKIDTHLTRFFRKVAYKKGRKEAITATAHKLAVIIYNMLTKYEPYKPFVREVNEHAERIKKLKEVERIVKSHNFKIEDINFGY

SEQ ID NO: 485795 - protein, 406 aa, unidentified
MNMNAVGIDVSKRKSTVAILRPGGKVVVKPFDIPHLSANFQSLEKLIRELDGETRIVMECTGRYYEPVARELSQAGFFVSAVNPQIIRNFQGLDNPLRKVKTDKADSVKIARYTLDSWANLKQYSLMDGLRSQLKTMNRQFDFYMKHKTAMKNNLIGLIDQTYPGANTYFDSPAREDGSQKWVDFIDTYWHVDCVRKMSLSAFTDHYQKWCIRRKYNFSKLKAEEIYGKAKELIPVLPKDSFTKRIIKQAVDQLNAASQTVEQLRTLMNETASKLPEYPVVMAMKGVGPSLGPQLIAEIGDVTRFTHKSAITAFAGVDPGVNDSGDYSQKSVHASKHGSPVLRKTLFQIMNILIKTKPDDAVYRFMDKKRSEGKPYYVYMTAGANKFLRIYYGRVKEYLSSLPESE

SEQ ID NO: 485796 - protein, 460 aa, unidentified
MILDDLELIHLYAAGIDIGAAENFVCVPAHTVAHGESNVRSFGVFTKEQDDLVEWLKSCHVTTIAMEATGIYWMSVFDKIEAAGIEVILVDPHSVRHVPGRKSDVMDCQWLQQLHTYGLLRGAFRPEASVRRLRVLCRHRADLVCEGGSHLQQSQKALVQMNVQLGLVVSDINGETGLRIINAILKGERDPKALVKLRDPRVKKSTVAQMEAALTGNYSEENLFVLEQNIRAWEFYQKQLQECDQQIEVALKAMASATLVGVPPAPPKPVPPAEEPVKKRQRPLHGNNALTVDFSEQVRRICGVDLMKVCGLNLLSVLMIIAEIGVDMGRWRSEKAFCSWLGLCPGTKISGGKKLSRRTRHVVNRASVLLRLAALAAGRTDTWLGRFYRRKRAHLGAPKAITATARKLACVIYHMLKYQEEFMPLDVALYEIKAQEQRMRRLRKQAEELGFELVEKQRAA

SEQ ID NO: 485797 - protein, 386 aa, unidentified
MRGKAFIPRDYDVFAGLDVDKKSIAATFSDQQGFIRSLQMPYSVEHLLNHVRKHFGNQKIAFVYEAGPTGYGLYDGLAAQGYQCLIAAPSMIPRAPGQRVKTNRLDSRGLSESLRGGQLKSIHVPSPVYRELRHLTQLRDTLVREAAAHKQRIKALLLLESIGFPPAPAGSQWSFMVKHELRKLACSRVVRFKLDQLLDNLEFCEKQVVNATKEIRRFCKEDAELWRSIEYLRSIPGIGWIVGSQLLARIGDWRQIDNVRQLGSFLGLVPTENSTGDTVDRGSITRVGDGRLRSKLIQAAWSAIRQDAELREFYRSVCRRNPRGKGPRIAIVGVARKLSTRIYAVLKNQRPYIVREQVRSAPLTQEETSPQGTTRRCAEPGETKNS

SEQ ID NO: 485798 - protein, 350 aa, unidentified
MNVKHYIGFDVHKKSVSYCVKLAEGMVIEEGKLRASREALRQWAGKRTEPWHGAMEATLFSGWIYDTLQPYAAKLEMGHPAMMKAIGAAKKKSDRLDARKISDLVRCNLLPACWVAPSEIRELRRMLRYRNLVVDQAVQMKNKISGLLMESGTEYNKKRLHGEKYFTELLETLEEVPDSVKELLKLSRGALESLQATQQQIVLQLQKHPKLVERVKRLKSIRGVGDVTALTWALEIGDPHRIPSIGDGLSYCGLTSALVESADKQQRGPLSKQRNPHLQTVLIEAAKLAPRWNPQLAAVHERELQRGHRNRATLEVARKLVAYLLAVDKSGKPFEVRTPAIPEKQVKPAA

SEQ ID NO: 485799 - protein, 359 aa, unidentified
MKILAIDLGKFNSVACLLNTTTTQSEFETLATQKMALEWLLRRTQPDQVLIETSSISGWVHDLIQGLGFNVIVANPSTEAWRWKNVKRKTDKDDALKLAKLAALDQISTVHVPIAEHRQYRSLVKYRKTLVHRVNRVQSTIRSLFDQQGVPIPQGHRTWTIAGLEMLSQHAKPLAECDLNELWQGELDLELKTLDVLWQQLHSVDERLEKIAKQNENVKLLLTIPGVGRRTAEVIVAALDDPDRFQNARQVSAYAGLVPDQRQSGQTNRLGKITRRGSELLRSALVEAAWAMLRYNPWAVKIYQRICGGQKTRKKTAIIALARKLLVRCWAMLRRKEVWHDDTPWSIAAPSPSLTTNPA

SEQ ID NO: 485800 - protein, 324 aa, unidentified
MAKRTTICAGIDTGKRKLDVALDGGSAQLQVDNTAEGHKALLDWLRCHRVKRIGIEASGGYEQVVVAELRRKRFVVVVFQPAQVRAYAKFQLQRAKNDKIDATLIAACTAAVKKIHAPPDARLLPFAEQLTMMDQIKEDIARFKNRLETCRNPRIQQAWKEDIARLEKREKIELKALVAAIREHRDLADRLELIYSVGGIGMPTAVAILIRMPEVGQFPREQASALAGLAPYDDDSGEHAGARHIDGGRKRLRRALYAAALPASFRWNPQLIALYKRLIAAGKGHKRALIACARKLLIFVNTVVARGTPWQNQPPPCAAMTMTG

SEQ ID NO: 485801 - protein, 392 aa, unidentified
MIYVGIDVAKDKHDCFITNSDGEVLFKPFTISNNRDGFETLFQKIEAISDDLNKIKIGLEATGHYSYNLLGFLLDKGLTTFVINPLHTNLYRKSLSLRKTKTDKVDSRTIATMMMSDMNLKSYSDTSYHNEELKSLTRYRFDKVKERAKLKSSVSRLICILFPELEKLVPTLHLASVYALLSEFPSADAVANAHLTRLSNLLSESSKGKYGKDTAITFRNAAKISIGSYMPAKSLELKHTIKLIQELTIEIDEIEAAIKRIMDEKIQSPILTIPGISYRMGAMILAEIGDFSCFDSADKILAYAGMSPSTYQSGQLDNCYSHMEKRGSRYLRYALYNATKYVCHWDKSFGAYLEKKRSEGKHYNVAISHSAKKLVRLIFAMEKSGKAYLPTA

SEQ ID NO: 485802 - protein, 360 aa, unidentified
MNIKHDTLPSFKNQDFHIGVDVHKNQWTVSVISMNMLLKKFQSIDPSPSVLLKYMQRHYPDGNYHVAYESGFSGFWAARKLKDLGVNCIVVHASDVPSSQKERLNKNDRVDSRKIARSLSNGELMPIYIPEKVAEEYRYLNRHRLKTIKDQTRLKNRIKGVLHQFGFNIPLQYQERRWSGAFINWLLTIKFDTQYAQFAYNDLVDQFIQTRARITTHLRKMRAMAKEQSPFDTLIPLLLTVPGIGFITAMTLVTEIIDMNRFHTLEKLASFVGLIPSITSSDETEINLGISPRRNKYLRTMLIEAAWKAVKIDPALTMKFNKLSRRMNRNKAIVRIAKILLSRIRYVWKNQKPYVLSVVN

SEQ ID NO: 485803 - protein, 387 aa, unidentified
MQKPHDNSKASPAAFMQDNTLIAVIELSLSNWLVAGLIPGVSREPLKKLEPNPEDLLKLLHGWRDEAIKAGRPITRIAVAYETGRDSFWLARWLRERGIDAHVIHATSVTVSREHRRAKTDRLDTAMLKRGFLGWLRGERGHCTVAIVPTMEEEDAKRPHREREGLVHEQTRAVNRMKSALIQFGVRNFNPKLRKASVKLETVRTPEGKSLPPNTIAALRRDMERLKIIKEQIKAIEQARLQQFEQKPEALANRMVYLLVRIYGRGLETADLLAHELLSRTLRDRKAVARYAGLTGSPDESGSKRREKGLSRSGNARVRKIMIQLAWRMVKFQPDSALVQWFKQRTENAKGSRKPMIVALARKLIIALWRYANDGVIPEGFRLHSAA

SEQ ID NO: 485804 - protein, 461 aa, unidentified
MNKSRPRGKHNKSAPQQMDWKALDVVHPDAAGIDIGGREHWVAISPERDAEPVRCFGCFTADLQGMARWLVEKGVRSVALQSTGVYWMPAFEILEQHGLEVYLVNAQHTKNVPGRKSDIQECQWLLKWHAFGLLNNSFQPSDEIRTARTIWRHRGNLVAEASSTIQRMQKALIEMNVQLSNVLSDLSGVSGMTIIHAVLKGERDAEKLAALVQPEVQATQEEIVKSLEGNWRPELLFVLRQHVELYRIYQEKIGACDVQLRRHLESLEGKVDLEAQPIGPKPKGKRGSRNAPQFDLRSELYRLTGIDWAQVNGIDVLTAQTVMAEAGPGLEEFASEKHFTSWLGLCPTNERSGGKILNRKTRKVVNRASAAFRNAARTLLRSQSYLGAQYRRLRTRLGAPKAITAMARKLACLYYRLIKRGQQYVDKGTAYYETRYREQQIRAVVKKAQKLGLQVLMPNAA

SEQ ID NO: 485805 - protein, 388 aa, unidentified
MIKYSLGIDISMKEFHACLSVIDNQQHIKIKASRKFTNNASGFKELHAWIEKHYKQQDIPLQIIMEATGVYYEQCAMYLYKEGFTVTVVLPNKAKKYLQATGLKSKNDKIDAKGLAQMGAEKKLEPWQPMDDFYYILRSLTRHYESLQNLKTNISNQLHADNAGMYANKEVGKQLKKLIETIGKQIEVMEQSIKDHIASEEIVQQKVNGVLKIKGVGVITVATVLAETNGFLLFKNGPQVVSFTGYDVIENQSGTHRGKTRISKKGNRHIRRILHMPAFNVVRYRVSPFVQLFERTLQKHNIKMKSYVAVQKKILVIIYSLWKNNRAFDKNYQNENTTRDEELVLPSRLSFAEADQVAQKNSSDLHQSYTRCPTVEVSSFAPSRLLQK

SEQ ID NO: 485806 - protein, 350 aa, unidentified
MIIIGVDYHPSFQQIAWIDAGSGERGEQRLQHNEEAEKFYRDLKERGVEVRIGMEAGGHARWFERLLAELQFELWIGDAAQISKQRVRKQKTDRQDAQLLLRLLLEERFPRIWVASLENRDLRQLLWHRHRLVQMRTRIMNQLQAVALNEGVRRRKGLWSKAGRVQLGSLALAPWATRRREDLLALLDYLEPRIAKLTAAIEQEAQKRPRARQLMTHPGVGPLTALAFLLVIGTPQRFSCGKQIGSYLGLIPSEDSSGDRRRLGHISKQGNALLRFLLVQAAQAAIRHDVDWRRQFLHLAMRRERRIAKVAMARKLAVHLYWMWRKGWDYQQFTKFGSHAGKPEHSRGVR

SEQ ID NO: 485807 - protein, 391 aa, unidentified
MPMYFVGIDISKYKHDCCIISAADQQIISKFTITNDKDGFEQLLTALNSLSNPEDIKIGFESTAHYALNLELFLENAHHSFMEVNPVLIKEYKKSTTLRRTKTDSVDCESIARWLITVEYKPHSKGFYHAYSLKSLTRLRDRLIRQRSFYLVKITNVLDHTFPEFKPFFNERLSKTALYLLENYGSAEKMARMNSASYDKLRCISRGKFSIQQFLRLKELAANTVGVNNSIFDLELNTLLTLYKSLSDEINTLETEIIKLIEEVHPHYMSIPGIGPISAAVIYAEYGDISNFSNPSQMLAFAGIEPGINDSGTESHGGRMVKHGSSQLRYVLLNACLPLIRFDLTFATYYEKKRAEGKKHRVAITHVAKKLIRVIYALERQDVDFNAQKLR

SEQ ID NO: 485808 - protein, 342 aa, unidentified
MEKVAVVGLDLAKQVFQVHGMDKDGRAVFSKTLSRDEVKPFFKKLRRCLVAMEASGGAHYWAREIAAMGHKSMLIPAQYVKPFVKRGKSDALDAEAIAVASTQKGMHSVLIKTAEEQAITTMMKARMLFVRERTAAINALRSLLAEFGYVVPVSKANIKKIGDILQSPKAQIPQAARLELRRILEHTQSLDARIGELTARLVKQVAQDEVSSNLTAIPGIGTIAAAMIRAFVPDPSRFKSARHFASWLGLTPRSISSGGNNRIGKITKQGNRALRYILVFGAFSVVINARARGVQSQWVMSLIKRKPFKVSAVAVANKNARIAWALMTKGGTYISPGEPKQA

SEQ ID NO: 485809 - protein, 351 aa, unidentified
MNYLGIDHHRQYSHLTLMDEKGNILQSGNVINSRSELEAFLEDVKDCRAVIEAGRSSYTLVDMLTELGVDVRLAHPKEVKSIAKAKVKTDKRDSRILAHLLRTDLVPEVYQRSKENRETQKILRQRAFYIGAMTRVKNQIHAFVVQQKEEIQQEAAREKNMFSERGQKMLLGLACPEPEKKMLGSLVKTVRHLEDRLRETTALVEEVYQGNRNAQLIQTVPGFGTFLSVLAATEIADVGRFADAAHLHAYAGVIPSTHSSGERSYHGKITKEGNRWLRWAAVEAVWPAIRADFDLRIFYERIKKRKGANSAKVATARRLLTIIYRMLKENRPYIPYKRNQSAAFGKFLTDR

SEQ ID NO: 485810 - protein, 344 aa, unidentified
MKEVITIGLDLAKNVFQVHGVDGSGDTVMRRQLRRSQLLPFFKKQRPCLVGMEACATSHHWARQLIELGHGVKLMPARYVKPYVKRNKNDAVDAAAICEAVTRPTMRFVAVKSAQQQSVLMLHRTRELLVRQRTMLVNAIRSHMAEFGIVAPVGVPRVKELFAVIADADDDRLPAIARACLEGLANQFLSLHEEIATAERRIHAWHRSNEASRRLETIPGIGPITATALAATITDPSVFTSGRELAAWIGLVPRQSSTGGKERLGRISKQGDQYLRWLLVAGAMSVIRHAKRRGTTSLPWLANLITSKPTKVAAVALANKIARIAWAVLRQGGTYQKPATAAAA

SEQ ID NO: 485811 - protein, 400 aa, unidentified
MNPVVGIDVAKEESEVQAFLDKAKPYGKSFSVKHNREELDELINILGEIKSLAGQMPVVILESTGHYHTPIIQCLEENEILYILLNPIISHQAKKSSLRKVKTDAFDAYQLCVLYYKEEFEPQKRRGIQLLNLRNLSRQQEILTNMYVEAKLHFHTILDQVFPEYRKVFGDLFSKVSLSILKEYPTSEKVLETGEEELAERIRGYCPTRSIQWAKEKVRKLIHSASQNPFQKVRYESHLINLNMYIDILFHYQGHLSDLESQMVSLANEIEEYKIIQSIPGIGEKIAATIISEIGEIDRFNHPKKLVAFAGVDPSVYSSGKFTATTNRITKRGSSRLRHSLYLAVLCGIRSSRNKKLKEFYDKKRTEGKPSKVAIVACINKLLHWIYALLKRKECFLDIA

SEQ ID NO: 485812 - protein, 457 aa, unidentified
MARKHKNRSRKIVRLDALKQINFNAAGVDVGDSEMYVAVPEDRDEQCVRVFGTFTRDLVSIAQWLKQCNITTVAMESTGVYWIPLFEILVEHGFEVLLVDARKIKNVSGRKTDIEDCQWIQQLHTYGLLNGSFIPDQNIRALRDMIRHRGNLLRYRASHIQHMQKILQLMNLKLTNVLSDITGTTGMQIIRAIVDGKTDPQFLSQFRDPHCRTPQIEIEKSLEGNYRSEYIFQLKQMLSLFDYYALLITELDHETEAMYKQLPSLINPKEHPLKSLKRNSKRKMRNSPEYDLRTQLYRITGVDLTQVDGLNSSTVQEIIADIGTDMSKWPTSKHFCSWLRVSPENKKTGGKVFYSYTKKTKNRANKALRMAAFALAKANCALGAFYRRVRAKHGGPAAITATAHKLARIIYKMLRDKVEFIDLGADYYEEKFKSRIFHNLKHKAKSLGFQLVPIPSQ

SEQ ID NO: 485813 - protein, 403 aa, unidentified
MNNVAGIDVSKGKSMVSVLRPFGEVVAKPFSIGHTGSELKELADYLKSLDGETRVVMEHTGRYYEPVARFLHDEGVFVSAVNPKLIKDYGNNTLRKVKTDKADSRKIARYGIDNWAELRQHTPMDTIRMQLKTLNRQQSLYTKTKTMMKNNLIALLDQTYPGVNALFDSPVREDGSQKWVDFATAFWHVDCVRNMSLTAFAERYRKWCKRHGYNFSQSKAVEVHAGAQDLIAMLPKDALTKTMVRQAIDALNAVSASLERLKAEMQALAAQLPEYPVVMAMHGVGDSLGPQLMAELGDVTRFTHRNAITAFAGVDPGADQSGTHEAKSTRVSKSGAPELRRALFLVMDCLLKTQPQDDPVYRFMDKKRAEGKPYLVYMTAGANKFLRIYYGRVKEYLASLEEN

SEQ ID NO: 485814 - protein, 424 aa, unidentified
MGSDTVWVCVGEHLSESPVRVFGTTTAQLRMSAEWMHSIGVDTVALEATGVYWVAAYEIYEQYGLRPILINSHAIRSFNGMKKSDFIDCQWIQLLHTFGILQPAVRAEANMIELRAYMRQRKTLTEQCSEHIQRMQKALTLMNVRLDQAVTDITGVTGMRIMRAILEGERDPARLAALRDRGCAKSESEITEALTGHWRDEQLFVLKQTIELWDFCQKLMRECDDHIEALMGTLPVRACPDKKAPQSKRRKNQVSFDGRFLLHERLGVDLVAIKGLDVLTILTVISESGMDLSRFPTEKHYVSWLGLAPGTRKSGHRVLSARSRRTTNRAATALRLAAQSLLKSDSELGAFGRTLRARTGAEKAITAVAAKLARRIYLSMQTGRVCEDRGASYHDQQHHERHLASLHKRARRLGMQLVPLQPCA

SEQ ID NO: 485815 - protein, 370 aa, unidentified
MAKSTPLYVGLDVHKDSIAVAHATGGRADPPVFVGAIGTRQADLDRLIRRLQGKAPELRFVYEAGPSGYGLYRYLTKKGWPCDVVAPSLIPRRPGDKVKTDRRDAVELARLLRSGDLTAVYVPSVEDEAIRDLCRARDAARVTLKDAKLRLKAFLLRLGLQYVGRADWNAAHKRYLAKVVCPTPAQQIVFQEGVRAVDEQVDRLQRIEAELRELAPHWCRYPVVEALQALRGVQWVVALTVVAELGDLTRFDNPRQLAAFVGLVPSEYSSGSSRRQGGITKAGNARARRVLVEAAWAYRHPAKVSLHIQQRIDQLPKVLQDLGWKAQVRLCKRYRRLVARGKHPNVVVTAIARELIAFMWAIARTIPVRT

SEQ ID NO: 485816 - protein, 318 aa, unidentified
MKTYHNFIGIDIGKFNFAVAVYNNKETREFENNPEGIAKFFECYNSKLRESLCVLETTGGYEIELLVALCNNNISVHRASTRKVKNFIRSFGNDAKTDILDAKALALYGAERKDKLQLFVPKTTNDIELYQLAMRKQDLIKMLIAEKTRLQGPNVEFTKASCKFMIDAISDQIKLIANQISSLIEGNMDLNSKKETLKTISGVGDNSASQLLILLPELGTLNRKQIASLTGLAPRSNDSGTYRGYRSIMNGRDNIKPILFMVAMAARRSKSEFKIFYEKLISRGKKKMVALTALMRKIIVIANAKIRDLISQSKVVEI

SEQ ID NO: 485817 - protein, 427 aa, unidentified
MEELTKAEPTGWGGYKYFLGLDWAQAHHAIVVLAVDGRKVLDVQIAQDAAGWQGLRQKLGDLAGADLSVVAATVETTCGPAVERLFELGCALYPINPKAGQRYRDRKVPSGGKSDRLDAWCFADALRTDGHAWRRLAPEDPQIQELRLLCRDERQLIRRRTALVNQLRQALQEYYPAALEAFEDWTIPGPWDFVLRFPTPAVLVKAGKRAWEKFLHSHHLYRRDTWDKRREIFARAAQFCGTEPVTRAKSLLAVSLAKELRTVHQQLRDYRERITSLFQAHPDHELFGSLPGAGDTLAPRLLSECGQDRARFEDHEALQCYAGTAPVSFQSGQIHVVRFRWACNRELRAAVHLWADRSRKSCTWAQVYYEHKRQEGKSHACALRCLGQRWLKIFWKMWQTRQPYDEQVHTRNQVRHGSWVLALAPAK

SEQ ID NO: 485818 - protein, 412 aa, unidentified
MGSLLQRSLPTATLVVAIDPGKAQHRVWLSTDEAGLVGEPLSLPVLRPGLEELDRLVREHAGASGALFAVEATGALHRSWVVELNRRFPDCVRVFAPSETAAARAQLGSRRFKTDDRDCAALTYLARQGYGRSVPADVHEALQSAVRHRRSLVAERKAAQQRLHDQVNALCPGLSAPPGHGRKLDLFGVTGQAVLDCLLEFEGRPAAARSLVARALGRLTRADAQFWAARWKDCLPPSADVAARIDRLGRSVERWRALCADIELVDTDIAVLLAGTEGQVLTTLPGVKTARAGAFAAFSMPIARFPSAEHLYSATGLVPGSYESSSITRRPGISRQGLPEHRDALMNIAWGLSQYCPPFIQRREELQARKMKPMQARVVLARHACRLAFRMMRTQEEFDEQRYRENRHQPGR

SEQ ID NO: 485819 - protein, 476 aa, unidentified
MNSKTKRANNQVNSVMNIQEQREMVEKANRILSEMRSFTWRDLETQGKFSKNEKLSFISDDMLIVGCDIGSETHYVRAIDTRGRELSKKALAFENDAEGFQKARDWAVQLAAANDKKQIVLGLEPTGHYWFCLAAWMISNGISVVQVNPYAVKQTKELEDNSQQKDDRKDPKLIANLVKDGNYGMPYLPEKVYAELRRLSMFREQLMEDRNRHMNRLHREMKIYFPEYKDAFGKIDSAFCIAVLKEAPFPEDILRLGAEGLRDIWHKAKLRGRGYSRAEEIVKYAETSIGLEEGTAAGKEAVRWFAEKITELDEELAEIENKLEGKCGEIPHAENVLEIPGIGGKILAGILAEMGDITRFDDVKEIQKLSGLGLVSCSSGKHKGETRISHRGRKRLRYWLFQAARSAVAHGEEYKWIHAHYTTRAGNPLQKKQSLVVIACKLLRVIYTMLKTGKKYDPEKLLKDIRYPESVQSAAA

SEQ ID NO: 485820 - protein, 408 aa, unidentified
MEAIVERCCGLDVHQATVVACLLVGSAERRPRKVTRTWGTSTSELEELRAWLLAEGCTHVGMESTGVYWVPVYNVLEDCFELVVGNAAHIKNVPGRKTDVKDAEWIADLVRHGLIRKSFVPPKWQRALRDLVRYRRKLVESETAERNRLLRLLETCNIKLSSVASDVFGVSGRAMLRALIEGTATPEHMAKLARGSLRRKTDRLTLALRGQLEEHHRFLLRLQLERVERIEADIAVVMARIDQALAPYLEQLERLTQIPGVDRIGAATIIAELGIDMSIFPTARHAAAWAGVSPGNNQSAGKRAGNAKRRGNVHLMTALVQAAFGASRKKGSYLKERFWRLKARRGERRAAMAVAHSILVAAYEMLRRHAQYRDLGAAYLDHIARAVTEKRLVRRLEALGYRVTLQTA

SEQ ID NO: 485821 - protein, 370 aa, unidentified
MRNYASRALASGPSHVSFMESDMNILAIDLGLTKSVACLLSTQTNEHTFRTVPTNPEAFRQLIVETRAERVVFEVCTIGGWVRDLCEELGCPFEVANPSHEAWRWRNVKRKSDRLDALKLARLSAMAQLPKVHVPARDVREWRSLISYRHTLVRRRTRVKNHIRAVLIAHGIRLGSGMRGWTRETLDRLRMMASQAEPSAMWKFELGIELDQLDALATAITRTEERLDAIAGGRPGVALLRTIPGVGARLAELVVAMIDDPRRFPSSREVASYAGLTPTQYQSGDADRRGRISRQGNPLLRAMLVEVSWIGLRYNPTIRALYERTCRKSMSRRKIAIVAVARHLLVWAWAMLRNGTPWTPRPRQGVVTTG

SEQ ID NO: 485822 - protein, 312 aa, unidentified
MEKISHGGIDVSKDRLDVMLLPDRRCFSVPNNASGWVELIERLRDLTIVAMGIEPSGGYERGIIRALLAAGLSVRRINPNKLRQFARARGVLAKNDRLDAQLIAEYVAIMPTRAVQRDVAAERLAEIVTMRRQLCDEHVTVQNQAAHIEDALLRRINKRRLTRLKADIALLDKRLAEMVRTDPALAHRYELLTSMPGVGPVLAFTLIALLPELGQMSRKQIAALVGLAPYDFDSGKLRGHRSIYGGRLPVRNVLYMAALSAARYNPALKAFHKRLAAADKSSKVVIVAVMRKMIVTLNAMLRENVAWQHGAT

SEQ ID NO: 485823 - protein, 412 aa, unidentified
MDGGIIFERCCGLDVHKLTVVATVLVVEGGATRSTTKTFGTTTKDLLELSDWLAEEKVTHVAMEATGVLWKPVWNILESRCIVLLDNPGRLAKVPGRKTDVTDSQWIAHLLQVGHLHGSFIPPLEIRELRDLTRQRVQLLNDRTSAINRLHKILQDANIKLSSVASDIMGVSGRAMIKAMIAGENDPKTLAELARQRLRGKIPQLRQVLHGHISDHHRFMLNFHMDQIESLEGLIERLESRMDEACRPLGREIRLLMTIPGVSLRSAQSILAEIGADMSRFASARNLASWAGICPGNNSSANVKKRGRILMGNHWLKRVLAECAWAAARNNDGYLRAQFKRFAPRKGKKRAIIAVAHSILIAIHHMLSEGVPFIDLGADYFDQTNKPQLIRYHTKRLEQLGLKVTLESAASA

SEQ ID NO: 485824 - protein, 355 aa, unidentified
MTMLAEVVDAVIGIDTHRDSHEVEIADPAGRPIAVMRIGNDSAGFARLLAAIAEVAPGPRVAVSVEGTRSYGVGLTRALAAAGLLVIECEQPRRKQRRGKGKSDPIDAHLAVLAALRLDAGKLPVPRADGDREALRILLVARQEITEASTAQAGRLRALLLAGDDTDRRAARATLTGKALATLAGREIPVQASREQAVRQAEIRRLALALDQARQQLRDNRAQLLAIVEDIAPGLTSRFGVGPVSAAQAIVSFSHPGRCRSEAAYAALGGTSPIPASSGQTIRHRLNRGGDRALNRAIHAIALVRMRSCPRTRAYVARRTAEGKTPREIRRCLKRYIARELYRYLTRTMNPPVGP

SEQ ID NO: 485825 - protein, 423 aa, unidentified
MHQPLIITIAVERMFSMDVVIERACGMDVHKDNITACIMTSEGKEIQTFSTKTVFLLQLVDWIKQHNCTHVAMESTSVYWKPIVNLLEAEDIEFLVVNAQHMKAVPGRKTDVKDAEWIAKLLRHGLLKASYIPDRNQRELRELVRYRRSIIEERARQHNRIQKVLEGANIKLGSVVSDVLGVSARDMLDAIADGEEDPEKLANFARRSMKKKKEELELALKGYINSHQRLMLKTILGHIDFLTEQIEMLDKEVANRVSSHQEDVARLDSIPGIATRMAEQILSEIGTDVKKQFPTAAHMCSWAGLVPGQNESAGKRKAAKTKKGNKYLRSALTEAAHSVRGSKNYLGALYRRTASRKGKKRAGIVVAHAMLRISYYLLTRKEMYVDLGEDYFDKQRQQSIVRHSLRRLESLGYTVTLQEPEAS

SEQ ID NO: 485826 - protein, 320 aa, unidentified
MNCIGIDVSKQTLVTYDGKKERVFPNTTGLAELVSFVRRKGKGVAIVFEPTSTYSRRLETLCRQERIRCCYLNPRVIPHLREVAQERSKTDRSDAELLYQYGQEKAKAEARLLQRDPIAHALSAILSCYKAAQKARVTCQGVLEALRHDPDTPPELLTELKEQIVHLKAWEKKELNRAEGVVRADKEASSALGQLLSICGVGPVTAITLIGLFRRYPNTNRKQVVALVGLDPMERQSGSSVRGKPRISKRGSPEIRKLLYEVTLPAARYNPSIKAVYHRLKAKGKPEKVARIAAARKLLLMAHAIYKSRESYNAIKGETT

SEQ ID NO: 485827 - protein, 342 aa, unidentified
MTKPGNRFPLLPFQTVDRASGTQTREETPCLRTQDISKSALDVHYAPSGTYRRYTSDGAGVAALIESLKPDKPDHIVTEPSGGYERRLLAALQAGDWPVSLVNARQIRDYARSRGILAKTDKLDAAVLSDYGATIRPASSPVLSGEVLRLKALIRRREQVARFIRQEKSAFEHIHEEDLRKMADKHLEYLEGQKEELDGLIEVAMNKADDMKHKAEILRSCKCIGLQTAAILMADMPELGTIDARKAASLAGLAPRNRDSGTWRGQRSISGGRASVTRALYLAAVSASRNNPDIKAYYTKKRNEGKPPKQALIACARKLLLTLNALLRDGRMWTAEYAPADA

SEQ ID NO: 485828 - protein, 381 aa, unidentified
MAATREDEYSALAPVLYLAFELGNDFWKLGFTIGMGQRPRERNIGARDVDALEREIHLAKKRFGLPETAPVLSCYEAGRDGFWLHRYLLEQGIQNLVVDSSSIEVNRRQRRAKTDHMDVGKLLGQLIRYRSGERKVWSVVRVPSPKDEDDRQLHRELSTLKKERTRQINRIKGLLAGHGLRLPVKADFLQRLESIRTWDGSPLLPRLQARLVREVERLELVGRQIQELERERVREIRHSPDPKVEQVRALLRLNGIGLNSSWQFIMEFFGWREFRSGKEVGGLSGLAPTPYQSGSSTREQGMSKAGNRHIRAMAVEIAWGWLRYQPDSALTRWYQERFGAGSSRVRRIGIVALARRLLVELWRYLETGAIPEGAVLKTRLI

SEQ ID NO: 485829 - protein, 406 aa, unidentified
MLDVHKAQVTACVRVPDGDGGRRQEIREFRTTTAGLITLADWLRSWAVTVVGMESTGIYWRAIYYLLEDEFECQLFNARHLRHVPGRKSDVQDAEWGCQLIEHGLVRTSFVPPRPLRELRDLVRYRKAKIQERGREVQRIEKTLQDAGIKLSSVASEVLGKSARLMLDAMISGTHDPALLAELAKGALRKKIPALREALQGRFTGHHALLVGQMLAQIDFLDETIATLSERVEELTRPFSREIELLDTIPGVDQRAAEMLLAEIGPDMSRFPTDAHLASWGGMCPGQRESGGKKHSAATRKGSKWLRGTLTECSKAIVRTKGTYLSARYHRIKSRRGHAKATVATAHKILTAAYHVLDKGVPYNELGEEFFYRRDTENTERYKRRLAHQLERLGHQVTLEPLPEAA

SEQ ID NO: 485830 - protein, 314 aa, unidentified
MTTQAMVVGVDVAKDRLDVAVRPSGETWSTANDEAGISALVARLRPLGPALIVCEATGGFERAAIAALAAAGLPVVVANPRQVRDFARATGQLAKTDALDAGILALFAERVRPTPRPLPDAAAQLLDAVLTRRRQLLEMLVAEKNRLGFAPKPLHRGIQAHIRWLERQLEDVTKELASLIEASPVWRAKDDLLQSVPGVGPIVSSTLLGELPELGTLSHKQIAALAGVAPLARDSGTLRGKRLIWGGRASVRTALFMAAMCGRRWNPALKVFYERLKAAGKPTKVALIACARKLLTILNAMIRDHSRWNVQYSC

SEQ ID NO: 485831 - protein, 337 aa, unidentified
MKDIIYDHYIAIDWAATNMAIARMTKKSNKITAIDVPSDIAELQFYLKNLKGTKILAIEETNTSQWLYTELLGYVNKIFICDPHRNSLLSEGPKTDKIDAIKLVQLLKAGLMKEVFHSTDKFIYLRRIVSGYEDLIKAGVRVQNQRYALLRVCGKSGYEKNDVKLSSRDDQYVLESLDRQIQNYAEEKKGYEKEFTRLSKKYSEISHQKSIPGIGLINAVKIVARIVTPYRFADKGHYLSYAGLIKHEKISGGRSYGKKTPRYCRTMKHVYKSGVFAAIGGNNPINDYYVYLLREKGYPEYQAKHRACRRLAIMSFGVFKSGKRYQPYRKKDLKKGN

SEQ ID NO: 485832 - protein, 401 aa, unidentified
MTTLRDNGERVKRFRELKGTLRSNRQRLLVGLDIAEGEHVAHLRHAHTRVVVPSLTIPNTTRGFTQLWAQIQQAQRATGCREVVVALEPTGTYHEAVAAFLDAQGADVVLVASSVAYWNRRTQDGTYDKNDPKDAANCADLLEQGKVLFYSQPDGPLAALRRLVRVLRRARGELAACKARWRTTLRPALGPMGEPLPQRLWAELPAVLQAWTPAAPGRPAVAKGRLPLGLATACTDLAAQVAAVHARITAIEAALTPLAERLPAYGLLRTIPGVGPTVAAILLAEIGDVAWFTQFSQLRKLAGLDIIRVQSGKRTGQWRISKCGRSLLRWALYHAAVGLARTTAGRARLAACKAKRRGDRYAGFKAITELAAKQLRVVWGVWRSGTPYDPRRAGGLQRQPR

SEQ ID NO: 485833 - protein, 368 aa, unidentified
MSDIQAFVGLDVHKETISIAVADAGRDGEVRFLGEIANTPEAVAKLARKLQRQHGSLEFVYEAGACGYGIQRQLAALGCTCRICAASLTPRRPGDRIKNDRRDSITLARLLRAGELAFVWVPDPLHEAIRDLVRARHAAGIDVRRARIRIQAFLLRNDMRYEGKAWSHRHRMWLTNRRFPHSAQQIAFQTYLNALEHEERRKAELEAQIRAVIEQSPLAVLARSLQALKGVGPVVAATIVAEVGDFTRFRHPRQLVAYFGLAPGEHSSGGSVRPRGITKAGNSTARSVLCEAAWNYRTTPKVGQWMKEHRPKQVPQEAIDIAWKAQLRLHKTYKRLTSRGKRTVVATAAVARELLCFMWSIGMVVQAA

SEQ ID NO: 485834 - protein, 363 aa, unidentified
MNGERKARGKRRYVALDIHKHYCVIAAVDKDGQIVLHAVRVEHQDLEEWAKKNLQGSDHVVIESTTNAWHVFDLLSPLVERMVVANSFKVKQIANARVKTDVRDTMILARLLAANLVPTVWVPPKHVRELRQLLAQRREMVETHTQVVNRMHSVAHRHHLKHERGKRFNEKNTGWQQDKRLSGMEQFQLKLEMENRAYLEKQIERIGKEVAKLSHQKPWAESMTYLMQLPGFGVITAMTVLAAIGEIERFETAQHLVSYSGLVPGLEQSGTKKRGKGITKEGRKELRWALVEVAQRAVKSDPYWKKRFEAMQKRMHRNQAIVAIARQILEVVWNVLTRRQPYRHFSEERIALSTTIRNGHGDN

SEQ ID NO: 485835 - protein, 345 aa, unidentified
MMIIGIDAHKRSHTAVTIDGNGRQQATKTVGTTTQDHLKLLKWATALGGERLWAIEDCRHMTRRLERDLIAAGESVVRVSPKLMADVRDSARTYGKSDPIDALAVARAALREPDLPVALLDGVERELRLLIDHREDLIAERTRIISRLRWHLHELDPGWLPPATVDRTSAFTVITAHLDALKEDGLVLRLSRRLVQYLQVLTLEINALTAEITERVTIVAPSLLAIVGCGPLTAAKILGETAQVRRFRSKDAFARLNGTAPIPVWSSNKQRHRLSRTGNRQLNAALHRIAMTQARMHPPAKELLARRKAGGDGGMEALRILKRRLSDVVYRAMLTDETQSTFAAA

SEQ ID NO: 485836 - protein, 383 aa, unidentified
MTLDRHFRQCVGIDVSKDKFTACLQMYDRASDVGCHTMSIDFDNTKSGFNQFVKWSRKEAVKGFPLTYLMEPTGVYYEPLAYHLHKIGQTVYVVLPNKARSFCEAEGIKTKTDAMDARCLALMGCTSRKLKPWSPPAPIYRELRQMTRFHADLSQIMTSVMNRMESLNHMEEADKTVRKNCQKLIDEIDTLMENNDKAIMQKITEDKELEARVKRIAKAKGLGVTTVVCIVAETEGFHLIENRKQLTSYAGLDVRAKQSGREDPKHAISKKGNAHIRAALYMPALVAVRYNPQIKTVYGRICQKHPKQKKIGVTAAMRRLLLLIYTLWKSGEEYDPMRDKTHTHQKKMKEEDTELEYEPEDCIGPKRDPADWNATDEHGNPPF

SEQ ID NO: 485837 - protein, 355 aa, unidentified
MTSSKYIGMDVHKETISIAVMSAGGKSVMECVIETKASTILQFIRGLRGDLRLTFEEGTWAAWLYDLLKPHVTEVVVCNPRKNALLKEGSKSDRIDARKLAELLRGNHLKPVYHGEHGVRTLKELARSYLTITQDLTRVRNRLKAVYRSWAIPCTGARVYAPRHRSEWLGKFSEAGVRRRAEHYYQQLDALRPLRQEVRKDLLMEAQKHKPWKLLRQIPGIGAIRAALLMALLQTPHRFRTKRQLWTYSGLGLETHDSAQYCVVEGQLRRSKKPLMLRGLNQNHNHDLKAIFKGAALEASSATGPLHDFYEALLAKGRKPSMARLTLARKIAAIALIVWKKEVSFDAKYLKQQAA

SEQ ID NO: 485838 - protein, 333 aa, unidentified
MPDYVGLDVFLDQTSLCVLDAAGQIVRETKLDTDPDAIAEYLGQAALVIERVGLEAGPLSQWLHAGLVAHGLPAVCIETRHTKAALGAMPVKTDRGDARGIAQLMRTGWFKAVHVKTQQAQEWRLLLTQRRLLVNKLIDVEAEIRGTLRGFGLKMGRVGRAGFAGRVRELLADRPSLLRVVEPVLLVQAMLLSQREALHRMVLQAVREEEVCRRMMTVPGVGPITALAFRATVDKAERFAHSRDVGAHFGLTPRRYQSGETDRSGTITKTGDALMRHALYEAATSMLVHATKPSALRNWALVVAKRRGLQKARVALARRPRASPCRRVASDVA

SEQ ID NO: 485839 - protein, 356 aa, unidentified
MSRDVKYIGMDVHKEAVVIAVLNSSGKLVMESIVETKASSILQFIHGLRGELHVTWEEGTWAAWLYDLLQPQVAQVLVCDPRRNALLKEGNKSDTVDARKLADLLRTGMLRPVYHGEHGLRTLRELARGYQTINKDLNRVMNRLKALYRGWSIPCAGTQVYAPRNREEWLGKIEHAGVRRRAELLYQQLDGLQALRRTLRPELLAESRKHKAAKLLRQIPCIGPIRAARLLALMQTPHRFRSKRQLWTYSGLGIETRDSAQYRYVHGQLQRTKKPQQIRGLNQNHNHEMKEIFKGAATRASCGVGPLRDFYVALLAKGMKPEMARLTLARKIAAIALTLWKKEERFDAEQLKPQAA

SEQ ID NO: 485840 - protein, 361 aa, unidentified
MEEIIDRNNALYVGIDVHRYEHTAVCADRFEEEKGSLSFVNTPIGIQQFINWLSAIGESNLTKIIGVEGSNGNGRFLTESLSQDYSQIYEINPIRTKQRRNFGTRGDKSDAVDARLIIEVLTRKLDELPRITIQDRSKTMTTLEQLVIFHEDLIFQITRLKNQLHLLFHEIEPEYQSHRGSSFSVRILDVWLKKCGKKVILSDPKHIKYFMILEKIRQLRRLKRTSKRVDGEMKLLINQIKPNLLTFPGVGIVTAGKIITAVKGIDRFRLDTFIKYAGIAPVEKQSGRNKKHKQNKCGNRQLNNAIYTVALTQLRGHSKAKAYFQKKIAEGKTKKHAIRCLMKRVACIIYGLLRSRENYRG

SEQ ID NO: 485841 - protein, 397 aa, unidentified
MATSIFRENFPGVARLQEAVDAAAFVIGLDLHKQTVAICVVDRLHPTEPVLQRSRVKNTGLAALLTSFVGPKVVVCEAAYGWQLLERALRGLPDVTFIPYDARKTAAWIASSGVKTDRLDAQVLCHACLTRGTPHLAVFVPERSDQECVRLVHHRDQLVGQRRRTFQRLRALERDTGPNPYTGEIQDATELTRLLEEDLRTELTGIQTRIAAVEDVLDHLSADDAIVRRLRTIPGVGRITSFALRHKVGTIARFRSPAHLASYFGLAIRERQSGDTKVKGRIAKAGDRLIRTLLVQGAQSVRSRRPDLARLYFPNLGQAELMADRRHANRVVIALARKQLTLVWQLWTHGVDFDLEVYKARRAQALAAAVAPAATCPPLSLTAELGTRSALQGRGTV

SEQ ID NO: 485842 - protein, 358 aa, unidentified
MQPEASREAKKMKYVGVDIGKWKCRAAMMDPEGTIMEEFTFPNDAEGIRNLASRLTAEDRVVMESTGSVWTTLYNNLEERRIPVTLANPLKTKAIASARIKTDKVDARILAHLLRSDLVAECYVPPRELREIRTLVRHRAGLVRMRSTVKNRVHALLDERGQWCAYSDLFGKRSLKWLRELELGSLDRLMLDNHLCHVESLNAQIGRVDVEVRRRASLDEDARLLLSLTGVDVYTALLIRSQIGDIGRFPDYKRLVSWAGLAPSLHQSGSVEIHGGVTKQGSKMLRWIMVEAARSAVRHDERMRRFYERVKRRRGDGKVIVAVACKMLKIIWFMLTRREPYMSRNERRYGVKLKSLEG

SEQ ID NO: 485843 - protein, 349 aa, unidentified
MQIKSQIRSIGIDLGKTTFHLVALGVHAQVLVRKKFSRPQLLAYTANLPSSLIGMEAGVGSHFLGRALREQGHQVRLIPAQFVRPFVKSNKNDYCDAEAIAEAVERENMRFVPIKTEDQLDLQAVHRVRDRLVARRTSVINQIRAFLLERGISFRKGPASLRRQMPEILENAEAKLSTSMRRLLDFLWQEWKGLQAQIESLNADLEHIASSDPSCVRLQQIPGVGPLVSTAVVSAIGNGAAFKKGREFAAWLGLVPRQWSTGGKAKLLGISKRGNPYLRKMFIHGARAAVLRVKREGSTLGKWMSGLETRAARNVVIVATANKLARISWAVLASGNDYHPMHKAAVFSN

SEQ ID NO: 485844 - protein, 426 aa, unidentified
MPFAALDLHKKIVEAVLLDEHGAPAWRGRFPATRPALEQFARAHLTPQHRIALEATTNTWAVVAILEPFVAEVVVSNPLRTRAIAEAKIKTDRVDALVLAQLLRSDFLPRVWTPDDATRRLRQSCTERANLVADRTRLKNRIHSLLHQRLIEPPSGDLFQPSSRAWLVQLELDPLGRQALDRHLRQLARLEEELSALTDSLAVEAHADARTRLLMTLPGVDFPVAQTLLAALGEIDRFPRADRAAAYLGLVPSTHQSAAHCYHGPITKQGSRHARWMLVQAAQTVAAHPGPLGVFFRRLQKKKNRNVAVVATARKLVTIAWHMLRRNEPYRYAQPSTLETKFSRLRIRATGQRKPNGSVKGASRPASYGTGTPTRAVPSLDQVCAAAQLAALPPAAPGELRMLDESGTAAFAQAIRKPKRVPRRSA

SEQ ID NO: 485845 - protein, 521 aa, unidentified
MPRPRTARPAERRKAFVLQKPNGPLAPRVQAVGPEHFGVVAIDCAKARSRYFLADFYGRTLLEPTTLPHSRGDFQAAIDRIRQAEQQHHLADRVVAIERTGEYHRPVQHAFRQAGFETRLVHPFTSKQYRQPADPDHKTDDTDLAAIWRAATQGFGLLEPTWPDAYVTLQLLRRHRRDLVDKSAILQCQIREVLHAAMPGYAECFCHRWDDSPAPLLFARHTTSAEAVRQAGLAGLQQLAAQAGVHCRRETFHKVLAWAEQAPPDAGHTRDRRRILTALDDDRLAKARQILELERTLAHGIVATPYALLLAIPGINVVTIADLAGELGPIAFYRDATAITGRAGLMPSRYQSDRVDGPHGPLRRRGNRRLRAVLMQTADNLVQCNHYFKARAEQWTRAGKDPRWVRVKVAKSFSRLAFALVAGRQLFPHPCCQPRHYVVGKLLAFHRERGTDLPALRRDLEAAVDRLPAPSCAAEAEPLQQELDALGRRRGPQPLAEIIPLVLARLAGRVVQSESHEGAGP

SEQ ID NO: 485846 - protein, 358 aa, unidentified
MSNLKYSIGIDVSKKDFHCCLSVIDTEQSVKVKSTHKFTNSTWGFKLLIEWVRRNRKEDLQVFCVMEATGVYHEQLAWYLHDKDFSISILLPNKAKKYLQANGAKSKNDKIDARGLAQIGAEKKLDLWIPPSRKLYNLRSCTRQHQSLSEMHSAINNQLEAITHSQFQSKDIIRQMKKTMRLLEQQINEMDKIIEEIVKEDEVLNFHYKNISEIKGIAMLSFAVIAAETNGFVLFKDAGSLVSYAGYDVVENQSGNHVGRTKISKKGNSRIRRILHMPALCAVREDQPQFKNLYQRVYKRTGIKMKGYVAVQKKLLVMAYYLWRKKMKYQADFDYSEKIIAPEKSEATHDKIPEGRFH

SEQ ID NO: 485847 - protein, 336 aa, unidentified
MDTSKHFFQLHGVNAAEKVVLRKKLRRKEMVAFFKALAPTVIGIEACGAAHYLARLLGSFGHEVKLIAPQLVKPYVKRGKNDGADAEALCEAMSRPSMRFVPVKTAEQQAALMMVGLRDRLIRNCTQLSNAIRGYAAEFGFSAAKGKAHLVPLLERIQADESVPVLARELFTAQAEEYARLQAQIDAVDVKLLAWHKADESSRRLVKIPGVGPIGAVLLMLKTPAPELFRSGRQFAAWIGLTPKDHSTAGKVRLGGITRAGDEALRSVLVVGATSVIQHVRRGGRGSPWIVNLLKRKPPKLAAVALANKMARVAWKLMVTGERYAAKSVPSLANAT

SEQ ID NO: 485848 - protein, 391 aa, unidentified
MTKPKTKTVNDFSRCLDPLDMDATLIAVIEMSQSSWLVAGIVPGVERQPLKKLAIDEHALLGLLNRWRAEAEKNGHRITRIAVAFEAGHDGFWLARWLTAREVEAHVIHASSVAVTREHRRAKTDRLDTELLKRGFLGWLRGERGHCKMVAVPTLSEEDAKRPSRERETLVGEASRIITRIKSAFVRLGIRSFNPKLKAAAARLETLRTPEGEPIPPNTLAALKRDLERHRIVKKQIRELEQTRLENLAQAPATGPNVMVLLLARVIGIGVETADMLVREVLSRTMRDRRAVARYAGLTGSPDESGAKRREKGLARSGNARVRHGMIQLAWRFLLFQKDSALAQWYRQRTANAPSTRKPLIVALARKLLIGLWRFARDGVVPEGVRLRPAA

SEQ ID NO: 485849 - protein, 338 aa, unidentified
MKSWSVAVLSQHSVLKKFRQDPSPESLHKFLTTHYPGADYHSVYEAGFCGFWIHENLTGLGINNIVVNPADVPTMSKEKLRKTDAVDCGKLARELRSGTLKGIYVPDVATLEMRSLIRLRNRIVKDTTREKNRIKSFLRFHGIDIPEEFTRHSVGNWSKRFLAWLREVSLSTEYGRQALNIHIEQFVRLRGMLLEQTRILRALSRSEVLKEPIRLLASVPGIGITTAMSLAVEIDDIHRFSSADALASYIGLIPMCHSSGESQGDGNITVRKHAMLRCYIIEAAWIAIRKDPAMTLAYEGYRKRMNAQKAIVKVARKLVNRIFFVLKHGQEYVPCVVN

SEQ ID NO: 485850 - protein, 417 aa, unidentified
MNTMIMQPYAAFVGIDWADTKHDVCIQSADSSRREFAVVPHKVEEIDEWARSLHRRFPGPIAIALELSKGPIVYALQKYDYFVIFPINPSTLAKYREAFQPSRAKDDPTDAELALDLILRHPERFEPLQPQSVEIRTLAALVEQRRRLVSDRVRLTNRLRNTLKQYYPQTLEWFDRINTKLFCDFIERWPTLTQVKRARATTLTAFFRAGNTRNPALLETRLVSIRSSQHLTLDEAVIAPNKLHALMLVGMLRVILDAIKTYDQTIAELAPQHDDYDLFSSLPGAGPSLAPRLLVAFGEQRNRFKNAAELQKYSGIAPVTERSGTKHWVHWRWRCPNFVRQTFVEWAAQTINKSYWAGEYYRQQRAKGSGHQSALRALAFKWIRILYRCWQTRTPYDEATYLKALQRRGSPLVAKAV

SEQ ID NO: 485851 - protein, 356 aa, unidentified
MKNTKLNFSGQNIYVGIDVHKLSWDVTIIINGMKVKKLSMNPKPQELYNYLTKHYPQGEYYSVYEAGFSGFWSDRELRTLGINNIVVNPADVPTKSKERRTKTDRIDSGKLARELSVGHLDGIYIPEEKAEALRVLVRLRRQLVTDQTRQKNRIKSLLLFLGKRVPEEVEEKHWSKRYITALRNLSIKQPESKRALVELLDNLESLRNQIASVVKQLRVYVAKDKEVSKIITLLISIPGIGFVLAIILYSEIIDINRFGKLDELVPYVGLSPAVYSSGEKEINLGLSKQKNKYLRNFLIESSWVAVRRDPALQMAYGKLCRRMSGQRAIIRISKKLLSRIRCVWSNQQPYVFSVVK

SEQ ID NO: 485852 - protein, 337 aa, unidentified
MEYFAGLDVSMEETHVCVVTRNGTVMHEARVPSTPASIAAALAQAPACRWVLFETGRMAPMLYHGLSRLGLPVVCVESRQAYQALKSLATHKTDRNDARGLAHLARTGFFKPVYVKSLPAHAVRALIIARKKLVGQRVTLENQIRGLAVVFGVRLPRALSPAFIRQALQASEGIPGLSAAMRGLIAARAAILAAVVAIDDDIRKMTRASGACRRLMSIPGVGQLTALAFTAAVDDPGRFRRSRDIGAYLGLVPRRYQSGEVDYMGGISKCGDRRVRTLLYEAANVMLTRYKGPLKLKTWALAIAKRSTMRKARIALARRLAILMHAMLRHGTEFRPA

SEQ ID NO: 485853 - protein, 318 aa, unidentified
MDAPCVGLDVAKAWVDVCLVPGDGRPPARWRIEQTVTAWTGLVRRLTPLAPHRIVLEATGGYEQGLADALAVADLPVVVVNPFKVRKYAQATGQLAKTDRLDAALLARYGQQVEPPLRPLPSPAQRELAALVTRRRQLVAQQTAETNRLEQATAAVRASVARMHAWLAEELATIETAIAELLAADPHWQRQRAVLESVPGVGAVVASTLLAEVPELGQLNRRAIAALVGVAPFNVDSGVWRGSRHTWGGRATVRSVLYMAVVSGRRYNPLVKAFYERLVARGKPGKVALVACMRKLIVLLNALLRDGVPFDPARVVTT

SEQ ID NO: 485854 - protein, 454 aa, unidentified
MGKPRVVPDEDHEVVYERVAAVDVAKASGVACLRAPDPARPGRFASRIWDHVPATRARITELGRELLRCRVQVVTLESTSDYWRIWYYVLESLGLAVQLVSASQAKNLKGRPKTDRLDAMWLARLTQHGMLRPSFVPPAAIRRVRDFTRARTDLVAERTRCLQRLEKLLEDAMIKITSVAKDGLKAKSVVAMVQALIAGERDPRALADLAKGPLRGKRDALAEALDGLFDSHHAVITQMLLGQVAFLDQQITQMEEQAITALAAVPQSWGTDPTGETGPGCGTSAGSPVLAAARRLAEIPGVSEWLAVVIIAEIGLDMAVFPDPAHLVSWMGLCRSAARSGTRNGKGKPKKGNSYARAAAGQAAIGAARTATFLGERYARIARRRGGGIAQAAVARSIMIIAWHLLADPAARYHDLGADYCASRISRDKKIRNHIRGLHALGLTVTITAAGPAA

SEQ ID NO: 485855 - protein, 450 aa, unidentified
MQSKDLNSGVFELLRPNAAGIDIASQMHYVAVPSDRDEQSVRKFGSFTDDLHEMARWLKTCKIDTVAMESTGVYWIQPFLVLEEYGFDVFLVNARHIKNVSGRKSDVKDCQWIQQLHSYGLLNKSFQPEDLTRELRTYVRQRKSLTQGYSTQVQLMQKAFDQMNIKLHNVIADITGKSGLLMIEAILQGERNPHVLAELTDSRIKASKEDIVKSLRGIWRQDNLFELKQAYEIYQVYRDKIADCDKQIEAVLKQIADKANNAENTTRDNNRRKANGKNKFNFNASSYLNVISGVDLTEIFGISELTVAEIVSEIGTDMSKWATEKHFTSWLNLAPNTRTSGGKRLKSKPMKKKNKAGQAFLIAASSLKASNNWLGEFYRRIKAKNGSPVAIKATARKLAIIFYKMLKDKVDFNPLPLEEYNQYFKERKLKYINKQAVNYGFKLVPVEFVS

SEQ ID NO: 485856 - protein, 340 aa, unidentified
MMRLYAAIDLHSNNSVLAILDERDRVVQERRLPNEMPRVLTELAPYRDDVQAIAVESTFNWYWLVDGLMEAGYTVKLVNTAAVKVYEGLKYTADEHDARHLAHLLRLGVLPTGYIYPKEERAVRDLLRKRAQLVHCRTAQILSIQNLVSRNCGEGISTDEIRKLDEVAIKENCGGDGMRMLAIKSNLAVLRCLDEQIHVLERTVLARARLRPEFKKLLTIDGIWNILAMTIMYEAGSMERFAEVGRFASYARCVGSSRWSNGKKKGEGNRKSGNKYLAWAFVEAAHFAVRYNERIRRFYERKKAKRNVAVAVKAVAHKLARACYHVLKDQVPFDEARAFA

SEQ ID NO: 485857 - protein, 345 aa, unidentified
MVDGTAERQWVGIDLHLHRSVICRIDDQGQEIDWVRIDNDPKALVRAVRKAGRKAPVAIEATYGWYWAVDALMAAKFEVHLAHPYGMKAMRPRRRVKTDQRDARELANLLRLGSLPEAYIAPPQLRELRELVRYRMVLTKANTAVKNGIRALLAKHGIRLPVTDLECQTGTALLDRLQLPGSYADRLASQRRCLLMLEHEIGLIETQLDRMLRAHPGYRALLKIQGLGPVLAGIFVAEIGDISRFPSADALACWAGITPRLHASDLTVHHGHVSKQGSGLVRWAAVEAVQRKCEPCVREVRDQIVARRGRSARNIAKVAAAHRMLDLVYYTLRDGQARALIPVAA

SEQ ID NO: 485858 - protein, 341 aa, unidentified
MTLYAGLDVSMKETAICIVSDTGLRVWEGKVPTCVETIANVLLTRAPGLTRAGMETGPCAVWLWHGLRASGLPVECIHARRAAAALKLQLNKTDRNDAHGLAQLVRSGWYEPILMKSLETHRVRAILVARTQLVGMCTALINKIRGLARTFGMTVGAGKGGSFDRAVRRALPGDPMISDLFEALLETLATLRERRRQFDNQLKRIALDSQTCRLLMTVPGIGPLTAIAFAGSIEDPARFRRSSDVGAYLGLTPRRYQSGEIDHGGRIPKCGDKLTRKLLFEAATAILFRSRDDFSLRKWAQQLTLRSGSWKARVALARKLAKILFCMMRDGVPFERRAATA

SEQ ID NO: 485859 - protein, 401 aa, unidentified
MVRYIGMDVHREFAQLAVLEDGLVRDEGKIGVTPEALRAWAVELRPDDQVALEATGNSDAIANLLTPLVGRVVVSNPSKTRAIAEAKVKTDKVDARILAQLLAADFLPPVWLPDERTRSLRRQVMRRAHLVRQRTRIKNQVHAILARNLAPTPPVSDLFGRTGRHWLSRQELPADERATVQALLRQLDFHGNELTIVDKELAVEALPDPMVARLMTIPGIDAIAGISIVAAVGDFTRFDDPNKLVAYVGLNPRVRQSGNSAPVHGRISKTGRAHVRGVLVEAAWSASRAPGPLRAFYQLVKTRRGFQKAVVATARKMTVLAWHLVTKEQDYAFARPALVTHKRRKLELAAGAPSRRGNYGLPGAAYNDKQQRNEEKIAVERAEHAYEVLVAHWQPKRPSRA

SEQ ID NO: 485860 - protein, 342 aa, unidentified
MLIIGCDYHPSVQQIAFVDTETGDCGEQRLKHSDREAEKFYRDLKLRAESVRVGLEATGHTRWFERLLAELGYELWIGDAAQIAAMRVRKQKTDRQDAQFLLKLLLEDRFPRVWVPSLENRDLRQLLWHRHRLVQMRTRIMNQLQSIAMKEGIQRRGGLRSEQGRKRLEQLVLAPWATKRRQDLLGLLDQLNDSVEELSAALQQEAEKRPEARLLMTHPGVGPVTALAFVLIVGDPERFRCGKQIGSYVGLIPEEASSGVHWRLGHISKQGSTLLRFLLVEAAQAAARFNPEWRSKFLHLAMRRERRIAKVAMARKLAVSMYWMWRKQRSFQPSIEVGSHAG

SEQ ID NO: 485861 - protein, 371 aa, unidentified
MKKKVRFVGLDVHADSIAVAVAEAEGEVRSLGTIPNRTESVRKLIRKLGGAGSLRACYEAGPCGYVLYWQLSELGVDCEVVAPTLVPTKAGDRVKTDRLDALKLARCFRAGDLTAVWVPDAAHEALRDLVRARLAAKHDQTRHRHQLSKFLLRHGRRRAASKSAWTLAHLQWVRQQVFEQPAQQAVLEDYLHEVEHAAERIKSLERSIDEAIEKTPEKIRKVIDALGALRGIAKLSAVTIVAEVGELSRFDKPRQLMGYTGIVSREHSSGDRVRRGAITKTGNAHLRRIICEAAWAYRHRPGIGAGLRKHQEGLPKEVTDIAWKAQKRLHARYVRLMGRDKAAPKTITAVGRELLGFVWAIGVEVERRQAA

SEQ ID NO: 485862 - protein, 352 aa, unidentified
MTTDGKPDEETEMPLYGGIDLHANNSVVVLLNEQDQVIYQKRLPNHLPTILEPLSRHHREIEGVVVESTYNWYWLVDGLMEVGYRVHLANPAAIQQYSGLQYTDDHSDARWLAHLLRLGVLPEGYIYPKGERAVRDLLRKRAHLVRQHTANVLSVQNIMARNTGARFSVKRMQALTKQDLTTLLAEEAQVLAVTSSLVVLDCLRQQIKTLEKTIHTGLHHTPAYEQLLTVPGIGTILAQTIMLETGAISRFPAVGHYASYCRCVDSTKINNGKRKGTGNVKNGNPYLAWAYMEAAQFALRFQPAAQRFYQRKLAQSRNNTVLARKAVAHKLARACYYIMRDLVPFETAKAFG

SEQ ID NO: 485863 - protein, 343 aa, unidentified
MDTVRTIGVDIAKSVFQVHGVNASGEVVIRRKLRRRSVLPFFRKLPPCLVGIEACATAHHWSRELSALGHEVKLMPPSYVKPYVKRHKNDAADAEAICEAVTRKNMSFVATKTMEQQSCLMLHRTRQLFIRQQTSVINAIRAHLAEFGIVAPVGRKGVMALLEIVADPNDRRLPEMTRSCIAALSAQLQMLKNQILEFDRKIMAWHRCNETSLRLDAIPGVGPALATALVGSIADPGAFKSGRDFSAWIGLVPKQNSSGGKERLGSISKRGDRYLRSLLVTGALAVIRYAKIHGTKHRPWLAALLERRPAKIAAIALANKIARMAWAMMVRNERYREPAALAA

SEQ ID NO: 485864 - protein, 340 aa, unidentified
MTITTVGIDLAKNVFAVHCVDQHGKTVLVKPKVPRAALPELIASLPPCVIGMEACSGAHYWARLFRQYGHEPRLMAAKFVSPYCMAGKSGKNDAADAQAICESVRRPHMRFVPVKDESQQAMQCLHRTRQGFIEEKTATYNRLRGLISEFGVIAPQSTDALRHMVSEQKKSLPLQVQQCVDDLLEHIDRIENNVTEYDRILSRMAKADHRSQRLMELKGIGPTTACALVASIGNAHDSKNGRQLAAWLGLTPSQYSSGGKSKLGSITKAGDSYLRTLLVQGALSVLIGAEKKTDSFSRWVCSLVERRGYWRAVVAIAAKNARLCWASLHYGDDFRLYSVS

SEQ ID NO: 485865 - protein, 344 aa, unidentified
MLYVGLDAHWRQSTFCVLDGQGRKILSRTVQGRWSEVLEEVGKVGRPFAICFEASTGYGYLYDGLRKMTRRVVVAHPGQLRLIFRSKRKNDRADAEKLAKLLYLDAVPPIHVPSSEIRSWRRMIGHRQKLIGERARVKNNIRAMLRSQGISAPRGLWSHRGEEWLQTAELSTELDMVQRDVLLERLRAIRAMIERVERVLNRVASGHPGVALLKTIPGVGNRTAEAVVAWVDDPWRFRRVSRIGSYFGVVPSQDASGPVNRLGHITREGPSVVRGLLAEAAWQAIRRSDRVRSFYERVRRGDDERRKIALVATVHYLLRVMLTMLQTGEVWRAESQLAKAEAGS

SEQ ID NO: 485866 - protein, 374 aa, unidentified
MKERGLRSSCPFRARMLGVLTLLRRRRPLVSEFYEGRQFVGMDLHRRRSVLVRMSESGEHLETVRILNDRDSLAEVMSRAGESPEVVLEATYGWYWAVDALAELGATVHLAHPLGVKAFSYRRVKNDERDAFDLADLLRMGRLPHAWIAPPATRELRELVRHRAKLVAMRSQCKAHVHAVLAKGGVWVPMTDLFGVEGNLLLDKVTMPAPYRERIASLRRFIEGFDAEIDLFTGLVQRRLTHDAGYTAIQQIPGIGPVLAAVFVAEIGDVHRFAGPAQLTCWAGLTPSHHESDTTVRRGRITKQGSRLVRWAAIESVKILPKTSHIGAIREQVAHRRGNRNIGAVAAARKQLELVFYALRDHHVRALHRSPRAA

SEQ ID NO: 485867 - protein, 343 aa, unidentified
MDIHVLGIDLGKNSCSVVGLDPTGRVLLRRRMRRESIVGLAAKLPGCVVAMEACCGAHHLGRLLAAQGHEVRLMSPEYVRPYVKAQKNDDRDAEAIAEAATRPTMRFVALKTEAQLDLQVLHRVRDRLVSQRTALMNQIRSILLERGIVVPKGRRKLLDALSVLSGESERSGVGPRVRLLLDDMLDQWRGLDRRIAALDDEFAEMARNDPAVRRLATIPGVGVLNATALVAAIGDGRTFNRGRDLSAWLGLVPRQATTGGKPKLLGITKRGSKYMRKLIIQGARAALPGLSRTATPLGSWLRGLLSRAHGNTVVVALASKLVRIAWALLRQETVFAAGRLAAA

SEQ ID NO: 485868 - protein, 317 aa, unidentified
MKDSSSISLTGIDVSKDTLDVYFTKNGRQQKIDYRNESLKLLARQIIKLKATVVMEATGGYEKKLVRYLQDQGIACAVVNPKQVRDFARACGTLEKNDAIDARIIAAFGQTMQPRTTEKIDKNREKLKVLTTRREQVQSMINQESNRRQQVEDRQMRAFIQRAIRLYESQLKELDSEILKLIEADQAMKQKSKILLSAKGVGPTVTANLIAGLPELGKLNRQQIAKLVGLAPLVRDSGKFKGQRRTCAGRGHIRRVLYMAALVATRWNSRIRAFYLSLLERGKPKKLALTACMRKLLTILNSMVKNNQTWEQNLCSA

SEQ ID NO: 485869 - protein, 360 aa, unidentified
MDVHKKTITIAIADEGRQKQPRVYGTITNDLDALDKFCRKMVSTANQLHFVYEAGPCGYGIYRHLTEKGIDCMVAAPSLIPKKSGDRIKNDRRDAKMLARLHRADELTTVYVPDCQDEAMRDLNRAREDAVIVAKKAKQRLKAFLLRNGVAFAGSSQWSEAYFKWLADIAMPHPAQQVALQEYIDAVHESLNRVKRLTDQIRQMVPSWRLAPIVFALQAARGVSLVVAVTVLAELGDLSRFAKPSQLMAHLGLVPSEHSSGESIKRRGITKTGNSHVRKALVEAAWSYRMQARVSRLLLKRQQGLPDQVCKIAWKAQLRLCARYKRLVAKGKTKQKVVTAIARELSAFLWAIAKQVQPLA

SEQ ID NO: 485870 - protein, 391 aa, unidentified
MIYIGIDVAKDKHDCFITNSDSEVLFKAFTIFNNLDGFNDLYQKIESVMDDVTKVKVGLEATGHYSYNLLGYLIDKGLPTYVINPLHTNLYRKSLSLRQTKTDKVDARTIASMLMSDVNLKSNSDTSYHNEELKSLTRYRFDKVKERAKLKTSVSRLVCILFPELEKLVPTLHMASVYALLSEFPSAKHVATAHLTRLTNLLSKSSKGRYGKDTAITFRDSARASIGSNMPAKSLELKHPIKLIQELDSEIDEIENEIKIIMDEINSPILSIPGINYRMGAMIIAEIGDFNRFDSPDKILAYAGFSPSTYQSGQLDGAYAHMEKRGSRYLRYALYNATKYVCHWDPTFAAYLAKKRAEGKHYNVAISHAVKKLVRVIYHLEKTKQQYIKAA

SEQ ID NO: 485871 - protein, 332 aa, unidentified
MDLHATNTYVGIVDEENTVLHKQRFRNELPLILSGLDPFKKDIQGVVVESTFNWYWLVDGLMAEGYRVHLANVSAIKQYEGLKQIDDKRSAFWLANLLRLGILPTGYIYPKEERPTRDLLRKRLHLVRHRTSHILSVKNILARNLGLRMKSEDIKKITDPEVKRLFPGKEMQTAVLASVGLIRHLEGDSSTIEKMITTKLKIRKEFAKLMTVPGIGKILTLTIMLEVGDINRFPTVGDYSSYCRCVKSIRTSAGKIIGYGNRKNGNKYLSWAYIEAAQAARRFYETVRVFYEKKMAKTNRIVAVKALSHKLTRASYYVMRDQVDYDPARLFR

SEQ ID NO: 485872 - protein, 465 aa, unidentified
MEVRVIRRLVGVDLGIASAHTVRVLTEDGREVCRRRCEPTVDSLRRVEAAALAGAPAGTVLEVVMEPTGPAWLPIAVFFKARGHRVFRVSSAKAADLRRFLSRHAKSNGIDADTLARLPLVDPAGLYPLELPGTEAAALDRRVRATDRLTVLAAQHKVRIKDLTRQLLPCSPLTGDLGVADLAVLERWADPRALLAAGPARLTALIVKASNGHLGADRAQQWRAAAAAAVELYGDHPAIAWTDLAAEVGTEVRLLRATLGELAAHARERETAYRYADLGGLARSLPGVGDVGGPVLVAGMGRPGRFPNGAAFKSYTGLAPRAAETGNTDRKGQPMSKAGSSLLRTTLIRAADTARKQDPQLARIYYTQMVERGAEHLKAVCVVAGALAERIWTVMNRQMPYVICDIDGTPVTPEQAKQIIAQNFTVPDEVRRRRRSSKTPSRKPAQQPTISSKGGRPLSKPHTAA

SEQ ID NO: 485873 - protein, 325 aa, unidentified
MNTPVLGIDIAKATFVAALRFENDRSMKMEFANCPAGFRKLRTWLKSHGVGQVRAGLESTSTYADALAQWLHDQGHVVYLLNPERVACYARSQGQRNKTDPADAVTIAAFTAQHSGTPWHPPSPEQKTLRSLTRTRHQILLCQTQLKLQLKTADPAGAVHLKAILQKTQDQLRAIATQIGAHLREYPVLAEQVRRLMTVKGIGLVTAAIAIAELPPITRSSDPRAICAWAGLTPRRWQSGKTEFPARLSKKGNVYLRQALYMPALVAQRFNPLLRDFAARLRANGKTSGAVLGAVSHKMLRILVGLLKSQTDFDPNWSPASPSQY

SEQ ID NO: 485874 - protein, 349 aa, unidentified
MNTTTVGLDIAKSYFQVHGADAHGKTTLQRQLRRAQVLTFFANLTPCLIGIEACASAHYWARKLSELGHQVKLMPPQFVKAYVKTNKNDARDAEAICEAVARPNMRFVAVKTVAQQELLMLHRVRQRLVVERTAKANQLRGLLAEFGIVLPQGLNSLERLMPEILGDAENGLTCLLRERFCQLFSHMRELSATVKEWERQIVSWHRENPLSRRLEKIPGIGPLSASALVASIGDVRTFKSGRQLAAWLGLVPRQESSGGKTRLLGISKRGDRYLRTLLILGARSVLRQMKRDAAAVPRSWLGRLSARRHVHIAAVALANKNARIAWALLAHEREYRANYQSNRPVMAVS

SEQ ID NO: 485875 - protein, 348 aa, unidentified
MKILALDLGKSKTVACDFDVAANQGSYRKVATTEQALHDLIVDRSPDRVVLEVGPSAGWVHDLARALGVEVQVANPNHEGWRWRNVKRKTDRLDALKLARLSAMDQLPQVHMPAARMRQWRGLIAYRHRLVGRRTQIRNRIRSLLVSQGMAMPSGKGGWTGKMVVWLETLSRPLEQVGMGQLWRGELALELEALSSVSAMIKAVEAKLDAIGQADGRVRLLQTMATVGLRTAEALVATIDDPHRFANGKAVGSYFGLTPRQYQSGSQDRRGRISGQGNGLVRRLLVEVSWLGLRYNPWLRGVYERVRRGSPTRKKIAIVAAARQLVIVAWAMLRDHQPWRPPATTNNN

SEQ ID NO: 485876 - protein, 398 aa, unidentified
MTESSDYESVQVFIGVDVGKDTHHAVAINRSGKRLFDKALPNDENKLRSLISDLKQHGQILLVVDQPATIGALPVAVARSEGVLVGYLPGLAMRRIADLHAGEAKTDARDAAIIAEAARTLPHALRTLKLADEQIAELSMLCGFDDDLAAQTTQASNRIRGLLTQIHPALERVLGPRLDHPAVLDLLQRYPSPEKLASLGEKKLAAQLCKLAPRLGKRLAADIAQAQAEQTVVVPGTNAAAVVLPRLALQLITLRKQRDEVALEVEQRVLAHPLYPVLTSMPGVGVRTAARLLTEVACRAFASAAHLAAYAGLAPVTRRSGSSIRGEHPSRRGNKALKRALFLSAFAALRDPLSRAYYTRKMSQGKRHNQALIALARRRCDVLFAMMRDGTFYTPQAS

SEQ ID NO: 485877 - protein, 349 aa, unidentified
MRTFPPPADTRFYAGVDLHARSLFLVVLDHDGHTRYARNLPAQPEPFLHAVQPFRDGLLVACECVHCWYWLADTCRAQDIAFVLGHAYSMKAVHGCKTKCDRKDAEAIARLLKGGNFPPAYAYPRERRGLRDLLRARLRLVRQRAELYGHVHTARRQANLPPVSNDVKYKSKRAAISADITDPFVRRRVDTHLALLEPLDTTIRQLEAELEDAAKQHYPTELAVLQSTPGVGLVLSLTILLEIDTIDRFDTRQQFCSYARLCGAVQTSDNKRAGAGNRKAGNAWLKWAFSEAAVLSAQKDEQIGALLQRLASKLGKAKALSALAHKLGRAFYHMLHTKEVFDVTRFVRH

SEQ ID NO: 485878 - protein, 315 aa, unidentified
MSQIWVGIDVCKDWLDVHIRPQGMILRLRNNEVGVKYLIKQLPVPTEVGRIILEATGGMELTAALTLHQAGFPVVVINPRQSRNFAKATNQLAKTDKVDAKILAFFGEAILPELRTMAAEETRQLNDLVTRRRQIVEMLTAERNRLSAIRGKAREDIEANIEWLNQRLRGLDEQIAQQVKECLLWSEQQQILTTVPGVGKVVATTLISALPELGSLSSKQISSLVGLAPMNCDSGKMRGKRRITGGRAQVRSVLYMAALVATRHNPVIRNFYNSLIERGKLKKVALTACMHKLLIILNAMVKHKTPWRIAETTTA

SEQ ID NO: 485879 - protein, 296 aa, unidentified
MKKLFIGIDFAKEKFDAAIIEACGLKEFGNREYGTFTNDKKGYRQFFKWVKTNADKSVENEWLFCGEDTGSCSLGLSKWLYGKGLDIWIENAYSIKHSSGIQRVKSDKTDSSMIAEYAWRHQDKAVLFEPLSESLSQLREVFLYRHKLVQQHIAMDVRKQDKEAAEPSKAISFIKRKSKHLMSEIDNAIKECDLMIDRIIESDAELKENYAIITSIKGVARQNGACLLIFTNNFRRFDLDARKIACYYGVAPFGKDSGTSIHSPAKTSHFANKLIKSLLGQAAHCAKKFNPEIREY

SEQ ID NO: 485880 - protein, 317 aa, unidentified
MNSSQIQTSVNIGVDVGKANLDIAIHPSGQLYSIPNSEAHIRRFVKILRNYNIERIVVEATGRHEHALVQACDQAGLPIIVVNPISVRRYAQAIGVLAKTDRIDAQVIAKYAATLKPEFRPIPDKTSKKIRDLLARRAQLLEMSTMEKNRLQIMPKPLHRSIRSMLKMLQHQIETVTRQIEQEVAKVDQWRTKMEVMTSVPGVGKVLAYTFLSERPELGSLNRKEIAALVGVAPINRDSGKLNGKRRIRGGRHRVRTVMFMAMLSSIQCNPVFKRFYERLKAQGKIPKVALIACMRKMIVVLNTMIKNQESWRGEVA

SEQ ID NO: 485881 - protein, 332 aa, unidentified
MGEKPVCAVRSGLKGVFVGTQVFVGIDVGKDVLFVAVRPFGDVLEIPNREDGIADLVKRLRSLEPTLVVMEATAGYETPVAVALYRAGMAVVVSNPRLIRSFARATGRLAKTDKIDAGVIAHFAEVIRPEPRRLDEPHEERLGQLVARRKQLIQMIVMEKNRVKRWGPEMQKGIQKHIDWLTKELERIDQALADFIKASPIWKAKDEILQSVPGIGKVGSHAIMSDLPELGKLNRKQIASLVGVAPMNRDSGNYKGSRSIWGGRARIRTILFMIAVVASRCNSVIRPFYERLCKAGKPKKVALTACIRRLLAILNAMMRNGTRWGEFKPAIA

SEQ ID NO: 485882 - protein, 416 aa, unidentified
MRTCGLDVHKSFIVAYIFDVFFEKDDNGKPVVKAKDVALGRFERTWEGLDKLVEFLEKNETKKVVMESSGPYSYMVYMALDNTGFDVWMAHPRDNKTNNQLKTDKRDAERLVKRFVVGEIRAYKLPTDPKIIRLKRLTRFRMKMVSRLISVKNEIRKTLDEVGIDLKKAFSTLGKGAIAIVSGLVRGLSVDAIISSNQSLAKKRDVIDEILKSRGKLDDALIFEIKSLLRLLREIERQRESTEKRIENALSDLEEETKLLTTIPGVGLQSAAIILAEIGGISRFPSPKNLASYAGLVPSVYQSGDEIVYGKLRKDCNRRLRYILYQVALKAIKYSPRLRKFYERLRSRGKKHKQAVIAVARKIAMAIWHILTRRTPWSENLKRGYVPRRRRFKRITMKQALKILRELGYEVLAQVC

SEQ ID NO: 485883 - protein, 424 aa, unidentified
MKVTYQTCCGVDVHKSFLVATIVKTTGGIEPSYQKKRFSTFNNSILEFKQWLLDNDCHDVCMESTGKYWVPVFNLLEDKINVVIANPKWVKAVKGNKDDTKDSKWIGDLFRLGLVKGSYIPCKKVRILREYTRYRYKLVSCRSSEKNRYQNALTVCNVALDSIVSDIFGKSSTSIIDYLLEQSGTSINHEEIASKLLRSLKSKEDAVIESVEGYQMTDAQKYRMRLVRAHMDYITAEINDVDKMIENMISSNPDFENAVQFLCTIPGVKRDSAITIISEIGTDMSQFSSSKRLCCWAGLTPGSNESAGKKKSVRITRAGVYLKPALVQCAHAAVKSDKSPYYKKKYESLVKRRGKKRAIIAIARMILTAIYQMLSTGEQWNPSDLYKIDMPVALVEKQKAKAIKQAKKLLQREGLLPPDEPLAS

SEQ ID NO: 485884 - protein, 400 aa, unidentified
MSLDRPFAETGAIRSELGAIFISLELSRSTWLVTSLSPGAGEKLSKREIKASDVSALLARLAQLRHKALARTGRSHPIIVIQEAGLDGFWLHRVLQEEGCESHVVDPASIAAPRRRRRAKTDRIDGEALLRALLAYKRGEPRVCSMVRPPTPEAEDERRICRERAELIAERVRHVNRIKGLLFSQGVRDYEPLRRDRRKRLLELRTGDGRPLGPHLKAQIERELDRLELLLEQVKTVEGARDRLLARLVESRSQDATAPAEAQPSPVALLLSLNGVGPEFAASLWTEGLCRSFANRRQAGAYPGLTPTPWRSGKIEHEQGVSKTGNARLRTKMLQLAWLWLQHQPKSALAQWFHRRLPGMTGRAARKRLIVALARKLFVALWKFTSAGVVIEGAVMKTTA

SEQ ID NO: 485885 - protein, 319 aa, unidentified
MPKAARRFSPAEFVPWVQALLARGHSVHVVYEACGFGFSLYRQLMAAGAQCYVIAPRKLDEECSRVKTDPRDATTLCQRLSRYLEGNTRELAVIRVPTEEQEQARHVSRQRTQLVCHRQKLEAQGRSLLISHALPAPAHWWKEQTWRRLGQHLPAWMRARLEMARPALLSLQAQINALTSELEAFASFPLPRGLGKLTSVVLTREICDWHRFNNRRAISSYTGLCPGERSSGSKRVPGSVTKRGNPRVRAALVECAWRMVRFQSHYPPVQKRLAILAKGSRTLGAVRKKAIVAVARRLAVDLWRLHTGRCTAEQLGLKL

SEQ ID NO: 485886 - protein, 316 aa, unidentified
MRTTSIWAGIDVSQDQLDLYVYPSGQTLRFSNDSVGIGALIQFLGPLRPERVVMESTGRLERLALCELAAAGFAVALANPQRVRSYAKALGKAKTDCLDAQVLAEFGAATQLPAYPVPDARAQALLDVVTRRRQLVEMLVAEKNRLSRASTTIRQDIDDHIEQLQQRIEALSQQIQQLVQDSVAWQQKRQLLLEVCGVGPVTTAVLLAELPELGALSHKKIARLVGVAPINRDSGKHRGQRRIHGGRASVRSALFMATLVAIRHHPKLKAHYQQLRQRGKLKLVALIACARKLLVWLNAILRDGQVRSGTPASAPD

SEQ ID NO: 485887 - protein, 382 aa, unidentified
MDGAPNGIKRAKMVVVESAIEGRPSVGKSIIDTSSVTRVGLDLAKRVLRIHAVDAAGFVVIARSVNRRTLLTFFDALPRCVVAMEACSSAHHWGRQLLELGFAVRLIPPAHVKPYVRRNKTDAADAAAICEAAGRPGQRFVPVRSVENQAALMRHRARELMVGQRTAALNALRGHLSEIGIIAAQGVQNAYALKRLAGDGFDDSGEIVVPDCVRLALAPLVRQIDALDEAIEAIDKELEASAKADETARRLMTIPGIGPVTATALLATIQDFASFSSGREFAAFLGLTPREHSSGGKPRLGRITKMGDRYLRKLLVVGACSALAARKGNNDALRRWASGLLERKTVKYKFKLTAVALANKLARIVYALATKGGHYDDRPVAA

SEQ ID NO: 485888 - protein, 343 aa, unidentified
MHSISTIGLDIAKSVFQVHGADGAGQVVLRRQLRRRQVLAFFQKLPPCLVGIEACASSHHWSRELQALGHTVRLMPPAYVKPYVKRQKNDTTDAEAICEAVARPNMRYVPTKTVEQQSCLMLHRARHLFIRQQTAVINSIRAYLAEFGIVAPVGRRGVEHLLEVAADAADHRLPEVARVCLAALGSQLRALKAQILEFDRRIMAWHRSNATSKRLDAIPGVGPALATALVASIADPKAFRSGRDFSAWVGLVPKQHSSGGKDKLGSISKQGDRYLRSLFTAGALAVIRYAKIHGTRHRPWLTALLARRPTKVAAIALANKLARMAWAMMARNERYREPAALTA

SEQ ID NO: 485889 - protein, 339 aa, unidentified
MKKRYLGVDLHRSCFTVFTRLKDGSGALQHWSIGSLKAFAKTVKGSDEVAVEATGNVRLFCEALKGSGCRMVVVNPHQFEVISRSVNKTDEHDAKVLAEFLSKGMLPEVRIKDEVHARVASLAQTRDKLVKLRTSLKNKVNNLLAARGILIAKESLSSDKGLAEVLASPVSELDRMELEILIGEIRHLTESIKKLEKLLHDHGSTLPGWKNLTSIKGIGDIGGSILLSTIGNIEDFADEGKLAAYFGIVPRVSNSNETERSGRITKRGCKLGRTTLVQCALIAARYSPYLQSHYRRIAATRGTGKAIIALARKFLGIIYKTLKNNWIFEDFPRFVLSNA

SEQ ID NO: 485890 - protein, 347 aa, unidentified
MAHFVGLDVSVKETSVCVVDDAGKVILEQQVPTEPADIIALLTSLGVPFGRIGIEAGPLSQWLVNALTAADLPVICVETRHMKALLTAQQINKTDRNDARGIAQMMRVGLFKPVHVKTLVAQQQRMLLTSRKLLQRKLLDVEADLRGTLRNFGLKVGAVSGSRYEARVRELVEGFPGLAAIAEPLLNVRRVMRQQFAVLHKMLLDRVRGDPVCRRLMTAPGVGAVVALTYRATVDQPQRFVHSRAVGAHVGLTPKRYQSGEIDYDGRVSKCGDALLRTMLYEAAQSLLTHSTKWSWLKAWGMRVAQRRGIRRAIVAVARRLAVVLHRMWVDGSEFRWRKDSAVPATA

SEQ ID NO: 485891 - protein, 348 aa, unidentified
MKIMVGIDLHSNNALCDLMDETGRRLLHKKLPCDLGGILALLKPHREHIATIGIESTFDWYWLVDRLQDAGYHVVLANPAAMQPYSGKKHTDDVSDAYFIAELLRLNLLPTGHIPDRQTRPVRDLLRRRLLLVRQRTTLILSFKSLNERTLGQRVPLSRVKTLKAEEAQARFTAPADQLLSGEQITLMGQLSDSITKLEEHLLAVAGKTRAYQRLQELPGIGKILGLTIALETGDAKRFAEAGHFASDCRCVRSLRRSNDKKKGENNRKCGNKYLAWAFVEAAHFACRYDDQCRRFYDRKKQQTNPIIATKALACKLAIVKNCFGIEVVNALFNSTLKHLIITQCFSS

SEQ ID NO: 485892 - protein, 345 aa, unidentified
MYRTRVGVDLAKKVIQVCIYRNKKVQSNIEMTPDEFLSWLVNQKPLTIIFEACSMSNYWKQKATEAGHEALLISAKLVSIVRQNQKTDKNDALAIVQATFLPGVTFIGGKTIEQQQIQTIKRLRELAVKHQGACQKQLVSLLLELNIRIGNRQGGILCAIDAVLEDATNGLSDECRRAIYIGKGQLAVSIEAVEHYGKCLEKVVSINKECKKLLRLEGVGTTNAINLYLALGCWDIGVFSKGKDASACIGLTPIQHSSGGLVKLGAIGKHCKNSILRSQLICGAMAVVRQLATREAKTKKDVWLKGLIERRGKKCAAVALANKTVRTAFAMLTQGTEYKAELLTA

SEQ ID NO: 485893 - protein, 450 aa, unidentified
MSTLETVEPAPAAAPAPEFAARIGLDWADQKHYWSMLDSNGKKTRGQLDNTPEATEVWAAELAQRFGGRAVAIALEQSRGAVITVLSKYAHLVLFPVHPTSLANYRKSFSPSGAKCDPIDGDLLLDYLVKHPEQLRTLRPDTVETRSLQFLTEERRKLVDAHTATLQSLIHWLKQVFPQIVRWFDPATPLVANLLLRWPTLQELQKARPGTLRKFFHQHNCRNEELTEERLAQIRLAVPATDDPALLQAGILSIQNAIRILACMRQGITEFDRQIAITYQAHPDHLITDSLPGAGPALEPRLIAAVGSQRDRFESAHDMVCCFGVAPVTERSGNSIWIHWRWACSKFVRQTFHEWANCSIRPCDWARQYYERQRAKGNGHHAAVRSLAFKWIRIYFRCWQDRVPYNDKLYEEALRKHAAKPKSTKTDSAATPTIQWKSCAGFSKVSKLSS

SEQ ID NO: 485894 - protein, 320 aa, unidentified
MSEPYYVGIDVSIDRLDVAIRPGGRGFCVTNDAAGWAELVARLPQGAIAAIGLEPSGGYERGIVRVLLAAGFSVRRINPNKLRQFARAAGALAKNDRIDARLIADYVAVIPTRVVERNPALEQLAETVTMRRQLCDEHIAVESQASHLEDALLQRIAKRRLTRIKADIVLLDKRLAELVAAQPDLVQRFRLLCSMPGVGATLAYTLLALLPELGQIGRKQIAALVGLAPYAFDSGRFRGQRHIYGGRTAVRNTLYMPALAAFRFNPALRTFHHRLVAAGKKPKVAIVAVMRKMLTTLNAMLRDGNSWTDGHTGRHTVLAI

SEQ ID NO: 485895 - protein, 368 aa, unidentified
MITERTSLGLDVHARSVSAAAIDTLTGEVIQRRLDGEYSHTIDLASRLAAEHGPLLITYEAGPTGFGLARELTAAGHRVQVAAPSKLARPAGQRVKTDRTDAMFLAECALNGTITPVRIPTLAQEGARDLVRSRDDARTDLMAARHRLSKMLLRRGWVYPGKTTWGPAHDAWLRALRREDVPALGAGATAAFDDAYDTVTHTLARRDRLDTAIAALAADSEFTPVTARLSCLRGISTLTGFALAVEIGDWHRFTGATIASYLGLVPCEHSSGQTRTQGGITKTGNTHARRLLTEAAWQHKSPYRPGPALRAAWAKVPGDVATRADTGNRRLNRRWQTLASHHKRHTIANTAIARELAGWCWSLAVMDH

SEQ ID NO: 485896 - protein, 321 aa, unidentified
MSIVGGLDVHRNQITCDWVDLRTGEAGRGRVAPAERDVFRSWLRQLPPGDAAFAVGACTGWRFVVEELTAEGFAAYLAEPADTSTLRGCKKRAKTGRADARLQREQLEQGRLPESWVPPAHILDLRELVRLRKTLGDQRVQWQQRIHAVLFPHGLPGPPRALSADATRCWLAGYTRRQPGCRALAGQLFGVGPVTAATIVAELGDARRFRNGDAVVGHAGLDVTVYSSDGKRSPGHLSRQGPEVLRWVFESARCASRTAAPGHPYYSHVRDRLTSSRATLSVARKLVRRARHILAGLGDDALAPVDPALLPPLPPAMRLAA

SEQ ID NO: 485897 - protein, 387 aa, unidentified
MQKPHDDSKACDATFVQDSTLVVVIEMGLSSWLVAGMIPGVSREPLKKIDPKAEELLQLLYRWRDEAIAAGKEITRIAVAYETGRDSFWLARWLRKRGIDAHVIHATSVAISREHRRAKTDRIDTAMLRRGFLGWLRGEPGHCSMAIVPTVAEEDAKRPHRERDSLVHERTSTINRMKSILIQFGVRNFNPVLRKAREKLDAVRTPEGIPLPPNTVAALRRHMERFCVINEQIKAIEQTRLQQLERDPADRFNAMVFLLVRIIGLGVETAEQLVREILSRQLRDRKAVARYSGLTGSPDESGSKRREKGLSRSGNGRVRKALIQLSWRMLQFQPESALVLWFKKRTENVQGSRKPMIVALARKLIIALWRYVNTGVVPEGFELRPAV

SEQ ID NO: 485898 - protein, 420 aa, unidentified
MLAEARDNEEIIERIAALDVGKAELMCCVRVPGAGRRRLQEVRPYSTMTRSLLAMADHLHDLGVTRVVMEATSDYWKPIFYLLEAGGFETWLVNARDVKHLPGRPKTDRLDAVWLCKVAERQMLRPSFVPPPEIRRLRDVTRYRIDLVNERTAEKNRVEKLLEDACIKLSVVASDIFGVSGRDMMAALIAGERDPKRLAQLARSRMRARLGPLEEAFTGRFTDHHAFLLERMPARVDAIDADIAALEAKVEEMVLPFARATARLDEIPGIGPTAAAVVLAEIGLDMGRFPTAGHLVSWARFAPGVKESAGKKKGNAGTGHGNRYLARILGEAAVGAARTDTFLGERYRRLAKRRGKKKALVAIGRSILIIIWHLLSDPDTRYLDLGPDFHDKRVGDDRRKRNHIRQLEALGYTVTLTPAA

SEQ ID NO: 485899 - protein, 317 aa, unidentified
MKQTEARAPYIGIDVCKKTLDVAVGESGRIVQVANTPAGVQECVAWLVKVAPAGIIVESTGGLERLVISELCRAGLEVSLVNPSRPRAFAAARGQSAKTDPLDAHNLARFGQAIRPPGLQMPSEEQQELAALVARRRQVIGMRVQEKNRLGTARKGQRTSLEAHLTWLTEHVAELDEKIGALIEANPAYKVKTALLVTSPGVGDVTARTLVAELPELGQRNRKEITALVGLAPYNRDSGTKRGYRAIGGGRAHVRCALYMATLSAVRWNPAIRAFYERLLQAGKLKKVALVACMRKLLTMLNAMLKAGTPWQSMTAA

SEQ ID NO: 485900 - protein, 364 aa, unidentified
MYDSTTTVAVGLDVHARSIRVAAVRADELLEERTLPYDEEAVERVLRRWPVVRCCYEAGPTGFGLQRFLVERGIDCQVVAPGLVPQRPGDRVKTDSRDARKLARLLAGGLLEPIHVPSRELEAARDLVRAREDARLDRMRDRHRLSKFCLRHGRALPTSSWTVARRKWLSEQRFEFAAQQQTFDSYLHTVDLVDARIEALERAIRETAEQEPWRRLVARLRCLRGIDTLTALALVTEIGDFDRFKSAEQFMAFVGLVPSERSSGDQRRQGSITKVGNRHLRRLLVESAWHARRRPTVGYRLARSQRGQDAVVVERAWRRQQRLYQRWQRMAGRGKPQQKIVVACARELAGFVWAIATEQPLRST

SEQ ID NO: 485901 - protein, 434 aa, unidentified
MDADYANRLRWFRQFKEHVNASTSTLIVGIDIGKDTHHAFLGTPAGRTIHRRLIFENSIEGFGNLLFYIQRYLSDEQLADVVIGVEPTSVYHKPLAEYLITVGYSVVYVTNAAIKKNRAILDGRWDKNDTKDAANVADLVSRGRCHFYDLPDMNLRDIRNLLSLRKRLKKQEHRLITRIRNNLVAQYFPELDRAWYRCQQENLAIVRFCLSPRKIAQIGFDDFCKMVTRRRRGLRQYKRLRHIHEAAQESIGCQLSSSVVFEAQLLVENLQRSREQIAEVEEQLYGICESYEEYELLQTIPGFGPFVSAVVLGAIGFAQRFENAKQLQRLAGLDLNASRSGKRSQTAVPVISKVGKADLRYALYQAAKVATSLTAEFKAYFKRLLKGREKEKGIKTKMRVKVSAKMLVIAWTLMKTQQPYKAGLLVIDEPVQHR

SEQ ID NO: 485902 - protein, 352 aa, unidentified
MNHLKYIGMDVHKATTVIAVLDSVGKVLAEAIIETKASPILDFIRSQRGTLQVAFEEGTQAAWLHDLIRPRVANLVVCDPRKIAIQGNKADKPDARRLAEMLRTNGLKPVYHGERSTRTVKELAQSYTSLVEDSTRVKNRLKALFRARGIDCSGSAVYSPKERKEWFVQLDTAGVRTRAGRLWEELDCLAALSEAAEKELLAEARKHAATKILRSIPGIGPLRAAVILGVADTPHRFRTKRQFWTYCGLGIVTKTTGEYKLVSGQVCKTKMRPLVRGLNHNYNRALKQVFKGAAMTAASGPWKSHFDAMVANGTREPLALLTLARKIASTTLALWKKGERYDHNKLRMKHAA

SEQ ID NO: 485903 - protein, 381 aa, unidentified
MRSVGLDLGKKEVSFCEVRDGKVLVRRTARDVGQLDQLGPDTPPANVAIEACREAWHVHDLLTANGHNVLLIDTTRVKRLGIGQHGRKNDRIDAEVIARAVEENRIPRAHMLSRERRLLREKLNVRRALIETRATIITTIRGIVRARGEKLAPSDTDYFRRNLAKATLTDTTRATLAPLSATLDALDEQLCLLEPELEELGAQEPIIATLTTAPGIDLVVAAAFVSVIDSAKRFTDAHQVESYIGLVPRERTSGGSDNRKLGAITKCGNPYLRAMLVQAAWCILRRRRQDPLAAWGRQIAERRGKRIAVVALARRLAGVLWAMWRDGLPYDIGRVATASMRGTERATLNAKDHAEAMRVIAHKANVRARRVRARIVKEVSA

SEQ ID NO: 485904 - protein, 451 aa, unidentified
MSDLPILDAHAAFVDVGSEQMHVSVAGGPPQVFGTFTAQLHALRDWLKAQGVRSVAMEATGVYWLPLFGVLEAARFEVCMVNGRQTRNLPGRKSDMQDCQWGATLHAHGLLRAGFVPSAEIRRLQDYMRLRADHIEMAATHVQHMQQALERMNIKLHDVIASLTGVSGLAVVRAILDGERDPQRLLELCALQIQRAKAERVKQSLLGTWSEEHLFALRQALQSWEHYQGQIAECDRRVEALLKDINPGPPPNAPSLPARRSKPGVNAPDIPDLRATLAQICGCQDLTQLPAHTEYSVLQVIAEVGTDLTKWPTEKHFTSWTGLAPGSHQSGKRRRPVKRSRNRAGRLFCVMAMSLARSKDIALGGFYRRMAARRGGLVANKALARKLAVLFWRVMVKGIDYVEYGLQQYEAKVLETKQRSLRRLARQLGQQLVPMPIPVPATSPPAHALTT

SEQ ID NO: 485905 - protein, 321 aa, unidentified
MQSSDFIGIDVAKATLEIATADATSPTQTITNDRTAISTWLATLPATAQLALESTGRYHELAVELAGGRGLRVYLVNPRALHHYAKAVHRGAKTDRLDARLIARYLAHEHAQLRPYTPPSAAVQELLRLQRRRAQLMVTLTSLRQSLADLDVCRREQRDALQGLRKLVAAVDARSAELLAAEPARADLAQRLATIPGFGPLNSRHYATLLPRLAPPRLSALISYVGLDPRPRDSGTFRGQRKLSKHGPAETRRLSYLAAMAAARYDDDWKNLKDQLIARGRSTTEAFCILARRLLRIAYALYRDGGVYDPAKLAPEGGQTT

SEQ ID NO: 485906 - protein, 314 aa, unidentified
MKAHVFVGIDVSKRSLDVALPEGVERVSNEPASITDLAERLSQTAPALVVLEATGGYETGLVLALQRRNVPVAVVNPRQARDFARAQGRLAKTDAIDARVLARFGEAMRPAPLPPIDASRAALAGLVARRRHLVEALIAERNHLEHATAAVTAWIDQHIAMLRDQLAQVDAAIAATVEADRALAHRQAIVTSIDGVGPATAAVLLAELPELGRIEHKQLSALIGVAPINHDSGQFRGQRHIAGGRASVRCALYMATLSAVRHNHTLRLFYQRLRDNGKPAKAALVAAMRKLATILNALVRDNRPWQPALQQDGC

SEQ ID NO: 485907 - protein, 397 aa, unidentified
MIAVGIDVSKSKSTVAILNGDGSIRAKPFDVHHVADELQALVDYIKRTSEPPTILMEPTSHYHYPLLKAFTEAELPVCLINPYQMKKYGDTELRKAKTDKRDSLRIAQYALEKSYSLIPYTPQDQKYEDLRFLSRQYSQRISTLTVAKVQLLSLLDETMPGITTILPLKSRDPDNCVLLRFIKRFKSFDVIRKMGKTRFLDSYQVLVKKAKDRFAGSKGLAIYELVLNSVTTRGENPLSAMTQDQCVDLVSTSQKAADEINLQMRIIAETMPEYKVLRSMAGVGDRLGPIILGEIGDIRRFHSGKALNAYAGNDAPPYQSGQFESRNRHISKRGNPALRKACFEVMQALKLTKPQDDPVYLFLLKKEQEGKPYNVAKMAAVNKFLRIYYARAMELYK

SEQ ID NO: 485908 - protein, 345 aa, unidentified
MSVIIGVDPHKASHTAVAIGGDEREVAKITVRATCQQTVKLLAWAEPFAERTWAIESAGGLGYLLAQQLVDAGEVVLDVPPTLASRVRVLGTGRSEKNDPNDAFSVAIAALRSEGLRTVEQADHTEIMRLLAKRNHDLGRLRAKLICRLHNALADLSPGGIAKELYVSDANRLLGSFEPATPIEHRRHQLALELVDDVARLDEQIKESHRRIRTAVRASKTSLTDLFGVGPVLACSLIGYSGDVGRFATRDCFAAYGGIAPVERSSGGRVFHRLSLRGHRLLNNAIHMVAICQIRQPHSEGRAYFDRKVAEGKTKREALRSLKRHVSNAVYRQLVLDAERGPGGH

SEQ ID NO: 485909 - protein, 425 aa, unidentified
MGRKKRSYRSVDVKKVDRARLGEALEGQRVVLSVDVAKETIYGSFMKEDRGTELTIRWDLVEESRSVVELLKELPAARVEVAMEPTGTYGDPLRTLMQAAGIPVYQVAAKRSHDAAEVWDGVPSLHDAKSSEIIGRLHLDGVSKAWEGRTEEEREIAAAVRMIEVHGGVYDKRINQVEALLARHWPELTRYLDLTGATILELLAQMGGPRGVAEQPEEATRLMRKVGGSFLADWKIEEAVRSAGETIGMPMIPAEEAALQEIAKEGRRAQKKEREARAKVERLVKQDDTSRELADLVGKVTTAVFVAQLGSIGDYDNAASVEKAFGLNLKVKSSGKYKGQLKITKRGPALARRYLYYAILRLIQNDPVVAAWYSVKVRENGGYKKKAVVAVMRKVSRALWHVAQGAKFDAKKLFNVGLLKAKAAA

SEQ ID NO: 485910 - protein, 435 aa, unidentified
MDEVTDEPLYRDRVCGIDIGKAGMVATIRVPSERDPARRAAETRSFGTTKREVLALADWLRCWQVPAVVMEATGDYWKGPFYRLEAEGLECVLADAKQVKNLPGRPKRDPSDSRWLAACFERGAVTPCFVATEEFRVIRLHTRYRRELTEERTREKQRAEKLLESAAVKLSSVVSDLHGVTGRAVMDQLIAGERDPKALAQLARARARRKIAELEEALDGAEFFTPAHAALLATMLARIDHLNTEIDQLTGVIERLLAPYEEQLQQAESMPGWGRRAAQDAVAETGADMTRFPTGGHLASWAGRTPLDNQSGKRQGRAKSKKGNRYLGGLLGETAVAAGRTQTREGARYRRIARRRGKPKAQVALGNTQLKVYHTLLSNPGMRYQDLGVDYYERQRGIRRRIAHHVGKLGALGFDVTLCRRPDPQSAGTGETTAA

SEQ ID NO: 485911 - protein, 363 aa, unidentified
MEGEKRRYVGIDLGKREYTMAIIGKNGKMSIHHGKTSIQGRQALYRLLEKNDKVALEAGNLAFIVAREIMDRVGSAVRVLNSAKLPLIWDTPTKTDKEDAMKLAHLVEERRDEKLPLVPLPSEQEMERRKVLSSYGREVRNRTKMLNTLHALFVHRGYTTVVKKDLATAERRQEAVKVLTGQEREDAGYILKHLELHEQRIGELKQKIEKEAKEDENMKRLQSIAGVGPIVAYAFIAHVGDGSRFNKGSQVSNYLGFVPRLYYSGTIQRHGHITKQGNGYVRGLVVQAAWAMVRSKSGGALRERYKYTTANRGASKKKTIVSIARRLAEIMYSVLKHKTEYEPRQWKGPQNTTAMLANQAMCA

SEQ ID NO: 485912 - protein, 415 aa, unidentified
MPNPLFVGIDVSSKDNVVCCLTNADEKRSLSRFTVLNNRPGIMELKERISYLVKKDNFDEIRFGLEHTGCYSTHAAMYLQRHLDFGCPNVNVYMFNPSLIKEFKKAHFLDAPKNDRVDAWYIAARLKSGHLPCPFTWSEPMMALQRLTRARYHLMQALVRESNFLMTNLYLKWSDYTLVFENKLSATSLAVMEEFESTEALAEISLDKLVDFLVQHGKNRFDDPQAVAEDLKKAARSSYRLPKAVNDSVNLAMASSIRVIRTIQEQLKSLKKAIKDHLDAIPQTLVSVPGIGPIYASGILAEIGDIKQFESHKQLAKFAGLAWTEHQSGKFTASQTRLIHSGNRFLRYYLLEAANSVRVHDPVFAEYYAKKKAEPKQFANKRALALTARKLVRLVFFLLKTNQLYQPKGGNRQNN

SEQ ID NO: 485913 - protein, 340 aa, unidentified
MAEQYVGIDLHRRRSVIVRMTPDGEVLETVRIDNDPVALSLELAKAGPDPEVVLEATYGWYWAADLLQACGARVHLAHPLGVKMFGYQRVKTDARDSTNLAELLRMHRLPEAWLAPPAVRELRELVRYRAKLVALRSGLKAQVHAVLAKEGVRVPMSDLFGIGGTRLLDELRLGRAYALRIASLRSLITAYDQEIAMLGREISTALAGDVGYLAIQTIPGVGPVLAAVFVAEIGDVHRFAGAPLLCSWAGLTPRHRESDTTVRRGPITKQGPRLVRWAAVEAVQRLPGASKQAADFHRIADRRGTGIGRVAAARKLLTLVYYGLRDGQVRCLAPAPREAM

SEQ ID NO: 485914 - protein, 400 aa, unidentified
MHLTANISIPQKNFIAIDLHSDNAVICVRRNALNKAGELVGKNIWCGRVSIRDGLDNFIKVLLPHCHDFDHVAVVESTYSWYCLADVFEERGWLLRIVDPSTVSQANLKASDDRTDVQYLAERLRVGSLKHYLPLSSPSRALRDLCRYRMAMVQDCASLKIKLINLYRNQLSKNLRVADLLERCRSHMQPNYRFNPDILEEFKDPNIRLRVAFEISRISMLEEMIEECNAEIQQQCKEQGLVKLCKTIPGCGPVLSAVICTEIGTMQRFKSAGDFVSYCRLCSTSKLSNGKSKGLGNAKNGNAYLRWAFTEVAQYASRNPVIREILQRLLRKYGGLRVKAIRTLAAKIARVTFYVLKNKQPFNAAKCFGMELTKSIKKKLEHKPLREDAAVVLPTVAGQA

SEQ ID NO: 485915 - protein, 520 aa, unidentified
MGRMIIGVDPHKASVTIEVVDQHGMLAATGRFPTARGGYQALMKYVRQWPYRVWAVEGAGGAGRPLALRLVRDGERVWDVPAKLAARVRVFDVGQGRKSDETDAHSIAAVAVHTRGLRELALEDVDLEVMRLLVDRRDEVSRLRVQIVNRLHRLLTELIPGGASKRDLSATQARRMLAPVRPRDPAGATRRRLAVDLVGELETVDGKLKMLKAELRIAVRGYGSRLMDLYGIGPAGAARLLVDVATITRFPSKAHFASWNGTAPLDASSGEQIRHRLSRAGNRRINHVLHIMAIVQLRNDTLGRAYYRRLLARGKTPMEALRCLKRRLSDVVYRQMLADQLAATVGPTNHDPGQAGPGGHTGATADSSADDLTTPTVASSDKSLPGPATNHATPDQQPADAHDDEDGDDLVDELSGPVEAIDLPAVTVLRRARAGAGPGLPLNSPARARRGSAVQGGPKGRRRGDPRQRALDGGGASPYQRGAGDPRAADSNNTGGEAATDQNLSSQDRAEEHGSHNPLT

SEQ ID NO: 485916 - protein, 334 aa, unidentified
MEQITTVGIDLAKRVFALHGVDAQGRVVLRRTVRREQLLEEIATLPPCLIGMEAGSGAHEWGRRFEPFGHRVRLMAAKFVAPYRQSGKNDGNDAEAICEAVGRPKTRFVPLKSAEQQAVLSLHRVRQGFVTERTATMNRIRGLLAEFGVVLPQRSPTVRRQALKAAETLPLLARRAIEDLCAHVRVLDERIDSYDRNLHQQAQTSEAARRLMQIRGIGPLSALAIVATVGNARDFKNGRQFAAWIGLTPQQYSSGGKTRLGHITKRGDAYLRSLLVQGARSALHTATRHRDRASRWACELEQRRGYHRTLVAIAAKNARIAWALLSKGEALRPS

SEQ ID NO: 485917 - protein, 404 aa, unidentified
MPTYFVGIDVSKFKHTCCIIDGDGEIIKKSFDFSNSKEGFDSLIEIFKSIDQSESLFQIVMEATGHYHECLFRYLVANNYLVQIKNPVVIVRFKQSEYLDKAKTDNLDALLIAQYASKHPFSPSMLKSYNIERIRRISRAKYFLYQDKERTINHLHRYLDESFPELIPFLRNRGDIKRYQGRNFFDSKTTLWFVENFPSAKKFSNARSETAEKLRRMSKGAFSLIKFNELRNIAKNSVGVSFQETEEIIIQLAQELRNIQERNDKLDELLTPLIDETSPNLLTVPGIGYRLAGLLISEIGDASQFPSADKIIKFAGLDVRVYQSGTIEKHGAIRKRGSPLLRYALFQAAEKARIHCPEIAEFYSKKKGEGKHPICALTHTARKILRIVWALLKTGQNYSQTISD

SEQ ID NO: 485918 - protein, 372 aa, unidentified
MKYIGIDLHSNKFTCCFLYENNRKQTVTYILDNHGVKDFLKHVNKESYIMVEASTNTFRFVERIKHAAQEVIIANTHKLKLISLVKKKTDKIDAEKLAIVLKMQITSNQKIFEPVHLPDNVIQKLRSLFTTYRLYRKHITSIKNRIHSIYKQELMPFTKEYIFGKKTKAILKEININPSVDFQLDLLFDELEAKEKAINKVTDYIMYAAKSYKKQIDILTSMKGISIITAIALIADISEIKRFTNSKKLASYLRSAPGVDSSNDVIRNLSTNKMGRRLSVTLLSQSLNHFRDSNLKIKKWYEKKIANGKKPGKVRMAICRRVFTEIYQMLKKNEYHYYRDERNHMNKMKTYKKFLTNYRLADKYVYDVKKCA

SEQ ID NO: 485919 - protein, 367 aa, unidentified
MGARRRSPGPSHVLITPDHASNVVGIDPYKRTLTAMVIDPRGGILASEHFRVSGEGHRALEAWALQFGAVARWGIEGSASWGRHTAVFLADRGHDVRDVCANRTARQDRARQRGKSDVLDSERIAREVLAHPLLPKAFKRAGQDQGPDEQHQLLAIWHNQRRSILTSRQHLVGEAESLLCELPLELRDDLPSSKAVRPRLAALERRNRRRRYDAPTTLRLHMLDEYRAQIVALDREEKQVVAELKKLVQASGSTLTELCGLDTRSVAELLVETGDPRRFTEGGFGRFNGSAPLVASTGEGPGDPVRHRYNPGGNRRINAILHRMAVTQLRCEPRAQAIYANALAKPHTKKGARRILKRHLRMSSTAA

SEQ ID NO: 485920 - protein, 352 aa, unidentified
MVHVGVDLDKRSSQIAVLTEDGEVAQQRLPNDAARLEKFFAELPPHTPVAIEASGTWWWLVDLLEHLGHDPILSHPKQTKAIAAARLKNDRVDAERLALLLRGDLLPTVWIPSAALREARELVRHRVQLVWLRGIVRNRLHAMLARRNLQPVSTKTWLTQRGQRELQRLPLADTPSRIREDCSALLPLLDAQIRRLDSELGARWGGDPRVQRLTTIPGIGPFIAIVLVLELGDIARFPSAKQVASYVGLTPRIRASAGRIRAGHISKEGNRLLRWVLVLAATQAVRRPGPLRTWFHAVKAAGQESRAGRARAPTRGDRVSRLETRVRLLHRRPSWCRAGVSSDVDMVFGPPS

SEQ ID NO: 485921 - protein, 314 aa, unidentified
MDKVAAGIDVSKDRLDVAVRPSGERFVVARNGAGLDDLVARLKELKPCVVVLEATGGFETVVVAALGIAGLPVAVVNPAQIRAFAKAVGQRAKTDPIDAAVIAHFGEATGVAPRPLPDAATQQLADLVARRRQIVEMIGAERQREKRANPRIKKSIGRLVKALERELSSVETDIDDSVRSSPAWREKEDLLSSVPGIASVISRTLIADLPELGSLGRKQIAALVGLAPFTRQSGRWRGKSFIGGGRPSVRRALFMGAIVARKHNPLLKAFFERLLAAGKPKKVAIIAVARKLLTILNAIVRDGIPWKATLEAVS

SEQ ID NO: 485922 - protein, 341 aa, unidentified
MERLYYIGLDIHKKTISYCVKKVDGTIVEQGAIAAQRKTLLKWMGGLPGPWLGAMEATLFTGWVYDFLKPYAIDLKVAHPEMLKAITAAKKKNDRADAEKIADLLRVNLLPECHMLSEELRELRRILRYRNMIVRTAVKMKNKMSGLLMEVGATYNKEKLHRRKYFNNLLERVEDVPDSVKDMLKLSRSSLEMFEAVQKKLVHTLREDKLIHERVERLMSIRGVGEVMALTWVLETGDSSRFHSARQAISYCGLCSAQRESAGKDQRGPISKKRNKHLQTMLIEAAKLAPRWNPQLAVLHEKEVNQGNRNRATISVARKLVEYMLAVERQQKDFVPPVLAA

SEQ ID NO: 485923 - protein, 321 aa, unidentified
MKGQSELFGKYIGIDISKDELHVALTAEGPVWVIKNDAAGVAKMIERLAELKPELIVMEPTGGYELPLAGTFAVAGLSVAIVNARQIRDFARGAGKLVKNDTIDAMIIAFFAERMRPEPRPLADAETMHIDALIRRRKQLQENLLAEENRLRTALVALERVSLQRHIDWLKQEFKSVEKELQVAIKASPLWRVKAELLRSVPGVGKVLCGTLLGGLPELGRLNRGEIAALVGLAPFNHDSGTMRGQRHIRGGRHDVRKALFCATRVSINSKYNPLLNEAFARLHAAGKPKRVAIVACMRKLLVILNAILRTNTPWSPDLHA

SEQ ID NO: 485924 - protein, 366 aa, unidentified
MKKIVKQVAGIDVAQKELVVCLGRMYDDWSPQLYANKTFSNTIKGFIALLQWIKKMTDETVSVRFVMEATGVYHESLAYYLNDQGFALSIVLPNKISNYFRTLDIKTITDKTASEAITQFGLERKLDYWRRPKEIYKKLRQLARERDQIVQERTVAKNQLHAEQAEAEPHKKSIVRIKQRITLLDKQDKEIQTELAMLIKEDKEMQALIIIICSLPGVGLLTAAIVLGETNGFELIRNKRQLTSYAGFDVIEKQSGTSVKGKPRISKRGNKYLRKAMHLPALTAIRHDQRFKAIFARLVSKHGIKMKAAVAIQRKLLEMIFTLATKKMTYDKNYFIKPIERENNKEKNCRIKLESSNNSHSLNRLA

SEQ ID NO: 485925 - protein, 403 aa, unidentified
MIFVGIDWAEAHHDVCLLDDGGQVLAKRRVAEGLEGVGKLHALIAEYAEEPASVVVGIETDRGLLVSSLLAAGYQVLAINPLAASRYRDRHATSGAKSDPGDARVLADLVRTDRHQHRPVAGDSELAEAVKVLARAHQGLIWGRQRQVNQLRNMLREFYPGALIAFEDLDSTDAMAILELAPTPSRGRALSRAKIASALRRSGRARNLETKAAEIQSQLRQPQLESPALVAQAYGHSVAASVAVIKQLNQQIAALEQELAASFESHPDAEIYLSLPGLGRVLGARALAEFGDDRTRFAHPKARKNYAGMAPITKASGTRKVVLARVARNRRLADACYRWAFSSLTTSGGARRRYDSLRARGQTHHQALRALGNRLVSILHGCLANRDTYREDVAWRSAFEVAA

SEQ ID NO: 485926 - protein, 401 aa, unidentified
MISVGIDVAKGKSTVCILKPYGEIVSKPFDISHVEKDLGELAAMLLRFDDEVKVVMEATGIYHLPVLTYLQEKGLFVAVINPYLMKVYRSGDLRKAKTDKIDSRIIANYGIEHWFTMAEFKASDDVYGELKMLGQQYRHYMKLHIMSLHELTHLLDYTMPGIKGMLASWNEGNRKDKLSDFVERFWHYDTITCLSETEFIKQYMSWAKEKKYHQSQDKAQAIYALAREGIPTLSSETPSVKMLVTEAVRVLKEVDATLSIILSRMQELAKSLPEYSIVRGMGGVGEVLAPKLIAEIGDVRRFHSGKALIAYAGIDIPPYESGQFVGSNRKITKRGLAALRKVGYETMRCIKTHPRPDDPVYQYIVKKEAEGKAKKAAKIAGLNKFLRIYYARVKEIYTDIK

SEQ ID NO: 485927 - protein, 409 aa, unidentified
MNPLFVGIDIGARHNVVQTMDAQGQLVSRFKADNDLTGTTTLVQQVVEAAERVGADTIRLGMEATSLYWWHLHQALVEHPALAPFQPQVAILNAKVIHGFKQIYPDLSKTDNLDARVIADCLRFGRVRYTPPPDFRFAALQRLTRFRFHQAGCLTREKNRALNLVFLRFSNYSQNCPFAHVFGKASQAVLTELTPDEIAEAPLEQLVELMLEHGNRRLADVPAMAQQLQALAHKAYRLHPKMQDSVEVALTMSLDTIRFFEQQLKKLDQVIAREVQAIPNTLRSIPGIGPVYEAGILAEIGDVHRFKDHNALAKFAGLTWRQHQSSAFVAEDIPLSRSGNFYLRYYLVEAANSVRMREPEYAAFYQRKHAEARHHHHKRALVLTARKFVRLVYALLSKGQIYQPRRSMG

SEQ ID NO: 485928 - protein, 523 aa, unidentified
MASTRSSKRSRAAAEFLQKPRGIIHPRVQQVGPDHFGIVSVDCAKARCKWMLTDFYGTILVPPTEVANNRVELDAAVARCRAAMIQHALGDAIVAIERTGRYHHPVKNAFARAGFETRVVHPYATKQFRQPANPDNKTDDTDLAAIARAAVNGFALVENPLPEAWRQLQLCIRHRRDLVRKTSALACQIREHLDAAMPGYAACFADKLWDSNVAFCLVRQFGSATVLLQQRSTGLCHYLRQQKVRFQQRTLDTVLAWAQSAAAPDPAAELHRQIALAYHDDRQRKTEEILVLERNIAHRLAQTPYILLLSFPGINVVSAADYAGEMGPIENYANPRSITGRAGLFPSRYQSDRVDHADGPLVRRANRALRAVIMGIADNLILCNQRFRMLAAAWKAAGKDPRLSHVKVACRFCRMSFHMVAGRQVFRHPSLRERGYILDKLLAFHLEHQTPYQQSLRDLNLAFTQIPAKEHAAEAQPLIDRQRTARRGRARGPQPIGEILAIVLARLGVGALPSTPSGDQDLP

SEQ ID NO: 485929 - protein, 438 aa, unidentified
MSNKVIFNLDELFISVGIDVGADFSWMSIALPNQQFVGKPYKILHNSIDSLTTAVSKIKEAEELYSLESRIFLESTGIYHYPLFCYLRDKGFNCSVINPIITKNSTNINIRKVHNDRFDSKKAALVGLKPDLKVSLMPSDLALNCRNLCREYYDLMDNRSAYVNKLQGELRIAFPQYLGIFSKVTINTSLTLLETYTSPSAFLKADKQEIIDIIKSTARFGLTYAQNKYNAIIQAATDANQFGYIIDSNIKRIRLYISFIRKYDEEINSILESLHELVDANEDSDFVKQIHLIETFKGAGFLSAVSIMGEIGDFSAFSKPKQLFAYFGLDPAVKQSGKFEGTKVQMSKHGSAIARRVIHTLTLQSISISRNREAKNPVLREYYLKKCDSKPKLVAMGAVSHKVCNMIFAILRDNKPFKIIAPQEHIKQYNSAKCDIAA

SEQ ID NO: 485930 - protein, 344 aa, unidentified
MKHYAGLDVSVKETSICIVDEAGRICREMKVVSHPEDLLAVLCDPAWRLERVGLEAGPLSQWLFSGLAEAGVPAICIETRHAKAFLKAQVNKSDRNDARGIAQMMRVGLFRPVHVKTLASQKRRALLAARKILQEKALAIENDIRGLLRNFGLKVGIVGVVGFEQRIHDLVEGVPELADIMEPLLAARRVLREKFAKLHRKVLLLARDNEVCQRLMTIPGVGPVVSLAFISTVDVPARFRNSKAIGPSLGLTPVLNQSGESHRVGRISLCGDEAMRALLYEAAQVMLTRVQKWSWLKAWAMNIAKRRGQKKAIVALARRLAVIMHRMWSDGTEFRWTREMAPTI

SEQ ID NO: 485931 - protein, 383 aa, unidentified
MKKDSTKQSIGKNTKQVVKKNTRQKVKQGLKPSNNVVGMDLGDDYCRYCMINGDGEEIEKGRVRTSLAGMEKRFKGMEKVKVVMEAGTHSGWISRQLKEMGHEVIVGNPRKVELISANSNKTDGVDGELLARLGRADEKLLYPIQHRREESQADLELLKARDQLVAVRRKLINHIRGAVKSVGGRLKKCGTESFHKQVKGEIPELIALSVEPLLETIEHLTKQIREYDRQIEKLCREKYQETELLQQVNGVGEITSLGFVLIVDEPGRFSSSRSVGCYAGLRPARSQSGTQDPELGITKEGNSFLRRLLVQSAHYILGPFGKDCELRSWGLKLAGRGRKNAKKRAVVAVARKLAVLLHRLWVNGEEYDPFYYSHQHPSLVVAQ

SEQ ID NO: 485932 - protein, 447 aa, unidentified
MKQKKPNKRKSVKLPKHLQNLNPYAAGIDIGSKSHFVAVPEGTDDQPVREFSSFTDDLERLAQWLTACGVTTVAMESTGIYWIPVFEILESYGLEVRLVNARHVKNVPGRKSDVLDCQWLQQLHTYGLLRGAFRPVDQVCALRAYVRQRSTLVRSAASHTQRMQKALAQMNLQLHNVVSDITGVTGMRIIKAILAGERNPKVLSAMRDPRCKNTAETIARSLQGNYRQEHLFSLRQAVELYEFYQEKISDCDQQILAQLKDFEAPDNHDPDQKPPRTVGEALQRMSGVDLATINGIDTNTALKIIAEVGVDMSRWKTAKHFASWLGLCPGAKISGGKVLSSATKQVANKAAAALRMAAFALINSKSALGAYIRRQRARLGAAKAITATAHKLARLVYSMLKNGTAFVDVGQEYYEERYRTRVVQNLKRKAQDLGFELVAIQGAAPTT

SEQ ID NO: 485933 - protein, 434 aa, unidentified
MNEEVYYERCAGIDVHKKLLVVCLRIGSKSEVREFGTLTHEIRSLTAWLKDNGCQMAAMESTGSFWKPIYNIFEQENLPVMVCNAHHIKNVPGRKTDVNDAQWIARCLSQGLLNPSFIPGREQRELRDMTRFRKSQVEERARNINRLQKFLEGANIKLGSWLTDVEGKSATELLELVIGKPDFTMDDVASRMHWNMKSTAEEIFLSLEGYMTSTQREFFAHIMEVIRQQTAQIEKTDAMIQRCLSDNYKAAVETLDAIPGIGRVSAEQIIAEIGTDMNHFGKPQRLSKWAGVCPGNNESAGKRKSGKTPPGNKALKSTLTQCAQSAKKNKNSFFHAQYGRLAPHRGKNRATMAVAHSLLIAIFYVLSGNEFKDLGAGYYTQFNREKKINSHIKQLSKLGVIIPDNIVKEALLIPSEYSGRSTLLQPIDHSSRSA

SEQ ID NO: 485934 - protein, 516 aa, unidentified
MASATARKRRRVFQVQKPNGQLSPRVQAVGPERFGIIAVDVAKKRSRLLLADFYGTVLMTPVTVEHERGPLNAIIATLRGFIREHDLGDVVVAIERTGEYHRPIQRAFRAAGFETRLVHPFTTKQFRLPADPGNKTDDTDLAAIVRAVTQGFGLLEPVWPELYLSIQMLRRHRRDLVDKAALLQNQIKETLHAAMPGFEAAFTHLWQSPAPLAIARAFSSAADILQAGADGLRATLKEAGVSPRHDTIAKVLDWARNAPQGHPLNSLQRRIFIALEDDRREKTKLIQAIEVDLARLAVQTPYALLLAISGINIVTVADLAGEMGPIEFYADANHITGRAGLVPSRYQSDRVDCSGPLVKRANRRLRAVLMQTASNLIGCNNTYNARAAAWRRQGKDDRWIRVKIAKSFSRLLFAMVAGRQIFPHPALQPRHYVLGKLLEFHLEHKVAPPQMRADLEALCDQLPAKARAAETPPLQERLDELRRRRAHGPRPLAEILPIVLARLQVVQSNPRSEDPS

SEQ ID NO: 485935 - protein, 421 aa, unidentified
MENTAARKRKQVPEGYLIIGIDPHKKRHAAVAITQDFTIRDKFKFDNTREGLETILRRTRTEMVKADCRGVMFAIETGGHYWRNIAYFLDEQGIPFRFINQYTLKRRREGKDLNHKKNDYRDSEVAAQLLCTGEFTDSVIPQGVYAELRTAHNAYRRLVKERTRITNLVKGLLDGLFPEFTQVFKDPCALTALSVLSACATPGVIAGMMEDEFVAAIEAKHQGRLMRKKLKELHYKAKASIGIAAGARSVSSEISFLVEKYELIRGHICIIERTLVSLVNEAEEGKYLLSIRGLNYIAVAGLLAELGCFKLYRSAKQMIKMAGSNPTESESAGKRGAHTPMSKQGRPVLRYCAWTSVIPMLRFNSDFRAWAKQRRERPAHANPLNGREVVGAALNRLFRLAFAMVKNQTYYLSPQLVQVTG

SEQ ID NO: 485936 - protein, 453 aa, unidentified
MRQAKSSSMPVVHPNAAGVDIGSQFHVVAVSPDRTDEPVKTFKSFTGDLHAMANWLKFCRIETIAMESTGVYWIPAFEILESYGFEVFLVNAREAKNVPGRKTDINDAQWLQRLHQFGLLRASFHPSCNIAELRAYLRQRERLLDYKASHIQHMQKAMMQMNVQLHHVVSDITGRTGMDIIRAIVGGQHEPKELVKFRNIRCQNPDEVMIDALTGNYKPEHLFTLKQSLELVDFYAEQLKACDQVIESKLKQLKEMAELPQKTLSKRKKTGYCANAPEFDVRAALFNFIGIDLTEIHGIGPSLALKLVAECGTDMSRWPTSKHFTSWLCLAPGNKISGGKILSSRTRRSSSRAAAHLRLAATTIGKSDTALGAFYRRLATRTGKAKAVTATARKIATLFYNALRYGMEYVDKGACYYEELYRNRVLGNLQRRAESLGFILQEKDKILSAEGVS

SEQ ID NO: 485937 - protein, 351 aa, unidentified
MIIIGVDYHPSFQTIAFLMEETGEYGEQELNHSDGEAERFYRKLKERGIDVRVGMEATGHARWFERLLAELGFELWIGDPAVIKTKRVRKQKTDREDARLMLKLLREDRFPKIWVPSPENRDLRQLLWHRHRLVQMRTRIMNQLQAVAMNEGYRWKKKLFSEKGRGLLEKLPLAPWASRRRKELLELLDQLDPKIAELTAAVEQEAKKWPEVLLLMTHPGVGPITGLAYVLVIGTPDRFPCGKQLGSYTGLIPCEDSSAGKQRLGHISKQGNKLLRYLLGEAAQAAARCNPDWRRRYMHLMMRREKRIAKVAMARKLAVRLYWMWRNGWQYSQLVEFGSNAGKLGIVHGVK

SEQ ID NO: 485938 - protein, 398 aa, unidentified
MAGKPKVVGGVDTHADTMHVAVLTLLGRKLADKEFRTNAQGYWEAIRFMTSHGRVQTVGVEGTSSYGAGLTKALITAGIQVIEVNRPDRAARRRRGKSDPLDAELAARAVLSGNATSAPKDPAIEAIRALFNARRSAVKARTAAMNQITSLLVTAPDPVRAKYRSLKEKALVTALRNCRPSSNDPVATAVLTALKTLAKRHQFLTSQADEMEAQIDVLVTAANPALRAAFGVGPDTAAQLLITAGGNPDRLGSEASFAALCGAAPVLASSGKTNKHRLSRGGDRGGNSALHRIALVRMSNHPQTRAYVARQVEKNKSKAAILRMLKRAIAREILRLLTKQIPVPEYADLRPARQAKNITLTTVADHFDVWPMTISMIERGKRRDDSFTQSYREWLAAA

SEQ ID NO: 485939 - protein, 404 aa, unidentified
MDKRCYFFFEVITMIFVGIDVAKDTHYAAVSDDSGAVLVKPFAFQNNAEGFCLLLKKLSEFDRSKLLIGLESTGIYSENLICFLYESGFRLAVINPIQTATLRKTAIRKTKTDKVDTMLIIKSLMVNSYRLYSQRDADSLKLRTLCRFRQNLKKSKARLKIQLAGYVNLVFPEFGKFFKSGIHIAASYALLKKYSSPKEIAALRTSTLCTLLSKASHGRFGKDTAEALKSLALSSVGVKNPYISIQIAQTIAQIELLEQQIKDLNSAIEEAMESINSVLMTVPGIGAVNAACILGEIGDIKRFSKPCKLLAYAGLDPTVRQSGQFTAKSTRMSKRGSALLRYALINSAWQLTLNDTTFKAYYDLKRSQGLNHYGALGHVAHKLTRVIFKLLTSDTPFNPAKLVA

SEQ ID NO: 485940 - protein, 439 aa, unidentified
MILIREVADAPVIMGISKPAGLKSPCGEVKIVNPLFVGIDVSSKNNVAYLMKPDGSKHSSFSVQNNLGGAKILSERIVSALGSMQLSDVVIGLEATSIYGDSLVYALREDGSLGRFQRKIHVLNPKQVKKFKEAYPDLPKNDFVDAFVIADHLRFGRINREVYMDDYRYKALQTLTRARFDVIQNLTREKQRFANYLFLKCSGMAQDKDIQNTSATTIALMEHFETVDDLANADLEELTAFITETGRGKFADPDATAKAVRAAAKGSYRLPKTVNDTVNQAMAVSIASMRALKGQVKVLDKAIEQQFEIIPNTLTSIPGIGKVYSAGIIAEIGDIHRFDSQASVAKYAGLVWNRSQSGDFEAEHSRMIKSGNRYLRYYLLEAANSVRRCDSEFRRYYDLKFKEVNKYQHKRALALTARKLVRLVFRLLKDNRLYIPPEG

SEQ ID NO: 485941 - protein, 367 aa, unidentified
MSDVIALDVSEGHSYVVWYAHGVCQSEFQVLHTQSGFAKLLKLALRANQPTVYFEATGVYSRPVERFCCDNHLPYCRLNPLDLKLKTNGLRRLKTDSQDAHRIARAALSNDFRITQPRTVIYTRLRELTRFHGRIQADMHVKHVLLHTQLQQTFPELEQLFSSRVSKLALNIVSLFPHPDLVNGLSRTVLKNRLMQSTDKKLSKAKGLKYAEKLQSLAKDSYPAVNSDSVQVQAVRYYCRALINLTIKKEHLIKQLVVLAQNLPEFDVLTSMPGIGVQSAAELIGELGNIRRFDNANQLNAFVGIDINRYQSGKYLRQDHINKRGDPKARMILYLIVKNMIRAQHAAPNHIVDYYYQLKKRPHSKAE

SEQ ID NO: 485942 - protein, 343 aa, unidentified
MKLTRVGVDLAKQVFQVHGVDRAERPAWCQRLKRSRWVAELERQVEPGCEIGMEACGGAHHWARLLQSKGYVVKLIAPQFVKPYVKSNKNDANDAQAICEAMSRPSMRYVAVKTVEQQDIQAVHRIRSSLITERTAKANQLRGLVYEYGLVAPREIASLRRAVPAWLEDATNGLTARFRALLAALYRDLQYLDERVRGLDREIAALARENEAVRRIEQLHGIGPLTASALVAMVGDGRQFKNGRHLAVALGLTPRQHSSGSKEKLLGISKRGDKYIRTLLIHGARSALRTAPGKTDRLSRWALALAERSHPNVAATALAHKMARVAWAMLRNGTNYEPERMVA

SEQ ID NO: 485943 - protein, 364 aa, unidentified
MYDSMTTVTVGLDVHARSVRLAAVRADELLEERTLPYDEDAVERVLRRWPGVRCCYEAGPTGFGLYRHLIGRGIDCSVVAPGLVPQRPGDRVKTDPRDARKLARLLAGGLLEPIHVPSRELEAARDLVRAREDARLDRMRDRHRLSKFCLRHGRVLPTSSWTVMRRKWLGEQRFEFAAQQITFDSYVHTVDLVDARIEQLERAIRETAEQEPWCGLVARLRCLRGIETLTALALVTEIGDFDRFKTAEEFMAFVGLVPSEHSSGEKRRQGSITKVGNSHVRRLLVESAWHARRRPKVGYELARRQRGQDAVVVERAWRCQQRLYQRWQRMAGRGKPQQKIVVACARELAGFVWAIATEQPLRNT

SEQ ID NO: 485944 - protein, 317 aa, unidentified
MSKRSIICAGIDTGKHKLDVALHGRPERLQVANTAEGHEELLAWLQQHRVKRVGIEATGGYEQTVVWRLRQGRFVVVVFQPAQVRAYGRFHLRLAKNDRIDAALIAACTSDIKTIHAPPDRRLAELAELQTQIDQIVRLMARFKNHRESCRDADLRQLWGDEIRRFRGLFRQRLKQLVAAIRQHPDLAKRLELVLSIDGIALRTASAIVVRMPEIGQLSRGQAGALAGLVPYDDDSGEHAGERHIAGGRERLRNNLFVAAWIAALRWNPHLTALYKRLRASGKEHKVAVVACARKLLIFANAVVARGTPWEDRTIAP

SEQ ID NO: 485945 - protein, 382 aa, unidentified
MNRILKIGMDVHSTSYTLCAMEPVLGGEDRIFANIQVTSDYRNVIQFIDKLKEKLGSSDSYSIECGYEAGCLGYSLYHQLTKAGVKCTILAPTTMLTQQGKRVKTDKRDAVMIAQCLSYGGYHAVHVPADKDVSVKEYLRMRDDHKVALKKIKQQINAFCLRQGYFYAGNKWTIKHLNWLKKLVLSDLYRETLNEYLTSYEEQTAKIERFDKRIEELAEDSEYQENVKKLGCLLGIKTHTALSLIVETGDFKRFRKGNTYAAFLGLAPGESSSGEKISRTGITKAGNSHLRMLLIEAARGMCRGRIGYKSKVLRSRQDGNPTEVIAYADRGNTRMRSKYYRMIRHGKKDNVAVAAVARELACFIWGLMTNNITPKGEGTKAA

SEQ ID NO: 485946 - protein, 348 aa, unidentified
MRGAVHMQITTIGLDIAKNVFQVHGIDTTEKVVVRKQLRRGQVLAFFKALAPCLVGMEACATAHYWARELTKLGHQVRLMPAKDVKAYVKRNKNDAADAAAICEAVRRPTMRFVQVKSVEQQGRLMLHRTRDLLMRQRTQVINALRAHLAELGIVFAQGREGLKELLKIIASEQDARLPVDAHTSLVVLAAELQAMQTMIGSVEKRIMAQHRSSEASQRLESIPGIGVIGATAIAATVPDPKVFRSGRDFAAWIGIVPRQDSTGGKHKLGPISKQGDRYLRRILVVGAHAVLKRSRQQPEKYPWLTQLLARKPFRVVAVALANKMARIAWALLAKGGLYRAPALAAAA

SEQ ID NO: 485947 - protein, 396 aa, unidentified
MKAVSGLDVHKDTIFACILQKGKAPFIKEYTTLTCGIEELKNDLKTRNVSMVAMESTGIYWIPVWKILETHFKMILVNPYYIKQVPGRKTDVKDAQWIATLLQKGLLKESFVAEGLLAELREYTRGYERLCRHESRLEQAIERQLIKCNIRITSFATQIGSASVMKIVKAICEGETSANKLEALVHGRIRNKHKEKIFQSLEGSIRSFDRLILKQAYQQYLLIKEQQNELIDHMNRICSEHFKKEMNVLCTIPGINNLSSMQIIAEIGVNMENFPTDKHLVSWAGLRPRNDESAGKIKSSKTTHGNKYLRRVIVQCAWAASRTKGSWFQDKYHQLCVRKSEKKALIAIARKQLMICYLLLQTKQNYVTPVRVLSEKQKERKIKYLHKQLEELLKMG

SEQ ID NO: 485948 - protein, 431 aa, unidentified
MNTVTPVPVQDRKHVLSVGLDWADQKHAVCQRGGADGQRQVFEIGTDPASVQAWLAELKALAGTQGRVAIGFEQSRGALFEMLRAHTDWIDLYPLNPLTVSKFREALFTSGAKDDPLDSQLIEELLYHHLDRLRPYQAPEPELRELDLLCQQRRKAVDAAVACANELCSLLKVYYPLALDLHEELRCTLTLHFLKRWPTLEQLKKAKPQTLRSFYYQHHSRSQSLITERLEKITRAQAVTEDLALIRPSVLSLQRLVNQLLTLQTSIAAFDKAIQALFAQHPDHLIFESLPGAGPQLAPRLLAAFGSNRAALSHPSEMQKKSGTAPVLDRSGQGKTISRRWCRSKFLCQTFHEFAAHSIPHSTWAKACYQELLARGKSHNAAVRALAFKWIRIIFRLWQDRTLYDENRYLQTLKNRRSPLSQKILAPMFKT

SEQ ID NO: 485949 - protein, 267 aa, unidentified
MEKLYGGIDIHKENLAGCIMDKNGNITREHTFPSSKKAVERFLYGIPSSGITIAIEACGMWRGVHKILTEIGYEVKLANPKKTHDIAGSKKMDKIDAKTLADLIRTHYLPEVWIPDEQTLQFRDLTRHKANLTRLKTQVQGKIRGYLLRKGTKYSKLSTEKTLSTLAEEDPDIKNLVQVYRCLKEEEREVMRRIKRISQNMKETTMLMSMPGIAEFSSLMILAEIGDIKRFPSPKELVSYAGLCCGIYQTGTTERSVHNTAVNKWLK

SEQ ID NO: 485950 - protein, 403 aa, unidentified
MNAVGIDVSKGKSMVAIMRPFGEIVSSPFEIKHTSSDIHSLIKLIHSIEGESRVVMEHTGRYYEALAHQLSAADLFVSAVNPKLVKDFNNDSLRKIKSDKADSVKIARYALDKWQSLEPYSITDELRAQLKVMNRQFHFYVKQKTAMKNNLIGLIDQTYPNANTYFNSPTRSDGSQKWVDFVSTYWHVDCIRKMSLNAFVEHYQNWCKRKKYAFNKSKAEEIYTKTKELVPVFPKNEITKHIIRQAIDQLNSTSVTVETIRTLMNETASKLPEYSIVMQFKGIGPSLGPQLMAEIGDVTRFTHKGALTAFAGVDPGVNESGSYAQKSVPTSKRGSSNLRKTLFQVMDVLIKTMPQDDPVYQFTDRKRTQGKPYYVYMTAGANKFLRIYYGRVKEYLSVLPDPS

SEQ ID NO: 485951 - protein, 372 aa, unidentified
MKTTTNKNRSTPSVVSTSSAAVVSGFTLGLDLGDRQHHVCVLDVTGQIIREASLPNTRPALAQLLAEFPRSTVALEAGTHSPWISRYLTDLGATVIVANPRKLHAISRNERKCDRRDAQMLARLARVDAALLHPIQHSSAQAQHDLLGLKLRDALVRNRVSLINAVRFTLKSLGHPVRNPASESFHKHVLADIPADCLPVVQPLLTVLAHVTEQIKAMERDLVQRSKQVYPVTQRLQQIAGVGPLTALCFVLKVGDPQRFRRGRDVGAYLGLCPRRDQSGGTDKQLRISKCGDGLLRRLLVSAAHYVLGPFGPPCALREHGQRLTGTGSAREKKRAVVAVARKLAVLLLSLWKYGTDYEPRVTSPKLVMIPA

SEQ ID NO: 485952 - protein, 348 aa, unidentified
MGLYAGIDLHSKSNHLAIIDENRRRVLKKKLANDPDLILGVLAPYQGEIAGIVVESTYNWYWLVDLLQENGYCVHLANPAAIQKYAGQKHVDDTHDAFWLAELLQLRILPEGYIYPKETRALRDLLRKRQSLVRVRTALILSLQNIVTRNCGIKLSSADLKVLTEDRVQPYLQENEDLLLAGSANKSCIDSLTLQIVRIEKAVEKKLKLLSPYIQLLTLPGVGRTLAMTIMLETGPISRFDKVGRYASYCRKVSSKWTSNEKVKGHGNKKNGNRYLAWAFSEAAEHARRHHAGSRNFYQRKLRQKKNMMVAHNALAHKLARAAYWILRDNVPFHEAKMFGQAEAALYN

SEQ ID NO: 485953 - protein, 343 aa, unidentified
MQTVSTIGLDIAKSVFQVHGVDADGLVVIRRQLKRRYMLAFFEKLPPCLVGIEACASSHHWSRELQALGHNVRLMPPAYVKPYVKRQKNDAADAEAICEAVTRANMRFVPTKTPEQQSGLTLHRTRHLFIRQQTSVINAIRAHLAEFGVIAPVGRKGIEELLQVIADPSDKRVPDVVRACLAALGSQLLSLKKQILDFDRMIMAWHRSNQTSKRLNCIPGVGPLLATALVASVPDPKVFRSGRNFSAWIGLVPKQYSSGGRDRLGSISKQGDRYLRGLFVAGALAVIRYAKIHGSKYRPWVAALLARRPTKVAAIALANKLARMAWAMMARGERYHYPAGLRV

SEQ ID NO: 485954 - protein, 365 aa, unidentified
MRTNSQVTQRSVSEDILYMGLDVHKNHINVTVMSDQAVISQSHVAIGDVESYVAGLQRKHPNSVLRAAYEAGFSGFATQRRLEALGVQTIVVNAADVPTTDKQRTSKSDRADSWKICHALRCDQLHAIWVPSVEHAGDRGLVRYRLPLKKARSQSMSRIRMFLHQQGIAIPDEFDRSYWSKAFRAWLNDQTMTSESSQMTYMLMLEEFEHADAVVSKHMKLIKTLSESDRYRKNVELLCSIPGIGVLTAMVILTELGPIDRFPSADRLASYVGLVPMRHQSGSSDRSMPIQRRAKTELRRMLVQSAWIAIGRANHFMDVYDRQRKIKRSQVAIIVVARKILNTIYAILKTSQPFTGSITSSAKLS

SEQ ID NO: 485955 - protein, 408 aa, unidentified
MGIWVGIDWGTEAHEVCGVGEDGKVSFRWRIEHEAEALQAFATQLLEKAAGAEIRVAIESKRGALIDTLRAHGIRVFHLNPKQLDRFRDRHTISGSKNDAIDAMVLAQSLRTDEPLHHEIASCDAESNELRELVRAYETLVKSGVALSHQTRDLLARYFPQLLSLGSTTDAWVLELWQLCSRPQDAHELSEATLAEFLRKHRVGRWKGKPAEALCRLRATEFTLAPGVEAGCIAHLRHLVPLLLLTQTHRRACERQIEKHLKQRMAAEAAGEKKHRHATILLSLPGLGTIGCATMLTEAAELLEERNYHRLRLRCGVAPSSRHTGKQRHPTVMMRKACNAHLRRAVYHWARASLPRSPRNRAYYANLRARGHSHGRALRSLADRELKMLVTMLRDNALYDPEKRALAA

SEQ ID NO: 485956 - protein, 348 aa, unidentified
MDKITAVGLDLAKQIIQVHGIDAAGRVVLRKAVRRERLLALLAQLPRCVVGMEACSGAHHWARELRHCGHEPRIMAAEFVRPFRKSLAAKNDANDAEAICTAVVQPNMRFVSIKSVEQQALLSLHRVRQGLIEERTATINRLRGVLAEFGVIVPQSATTLQRALPAVLADAERLPAPVQRGGQVLREHLHDLDAHIAEFDRAIAQHAKSSAPAQRLVALPGIGPLTASAMVATVGNPHDYRNGRQFAAWLGLVPRQYSSGGKCKLGRITRRGDAYLRALLVQGARSTLQAALRRAPACHDRLSAWIVQLTRRIGYHKTLVAIANKHARIIWALLARDQALDLAPTTTR

SEQ ID NO: 485957 - protein, 383 aa, unidentified
MTQSKHAGKSTYENLQAIYVSIELSKNTWLITSISPGAGEKLSRHSVPGGDIAGLLSRLGQLKQKARDRTGQDYPFVTIQEAGLDGFWVHRVLEAEGHESHVVDAASIATSRRRRRVKTDRLDGETLIRALLAFKRGEPRVCSMLRIPTPDEEDRRRIVRERKVLMEERIRHSNRIKGLLFSQGIRDYDPLRRDRRERLETLRTGDGRELPVHLKCQVVRELDRMEMLLDQIKAVEAERDAMLVDEQQSAREVVMLTKVVGIGPEFAAVLWGEGLFRHFDNRRQVAAYAGLAPTPWQSGSIDREQGIGKSGNPRLRSTLLEMAWLWLRHQPASELSRWFNERVAQNGGRFKKVMITALARKLVVALWKYVTAGVVIEGARVRP

SEQ ID NO: 485958 - protein, 398 aa, unidentified
MLYVGIDVAKSKHDISVIDSSGKIFVKHLQITNNREGFTKLQSTLTNLQKTTGEEVQIALEDTGHYCFNLLRFLRMNGYPTFSYNPLLIKEFAKHHSLRKTKTDKKDAMTIARKLREDIDKQLFEAKTDMIELKYATRNASKIKENCTKQKINYTRLLDILFPELAPFLGSPTAKHDSSIYAVLKEFPSPKKLANAHLRKLTNLLSSHSRGRFGKEQALALKELASESVGSESPALEFELLQTIDTIEYFTHQRKLADKEVAKIMEEIDSPILSIPGIGITLGSIILAEIRDIDNFKSPNQLLAYAGCEPSVSTSGTNQVETGHMVKRGSSQLRWALHEAARLMSIWSPSMRLYLDKKRSEGKHYNVAISHVVKKLVRIIFQLLKNNEPYDEEKMIVN

SEQ ID NO: 485959 - protein, 341 aa, unidentified
MRKNLYCGIDLHSNNAMYVITDEQDKQLFRKRLPNELPVVLKALEPFRKRLQVVVVESTYNWYWLVDKLQEQNYPVVLAHPSEMEQYRGIKEADDLTDAAFLTRLARLHILPTGYIYPKQDRPVRDLLRRRMLVVQQRTAVVLSLQNMALRQTGGHIGWRALRQLDEEERAALLGDHDCLTFVTREQVELIELLTEKIRRFEKKVLEHVQLRPAYQRLLTLPGVGTILGLTIMLETGDIGRFQTVGDYTSYCRCVRATHTSNGKTKGHNNGKNGNAYLAWAFVEAVHHALRVCPPAKAFYDRKRAKRNGTLATKALAAKWSKAAYYVMKRQEDFDLARVFG

SEQ ID NO: 485960 - protein, 386 aa, unidentified
MPKPADLNRCLAPLDQDHTIIAVIEMSQSSWLVAGVVPGIARHPLKKLAPDQGALLKLLHRWCAEAGQAGREISRIAVAFEAGRDGFWLARWLRAHGVEAHVIHPTSVAVSREHRRAKTDRLDTALLKRVFLGWLRGEPDHCHMAAIPTLEEEDAKRPTRERESLVGERTRIVNRIKAALARLGVRGFKPTLRKALERLDALRTPEGAALPPNTRAELHRDMARLRFVTEQIQQIEAARSERLEQAGAGPNAMVRLLAQVVGVGIETADMLVHEVLSRNLRDRRAVARYAGLTGAPDESGSRRREKGLAKAGNARVRRGMIQLAWRFLLHQRESALAQWYRARTADARGSTRKTLIVALARKLLIGLWRLVTTGEAPHGVALRPAA

SEQ ID NO: 485961 - protein, 415 aa, unidentified
MEPIHKRVAGMDVHRMEHVATILLEQEDGTVSNETRKFGGFKRDMRALVDWLRSHRIQLVVMESTGIYWKSVFSHLEAAGIPALVVNAFHVKNVPGRKTDVSDSEWLAQLARFGLLRGSFIPPKDLRELRVVSRYRRKLVQTLTGEKNRLHKVLDDAGIKLGGVVSDIDGVCARKMVEGLIAGKTPAELSALGRGKLKSSDEVLQASMDGDLSPRHRLVLSTAWNHLRYLEQQVAQLDRYLIEAIKPYAWAWRLLQTIPGIDEISAAMILIEIGVDMQRFGSASRLASWTALCPGNHETAGKRKSGKIRHGNPIVRYLLCEAANATRRTKTVFQAKYTSLVIRRGHKKTIIAIAHKLIRTIYFVLTRRKPYHDTTVDYEAAIVARNAPRWIKALKKYGYWPKAAAANPATATAMA

SEQ ID NO: 485962 - protein, 349 aa, unidentified
MRAKPCGASVYGIDLGKNLFHVVGTDSSGHLVQRVSLNRQTLFHFFSNASVALIGMEACPGSQWLTRKLTAMGHTVKIIPAQFVKPYVKSNKNDLVDAAAIAEAVTRPSMRFVTPKSTEQLEIQTLHRIRDRVVGSKTQLINQIRAFCLEFGIAIRQSVGLFKADFPAALADDSNDLTPRMRVLLEGLWVEFGALETRLAELNKEIEVLATRSEVAHRLMSIPGIGPLCATALIAAVGDGKQFGKARDMAAWLGLVPRQYSTGGKTTLLGMSKRGNSYVRRLLLHGARSCVLHLNRQRDQLGSWITKLATRMHTNKVAVALANKLARVAWVVLTRPGSLYRGDRDVAAM

SEQ ID NO: 485963 - protein, 339 aa, unidentified
MTHTIVGVDIAKNVMQVHWVDQETGEIVNRPVKRAAFLEYFANRNACLIGMESCSGSQHWARRLIEMGHQVKLMPAKFVKTFNIRNKNDAADARAIWMATQMTSKAVAVKTEAQQAVLALHRMRQQLVKFRTMQINSLRGLLSEYGEVMGVGRTALDKAVAGVLERLAGRLPAILIDTLREQWKGLDDLDRQIGQIERRLREWMKDDQAAKAIAVIPGVGLLTATAAVATMGHAKAFKSGREFAAWLGLVPGQTGSGGKVELLGISKRGDTYLRTLLVHGARSIVYRVKAPGPWVEQMKKRRPLNVVIVAMANKLARIIWAMLAHQRPYRKDYESVKPA

SEQ ID NO: 485964 - protein, 323 aa, unidentified
MNKYTETFGIDISKDVFDCYGSSQGHLQFKNTEKGFVKFLKTSKDNTLVVMEATGYYHYRLAQFLYKEGQIVSVVNPLSVKRFIQMKLAKVKTDKSDDKAICDYGIINEVPLYNALTDFQSECLQLFRWLDNLIKKRTATKNKIHGEEVLGVPSKFVFRSLVKTKKNLDKEILGIEQKLLSLVKQDQQVQLTLLQSIPGIGVKTALFLIVVTDGFKKFENAKQLCSYVGITPTIRVSGSSVRGRSRISKVGNRKLRNLLFLCSFSACKQNKGCREIYERITNKGKSKKLALIAVSNKLLKQAYAIAKSGNPYDASFVSVVKIK

SEQ ID NO: 485965 - protein, 526 aa, unidentified
MEVLHPNCVGLDVHKKTVVACALTTEPNGRLRKQIRTFGTMTAELLALGDWLQTLGVRTVAMESTGEFWKPVYNLLEGRFELLVVNAQHIKNVPGRKTDVKDAEWIADLLRHGLLRGSFIPERPQRALRDLTRQRSNLVQDRASVINRLHKALEWANIKLTSVVSDVTGVSARAMLEALVAGQHDPATLADLAEGRLRSKRDLLEQALTGVVQEHQRFIIAEHLIQLDNLDEQIGRFDAQIEAYLARLSNPPANDEAPAAPTTDTPTEAPATPTAEASKDAPATPAATPSTVALATPAANAPKAAPATSAADTPTDAPATPAATAPSDAPATPAAEASTTVSATSAADAPKAAPATPATDLTWQAAIALADTIPGIGPRLAQDILAETGIDMTRFPTAGHLAAWAKLCPGNRRSGGKRLSAATGHGNRHLRAKLVQAAWAAIKVKKSYFAACFQRLAGRRGAKRAIIAIAHRILIALYHMLKQRKPFEDLGATYYDERHQAQLIKRTERRFAQLGLKITVEPLPAA

SEQ ID NO: 485966 - protein, 355 aa, unidentified
MNQEKYIGMDVHQATISVAVMDSSGKLIMECILETKATTILEFIAGLRGTLSVTFEEGTSAAWLHDLLKPHVSHLVVCDPRRNALLKDGSKSDRIDARKLAELLHANKLHAVYHGEHGVRTLKELGRSYLTITKDLTRVMSRIKALYRSWAILCSGATVYAPRHRDEWLAKIPHPGVRLRAERLYQQLDVLQPVRQEARRDLLAESHKHPAVKLLRQIPSIGPIRAALLVALLQTPHRFRTKRQLWAYSGFAVETHDSGEYRYVRGKLQRNRERITVRGLNHNHNHDLKNLFKGAALSASTRPGPLCDFYVALVDKGIRPTMARLTLARKMAAITLTIWKKGVDFDAKQLNRQAA

SEQ ID NO: 485967 - protein, 348 aa, unidentified
MLYAGLDLSRKRLDFHLLDREGVTVEDGAAPPDADGLHSLTARLDRHGETIRAAIESMNGARFVHGLELAGWQVEIADAQEVKGLAPLACKTDRIDAWVLAELSRRDLVPAIWLPDPRVRAERERARWRLHLVRHRSSLKQRVHAVLLTHGKPCPVSDLFGLQGRQLLSRLGLPEPWQGTIEASLRLIDELDREISECERELRRLGADHRYVPLLCTVPGISWVLVYTIAAEIGDISRFAAPQKLAGYSGLCPRVYQSCERDLRGPLAKQGPRYLRWALVEAATHACTAPVYRDRYQQTKARIGKQRGAKVAQIDLARRLSEAIWHMLSRGEAFAPKGATDPWPPDGP

SEQ ID NO: 485968 - protein, 391 aa, unidentified
MFLLGIDIAKLNHVASCIDSSTNEVVFSNFKFKNDFKGFSSLLDKIRTFNAENLIIGMESTSHYGENLINFLFKQHFKVALINPLQTSHLRKANIRDAKNDNLDSLNIARALSFAKLNFISKKNIDCFSLKKLTRFRSNLIKQRSKAKIQLTSLLDLLFPELQYLFKTKIHSRAIYSLLKKHPSAEEIAALKDDEISNLLYASSKGHFRKEKSIELKSLAKTSVGIKDTSISLHVVQLIELIELYDRQIKDIVSKISDTVEKLDTKLLSVPGINIIACAIILGETNNLDNFSDSKKLLAFAGLDPKIRQSGNFYASSCRMSKKGSPYLRYALIFTAWNIARHSEKFNRYYCLKRSQGKSHYNALGHVAHKLVRVIFTLIKKDIIYQEENLR

SEQ ID NO: 485969 - protein, 398 aa, unidentified
MTRKNTLKSLPTDTEFRVVGLDLAKSDVSVAAIPVDDNTPSLVDRMTYADLLDWAGKISPTLFAMEPCNGYSLLCLQLENLGHEIKVISGSTVSMWINTHLSGQKTDLNDAIALARLAVSDAELTPIRHKSITEIRIQTVQAVRQQLMSQRSKSIVSFKALAQQWGIPCAAGHRNLKKLRESIEAKVDLITRPVANAMLFLLDAVKSLDRQIGQLNQTLQELVMSDERGRLLQSVLGVGTQISARVITVVGNIERFNSPRSLVAYVGVAPRNFITGHKNLTKKKHGNCPDLSHKGQGKISRRGDKLLRSLFIQGAACLYMQFCKDQLPECQLKRWILKQLARQKPYGKLIVSLAAKLIRIVWAVLTYREKFNIQKAGMTRSMWSEMALETPLNKEVPA

SEQ ID NO: 485970 - protein, 429 aa, unidentified
MSYRIAGIDVHKKMLAVVVTDVEIDSEYQFEQRRFGSNPEQLRSLAAWLLEQEAEEVVMESTAQYWKPVWEALERCWKPICETRKGARRKSGTLHLAQALSNRGRRGRKRDFPDAERLVKRLVAQELTLSFVPDAEQRLWRTVTRKKYQLRCDRIRLQNQLESLLEEAHIKLSSLVSDLFGLSARRMLQAIAEGETNPATLAALADERLRATPEQLSDALGACSELNPVYRRLLKMALEELRLIDEQIGRLDQEMAGLLRQHQDAVQRLAEIPGLGVDSAQQIIAEVGPTAATFPSDKCLSSWVGACPGDDESAGVNHSHRSPKGNRHMRRLLNQAANAAARTKGSIFEIVYRRSVPRLGHNQAIGAIAHRQCRLIWLILHQGVRYEERGPAVTKRSKQLRTWKMIRQLRTLGYRIEPPNPQPSRAPAQ

SEQ ID NO: 485971 - protein, 417 aa, unidentified
MDDEVYYERCAGIDVHKKLLIVCLRIGRKSEVREFGTRTQEIRDIVAWLKANDCQMAAMESTGSYWKPLYNIFEQEGLPVIVCNAYHIKNVPGRKTDVNDAQWIARCLSQGLLKPSFVPDREQRELRDMTRFRKSQIEERSRNINRLQKFLEGANVKLGSWLSDIEGKSATELLELVIGKPDFTVEDVSKRIHGRMKSTAEELFLSLEGSITPVQREFFAHIMSVIRQQTTQIEKTDAMIQRNLNENYKAAVAALDDIPGIGRISAEQILAETSPDMSHFRNQHSLSKWAGVCPGNNESAGKRKSGRTPPGNKMLKATLAQCAQSAKRNKKSFFSAQYSRLVSHRGKNRATMAVAHSMLIAAFFVLCGRKYKDLGADYYNQFNREKKINSHVKQLSKLGVAIPDNILRAAFYSTRER

SEQ ID NO: 485972 - protein, 317 aa, unidentified
MTDTNRFVGIDISKSSLDICVLPEARSASFANDSAGIARFLAFLTQFDRIDCLVLEPTGGYERAVVDALLAAAQPVAKVNARQIRQFARACGTLSKTDRIDAFVLADYARRMETKLLAAASPAQTVLGELVSRYRQLSHMIVQERNRREKLASNRDERQAVWIKETLTFLTDQRQAVVEAMEDCLRKDHHLAAMADVLMSLKGIGLRTACFLIAGLPELGLMDKGQIAKLVGVAPINRDSGQMRGKRMIAGGRKQVRDALYIAALPAIRFDPVMKALFQRLKEKGKPGKVALVAVMRKMIIILNARMREHRATVLDR

SEQ ID NO: 485973 - protein, 430 aa, unidentified
MKSNTQNAKIEAITEKTLVLGIDVGSEMHYARAFDYRGIEYSKKPFKFSNTEAGFVTFKEWILNLKERHEKDKVVPGMEPTGHYWFNLGKFLQDNEMKPVLVNPHHVKKSKELDDNNPTKNDRKDPKVIAGLVREGRYMIPYLPEGVYADLRTASNIRFQLQAELTRIQNRISRWFNIYFPEYKTVYGKPDAKSGMLILKAAPLPEDILTLGIDGVNQIWRDAKLRAVGKARAKTLIEAAEHSVGSKEGAVSGKMEIRMLLEDYESRNTRLQEVMVLIEELVRKIPMAEKLLEIKGVGIRTVSGFLAEVGDISRFNNPKELQKLAGLALVENSSGKHKGETTISRRGRKRLRYLLFEVAMSLVAKNPEFRELHNYYTTRRLNPLKKMQSLMAIAAKLIRVFYVMLTKGVNYDPKKMVNDIKRPAVYLQTA

SEQ ID NO: 485974 - protein, 425 aa, unidentified
MNCTQNEKISQVSDETMVVGIDVSSETHYARAFDFRGREVGKVFKFCSDAAGFSDFTAWIERVKLSSNKTSVIIGAEPTAEYWFTLAEYLKVSELKFVFVSPMHVKRTKELDDNHPSKTDAKDPKTIAKLVIEGRYLEPYIPEDIYAELRVMNNNRLRVQKELNAIRNRITRWFVIYFPEYKRAFADWSAQSSIILLQNAPLPCDILALEAENINKLWREQKLRAVGLKRAKTVVDMAQISVGVKQGENAARYEIKMLLEDYLRKSEQLSTILAILETLVIQIPNVEKLLAIKGVGILTAVGFMAEVGDISRFKSPKQIQKLAGYAITENSSGKHKGRTGISKRGRKRLRQSLFQVIMPMIRSNREFRDLHNYYTTRPKNALKGKQSVVALACKLIRVFWAILTKGVDYSSEKLVSDITRKQLVA

SEQ ID NO: 485975 - protein, 479 aa, unidentified
MIRSVGIDLSRTGNHQVCCLDEQARPCDSFSFDSTLEGLEKFEKRVFLEGATPTIVFEPTGLAWIPMAAYLRARHPDCQLVKARLQKVAALRRYLHSRAKSDRVDGVTLAKMPFIDAEHLDEAYLPPAEYHALQRLTRQRERLMKSITIHKNRIGSIINGYLPGLRKAFTDEWSERARLFYRQLLNPFTVVRDGKDVFETLFVSAKAKGAMTESHRVYQLCQKLVEFYEKSRAAGMVNEDFFDNLQDEISCELRLMETEEAEVERVSGRIEELYRHLHPSDHLRSIPGIGVRTAQVFLAVIGDPNRFRNQSAFANWTGVVPGARQSADSEGKGLRMTKAGPAMMKRALYQAGDIARRYDPQLADLYYREMVQHGKTHLQAMGAVMSHLAARILAVLQEDRPYELRDNQDRPISKMEANGLIQQFKVPEETRQARRRRKPNEGRLSGRRTHEAAKAPQSEPLIPPPKIVYCAEELRSTAN

SEQ ID NO: 485976 - protein, 399 aa, unidentified
MPTTKLQKTDDFAGQNFYVGLDVHKKSWAITIRSLGIEVSHFTQPPGAEALSNYLTREFPGGTYHSAYETGFCGTGIHEQLCKLGIKNILVIPSTDKQKKNKTDLHDSRAIAGHLERGNLEGIHILTQEQQEIRSLFRLRESKVNDVTRSNNRLKSFLMYYSIKLPERVSKNEFLSNKALAWLNMELGCAAGTFALQQYIEDLKYQRQQLFHITKSLRVQVQALHEKTYKSLLSVPGIGAITAMGLIAEVADFSRFNDPDEYCSYLGLCPWEDSSGDTIKTKGVQPRCNRHLRPLLVEASWQAIRKSRTLFAYYSKHTGKSGKKAIIKVARKLALIAKGVATTGQLYQDDYLKKKQLEQRPDSYRDKKDLKAGRFSSGITEQHINKQPDDSMQIATMPG

SEQ ID NO: 485977 - protein, 412 aa, unidentified
MEVIVERCAGLDVGKDEVVACVRTPSPSGRGRSSELRTFLTFTSGLEELADWLSASGVVEVVMEATGQYWKPIWYVLEERGFDLRLVNVKHVKMVPGRKTDVADAAWLAQLLEHGLLGGSFVPPAPIRELRDLTRYRKRLIQTHTAEQQRVQKVLEDAGIKLDSVASDVLGVSGRAMLRALIAGERDPDTLAELARGVLRKKIPTLRLALRGRFRDHHATMLRVIVDHVEYLESAIADLDREIDRVIAPFSEARDRLDTITGVGKRSAECIIAEIGVDMTRFPTAAHLASWAGMCPGNNITGGKQRSSRTTNGNRWLGEILHQCADSARHTRDTYLAAQYWRLRRRMGHRKAVVAVGHSIIVISSHLLTDNCDYDDLDGDWFTRRTDTDKRRDHLIRQLHDLGYGVALTKVA

SEQ ID NO: 485978 - protein, 430 aa, unidentified
MKSNTQNAKIEAITEKTLVLGIDVGSEMHYARAFDYRVIEYSKKPFKFSNTEAGFATFKEWVLDLKERHEKDKVVPGMEPTGHYWFNLGKFLQDNEMKPVLVNPHHVKKSKELDDNNPTKNDRKDPKVIAGLVREGRYMIPYLPEGVYADLRTASNIRFQLQAELTRIQNRISRWFNIYFPEYKTVYGKPDAKSGILILKEAPLPEDILTLGIDGVNQIWRDAKLRAVGKARAKTLIEAAEHSVGSKEGAVSARMEIRMLLEDYESRNIRLQEVMGLIEGLVNQIPMAEKLLEIKGVGIKTVSGFLAEVGDIRRFNDPKELQKLAGLALVENSSGKHKGKTTISRRGRKRLRYLLFEVAMSLVAKNPEFRELHNYYTTRRLNPLKKMQSLMAIAAKLLRVFYAILTKGVGYDPKKMVNDIRRPAAYAQAA

SEQ ID NO: 485979 - protein, 341 aa, unidentified
MAEEKSIELRVSVDVGYRRHSVAMGLSSGEVLEEFEIDHRIEGFEEFFSRIEKQRKKENCAVAVAMEGYNGYARPLDSMVRQRGYRLYNLNNLKFARFKEIFPGSAKSDRIDARKGLELFQLSDHLPLAKEVLQEVTGTPPENEVLKRLTRRRRRLVNERVRVVNSLQADLQAVCPGLLEITAEASNQWFLNFLLSAQTLPQLARLRRNTLLKIPSVGVKCASIIEGWQKRAHFSQEVEWVGEMIQEDAKRCLELDGKVKRLEAQIAEVAKGSKITKILRSIPGFGAVCTSELAGEIGTIERFASEASLSLYLGMSTLDNSSGKYQGTKTPKHVNTRAKQR

SEQ ID NO: 485980 - protein, 381 aa, unidentified
MRPTARIGDCRVQANQEKNGGEETEMAVYVGIDVHKHYCQAALMSEQGQITHELRFDNTTEEASNLVDLAKTVDTQIKAVLEPSANFWIRIYDTLEEEGVDVKLSNPLRTKAIAEARIKTDRIDAKTLAYLLRGDLVAESYVPTRKNRERRALIRHRANLIQMRVDIKNRIHALLDKHELTHTYTDLFGKQGLEWLRSLQLPTPDHEILQSSLQVAETLTEQIRSMDIQIAKDATTEEKAKLLMTMPGVDYYAAMLLLSEIGDVHRFSSDEKLVSWVGLAPQVHQSGASNWTGHITRKGSSRARWILGQCAQSARQHDPRMREFYERIERKHGSQKATVAVARKMLAIMYVMLIRNEPYRGENPELTDRKHKRLNTLVNSA

SEQ ID NO: 485981 - protein, 479 aa, unidentified
MADHTTTGSGKTQRLTRQQRKELGRRIWSEHPGLEVVHREAAGIDIGSREHYVAVGPDRDAEPVRVFGCFTADLHRLARWLRECGIQTVVMQSTGVYWIPVYDVLEQAGLDVWLVNARETRNLPGRKSDVQESQWLLKLHTYGLLRKSFRPTAEIRALRTCWRERAEYVQQAGRSIQRMQKALTEMNVQLSTVLSDLSGVTGMRILRSIVAGERDGMRLAEFRDPNVKASPETIVQSLEGTWLPEQLAIWKRQLGDWDHLQQQIVACDVDLQAMLKQLPDAESEPEPPSALPTGRLQRKKNRRWSKNEPSFDLSAELKRVAGVDLTRIDGIKVLTVQTILTEAGLDMSKWATENHFVSWIGFSPRNDVSGGKVLKKKTRKVVSRLATALRIAATTLRQSDSYLGAQFRRLRTRLGAPKAITAMGAKLARLVYRMLKYGQEYVDKGTAQFEAKYREQQIQLLRKKAAQHGFKLVSVPNPA

SEQ ID NO: 485982 - protein, 392 aa, unidentified
MERYDVVVGMDVGKSFHHMRAITKGEEDLVNEQVLQHEARLIEAFTEMTEHGSVLVVVDQPNNIGSLVIASARKAGCDVAYLPGLAMRRAAGMLPGDAKTDERDAYVIAMTALSMPQTLRPVPEENILRADLIALASCDDDARCDMTREINRLRAHLVECHPAFEQALGDSVTSPFALRLLARFGGPWSMRKAGKGAVMRWARSQKRPAMKLLEKLLASLGEMAEAPAGAALREEIAIPVCARRIAEFAAIRKDIERRAVVLLEDCSTYHLLMSMPGVGTKTAISFIIHVDITCFDSASKLASYAGIAPRTFQSGTSIKGECAARSGNRALKNALFLSAFASLRSDPLAREYYDKKRAENKKHNAAVMCLARRRLKIMYAIVRDQVPYRMAA

SEQ ID NO: 485983 - protein, 370 aa, unidentified
MLNTTTFVGLDVHARSIKAVALDAMTGEVRSATFSYDAAAVAEWVGSLDPAAKCVYESGVTGFDLQKKLTALGVDCVVGAVSKMIKPSADRKRKNDRNDAEFLARMLSVGNVVEVWVPDDECEAARDLVRALDDAREDLKRCKQRLSKFLMRHGHAFSETTPTGRRRGNWTAAHWAWIRSIEFPEKADDEVLAYYIDAVRQAMENKKRLEKLVEAEASKPRWKKRVDSLRCLKGVDAMTAADIVFEAGEFSRFKSARSFAAWLGLTPSEHSSGESARQGGITKAGNKHLRRVLVEAAWHYISASPHPKDLAKGQAPDPAARRHAAKGIRRLVKRREEMLGRGVHKNKANVATARELACWCWAVGRMIENG

SEQ ID NO: 485984 - protein, 363 aa, unidentified
MEAQTNQRARRKGAEHADYSCDYHPGFQQIAFVDTETGELGESLLTHREEAEQFYRTLKERRVRVGMEASGHARWFERLLTELQFELWIGDAAEIRTKRVRKQKTDRQDAQLLLKLLMEDRFPRIWVPDAENRDLRQLLWHRHRLVQMRTRIMNQLHVVALNEGVRRKKALWRPAGRSELESLVLAPWALRRRRDLLDLFDQLTPKIHDLTRALEEEVEKRPIARRLMTHPGVGVLTALAFELVIGTPERFGCGKQIASYVGLVPSEESSGDRRRLGHISKQGNALLRFLLVEAAQVTVRSQPQWRSKFFHLAMRRGRKIAKVAMARKLAVHLYWMWRQGWDYGQFEKLGSHAGEPGNRHGGQ

SEQ ID NO: 485985 - protein, 312 aa, unidentified
MTEITIGVDVSKDTLDVHLHPDGTHRQFINDAAGFRLILDWIGSRPVARLVFEASGAYHRAFERAMGEAGIALCKVNPARARRFAEATGQSAKTDRIDAAMLARMGAVLEPDTRAAPSKTACDLKELHMMRVALVKDRTAAKNRAATLTLPLLKRQLRQRLAAIDRQIRQIEQAMHALIEADPELARKRDILISIPGIAERSAFALLTGMPELGDLNSQAAGALSGTAPRTRQSGKWTGRAFVQGGRAHVRRALYMPALAAARFNPDLNQTYKSLTARGKPPKLALTAVMRKLIVLANALIRDNRKWTPKPN

SEQ ID NO: 485986 - protein, 449 aa, unidentified
MSKQRNKVVSLPVIEPNAAGIDVGATEIFVAVPADRDPEPIRCFPTFTVDLERLADWLQQCRIRTVAMESTGVYWIPLFQILEKRKIDVRLVNAHHVKNVPGRKTDVSDCQWIQHLHSVGLLRGSFRPDDEICALRSLWRHRDNLIQLATLHLQHMQKALDQMNLQLHHVISDLAGTTGLAIMDAILAGERNPQKLAQLRNRHIQASEETIMKSLVGDYREEHLFTLRQSLKSYRHYQELIQEVDLQVKQMLQRLPSRTAAGEKPPKGEKIRRTPWRNEPPQLRTDLYRAFGVDLTEVPGINSLTAQMLLTEIGPNLSRFPTAAAFCSWLRLCPNPKISGGQVLSSRTQPTKNRVALALRMATQGLHRSDSYLGDYFRRMKARMGAPKAMTATAHKLARIVYHMVTTQQEYDATVFQQQEQRRRLQKSARLHAQARELGFHLVPINAVP

SEQ ID NO: 485987 - protein, 409 aa, unidentified
MNPLYVGIDVSSRNNVVFFMKPDGSKIKNFSVPNSKDGSHKLVKEILSALTSFALTDVIIGLEATSVYGDNLVCFLREDGSLTPYNRKIHVLNPKQVNKFKESYNDLPKNDFVDSFVIADCLRFGRINKEVYLDDYRFKALQNLTRARFVAVQNLTREKQRFMNVLFKKYSSLAQEKVFSDTFSATALAVYEEFDSADTLAYMDLHELTAFLQEKGKNHFSNPEEVAKAIQKAARSSYRLPKTVNDSVNQVLSISITSIKALEAQIKEFDKAIAAQMELIPNTLSSIKGIGPVYSAGIIAEIGDINRFPSQAQLAKYAGLAWRQHQSGDFEAQNTRLIRTGNRFLKYYLGEAAMSLVRCDAEYSRFYHLKYKGVNKYQHKRALALTARKLVRLVYRLLKDNRLYIAPKA

SEQ ID NO: 485988 - protein, 337 aa, unidentified
MRYCGIDLHSNNSVVVVTDETDKVLVSRRCPNDLSKILALLAPHRDELSGIVVESTYNWYWLVDGLMAEGHVVKLAHTVAMKRYDGLKHSGDETDAAHLAHMLRLGILPTGYIHPPAERALRDLARKRIQLVRSRTQHVLAVENILARQTGACTGAGAIKRWGASDVDSLGLTADVALAMKSNVAVINALNLEIDRLESRLLEGVKLRPEYARLKSIPGIGDVLATIIMLETGNIARFAQVGNFASYARCVDSARYSNGKKKGEGNTKNGNAYLVWAFVEAANFARRYSDDAKRFFERKKAKTNSIVATKALAHKLARASYHMLKAGQDFDVKRCFA

SEQ ID NO: 485989 - protein, 348 aa, unidentified
MKFYTKSHKHYCGIDLHARKMFLCILNGSGEVLLHRNIATSPETFLKTVAPFRDDLVVGVECMFAWYWLADLCSREGIEFILGHALYMKAVHGGKAKNDKIDSHKLAVLLRGGSFPVAYVYPPEMRATRDLMRRRNHLVHERAELLAHIQNTAIQYNLPEIGVDLTSKCNRNEVDEHFPDLQVRKIVQVDLAMIDAYDDVINVLERDIEKTARRHDGHALMLLRSVHGIGGILGLVLLYEIHNIRRFETVQDFASYCRLVKCSHESANKKKGTGGAKIGNAHLKWAFSEAAVLFVRHNPSAKKLHADLVKMHGKGKALAILAHKLARTIYYMLKNNVPFSLEKFLATA

SEQ ID NO: 485990 - protein, 469 aa, unidentified
MGIDLHKRLIEVCIVDESGTIVGRRRLNEVTEASVTAFARRYLQAGDHVALEATTNVWAVAGVLERAVARVAVSNPVLNKAIAHAKVKTDKVDAEVLAHLLRLGYLPEVWQPDPATRRAREWTTRRSGLVSQRTGLVNRVHSTLAQRLLACPYEVTSTAGRQWLATLPADEELRWLLDSDLRALDAVQAEIAAIEAELARRGYADERVRLLMTLPGVSQHTAQSLLAAIGEVSRFPTADQLAGDLGLTPRTRQSATHCYHGSITKAGRTHTRWMLVQAAQAVQNHPGPLGDFFRRLKGRTTHNVAVVATARKLAILAWHVLTTGQPYRYAIPATTQAKLAKLPGGGRTIKSLPEVFASENVPAAAPAPAGETRHLAAIELQDFADSLQRAQVVPRPEGRRRILTKPTGTKPTEEAGPASPDVPCVAAETDGSTTTEVNVVAPRRGSSARTSRRRKLQSAAPPQSTEGTD

SEQ ID NO: 485991 - protein, 355 aa, unidentified
MMIIGCDYHPGFQQIAFVDTETGELQERRLEHREEAEKFYRDLAAQGIKVRVGMEASGHARWFERLLSELQCELWIGDATEIARKRERKQKTDRQDAQHILRLMLKDDFPQIWVPSGENRDLRQLLWHRHRMVQARTRIMNQLQAVALNEGVRCKKRLWREKGREQLESFRLAPWASRRRHELLELLDRLNPTIAALSQAIEQEVEKCPEAQRLRTHPGVGPLTALAFVLIIGRADRFQCGKQIACYLGLVPLEDSSGQRRRLGHITKQGNSLLRFLLVEAAQVTVRSLPEWRSKYCHLTMRRGRKIAKVAMARKLAVRLYWMLRKGWDYGQLTKFGSQGRKSGSHAGEPTASTR

SEQ ID NO: 485992 - protein, 350 aa, unidentified
MRTLDFTNEPIYVGIDTHKSSWNVSIILKGITHKTFTQPPKPDALSKYLHTNFPGGNYICAYEAGFCGYWIQHDLEQKGIKCIIVNPADVPTKHKEKDNKTDKVDSRKIARSLRNNELEPIYVPSRQSLEDRSLARLRYGIVTDLTRCKNRIKSLLFFYGIEIPAELDKRSRGYIKWLESVELTQETGTSTIKYLLQEYLSLRNIQLDVTRKIRHLSRTEKYTKHVALLTSIPGIGITTAMIILTEIDTIDRFNNLDKLCSFIGLVPRVNSSGEKEIIGDITRRGNMHLKKCLVESSWIAVRRDPALMMSYKEYCQRMEPNKAIIKITRKLVNRIRYVIKNQKKYQKNKL

SEQ ID NO: 485993 - protein, 366 aa, unidentified
MKKTSTVRVNKNTIFKGHKLTIGLDLGDHWSCYCVLDEAGEILLEQKVAMTPEAMKQTFAKIPQSLIALETGTHSPWVSRLLTELGYKVIVAHAQKVQLITKSNRKDDRHDARTLARLARIDPELLGPVRHRSAQAQIHLTVIRARAELVRARTALVNAARGLVKSYGQRLPKCGTQQVSRELGAGLPAELREVLEPLLKEIESLNERIKEYEVRVEKIAKESYPHVELLKQVKGVGTQIALTYVLTLDDPQRFAKSREVGCFLGLKPGRRDSGESQPEMHISKEGDRYLRTMLVQGAHYILGPFGEDSDLRRWGLKLAARGGKSAKKRAVVAVARKLAVLLHKLWVSGEVYEPLRNSQKAIRAAA

SEQ ID NO: 485994 - protein, 464 aa, unidentified
MAKAQKSRSKSRAKQNHRAKLKAPDSTLGLQVVHPKAAGIDIGNEEHWVAVPADLDPEPVQSFGCFTQDLEEMANWLVRIGIQTVAMQSTGVYWIALCDILAERGIRVFVVNASDTKNLPGRKTDIQECQWLLKLHAYGLLRNSFRPEEEILVMRTYWRQRQQHIGDASRCIQRMQKALTQMNVQLANAISDLSGSTGQAILKAVLAGERDPAVLAKLRDPRIKATEATVAKSLEGNWRPELLFVLQQEQESYESFQTKIAECDGQLKRHYATLEPKADATKLPPVPRDRRAKGNVPAGFDLREEMYRATGVDLTAIDGVNVLTVQTLISEVGWDMSRFATEAHLVSFLGLSPRDKISGGKVVGREKKKNKNRAGVALKLAAGTLLNSDTYLGAQYRRLRTKLGAPKARKAMANRLARIAYRMLKYGEYVDRGKEFYEQKYRALQIRLLTKKATELGLQLVQSA

SEQ ID NO: 485995 - protein, 419 aa, unidentified
MSNHTAKHLASLQPGTLFAGVDLGLDDSVVVVLTTTADRLDRFRSRNDAAGYAALRQRLQRLVEKHQAPGLLIGMEPTNYYWKQLGYDLERHQLPFRLVNALTVKRHREGDQLDRSKDDWRDAYTIADLLRQGKFTETRLPHGVYAELQAGYIAYQRLRRDRGRQATLLVNTVRQLFPEFGQIFKDVSGATAGAVITAGLLPHVISTYSEDLFLASVRSHYTGQHLRVRQVRQLYALAQDSYGCPEATTALCLMAQQQVEAIRLLDLQAKHLLDTLLTLFYTLPEAPYLLSIQGLTAPSALGLVAHTGDLTQYPHGGALIKLAGTQPTPNTSGRKTYSPTPFSHQGRSGLRTVTYFIALRLIRRNDALHYHYQRLTTRTEHPLPKMQAIGACMNKLLWYVWHVAKRRERYDCQRWRTLN

SEQ ID NO: 485996 - protein, 345 aa, unidentified
MELFTLGIDLGKTTFHLVGMNQRGEVVVRKRFSRTQLLHFTANLKVELIGMEACGGSHFLGRALREQGHEVRLIPAQYVKPYVKTNKNDYIDAEAIAEAVGRPTMRFVPVKSDEQLDLQSLHRVRERWVMRRTAAVNQVRGLLLERGITLPQGRRHVDAALPGILADPATKLSGGVLILLTELKLELAQLTERIDRADKSMEKIAQENEACQRLVTMPGVGPVISTAIIATIGNGTAFRRGRDFAVWLGVVPQEHSTGGKQVLWKIPRRGNQYLRMLFVQGARSVMQRRTKQAPGLSAWLAQLTARTPRKVAIVALANKLARIAWAVLTKNEVYRPPLLDGAAVA

SEQ ID NO: 485997 - protein, 343 aa, unidentified
MQTITTIGLDIAKSVFQVHGVDAGGQVIVRRQLKRRYVLTFFQKLSPCLVGIEACASAHHWSRELQALGHTVRLMPPAYVKPYVKRQKNDATDAEAICEAVTRANMRFVPTKTSEQQSGLVLHRARHLFIRQQTSVINAIRAHLAEFGIVAPVGRHGVEELLNVVADPNDKRVPEIARACLSAFGAQLRMIKEQILEFDRLIRAWHRSNEMSMRLDEAPGVGPVLATALVAAVADPKSFRSGRNFSAWIGLVPKQHSSGGKNRLGNISKQGDRYLRGLFVAGALAVIRYAKIHGTKHRPWLTALLARRPTKVAAIALANKIARMVWAMMARGERYKEPFALAR

SEQ ID NO: 485998 - protein, 460 aa, unidentified
MAKHKQLQKMKVQVNALEQINLNAAGIDIGAEEIWVAVPPDRDEQSVRSFPTFTADLHRLADWLEQCRIETVAMEATGVYWIPLYDILEERGFEVYLVNARHLKNVSGRKTDVLDCQWIQQLHTYGLLSASFRPPEHIVAIRSLVRHREMLVQSRSAHIQHMQKALTVMNLRLTNVLSDITGVTGMKILRAIIAGERNPQVLAQFRDERCAKSEAEIAKSLEGHYKPEQVFILQQAVELYDFYDRQVQHCDAELEALYGQFSLPEDPVTPLPAPHTQKRRKNQAHFDLAPALYRMSGGIDLTQIDGVDELTIQKVLSEIGTDMSKWPTEKHFASWLRLCPNNKITGGKVIQRGVQPTQNRASTALRVAAASLHHSDSALGAYYRRIRARSGAPAAVTATAHKLARIIYAMLKDRQPYQDVGTHYYEQQYRDRVLRNLNRQAAKLGFRLEPAAPASGQEVS

SEQ ID NO: 485999 - protein, 345 aa, unidentified
MQPMYYIGLDVHKRKISYCVKDSGGKVYAEGSLPATRFDLDHWMKTLPQPWTAAMEATMFTGWIYDHLKPHAAALKVAHPLMLRAIAAAKKKNDRIDANKICDCLRCDFLPECYMASTAIRERRRTLQYRNLLVRQMVQMKIKISSLLMEAGVSYNKQRLHKAGYFRELLATNPDIDEGLRSLLRLCRETVVRLQKTEGAMVRSLERDSLLMDRVQRLMTIPAVGPITALTWALEVGDVQRFSSIKKAISYCGLCGAEKSSANTVQRTPLSKQRNKHLQTTLIEAAKMAPRISSELAMLYDKEKQRGNANRATLAVARKLVAYLMAVDRRQRNFQVVETSSSIAA

SEQ ID NO: 486000 - protein, 356 aa, unidentified
MKGYIAFDSHKHYTLAECEDAATGQAFRTRIEHEPGAIRAYLEGCDSGQAVALEATGNWYWIVDEIEKAQCGPLLVHPRKAKLMMGMINKTDKLDVHGLNRLQRNGTLPTVWIPPAPLRDLRELTRTRMFLARHRTRLKNRIHATLAKYGLSLTGYSDSYCKGARQSLKELIAQLPPQTQYVTRMLLEQLDFIERQVQDQEERLEALITVTQEMQLLQSLPGVGMILSAVIALEVGDVTRFGNAEGLASYAGTVPRVHSSGGRVRYGPLRPDVNRYLKWAFAEAANSVALNYSRRPERHVSCIYSKIRERRGHQKAIGAVARHLAEAAFHVLRRKEQYREPLSVKKMVRRGRTREA

SEQ ID NO: 486001 - protein, 361 aa, unidentified
MTNGSRLVIEVQGAGEAIGLDLSDKGGTYVVVDAMGQVSGEGKVTLTQTGLRKVFGSRKPTRIAIEVGTHSPWVSRLLAELGHEVIVANAHQVKLISQNKRKSDRQDAELLARLARLDPSLLKPVRHRGEQAQADLALLRSRDCVVRTRATLINHVRGSVKAVGGRIPNCSTDAFAAKAREHLPQLLQAALLPLLATIDQLTQQIKANDKQLEKAAERYPEVKLLRQIKGVGLLTSLAFVLVLEEAQRFSKSRSVGAFVGLTARQSQSGEREPQMHITKAGDELLRRLLVQSAHYILGPFGPDCDLRRWGKKLAGDGNKIRKRKAVIAVARKLAVLLHCLWVDGCVYEPLRAEAAAEGAAA

SEQ ID NO: 486002 - protein, 394 aa, unidentified
MFYVGIDIGKRSHVASILTSEGTVVLKGFSFPNTTEGAKRLLEKLHTFSSVSDQFAIGLEATGHYWLALFSFLQDSDLLIYVLNPIQTDGWRKGTEISKRKTDIIDSILIADLIRYGSFVETSLSDESLFSLKQLSRYRTYLATTAGDFKRKIIAVLDQVFPEYATVFSKVGVFGKASKEVLLEFSSPEALNELSAEVLAAFLSDASRNRLGLKKAELLKEAALNSFGVKFAQEAFIFQLRSMIEQLKFLETQIKETELEIKNIMDSLNSVIETIPGIGPINGATILGEIGDIHKFSTAAKLVAFAGLDASVTQSGSYESTHNVMSKRGSPYLRKALFSAALIASFNDPVFNAFYQKKLSEGKHHLTAVGAVARKLTYTVHAILKKNEPYQVQL

SEQ ID NO: 486003 - protein, 334 aa, unidentified
MNYKTFIGVDISKKTIDVALKQIDNQTIEHCQFPNNQKGFKSMESWINKQMTTEIKDCLFCMEHTGVYVLPLACFLSENELSFCLENPYHIKHSMGLQRGKTDKADSKMIARYAAMHQEELKLSNFPSKIIIKLQALLAYRERLVNAQKGFKVASGELSAFVEKQISTHISKETNSLIKCIESRISKADKQIEELIKQDVQMSKNYELAKSVKGVGPIIASYMIVYTQNFTTITDSRKFASFSGIAPFEHSSGISINKGNKVSHLANKKMKRLLNNGAWNAARYDNEIKIYFNRKVAEGKNQLSVINAVRNKIVSRVFAVVKRGTPFVNIVNYT

SEQ ID NO: 486004 - protein, 420 aa, unidentified
MKVVYQTCCGVDVHKSFLVATIIKTTSGIEPSYHKKRFSTFNNSILQFKDWLIDNNCRDICMESTGKYWVPVYNLLEDDINVTIANPKWVKAVKGNKDDTKDSKWIGDLFRLGLVPGSYIPCKEIRILREYTRYRYKLTSSKSGEKNRFQNALTVCNVALDSVVSDVFGKSATSIIDYLIEQSDNSINHEEISSRLLRSLKKKSDSVIESIDGHQMTDSQKYRMRLIRAHMDYIISTINDIDTMIESLITPHENAIQLLCTIPGIDRNSAITIISEIGTDMSQFSSSKRLCCWAGLTPSNNESAGKKKSVRITRAGVYLKPALVQCAHAAVKSEKSPYYKTKYERILKRRGKKRAIIAIARMILTSIYQMLCTGEAWNPSDLYKIDMPEPLDAKQREKAIRQALKLLKSEGIIPESLEAS

SEQ ID NO: 486005 - protein, 309 aa, unidentified
MKEVVKFPQVVKVGCGIDVHRDIIVATIGKNNDEFQTREFDAFTSSLTSLRDWCKTEQVTHVAMESTGVYWKPVFNVLEEDFDIILVNARHVKNVPGHKTDKADSIWISKLLLSGLLKASFIPPCEIRELRDLVRYKKKVVAQAASEQNRIIKILEDANIKLSSVVSKVDGAVGKKIINSVIQGQTDPDELIKFYHGKMKVSKTEFRKALEGRITKHHRFMLQLHKDSIAEKERLIERIEAQIDEETKAYQVEIDLLQTIPGVGKDSAISIISEIGADMSRFPNENHLSSWAGMSPGNNETGGKKKMSE

SEQ ID NO: 486006 - protein, 346 aa, unidentified
MMIIGCDFHPSWQQIAWLDTATGETGGQKLVHAEGEAQNFYRQLREPVLIGMEATGNSQWFIELVEDLGHAIWIGDAAQIRASYVRKQKTDKRDATHILKLMLEGGFPRLWAPDREQRDLRQLVLHRHKLVLIRARVKNELQHLSLNKGMQKKRKLWSAAGLQLLRELPLKPWAACRREDLLGLLETLHQQIGKLDVAVQKAAEENPQARLLMTQPGVGPNTALAFVLTIGDVSRFRRGKQVASYLGLIPREESSGGRQKLGAITKQGNRMLRSLLVEAAGIAVRCDPGFRKQYLHRCHRKPKAVAKVAAARKLAVRLYWMLRTQTAYPEIVRIESSPRVALVGAS

SEQ ID NO: 486007 - protein, 347 aa, unidentified
MRFYTHQHKYYCGIDLHTRKMYICILDEKGEIREHRNLKTDRDAFLKAIAPYREDIVVAVECIFTWYWVADLCQNEGIPFVLGHALYMKAIHGGKAKNDKLDSQKIAVLLRGGMMPMAYVYPAKMRATRDLMRRRNHLMRKRSQLYAHIQNTNSQYNLPDAFGPISRHRNRDSIAEQFEQLSVQKSIAVDIEMIRTYGGILLQLEKSIITLANNHDPVSYALLQTIHGVGKILALIILYEIENIRRFASVQDFVSYSRLVKCAKESNGKKCGSGGSKIGNAHLKWAFSEAAVFFLNGNEPAKKYLDRFTKKHGKSKALSILAHKLGRAVYFMLKNKEAFDQKKFLNL

SEQ ID NO: 486008 - protein, 419 aa, unidentified
MPFKIFRKNCCGLDVHKTWIYACIGITDTNGRTEYKQARFSSFTKGLQELADWLAKYSCTEVCMESSGKYWIPVFHVLEESCYVVLAHPKYTKPQKGNKTDRKDAKWICDLFMCDMIKPSFIPPPDIRHLRDLLRFRTKMTNQITGMKNRALNCLTVSNLKLDDVFTDVFGKSSRSIIQQILDHPGETFDVTPFVDRRCKHPIEEIQAAVDGAISHEQATKLKICLAFIDEQQKRISELDTEIFRLAEPHTTVLDFIRTVPSFSKEPLTAIRLLSEIGPDMSVFTTSKHLVSWAGCCPRNDQSAQKVKSTRISRAGSYLKPLLVQIANALLKSKKHPEFKERYRRIKARRGHKKAIIAVCRMLLTAIWNVLSKLEPYSAKGYLADKLTEHSVVITKSEGLALLRKRGYIFRDEIAHTGS

SEQ ID NO: 486009 - protein, 328 aa, unidentified
MEGPIVSIDVSNGNSHYMCFIKNNKRFGKVKKIDHDIEGFKRLLEDIQKLEAETNEKVCAVFEATGVYTKPLERFLSKNSIKTYMINPLESARKRKEEIHNKKTDKLDPISISKVYYDKEEMMELKKKDETYNWLRKKNRLYEDQLNHLRKYKVTFQNQLSICFPGYLDLFKDGYSDIPMTILKKYPHPDLLKNKKAETVARYLEKNTCHTHKVSLEYALKIIEFAKKTYPGCEKDDVEVEIFKILLDKVIETQRECEKTLNEMITVASTLEEYRYILSIDGIGIDLAARIIAEIGDIEEFKSREALVAYAGLDPHIYISQETRMENI

SEQ ID NO: 486010 - protein, 354 aa, unidentified
MKRSTKYVALDVHQATTVASVREEGGRVIARSVLPTDGGALTEFVRGMRGARHVTFEEGTQAQWLYDLLAPLVDRVVVCDRRGAPHQGNKGDQVDADQLSELLRRGALRAVYHGSADHVTLKELTRTYRTLVEDATRVMLRLKALFRARAIPTRGTTVYQARARGQWLAQLADRGARFRAEALYAELDVLRKLRPKAKAAMVTEARRDPAWPVLRTIPFLGPVRVALLLATMQTPWRFRTKRHLWAYAGLAVVTRSSADYTLLAGAPVRRRRAPMTRGLNRNHNRVLKDVFKGAATAATARPGPLQDFYHGVMARGTREELARLTLTRKLAALTLRLWKKGEPYDPTKLTTPAR

SEQ ID NO: 486011 - protein, 426 aa, unidentified
MNYKQNERILQVTEKTLVVGVDIAKETQFCRAFNYRGLELGKVYSFSNDRLGFDSFKEWSEQLMKQNGLDNLIIGMEPTGHYWFNLGEYCRDNTMKIVLVNPFHVKRCKELDDNSPTKNDRKDPKTIAKLVIDGRYVETYMPTGIYAELRRAFRMYDHVTGCKSVVVNKILQWLDNYFPEFTEVFGSWDCKSGMITLREFPLPSMIVDFGEAKVLEIWKKEIKQGVGKKRAQKLVETAKTSVGSNEALKMGVKELQYLFSEYDVYVKQLDGIKIEMENLLEQVPGAKEALKIKGMGIVTVAGLIAEIGDISRFQDARQIQKYAGLNLVETSSGKHKGDTTISKRGRKGLRMMLFRVMMPMVANNAEFKELHKYYTSRKENPLKKKQSLILLCCKLIRILYAILTKGVEYDGSKLMKDIRRPQEQAA

SEQ ID NO: 486012 - protein, 339 aa, unidentified
MAILFVGIDLTKNVFAVHGVDEHGKAVLVRPAVQRAKLHELVASLPVCTIGMEACSGAHHWARLFKQHGHTVRLMAPKFVSPYRMSGLRGKSDAADAAAICEAVQRPNMHFVPVKSQDEQARLCVHRVRQGFVEQRTATINRLRGLLSEFGIVLPQKTATVRREATAHLEDLPGWANTAVGDSLSEVHRLDERLAEYDRHVTQMAAEDERSRRLMQLQGIGCTTASALVSTIGDAHDFRNGRQLAAWLGLVPGQYSSGGKARLGSITKAGDRYLRTLLVLGAKSVLAAAKSKDDRLSRWALALQVRRGYWRAIVAIAAKNARMAWAVLGKGERFRPIQT

SEQ ID NO: 486013 - protein, 399 aa, unidentified
MRTVFGIDVSKASSEVAILVNSEKVHSYSMSNDAIGFSRLLKDLKSVQNPAIIFEATGVYSRRLQAFLEDNNYAYTRLNPLEAKKQLDSLRVRKTDKIDAEKLAESQFFLNRKTTYIQKEVYQNLHDLSRFYQNLTEDIVRAKNRLHKVLQVTFPELEQLLSTPTGEQYWNLVIAFPIKNFVLEVSETELTELIRQSTSKRISEKRASSLADKLTELAKQSYPTVKKTSPILEEVKYYAQELLRLSQGRRVVLDQMISLAQPLPEYDILLSIPGIAETTATSIIGELGDIRRFQSANQINAFIGIDLRHYESGNYLAQEHITKRGSPYARKILFKCIHNIASASHTNPCHIADFYEKRKRQSQVSSTKPHTASIHRLIRTMYYLITHNKLYDYHLAKNQ

SEQ ID NO: 486014 - protein, 360 aa, unidentified
MKVMAGIDLHSNNAMIGLVDMEGNRLQHKKVACELEAVLEVLAPYKRRLEKVAVESTYNWYWLVDGLSDHEYPVVLANPARIDQYDGLKHADDKSDAFFLAELLRLGILPTGYIYDRQTRPVRDLLRRRLSLVRQRSSLILSFKSLYARNTGAALSLSRVKALSVEEAKGLYQHPCDRLIAEEQMTVMRQLDASIERIEKTVLKVVKLLPCYKRLQTMPGIGVILGLTITLETGPIGRFASAGDYASYCRCVKAQRLSNQKRKGQNNRKCGNKYLAWAFVEAAHGAKRFDTASQKFYERKKSQTNAIVATKALACKLSKAAWHVMAEEVDYDGRRVFGGQGKINFGRSGREPDSGHGLKA

SEQ ID NO: 486015 - protein, 411 aa, unidentified
MLEVKVEKCAGIDVGKKFLAVCILIGLANQKPTGEVRRFGTSVKELERLRAWLLESGCTEAVMESTGSYWKPVFNILEGSLKIILANPEQVKALRGKKTDPKDSRWLASLLRHGLIQGSFIPPRDIRELRDLTRRRRTLVGDGAAERNRVQKVLEDANVKIGNVLSDVFGTSGQAMLEALLENTRSAAEIAELGHWSLAPKIPQIVEALEGHRMTDHHRFMIRQSLRHMHNIEEMIEELDKEIAVRLKPYQQQMKLACTVPGIKPTAAASILAETGMDMSPEGPFPDCHHLASWATVCPGNDESAGKRRSGRTRQGNRWLRATLTQTAWAGAADKKSLFQMRYQRLKLRRGGQRAVIAIAHAQLIAIYWALRNSTPYPEQLQRMQQDRREAQIRHHLRRLSKLGYEPDMHG

SEQ ID NO: 486016 - protein, 436 aa, unidentified
MRGCRCSMIMGFTKPIEHFNLQRKKVITMNTLYVGIDVSSKSNVVYLMLPNGDKHSNFSVANSHEGSTLLVKKIYSALTSHSLDTVLIGLEATSVYGDNLVYFLREDATLAPFNRKIHVLNPKQVKKFHDTYNDLPKNDYVDSFVIADCLRFGRINKEVYMGEYRYKALQNLTRARFFAVQNLVKEKQRFMNVLFKKYSTMTQEKVFSDAFSTTALAVYDEFESAEALANMDLHELTDFIIEKGKNRFPDPDAVAKAIQKAARSSYRLPKTVNDSVNQVLSISITSMKALESQIKEFDKAIIALMELLPNVLISIPGIGPVYSAGIMAEIGDINRFDNQASLAKYAGLAWKQHQSGGFEAEVTRLIPSGNRFLKYYLCEAAFSLVRCDKEYSDFYHLKYKEVNRCQHKRALALTARKFVRLVFRLLKDNLLYCPAK

SEQ ID NO: 486017 - protein, 356 aa, unidentified
MSREVKYIGMDVHKEAIVIAVLNTRGHLVMESIVETKASSILQFIHGLQGELHVTWEEGTWAAWLYDLLKPHVDQVLVCNPRRNALLKEGSKNDKVDARKLADLLRTGMLRPVYHGEHGLRTLRELARTYQTLSQDLNRVMNRLKALYRGWGIACGGPQVYAPRYREEWLGKIEHVGVRRRAELLYEQLDGLQSLRRTLRSELLAESRKHQAAKLLRQIPCIGPIRAARLIALMQTPHRFRSKRQLWSYSGLGIETRDSAQYRFVRGVLQRAKKPQQICGLNRNHNHEMKDIFKGAANRASCGMGPLRDFYVALLDKGMKPEMARLTLARKIAAIALTLWKKEERFDAEHLKMQAA

SEQ ID NO: 486018 - protein, 436 aa, unidentified
MRLKDYGRKPKLRKEFVNNPKLLIVGVDIGRSSHSACFGTNSTVSSKKFDFKNSRNGFKKFEFNIRKMCKTAKCNQIMVGMEPSGLYWYGLYERLKKCGFSVCLANCMAVKNNRKTMHDGSSKTDPKDAYSIYDLLTQGKFFLPVERDPELAAAYRLMRKHMFLKKRISRLRNQIRGALHLSFPELNDVIKDLTLPTSLRFLQSNPTPESMMRNGKKRFMKKWQPRKRCGQWRPDKFNLIYEQAKLSIGLKDPQRIDEFEIKTMAKDLEDAVTKAQMWLDKAIELVCQRDDFELLMSMPRIGKPTATALLTAIGNIDEFAYGKQLVKLAGLDIRLYESGTSIKKRPRVTHIGSGYMRHWLYHYAMRLVAFEPDFQCLFERRKKNSPGKGAGQRALVAICDKILRIIYRMLKDQVKYSPEKDKIVAAYYQQQSKMAA

SEQ ID NO: 486019 - protein, 343 aa, unidentified
MQTITTIGLDIAKSVFQVHGVDAAGQVVIRRQLKRRYVLAFFQRLPPCLIGIEACASSHYWSRELRALGHTVRLMPPAYVKPYVKRQKNDATDAEAICEAVTRANMRFVPTKTPEQQSCLMLHRTRHLFIRQQTAVINAIRAHLAEFGIVAPVGRKGVTELLHVVADPSDGRVPEVARACLAALGTQLLGLKEQIVEFDRLIMAWYRSNETSKRLHYIPGVGPLLATALAASVADPQTFRSGRNFSAWIGLVPKQHSSGGKDRLGSISKQGDRYLRSLFVAGALSVIRYAKIHGTKHRPWLTALLARRPTKVAAIALANKLARMAWAMMARGERYRNPVALAA

SEQ ID NO: 486020 - protein, 427 aa, unidentified
MAKVEHTSDARVLVGIDISKNRHEVLIAVPGKTRRRRMTLLNTAADYQRLIDVLKDIDLPVTIGFEATGNYHRALMFALGTAGFELKLVSSIALARTREALHNSWDKNDPKDAQVILRMLEIGAVQVFHDPLVAGTCDLQELSKTYEMVARSKTELWHRILTHYLPLYFPEADRFHRSSRGDWFLALLEAFPSPHVISAMEKDAFIKAAWSLVGRRVGKSALLADIYETSKTSVGLPVAPDSDAIRMFRLVLAQGRSLIQQRNAIEERAAELLEEHPDYKLLRSIPGIGPVNALAVLAEAGDLRRFRHHRQFLKFCGMDLATVQSGLFRGRSKISKYGNARLRRTLWLASQAAVLKPANSFRDKFERYIAQDRHNPDLRRKAYTAIAAKMARTIHAVIKSGEPYRPFFEGVSPSGRTPLCRAVEAGS

SEQ ID NO: 486021 - protein, 401 aa, unidentified
MMFVGIDWSDQTLDFHLQDQEDKVYAQGQVKISMDGLTEMFVQLEKHGRPKEIFIASETSCGAWIQAFLDRGYPFYPINPNSLNEFRKALKIQGDKTDKIDRRVIAKYLCTFYKNLIPLKPDAEEIIALRIACQQRLRLTKEHTAKINELQSILKSHYPAVLKLFSCLNSNITLEFLQRYPMQDKMMALTEKRLRQWLTRHSYPCMRRFEEMVEILKKPALPIAGYLQEGQVPLIRYLARSLQTLSREIAERDLQINSQLDGLPEADWIRSLPSAGKVLAPALLACLGRDPHRFVSTSKAQAFMGTAPVTVQSGKSHQVHFRFGCWKFARRTLHSFADHSRHKCGWAQAFYEKQRLTGHKHHAAVRSLAHKWLKILLAMKRTGSHYNESVFLDSKRRYLLN

SEQ ID NO: 486022 - protein, 408 aa, unidentified
MNAVGIDVSKGKSMVAALRPMGEVALLPQEFLHTEVGLEQMACAIIALGEDTRVIMEATGRYHEPVAAALHEYGIYVCVLNPLLIKQSGGGSIRKVKTDKADAMKIAKYGLDNWVDLREYTPMDTVRQQLKLCSRQYDLYMKTVVSLQNNLISLTDKTFPGVNELFSSPERADGHQKWVDFVMTFWHCDCICRVSEKAFTERYRKWCKRKGYHFSAEKALDVYAGSCGHFTTLPKNDNTKLLITTAAQQLLAGKMTLAALRAEMTRLAKQLPEYDTVRAMYGVGETTAAQLIAEIGDVRRFPRRSSIVGFAGVDPAVNQSGKHEAQSTPTTKRGSPHLRKTLYQIVCTYLKKSPAEEPVYQFLDKKRSEGKPYFVYMTAAQNKFLRIYYARVKECLEAFDARQSSTQS

SEQ ID NO: 486023 - protein, 400 aa, unidentified
MMTPDDIDVWVGLDVGKSAHHAHALDHDGNTLYDKPLKQDEKAIRTMLGKLSKHGRVLLVVDQPNTIGSLPLTVARNMGIAVAYLPGTAMRRTAQLLPGDAKTDRRDAHVIAWAALKLPETLRDAGPDDETLAALKLLPGHDEDLAHESTRHVNRLRSLLLQTHPAFERALKGERITRDATLALLERYGGPMGVKRAGIEDVKDWAKSNGLRAGRIIDDMFKAIGEQTVTVPGTLMAETIIPSIAHDIKTIRDRRREVGRQVEKLLEDHPLLTVLTSMPGIGVRTASNILLGIGGDIANFKSSAHLAAYAGISPVTGQSGTSIKGERPSRRGNKRLKNALWQTAFVASTKHPPSVAYYKRKREQGKHHNAAIICLARRRCDVIYSMLKNGTLYQEPALVA

SEQ ID NO: 486024 - protein, 379 aa, unidentified
MNKTQVIQKDNSTKEVNLYMAMELSDKKWKLAFSDGSKERLKVIDSGEIADLWKEIANAKEKFCLDEDTQVISCYEAGRDGFWIHRYLLNKGIENNVIDPASVEVDRRKRRRKTDRLDAKKLLMSLMRYMWGDKQACSIVRVPSVKDEDERQLHRELESLKKERTRHSNRIRSLLISHGVRIDNPGRSDFKEYLEGIRLWDGSGLSKNLKDRLKREHDRYSQVGAQIKELERFRKELIRDDESESMSRVRQMLKLKGIGIESSWLLEKEFFGWRKFKNRKEVGSLSGLSPTPYSSGSSNREQGISKAGNRRVRAMIVEISWGWLRYQKGSKLTKWFNERFANGGKRMRRIGIVAVARKLLIDIWRYLEHGVIPEGAIVA

SEQ ID NO: 486025 - protein, 343 aa, unidentified
MSDISILAIDLAKHSFQVCATTAEGVVKFNRKYSRGKLSQLLAEHSSCLVAMEACATSHWWGRYAQEAGHEVRLIPPIYVKPFVKRSAKNDANDAAAIATAVRQPGMRFVQVKSQEQQTHAMLFRTHQTLTRQRATLITTLRGHFAEHGIIVAKGDAALLAYEDTMEAQEGAMPDLVRETARLYYHHMAQLAQTIATLERQMADVAKEDEGIQRLRTMPGVGPITAAAFLAFAPPMESFRRGRDFAAWLGLVPKQLSTGGKTKLGRISKMGQSDLRRLLITGATVCIRWARWKGVKPDGWLGRLLERKKGTLAAVALANKMARILWAMVTKKQDYRGGLVEYA

SEQ ID NO: 486026 - protein, 345 aa, unidentified
MDEGYDGRQVVGMDLHRRRSVLVRMTMDGRKLETARIENSPAALRAVIARAGKCPLVVVEATYGWYWAVDVLRAAGAEVHLAHPLGVKAFSYRRVKNDERDCADLADLLRLGRLPEAWIAPEPVRALREVTRFRHKLVQQRTSCKDQVHGVLAKSGIPVTCSDIFGRGGGLWLDGLPLPAPYAGKVASLRALIAVLDGQIALAGEQAAGMLAGDRGYAAVRRLPGIGPVLGAVICAEIGDVTRFGRPGQLCSWAGLTPRHYESDTKVIRGHVSKQGSRALRWALCEAIQHQPPGTRPREVRDAIIARRGTDARSIAKTAAARILLTQVFYAMRDGHVRRATRQAA

SEQ ID NO: 486027 - protein, 341 aa, unidentified
MNIKRIGIDLAKQVFQLHGVDGQEKAVLRKQLPRAKMLMYFQKLPPCLIGMEACSSAHYWGRELQKMGHTVKLMAPQFVKPYVKSNKNDANDAEAICEAVARPTMRFVAIKTIEQQDIQAVHRIRSELVQQRTAKVNQIRGLLGEYGLVVGQRIDVLRKALPLILEDAENGLTVDFRTLLEGLQQDLITLDQRVDDMDKKIKLLASSNEDAKRLQQIPGIGPITATALISAIGDGKQFKRGRDLAAWLGLTPRQHSSGGKDRLLGISKRGDAYLRTLLIHGARAVLKVVGNKEDPRSRWIQNLCGRRNKNIAAVALANKNARIVWALLTKKTDFLPEGKPA

SEQ ID NO: 486028 - protein, 342 aa, unidentified
MYYIGLDVHKKTISYCVKDAAGWVHQEGKIGSTRCELNAWIRTLPEPRTIAMEATIFTGWIYDHLLPHASAVKVAHPLMLRAIALAKKKNDKIDAGKIADCLRCDFLPECHMASTEIRDRRRILRYRHLVVRQMVQTKNRVSGLLLETGVEHTKSRLHKVGYFRRLMTTNKEIDDSIRLLLRISRENIERCQKTDYALVSSLERDPLLKERIRRLRTVPGVGPITALNWALEMGDISRFRSIKEAVSYCGLCGDERSSADKVMRMPLSKQRNKHIQHVLVEAAKLAPRQSAELALIHQKSLEKGNKNRATLAVARKMVAWLLAVDRENREFIPAEQRGVRAA

SEQ ID NO: 486029 - protein, 319 aa, unidentified
MDGNQEHKNRYVGIDISAKELVVAIGSEGPVWQIVNDEAGVAELIERLRVEEPMLIVMEPTGGYEIPVAAALGVAKYAVAVVNARQIRDFAKARGRLAKTDKIDARTIADFAETMKPEPRPLKDDETMEIDALVRRRKQLQEAAITENNRLRTSFHRREQESIKRHVGWLERELKDLEKELQRRIQTSPLWRELDMLIQSVPGVGKVLSMTLIAGLPELGKLGRAQIAALVGVAPFNCDSGKQRGERHIRGGRHDIRRALFCTTRAAITHGYNPLLAAQYERLQAAGKLKKVAQVACMRKLLTILNAIVANRTPWRNPA

SEQ ID NO: 486030 - protein, 300 aa, unidentified
MNDMMIGVDLAKNVFQIHGALRTGEVQFRKKLTRQQFTAFMARQAPCLIIFEACGGAHYWAREMEAPGHEVKLIAPQYVRPFVKRQKNDAADAEAIVIAARQAEMRFVEPKTVEQQSRAAVFRGRERLVHQRTADVNALRALLYEHGYVFPVGMRYLDRMTALVDDDTSDLPALIREECQDLLAQIAEKTAHITERTAKLKALASQSDRARRLQTMPGVGPLTAIAVPAFGSDMAHFKTGRNFAAWLGLVPRQHSSGGKERLGRMTKAGQADIRRLLIIGAMSRLGWLGRHTIAQGNCPA

SEQ ID NO: 486031 - protein, 482 aa, unidentified
MKHKQQEKTKNATCQPTQGHWQQMNRKQRREMTRKIQSEDISLEVIHPDAAGIDIGNESHYVAVPPARDSQPIRRFGCTTAELKEMALWLKQCAIRTVAMQSTGVYWIAVYDILEEAGLEVYLVNARDTKNLPGRKSDVQESQWLMKLHTYGLLRNSFRPSQEIRTMRTYWRQRNDLVQSAGRHIQRMQKALTQMNIQLANVLSDISGVTGQAIIKAILGGQRDPHKLAEFRNPRVKASEEEIARSLEGNWQGDLLFVLQQEQDGYEFCQKQMGECDQRIEQYLQQREERSAGANPPEEKRKERLKKKKGNKPLFDLRSGLFRMTGTDLTRIDGVDVMTAITILSEAGWDMSKWETEDHFVSWLRLCPDNRISGDKIIGKGRLPTNNRVSTSLKMAASTLRLSKTYLGAQFRRLRGRLDTPVAIKAMAAKLARLVYRMLRYGMKYVDRGAEFYEAQHRRLQIKHLKSKAAKLGFQVIQVPAA

SEQ ID NO: 486032 - protein, 344 aa, unidentified
MSVVSIGLDLAKSVFQVHGVDAAGHTVLRRRLMRGELVAFFAKQPACLVGMEACSSAHHWARELVQLGHTVRLIPPQYVKPYVKRSKTDAADAEAICEAVGRPNMRFVPIKTREQQAVLALHRVRALLVRQRTATINALRGLLSEFGVVAGKGTQRISDLNERMGKLSAEALPDEAREALTCLFIQIDDLGLRIHAMERRIIAWHRASEASQRLASAPGVGPITATALVAAVGDGTQFKSARHFAAWLGLTPRVRASGEKERIGRITKGGDRYLRTLLIHGARAVVGTTFRKGVTVRPWLAALVNRRPVNVAATAVAHKTARALWAMLTRCEAYRRSAVLSAAA

SEQ ID NO: 486033 - protein, 377 aa, unidentified
MNSEKYIGLDVHQATISVAVLDSTGKLVMESILETKAAIILEFFAGLRGTLSATFEEGTWAAWLYDLLKPHVVKLVVCNPRKNALLKDGNKSDRIDAHKLAELLYLNKLCSVYHGETSSAMAEQPSRASLSRIHRTVDAVTWLGPIHLACRDLRQLLWHRHRMVQARTRLMNQLQAVALNEGLRCKKRLWREQGREQLESFRLAPWASRRRHDLLELLDRLNPTITELSQAVEQEAEKCPEAQRLMTHPGVGPLTALAFVLIIGQPERFQCGKQIASYLGLVPLEDSSGNRRRLGHITKQGNSLLRFLLVEAAQVAVRSLPEWRSKYVHLTMRRGRKIAKVAIGAKTGGSPLLDDAQGMGGDSRPLIDVHHRPESRR

SEQ ID NO: 486034 - protein, 364 aa, unidentified
MKRKVYVGMDVHKETIRIAYLTSNSKEILKEQQIKHNEVQIKKFIKKLKLEWNEIHCCYEAGVTGYPLYRYLKSLGVNCILVAPGKIPRQNTDKIKTDKRDAIKLARLMRSGELESIHVPSEEDEAVRDYLRSRDSLRLDLGRNRQRLMKFLLRKDIKYSTTKYWTVSHYKWLNNLHFNNEILQETFNDYYSRVRVQEENLKAMDKKIQEIAESEPYREKVGILRCFRGVDYLTAMFLLCEVNDFKRFKTAGSFMSFLGLVPGEYSSGSKRKQTGITKTGSPRLRRILTEAAWQHRFPGTGSKIITARRSGQPALVVALSEKASLRLHKKFRNLQLRGKTPQVMITAVSRELSGFLWAAMNLVA

SEQ ID NO: 486035 - protein, 402 aa, unidentified
MNAVGIDVSKGKSMVAIMRSFGEIVSAPFEIKHTASDIHSLVELINSVEGESRIVMEHTGRYYEVLAHQLSEANLFVSAINPKLIKDFDNDSLRKVKSDKADAVKIARYALDKWQNLKQYSVMDELRNQLKTMNRQFGFYMKHKTAMKNNLIGILDQTYPGVNTYFDSPARSDGSQKWVDFASTYWHVDCVRKMSLNAFIDHYQNWCKRKKYNFSQSKAEEIYGKAKELVPVLPKDDITKLIIKQAVNQLNSASTTIESLRTLMNETASQLPEYPVVMAMKGVGTSLGPQLMAEIGDVSRFTHKGAITAFAGVDPGVNESGSYEQKSVPTSKRGSSDLRKTLFQVMDVLIKTHPQDDPVYQFIDKKRAQGKPYYVYMTAGANKFLRIYYGRVKEYLSSLPES

SEQ ID NO: 486036 - protein, 369 aa, unidentified
MADRITYVGLDVHKEAIVVAVAAGGLRGEVREYGRIANTPTALDRLLRKLGGDGVKLRFCYEAGPCGYGIQRQVSATGHECIVVAPSLIPRRAGDRVKTDRRDAASLAKLHRAGELTAVWVPDIGHEAMRDLVRARLDAVHSLRRARQQLSGFLLRHGCHYGRPVWTKLHRRWLAGLKFEQAVHHIVLEDYIAAVETTETRRDRLTAQIEAMLPDWTLAPVVSALQTMRGMALVNAATLIAELGDLSRFANPRQLMAYLGLVPSEHSSGASVKRGGITKAGNGAARRLLIEAAWSYRFPARISRELLLRQENQPKPIRDIAWKGQVRLCARYRKLARTGKPANVVTTAIARELTGFVWAIARRVRVTAG

SEQ ID NO: 486037 - protein, 318 aa, unidentified
MIIIGCDLHTRCQQIAMLDTETGEVVEKRLEHENGEARRFYQGLEPPVLVGIESTGYTLWFAEMLSELGHELVVGDAAKIRAAETRKQKHDRRDAGNILKLLAEGRFPRLWLPSVEEREVRVLLEHRHQRVQMRTRAKNGLQAIALNHGLRRRRRLWTEAGLKQLGALPVGEGTEWRREDLLRLLHQLDGWVGELDQRLKAEVERRPEAQRLMTHPGVGPLTALATVLILGEVKRFAETRQVTSYVGLIPAEDSSGGKQRFGHLTKQGSRLLRFLWVEAGQSASREDAGLSRVYKRLVFRKGKSIAKVAIARKLIIRL

SEQ ID NO: 486038 - protein, 320 aa, unidentified
MNKERTYIGVDVSKESLDVAITNSDKKWRFNNNLSGINSAIEMIKQTGRALVIFEATGGLELPLWYALAEAGMDAAPINPRQIREFARAKGRLAKTDTIDAKTIAQYGQTFNPNPQPFPDTQELKEMITRRSQLIDMITAEKNRLKAVRRERIRQDIQANIEWLKSRLDGVDKDLGKTIKANPKWRNRFDLLESTPGIGATTAASLIANFPELGKLNRHQVASLAGVAPLNRDSGLMRGKRTVWGGRGRVRNALYMATLVATRYNPVIKAFYSRLCAEGKAKKLALTACMRKLLIILNSMLKQNTPWKYNHSSGLIGPCH

SEQ ID NO: 486039 - protein, 443 aa, unidentified
MSELAVLDPRAAFVDVGSEKMHVSIAGGPPALFGTVTSQLHALRDYLAEHQVRSVAMEATGVYWLPLYGVLEASGMEVIMVDGRQARNLPGRKTDMKDCQWGATLHAHGLLRAGFVPPAHVRRLQDYLRLRGDHIVAAAGHVQHMQKALERMNIKLHDVISSLTGASGLAVIRAILAGERDPQALLGLCHRQIRTVKAERVVESLRGDFAEEHLFALAQAVQSWDHYQGLIAACDRQIADILRRMPDANTPPPAASTKKATPRRQPGVNAPDIADLRDMLEQICGGKDLTILPAHTEYSVLQIIGEVGTDLTKWRTEKHFTSWVGLAPGSAQSGKRNGRVKRRRNRAGRIFCVMARSLARSKYIAFGGFYRRMAARRGGLVANKALARKLAALFWRAMVKGLDFVEMGVAQYEAKVLETKHSLLHKLARQLGQQVVPKPIAVA

SEQ ID NO: 486040 - protein, 389 aa, unidentified
MIYVGIDVAAKKHACCILAESGKVLKQFTFSNDMPGFEKLHKALLTPSETKIGLESTGVYGNNLAEFLRRNGYETHIFNPLLVKKSIQATTLRKTKTDKSDAKHIAQYTKEHSQPNPKISYHTSELKSLSRGRFSLVRERSKVKTQAKGLLVQLFPEFSQAFSDVFGAAASAVLRQLPSARMIAQCPVDVLTDLLRTASHGRLGKVKAELLIDLAEHSVGIQSMALELQMQMLLQQIDLFTIQINRYEAAIKSEMETIQSPITTIPGIGCVLGAAILSEIGDIRRFTTPAKLQAYAGVDPSVGESGSSVSTPGRMVKHGSHYLRWALCQAARCVSLYDPIFAAYMKAKRDEGKHYCVACSHVAKKLTRVIYSILKNNTAYSLTYSQIGA

SEQ ID NO: 486041 - protein, 329 aa, unidentified
MKRRWFIGIDISKMTLDVVIYDPENKKARKHIKVANEVKGFKRILKTFKQEGINFKEVFICLEYCGVYGLELGLFLEGKVAFRFCSPLHIKRTLGLTRGKNDKLDAYKIARFCYLHRGELTPSSMPTETMLKLKSLMSERSRVVKASTIEKQVLKEHSKQLGSKSVKRIKKRLKGLTADIAIIEKEVLELVKMDKLLIQNYNLLISITGIGMVNAVMMILSTNNFEGITNARSFACYCGVAPFEYSSGTSIRGKTRVSHLANKTAKANLTNAARSAIVHDPELRIYYKRKRGEGKAHGTVLNAVKFKIITRAFAVVKRRTPYVKLRKAG

SEQ ID NO: 486042 - protein, 414 aa, unidentified
MDLVHPRCAGLDVSKRDVKVCVRIASGGRAAAASTVTTWGAVTNQVLALRDHLIAEQVTLVVMEATGDYWKPFYYLLEDGPFQVMLVNARHVKNLPGRKTDVSDAAWLAQLGAHGLVRGSFVPPEPIRQLRDLTRTRTTLVRTRAKEIQRLEKLLEDAGIKLSSVASDISGVSGRAMLEALIAGQRDPVELAGLAKRRLRSKIPQLTEALTGRFSEHHAFLARVHLDLIDQHARAVDDLTARIEVVIEPFRGARDLMITIPGISVLVADMIIAETGADMSRFPTAGHLASWAGTCPGSNESAGRIKSTKTRPGNPYLKGALGVAALSAARSHDTYLAAKYRRIASRRGPMKAIVAVEHAMLIAIWHMLTNGAFYEDLGGQFFAQRNPDQTKKRALDQLRQMGYDVTLAPLQAAG

SEQ ID NO: 486043 - protein, 351 aa, unidentified
MRYYTTTTEYNCGIDLHARQMYICLMNKDGRILVHRNVRRNDFNYFLKIVDPYRHDLTVCCECTFNWYWLADACQDAGITFVLGHALYMKALHGSKTKNDRIDSEKIAHLLRSNLIPPGYTYPAEKRPLRMLLRRRTYFVWKRSELLAQMTVGAMTEGIEFSGVSQHRRQAWMEALIAAHSNELYREAVRANMHIVQHYDRMIDKLERIILKHTRRDHGWQYNLLRTVPGIGKVIALTILYETDDMSRFPRVQDFSSYCRLVKGTVASAGIIKGTRGGKLGNAYLKWAFSQAAILGKRSHPKLRKCAQQLEAKHKKPVANAILASKLGRAVYFMLRDRKPFDVNKVTGDNN

SEQ ID NO: 486044 - protein, 425 aa, unidentified
MVPRNLTGRKPRKEESAMDGQYSRTIGFDLGDTYSHVCRLDEAGEVVERSRVRTRRAEVKERFSGYPPSRVAIEVGTHSPWVSRLLQECGHEVLVANSSKLRMIYANAAKSDRVDAESLARVARMDPKLLHPIRHRGESGQAELAVLRGRDALVRTRTTLVNHVRGAVKSFGERLPKCSADSFGSEAAGRIPKALREALRPVVQVIAELTRKIKAYDKRVEAMCEKAHPETQRLRQIKGVGPVTSLAFVLTVGDPSRFAKSRSVGSYLGLTQRRNQSGGWDPELPITKAGDGHVRRLLVGSAQYMLGPFGEDSDLRRWGLSLMETGVARGQKRKRAKKRAVVAVGRKLGVLMHHLWTTGDTYEPLYQAKRRVPEVEEVNEAAVLPAAPLPSPQGGEATARTTGREEKRRGARREAERPSPVSSPG

SEQ ID NO: 486045 - protein, 377 aa, unidentified
MKNVRFVGLDVHAETIAAAVAEADGEVRSLGVIPNRAESVGRLIRKLGKPEQLRVCYEAGPTGYVLYWQLTQLGVKCEVVAPTLVPVKAGDRVKTDRRDAQKLARSYRAGDLTAVWVPDAAHEALRDLVRARWAAKRDQLRARHRLSKFLLRHGRRAPEGVNAWTDKHLQWIKSQVHFAQRAQEITLGDYLHEVDHMSERIGRLERSIDAVIESLPVKMRAVIEALQSLRGIAQLSAVSIMAEVGEVSRFEHPRQLMGYSGAVSREHSSGERIRRGAISKTGNAHLRRIVVEAAWAYRHRPAVGKTLAARQRHSSAAVTELAWKAQQRLHQRYVRLMGRGKSKQQTITAVGRELLGFIWAIGVHVERELNTPLRQAA

SEQ ID NO: 486046 - protein, 400 aa, unidentified
MKGPIVSIDVSNGNSHFQCFIQRGTKMGKVHRIQHTVEGFRFLKSKVEELAMKTKEEVVVVYEATGVYTTPLQRFLEKSEIKQYQISPLQSAKQRKTEIHNKKTDKKDPESIAEVYYAKELRKYEREADIYHQLRTANRVYEDCLEHLRKYKVTFQSHLSIVFPGYMKLFQDGYSPISLQLLEMYPHPDRLKNKQPETVAKKLNKHTDHSFEVCLKNAKRVIEFANKTYPGCDKEDPWVAVLVEDIHQLQAMIEQAEAKLDKIIKLAKITPYYFIILSIDGIGPNLASRIIAEFGDISKFKTRGAMAAYVGNDPNRAESGDIDGYHLSISKKGNKRLRCILYLAVTCSIRSKKENPINAFYQKKRQQSTPLKSKAAKVACITKLIRTIHGMCKNGTEFTS

SEQ ID NO: 486047 - protein, 427 aa, unidentified
MSRRPRRNHSPAFKIPWGVDSNRRSDRVRLLPPTLEATMQTVTDRSEAPTAIRTDLGAIFVSLELSRSTWLITSLSPAGGEKMSKHVVRGGDVAGLLERFTQVREKARTRTGKVFPFVVIQEAGLDGFWIDRVLRNEGIESHVVDPASIATSRRHRRAKTDRIDGEALVRALLAYKRGEPRVCAMVKAPTPEEEDRRRVCRERKVLIAERVRHVNRVKGLLFSQGISGYEPLRRDRRERLDTLRTGDGRPLADHLKAQVRRELDRLELLLEQIKAVETERDVLLATQQVAVPAPAAMLLGIKGIGPEIAAILWSEGLFRHFDNRRQVASYAGLAPTPWQSGSIDRDQGVSKAGNPRLRTTLIQLAWLWLRHQPKSALALWFEERVKRTGGRLKKTTIVALARKLLVALWKYVTAGVAIEGAVMKAAG

SEQ ID NO: 486048 - protein, 445 aa, unidentified
MSEATLSTKMAEPEWAAFVAIDWADKKHFWRLALAGSGQQEQGELENTPEAVDTWAVGLSVRFGGRPIALCLEQSRGSLVYMLTKYPHLVLFPVHPKTAAQYRETFCPSGAKSDPSDTASLLDLLQRHRERLRQLQPDTSETRLLQLLVETRRRAVNENTRQKNRLTACLKRYFPQVLQWFDDVDSPLVAALLQRWPSLTELQRAHPGTLRKFFHEHNCRAEGRIQERIAGIRAATPATVDAAILEAEAFQARGLVAVMATLRTHIDELDQRIAQLVAEHPEGSLFGSLPGAGPALVPRLIVAFGTRRERYDSAYEVQCFSGIAPVTEGSGKSQWVHFRRPCPKFLRQTFHEFAFQSIRKSPWARAFYDAQIDKQKSHHAAVRALAYRWIRIIFRCWKDRKPYDEQTYQRSLQRRGSPLMSYFAPATGVRWKTVAGFQKLSQENS

SEQ ID NO: 486049 - protein, 470 aa, unidentified
MFLHRPGRLAWRMEVVLAKLRKNKKAHGLVAAPVMEPNAAGVDIGATEIYIAVPPDRDTQPVRRFAAFTEDLKAAADWLERCRIETVAMESTGVYWIPLFQILETRGMKVCLVNARHVKNVPGRKTDVSDCQWLQYLHAVGLLRASFRPSGQVCAVRSLMRYRESLVGMAAVHLQHMQKALDQMNLQLHHVISDLSGTTGMAILDAILCGERNPLKLAQLRDPRIKASPETIAKSLVGDYRREHLFTLRQSVTAYRSYQQLLACCDVEIEQMLGEFPDGAGPDTPVLADPKDRHRPRRNEMKFDLRGHLYRIFGVDLTEVPGLNALTAHTLLTEVGPDLSAFPNVGAFASWMGLCPDNRVSGGKVLSSHTRKVNNRAARALRMAAQSLFRSQSWMGQYYRRMRAKLGAPKAITASAHKLARIVFHMLTNRHAYDETVFAQQEIQNQHRLQQRLMQQAKKHGFQLIPIAQN

SEQ ID NO: 486050 - protein, 437 aa, unidentified
MRRKKKNANKSINLQVLPLVHPNAAGIDVGAKEHVVAVPCDRDPKPVRTFQAFTPNLHELAAWLKRCGIETVALESTGIYWISLYEILEQYGFEIRVVNARHVKHVPGRTKTDVLDCQWIQKLHSFGLLNGSFRPDQQIRKLRTYMRLRDNLVAASTQAVHHMQKALFEMNVQLSNVISDIVGETGLRIIEAIITGQRDPMQLAALCSTRIKASRETVAKSLHGNWDEALLFALKAALETYRFSQTKIQECDCCVQQHLAQFASRAEAINSSQDSKAQLHRVCGVDLTKIPGIKEQSAQIIISEVGLDMTKWKTEKQFCSFLGLCPDNSISGGKVLHRATRKVYNRAADTLRLCAQSLTHSKSALGAKYRRLRARLGAPKAIVAMAHHLARLVYRMLRYGQNYVEQGIHQYELKFQLQRVKWLRKEAKSLNLQLVPA

SEQ ID NO: 486051 - protein, 460 aa, unidentified
MRRKKLAGQSKESGPKKVDWKALEIVHPDAAGIDVGGSEHWVAIGPERDPEPVRRFGCFTADLREMALWLVDRGVKSVAMQSTGVYWMPVLEILEQHGLQVYLVNARHTKNVPGRKSDGQECQWLLKLHAFGLLNNSFQPTDEIRIARTLWRQRGNLVAEASSAIQRMQKALTEMNIQLSNVLSDLSGVSGMSILKAILDGERDPWTLAAIVQPGVKATPQDIARSLEGNWREEWLFVLRQQVELYRVYQEKIADCDVALREHLESFGSKIDVPAQPIGPRPKNKSSKNAPQFDLRTELYRITGIDWSQVNGMDVLTAQTVIAEAGADLSAFPSEKHFTSWLGLCPTNEQSGGRILNRRTRKVVNHAATALRHAATTLLRSQSYLGAQYRRLRTRLGAPKAITAMARKLACLFYRLIKHGQQYVDKGTQYYEAKYREQQIRAVTKRAQKLGLQVVVPNPA

SEQ ID NO: 486052 - protein, 373 aa, unidentified
MKKVRFLGLDVHAETIAVAVAEPNGEVRSLGIIPNGEESVRKLVKKLGPAEQLQACYEGGPTGYVLYWQLTALGVKCEVVAPSLVPVKAGDRVKTDRRDATKLARSYRAGDLTAVWVPNEEHEALRDLVRAREAAKQDQLRARHRLSKFLLRHGRRVPSGIKVWTQRYQDWVKEQVHFEQPAQEYTLLDYLHEVEHMTDRIRRLEQAIGEAVKLAPPGMQEVIQALQALRGIAQISAVTIVAELGEISRFEQARQLMGYSGAVSSEHSSGKRTQHGPITKTGNAPLRRIAMEAAWAYRHRPTIGAALRKRQEGLSEDAKEIAWKGQYRLHKRYRNLVAAGKEKQKVVTAVGRELLGFIWAIGVQVERNSKRVA

SEQ ID NO: 486053 - protein, 370 aa, unidentified
MINATTFVGLDVHARSVKACAFVPETGETARKSFGYEPGEIASWVASLPQPAKCVYESGVTGFHLCRELGSMGIDCVVGAVSKMHKPAADRGRKTDRRDAQFLAVQLALGVVTEVHVPDPECEGARDLTRALADARDDAVRAKQRLSKFLLRHGLVYDEKNAAGQRRSRWTRDFWAWVGRIDLEDAAAMATLDHYCGRVREADAAKAALEAKVKLLAQQPRWKPTCDALKCLKGVDAVTAASVACEADGFARFATASGFAAWVGLVPSEHSSGESQSRGGITKAGNKHLRKLLVEAAWHYRGASRSPKDLAKGQTVNAAARRHANAGVRRLVDRRRALDEAGKQSSVANVAVARELACWCWAVGRMAEGA

SEQ ID NO: 486054 - protein, 388 aa, unidentified
MNYCGIDVAKRKHSAMVINDKSETVKQNFTFKNARQGFDKLLQELQPFADQLLIALEATGHYWLSLYEVLTSTGYQVVVLNPLQVHAYQRSGIRKRKNDRIDSFWIADFARISNPQATQQQATEHLQLRELSRFRFRLTENMGNCKRKILSILDRVFPEYEKLFSNVFLTSSRQLLAQAVTAQEFADFDLGELTALLSSASRGRFGQEKAEAIQSVARQSIGVHFLADSVRIQMRCLLQQLDLLEAQRQEVDLMLEHLMQQLPQHITSIPGIGLATGAAILGEIGDVHRFESPEKLVAYAGIDATVYQSGQFEALETHMSKRGSPYLRQALWQAASKAVLHDPQLKMYYQRKKAEGKHHGTAIGAVCRKLVARIFIILKENRPYEIRY

SEQ ID NO: 486055 - protein, 389 aa, unidentified
MKIYVGIDIAKLNHFAAAISSDGEIIIEPFKFTNDADGFQLLVSKLESFDKNSLIIGLESTAHYGDNLVRYLVTEFYQVCVLNPIKTCQMRKNNIRKTKTDKVDTYVIAKTLMMQDDLRFVSFYDLDMMDLKALGRFRQKTIKQRTRLKIQLTTYVDQVFPEIQYFFKSGLHQNAVYALLKEAPSPKEIASMHMTHLANLLKVNSHGHFTKEQAKELRVLAQKSVGANDSAISIQITQTIQQIELLDSQLEKIEAEMTDIMKFNDSVIMTIPGIGYINGGMILGEIGDIHRFSNPNKLLAFAGLDPSVYQSGNFQAKTTRMSKRGSRVLRYALVNAAWNVVRNNATFKAYYDAKRAEGRSHYNALGHCAGKLVRVIWKMLTDEVEFNLE

SEQ ID NO: 486056 - protein, 315 aa, unidentified
MAMRVSQEKMIIGVDVAKNELVIYHEQYDRLEAIPNTKVAIAKWLKTLAGTSAIAIEATNVYHVLFADMAYEAGCEVYVLDGYQLSSYRKSVNIRAKTDAQDARLLARYLKNEFDELRPWIPPSPLYRQLLSLFRRRAALVQARTGLVQSWANEPLLKTAFANQLNSMKRLEALVEKKIRDVLQEAGLMGQVNRCMKVEGIGFLTAARLVTSYQRGEFSGANAFIAFLGLDLRVSKSGQRDGPRRLTKRGDPEARRLLHNAAMSGSRTPAWKPFYEEQRKRGFSTTQALVMLARKMARVVFALLKNQSEYQTKAA

SEQ ID NO: 486057 - protein, 367 aa, unidentified
MMGWMAPLRHLSAKLLSDRISSEWEPSMGEVTTIGLDLAKHVFQVHGVDAEGATVLRKQLRRAQVLAFFSRLPPCLVGLEACATAHYWARELRALGHEVRLMPAQYVKAYVKRNKHDAADAEAICEAVQRPTMRFVPVKTADQQAAVLLHRGRERLVRQRTGLVNALRGHLAEFGVIAPQGLRNVGKLIAIVRDEGDARLPELARQVLQVLAAQIEQLEAAVAAIEKQLMAWHKSNPVSQRLASVPGIGPIIATAIAATVVEPSGFRSGREFAAWLGLVPRQNSTGGKHRLGGISKRGNQYLRRLLINGASANLLRSKATNADPWVIGLRQRRPSLVVAVALANKTARIAWAVMHRHENYQRVAAAA

SEQ ID NO: 486058 - protein, 457 aa, unidentified
MVRVRLSLTQKVDSQFEIAPVAEPRIVPMRTYSNVAIRRGRRHNEEECVFMQSVYARCCGIDVHKKLIVACFMNGKKSELREFSTLTSGIKELAHWLLENDCQMAAMESTGVYWKPIYNIFELLEIPVMVVNAHHMKNVPGRKTDVKDAQWIAQLTQCGLLRASYIPDKEQRELRDVVRYRKSLTEERSREINRLEKMLEGANIKLSSFVSSLTGVSSRKLLDKAMTDEGVTEENITSLLHMSMREKTNVLLLAMEGVLTPVQRQLVRAILNHIDDMTRRIEDLDNIVKEQMQKYEDEIKRLDELSGIGQTSAQIILAEIGSDMSRFPTAGHLCSWAGLSPGNNESAKKRKGGKTTKGNKTLKSTLIQCAQSAVKNQNSFFYAQYQRLVVRRGANRAKVAVAHSMLIAIFHMLKNNVPFHDLGCDYYTKFNTQSKVNYYLSKLKELGTEVLPVPSVT

SEQ ID NO: 486059 - protein, 410 aa, unidentified
MKMAGIDVHKKVLMVVVVDTSVPEEKPVRRRFVTLPSELQRFRIWLQEQGVEEAVMESTAQYWRSVWLELEPHMSLHLAQAFSNRAPRGRKHDFKDAERLVRRLMADELILSFVPKGEQRIWRSLTRMKVQLTRDRVRLQNQMECLLEEMRIKLSIVVSNLLGASGLRILHALAQGETDPKRLAELGDERLHCTEEQLVDALTGRVQPMHRGMLALQLQRLQLIDQQMAQLNSMIAQAMKSHQDAVIRLAEVPGLGVDSAQQIIAEVGAQASTFSSAAELTAWVGTCPGKEESAEQNHSSRSAKGNKYLRRVLNQAAHAAVAKKGSYFQVVFRRLMPRLGYKSAIWAIAHRLCRVVWKILHEGVRYIEQGRDVGPREKKQRAQMLARALRKLGYEVTITPINELAPKPAI

SEQ ID NO: 486060 - protein, 342 aa, unidentified
MKIHTIGIDLGKTSFHLAGLNERGEVIMRKRFSRAQLLRFTANRKVHLIGMEACGGAHYLGRALREQAHEVRLIPAQYVKPYVKTNKSDYIDAEAIAEAVGRPTMRFVPIKSDDQLDLQSLHRVRERWVTRRTAVINQIRGLLLERGITLRKGRRYLDEALPGILEDAETKLSGTLRLLLTQLKLELNQLALHLEEAEALIEQTVQESEACQRLMQIPGIGPVTATAVISAIGNGAAFRKGREFAAWTGLVPREHSTGGKQKLLGISKRGNRYLRKLFVQCARAVLQQKTKQAPGLKVWLEKITSHTHRHVAAVALANKLARMAWAVLATGEAYRAPLLVAA

SEQ ID NO: 486061 - protein, 376 aa, unidentified
MTMMHHRQIRYIGLDVHKATISAAIAEESGAPTSYGRIPNDPAAVRTLMTRLGGPQVELRVAYEAGPTGYALHRQLTSMAISCMVVAPSLIPKQPGNKVKTDRRDALKLARLLRSGDLTPVWVPDEAHEALRNLVRARADAKADQLRAKHRLSKFLLRQGCWPPVGVRNWSKRYVTWLHQLEFEHLPDRVVCADYLTEVTAAGERIKRLEVALYECAQSSRQVALIRALQAFRGIAFLSAVTLVAEAGDLRRFRTAPQFMAYAGMVPSESSSGGKQQRGSITKTGNSLLRHVLGEAAHHARHTPRVTSKVKQRQTDLPADIVDLAWRAQVRLHTRYRHLSGRIGALKALTAIARELAGFVWAAGQALQEEEVPTAA

SEQ ID NO: 486062 - protein, 354 aa, unidentified
MSEKLNTAIAVIGIDIGKNSFHVVGHDQRGAIVLHQKWSRGQVAARFANMPPCLIGMEACVGAHHLSRKLKAFGHDARLMPAKYVRPYSKGQKNDFRDAEAIAEAVQRPTMKFVATKTADQLDLQALHRVRERFVSQRTGIINQIRAFLLERGIAVRQGQRFLRAELPRILATPSDVLSPRMVHLIENLAGDWRRLDERIESLSSEIEAIARQDAGCERLMSVPGIGPIISSAMVAAIGSGEVFTKGRDFAAWLGLVPRQMSTGGRTILGRISKRGNRYLRVLFVQAAWVVLIKPKSWERHGLKSWIEAAKKRLHPNVLAIALANKLARIAWGVLAHGRDFEVRKISEAAAQSA

SEQ ID NO: 486063 - protein, 351 aa, unidentified
MQYYVGVDNHKKFSYLSVMDAQGVVVKEGKVVNTKEAVSRFLGKEYTKNTSAVLEAGRNWTVMYDWLEEELDEVKLAHPMKVKAIAEAKIKTDKIDAKTLAHLLRCDLVPEAYVAGKDTRIAKNILRQRMFLVKLSTMVKNRIHLIIDRHPEAKGQIDPSDLFGKQGIEWLKLVMLPKEDRRILDGEIELLEYLRQRIDASDHWVVELGKDNAAVQLLMTIPGIGKFFALLIATEIDDIARFRDKNKFASYAGLIPSVHASADKRFYGRIIGHGNKYLRWAFIEAVWPAIKKDLSLRELYESLKIRKGANKAKVAAARRLAIIAYRVLSQKRPYEVNYSGCPHIFLAEAVR

SEQ ID NO: 486064 - protein, 384 aa, unidentified
MNKHNILFIGLDTHKVFVEVAYIEDQRGAKSVHLGKQPTSKLAITKLARQFESKYPDATLHFVYEAGPCGYWIYRLLTSLGHCCYVVAPSLIPKKPGDKVKTDKRDAMMLAKLLKSEDLTPIYVPEPEDEAVRDLSRAREVAMKDLKDAKYQLKAMLLRNDINCKVKDNWSAPHLRWLTALVLPHPAQQIVLQECIQIITERTQRVERLVNELTHQVQSWRYYPVVKAVQAMRGVRLLVATGVVAELGDLNRFDHPRKLMSYVGLVSSEHSSGGKRKLGGITKCGNGRARRLLIEGAHSYRYNANISTEIQKRQEGLPKAITDITWQSQLRLCRRYQRLSYKGQHYNVIITAIAREMIAYILAISREVALTPVNPKLRLSRVPA

SEQ ID NO: 486065 - protein, 358 aa, unidentified
MQRNKISFKGQKIFIGIDVHAKSWKVAIAPEVGVVKGYSQKPSVKELFDFLKKNYPDGEYQAVYESGFSGFSTYYALTEVGIDCIVIHAADVPTTQYEEVMKTDRVDAAKLARSLKAGLLKGNYVPEKQYMDDRSVVRIRKTIQKQLGGYKSRVKHLLHCHGVEMPERFSKIQTHWSRAFITWLMKDVKLMSDTRTSLDLLIRQVEVIRGTLLEATRQLRKMSQAKRYKRRHDLLRTIPGIGIITTMCILTEVCDVKRFHNENEFAAYLGLIPTSHSSGENIVHGEKTFRGNKQLGPMIIEAAWIAIGRDAGLGAQYFQYKQRMEPQEAIVRIARKLSNIIFSVLKNEKEYVPYQTGI

SEQ ID NO: 486066 - protein, 391 aa, unidentified
MKKFNPEQHRIETASALEIVRTAENVDVYAAYVGLDVHKETIAVAVAEPGREEPIYRGEIANKPKSVQKLLAKLSETYDGGLLLFCYEAGPCGYVLYRQILASGHDCQVVAPSRIPKAPGERIKNDRRDALKLARLLRGGDLTAVWVPDQEQERMRDLSRARDDMKGQERKARQQLNAFLLRHGYHWPRGKSRWTPAHENWLAGLKMEHPWQQVVLEEYIAAERAAGERVAQLNDHLMRALPEWSLAPVVDSLIALRGVDKLAAIVLLAELGDISRFQSPRQLMAFLGLVPSEHSTGTRRRQGGITLTGNAHARRMLVESAWSYRFPARQTKHLKGKARNASPEAKQIAWKAQTRLCGRYRTLIRVGKNTKLGVRGHRPRAGWLHLGHRAP

SEQ ID NO: 486067 - protein, 465 aa, unidentified
MAKAHNSSSKPRAKQNHRAKLKPQDATQGLQIVHPRAAGIDVGNEEHWVAVAPDLDPHPVQSFGCFTRDLREMAEWLVRCGIETVAMQSTGVYWIGLYDVLSEHGIRVFVVNARDTKNLPGRKTDIQECQWVQRLHAYGLLRNSFRPEEEILVMRTYWRQRQQHIADSSRCIQHMQKALTQMNVQLANVVSDISGETGLAILKAIVGGERDPQALARLRDPRLKASEVTVARSLEGNWRPELVFVLSQELDSYEGYQHKIAECDEQLQQHYRTLQEKADPGQLAPVRRDKRARGNVPGGFDLRKELYRASGVDLTGIDGINVLTAQTVIAEVGCDMSRFSTEAHFVSFLDLSPRNKISGGKIVGREKRKASNRAGLALRLAAGTLLKSETYLGAQYRRLRTRLGAPKARKAMANKMARLIYRMLKHGEAYVDRGQEYYEQKYRQQQFRMLTRKASELGFQLVQSA

SEQ ID NO: 486068 - protein, 360 aa, unidentified
MKKYIGCDMHKRYSVFVEMDETGKAGRAVRVEHRNGEMEAYLAKLPPGTPIAIEASGGWYWLFDLMESMGVEPHLAHALKVRNQIKGSNKTDSSDALGLAMLLRNGTLPEVWVPSGKLRDLRGLMRCRLRMRRITTMLKNRIHAALRRYGITAANWKDPFAAGAQKALEEAVEKLPTLTAVATRIEWGVLRETESQIAVLEEQIADSAGKLGGVYRLQTLPGVGKILGPAIYLEMGDAERFATAEKFAGYCGLVSRVHSSGGHTRQGRLRKECNASLKWAFVEAAEAIVSHQKTMSHRHVVRLYQRVKRDRKDRHGKAVVAVARHLAEAAWHMMRTKQDYREPQPTAGMLQVHHATGRPL

SEQ ID NO: 486069 - protein, 404 aa, unidentified
MKGPIVSIDVSKGKSDYQAFKDVNVKYTGSRSIKHNKEGFDEIVNLVREMEKKLETEVCVVYEATGVYHRVLKKVLEDNNIKQFIINPLLSAKTRKNDSLRSPKTDKLDPKSIAKTYYSHSLHNSHKQETIYHELRELSRYYEDILVHIRKDKVAFRAQLDIVFPGYDTLYDDLYGPVALAIIEKYPHPEMLQKKKINTVSKVIQNKTCHRQAVSDTMADKAIEYSKTIYSGCDKDDIEVLILQRFIKKLNEDMAEAERTIGEMIKLAQELPDFNIIKSIPGIGDNLAARIIAELGDMTRFKKKNELVAFAGLDPRISESGQNDGDHMHITKKGNKRLRCLLYLAVTCSIRLKRDDNSIKDFYIKKKQQSNPMCSKAAKTACASKLVRIIYSMCKTGELYQYNK

SEQ ID NO: 486070 - protein, 414 aa, unidentified
MNAAGIDVSSRKSTIAVLRPFGEVVKVPFEVSHTAEGLASLARQLKAIDGETRVVMEHTGRYYESVANVLHESGLYVSAVNPLPIKEYGGNSLRKVKTDKADAMKIARYALDNWCDLRDYTPMDTVRYDLKTLNRQFQLASKQKTASSNNLIALLEQSFPGIRKCFEGPVRKDGTQKWVDFAHTFWHADCVRKLSLNAFAERYRKWCKRNRYQFSTEKTDEVYELAKSAVVLVSKTEVTKVLIKEAANQLTSISRSVETYRTEMNRLASQLPEYPVVMEMYGVGESFGPQLMAEIGDVRRFERKQSLVAFAGIDPMPNQSGEKNVRSNKSSKRGSPYLRKTLFNIMTVHLQRAPANEPVYQFLDTKRAGGKPYYVYMMAAANKFLRRYYAKVRDYLASLDSLPPVDMDSTGLNK

SEQ ID NO: 486071 - protein, 403 aa, unidentified
MIIVGFDWARDKHDVCVQNPRGKKLYEGVVKHDADALEQLRTRLAELEPDPAAVCVALEQHDGALLAWLLEAGYTVYGINPKSADRARDVFRPGGAKDDPGDALVAADVLRSNLERFKPLHPQSHETLRLRSLARLRMRMTSQKTAVMQRLRTILAEWCPHVSKLCKDFNRTWQRALLDRWPLHEDLATAHGNSINAFLAEHRLAPETRQKVRIAQKATPTFIPEGRKDAIRLDIALCLDQLKLLVGKLTEVDRELEQAFSAHPCFNIFNSLPVKGLQTLAMITAAFGDRRDDPTGWRQLAARWGVGPVTVSSGKRKLVKRRRACDTHVLQALTDFAFTTAFSVSGCWSHSFYERKRREGRDHHESLRAVALRWVKILWAMWNAASTYDEGYHRRRKGIARSN

SEQ ID NO: 486072 - protein, 359 aa, unidentified
MQTQSNKIDFKGQNIYVGFDVHLKSWTVTIMTEKLTHKTFSQPPKPEALHHYLVKTFPGGTYYSAYEAGFCGYWIHNRLIELGINSIVVNPSDIPTTGKEKVMKTDPRDSIKIARSLRNGDLKPIHVPSLMTLEERGLTRMRSTLVKDLTRYKNRIKSFLYFHGIEYPEAFSNSKSHWSNRFNQWLEGLEFNDLTTRATLTTLLGQSNYLRGSILQITRQVRELAKTDRYKRQDKLLRSIPGVGIITAMIILTEIESINRFANVDQFCGFIGLIPSTNSSGDNEAIGDITPRGHSILRAAIIESSWTSARLDPALNKSYHDYCRRMEPNKAIIRIARKVRSRIMFVLKNSQPYVFSVVK

SEQ ID NO: 486073 - protein, 333 aa, unidentified
MINASELVFVGIDVSKDTLEFALDEKSKTQNFSNDETGIKSLLANVKAAQSACGGVGAIVFEATGGYEREAAVALCSAGLPVMVVNPRQARDFAKAMGYLAKTDAIDARVLSHFARTLHQSERREELLLRLPDAQQVKLQALVVRRSQLIQMRVAEDNRVAMSHPTQRKSIAAVCKVLNKQIVSIDRNIDAQLKDHFAVKLALLDNFKGAGTGTKASLMAALPELGRVSHEKIGTLVGVAPLNCDSGLHKGKRFTWGGRADVRSALYMAALSAVRYNSVIKKFYDRLLSKGKPKKVALVACMHKMLTIFNAIMKSGKPWDENYVSPKTAAKTA

SEQ ID NO: 486074 - protein, 335 aa, unidentified
MEKKVIIGIDVSKSWLDAHVLLMGSQEGHALRIHNTVVGFTKLIKFINKQTKVNSDDWLFCMEHTGVYSYGLNSFLQERSIPQSMVNALAIKRSMGIIRGKNDKADARVIAQYAVRFQDSLPEFHLPTESLQKLKIQLSQRERMVDMKRQVDLAMESMEALPQDFTKEARMQNKKLIRQLEANIEQMDAIIRDTIKSDIELKEQARLIESVPGVGPQTSANILVTTQGMKLFSDSRKYACYCGVAPFEYTSGSRYRGKTKVHYLANHKMKSLLHMAALNASVYSPEIKLYYERKKAEGKNPMSILNAIRFKLIDRVFAVVKRNELYDKNFLRKAA

SEQ ID NO: 486075 - protein, 423 aa, unidentified
METMHERVAGLDVHKATIVACVRISAGAKVERECRTFDTTTDGLLALLAWLVECRCSHVAMEATGVYWMPVWKILSDGAFSLIVANAAHIKNVPGRKTDMNDAMWIADLLACGLIQASFVPEEDLQELRSLMRTRKQLGREQTRHVQRIQKTLTEANIQLDSVLSDIMGASGRRIIEAVISGVRDPRKLAALASAQIKATPKQLYDALHGRLTDHHRFLLKLHLQQWDGLDATIREIDQEVEARIARGDKEVKPGEAPFRDLIKLLSTIPGVSILSATTILSEIGRDMIRFPTAGHLVAWAGLCPGQNESAGKVKSTRLRKGAPWLKTMLVQCAWAAKRKKDSYYKAQFFRLQSRRGPQKAICAVAASILTAIYHILKDGTPHRDLGADHFNRRSTEGQAKRLVAQLTKLGFQVQLQPRVEAA

SEQ ID NO: 486076 - protein, 362 aa, unidentified
MSSVPVFVGIDYHQDSVQVCVLDSDGKRLANRSVRNNAAAVAEVATRHGEPVRLAVEACCGAADLADELIALHKLPVQLAHPGYVARLKRSPDKTDSSDAGLLADLSRVNYVPTVWLAPEGTRQLRRLVRHRTQLVRRRRDLKLRIRGLLRENRLSCEAARPWRKAWLAWLQTEAKLSAQDRWIADDHLLELAALGKRIAAVEARIAEATADDPLVARLMEYAGVGLITAVTLRAEIGRFDRFANGKQAARFCGLTPQNASSGARQADAGLIRAGNPELRAVLIELAHRLIHRIPGRWADLAYGMLARDKPKNVVVCAVANRWVRWVYHDLKQPASSQSTSARARQKGPPLPPSPSLGLSEG

SEQ ID NO: 486077 - protein, 317 aa, unidentified
MEVSLIFVGIDVSKAQLDVAIRPTGEKESFANDKAGIKALVKRLAKIEPTLIVLEATGGYERQVTRALVSADLPVVVVNPRQVRDFAKATGQLAKTDSIDAAVLAHFAEVIRPELRPLPDVVTLELRALTARRRQILEMIAAENNRLAMTSKAVAKRINAHIRWLEQELERANQELDRAIEQSPIWKENDELLRSAKGIGPVTSRTLLAELPELGTLDRKQISALVGVAPFNRDSGSLKGRRSIWGGRAPVRCALYMATLVATRRNPVIRNFYKRLTAKGKLFKVALVACMRKLLTILNSMIKHKTRWSETFSLHTT

SEQ ID NO: 486078 - protein, 328 aa, unidentified
MKINHIIGADISKKSIDLFCHGLHEHLKIKNDVSGFKKIQFWLAKLELVTKDLVIVMEHTGYYSYHFEGFLHQNQVQFCKVSALAIKKSLGLVRGKTDKIDAGRIARYGYEKQDRLRLEIPVDATLHRLQILNSTRSLLVKQRSSLMCAVKEYRVILAEKDPIIQGQLKLIRELTGQIESLEKKMKELLIKPGPIAENFRLLIGIKGIGLIVATATLIKTNNFTRFKNRKKFSCFCGSAPFEYSSGTSIKKRTRISHLADKSMKTLLTQSAKTAIQHDKELKEYYQRRTQMGKSKTSTINVVRNKLIHRMFAVIKRQTPFIPQYQKIV

SEQ ID NO: 486079 - protein, 337 aa, unidentified
MKYVGVDLHKRQFTVCWKLEEGIKLEKYPMNKKGLEEFKKKLDKSTEVALEATGNSKYFYDEVIDYAKEVRVINPMQFKVISQSVKKTDKEDARVIAEYLSKGLIPEVRIMKKETREIKSLIQTRDKLVKLRSSLKNKIHGILTEQGICSHKEMFSSEKALKIVQEMPCSETSKFEIEVIVEQIKSLNQSIKKIEEKIKEKGKGLKGGKNLQSITGIGELSSAIILSNIEEIKDFENEKKLSAYAGLVPRVYDSGDSIKHGRITKRGNKILRTTLVQVALVAIKYNQYLRNFYLRLKQKKGSGKAIIATARKMLGIIYRTLKNDWVFSDFNNFVLAN

SEQ ID NO: 486080 - protein, 407 aa, unidentified
MLFVGVDWAEAHHDVCVLDGEGRVLGRKRVADNYVGLGELHALVAEHLGDEDDADQVIVGIEKDRGLIVTALVAAGYQVYAINPMASARYRDRHHTSGAKSDPGDAKVLADLVRTDRQNHRPVAGDSALVNALQVLARAHQNIIWSRQRQVNALRSQLKDYYPGALDAFGTDLSHMDAVAVLAVAPTPALGRTLSRAKIVSALKRGGRQRKLDERAATIQEVLRREQLHQPPLLEDAYGKVTSSIVRTISQLTNEINELERTLSEGFEQHPSAKVILSLPGMGTVLGARVLGEFGDDPNRYCNAQSRNNYAGTSPVTKASGKSRVVLARHSRNRRLADALDRMAFCSLIASPGARRYYDEMRAREKSHQKAVRQLANRWVGILHTCLDRDCLYDEEIAWATPKDIAA

SEQ ID NO: 486081 - protein, 346 aa, unidentified
MKIIGCDFHPSFQQIAVFDTETGEITEHKLVNGNGEAERFYRSLPVPSLIGIEACGNSHWFIDLLGRLGHQVWVGDAAKIRASYVRKQKTDRRDAGHILTLLLEKRFPKLWTPSRQERDQRQLLIHRHKLVQIRTRIKNSLQHLALNQGVQKKQKLWSKAGQKVLIQLPLEGWTAVRRQDCRELLAQLDERIARLDKAAELAAEAHPQASLLLQQKGVGPITALAFALTIGDVSRFPHSNQVASYLGLIPSEHTSSSKRRLGSITKQGNSFVRMLLVEAAQSVTRFDPKFHKQYVHLCRNKPKAVAKVAAARKLAVRLYWVLRTDQNSQKAVPIESSPRVPLVGAS

SEQ ID NO: 486082 - protein, 344 aa, unidentified
MKYFTGLDVSLQETAICVVDEDGIVVSEGKAASDPDDLVRWLAATGLTITRVGLEAGPLSPWLHAGLREAGLPAICIETRRMKGATAAMAVKTDRNDARAIAHAMRVGWFTTVHVKSTESQELRLLLSNRRTLLEKRVAIDNEIRGTLKAFGLKLGAVTVAAFEARVLELLAKRSRLLAMVRPMLTARYALRQQCEVLHRMVLKAVRASAVCRRLLSVPGVGPIVALTYATGVDDPARFLRSRDIGPHFGLTPRKYASGEIDRNGSITKAGDGAVREVLVQAALTLLTRVHRWSTLKAWGMAVAKRRGLRRAIVAVARKLAIIMHRMWADTTTFNWTRETVALA

SEQ ID NO: 486083 - protein, 452 aa, unidentified
MKSRPPEKAKKATDHSTRGHWNEMNRKQRREMMRKIQSQDLSLEVVHPDAAGIDIGNEFHYVAVPPTRDNQPVQRFGCTTVELKAMAHWLKQCRIHTVAMQSTGVYWIAVFDILEQAGFEVYLVNARDTKNLPGRKSDVQESQWLMKLHTYGLLRNSFLPSQEIRTMRTYWRQRNDLVQAAASHIQRMQKVLTQMNIQLANVLSDISGVTGQAIIRAILAGQRDPHKLAELRDPRVRASEEQIARYLEGNWQEDLLFVLKQEQQGYEFCQEQMAACDRQLEQYLQQRADRSQGTSLPKEMRKGRLLKKKGNKPQFALRAELFRMTGTDLTQIDGLDVMTAMTILSEAGWDMSKWADENHFVSWLRLCPDNRISGNKIIGKGRLPTNNRASIALRMAASTLRMSNTYLGAQFRRFRTKRGSPIAIKAMAAKLSRLVYRMLRYGMKYVDQGAAF

SEQ ID NO: 486084 - protein, 332 aa, unidentified
MKIKKEVIGIDVSKLTLDVVIHSLKHYFIVSNNPAGFSRLLQVIWKELPGNKENLFFCFEDTGRYSLPLCIFLNGEKLSFAMVPALDIKRSLGLVRGKNDKKDASFIALYAWRKRDEIKPTVFPAGSIVRIKQLLSLRNKLVKHKKAYQTAMCDIQDYFKEGDAQFYLEVNKRVIKSLSSEMASIEKEIETIIKSDPEVQKNYKNLKTVPGIGKIIAFYLIAYTHNFTKFENARKFCCYCGIAPFENRSGTSLKGRSKVNHLANKMIKALLNMGALSAVRNHPEFKTYYSQRVENGYNKMSTVNIIRNKIVFRAFSVIKRGSPYINLHKFAA

SEQ ID NO: 486085 - protein, 359 aa, unidentified
MVMLAEHYDFVIGGDPDRDTIDLAILEAGTGRVRAQTADRTDGPAYSRLLAWARQHAPGRRVWALEGTSSFAAGFVTILAEAGEDIVEIPGQKRSRRPKNDRIDAIQAARTALAQTQQAAPRERGLREALRQVLVTRQGVLVSRTKAINELKSLIVVAPEHLRSQLRGLPVAKQLDRIDRLTSPVGATIEHRVTISTLRSIAARIRFLINQAAELDVELLVLVPQHPAGPALLAEAGVGPVVAAQLLVSWSHHGRVRNEAAFASLAGVAPLEASSGQRTRHRLSRMGDRNLNRALHTVAITRLRCHEDSRNYETRRSAEGKTHRDVRRSLKRILARRFYRLIQAATVPANTTDALGKAA

SEQ ID NO: 486086 - protein, 355 aa, unidentified
MSQEKYIGMDVHQATISVAVMDAAGKLIMECLLQTKASTIVEFIQGLQGTLSLTFEEGTLAAWLHDLLKPHVSRIVVCDPRKNALLKDGNKSDRIDARKLAELLRGNQLHPVYHGAHGVRSLKELGRSYLTITQDVTRVMNRIKAVYRSWAIPCAGTTVYAPRHRAEWLAKIREPGVRVRAERLYQQLDLLQPVRLEARRELLAESHKHSSVKLLRQIPAIGPIRSALLVALLQTPHRFRTKRQLWAYSGFAVETHDSGEYRSVRGKLQRNRERMTVRGLNDNHNRDLKNLFKSAAISASTRPGPLRDFYVARVEKGMRPTMARLTLARKIAAISLTIWKKGVDFDAKQINQQAA

SEQ ID NO: 486087 - protein, 346 aa, unidentified
MVVGVDVHKRSHAAALLDGNGVVLAALTIPNSVAGVERLLGWLTEHDARDAVIGIENAAGYGRLLCAALAAAGCEILNVPAWRTHRDRHEQGRGKSDPGDAVAIAHVVLRKREQLGPALEPELIRALALLEGLRRQSVYNRTQAIQRLRAIWTQVDPEGEARVIHCQRQRELRKLTRIAFGAGIAEQAAARCIRELAREIERLNARIATLEHELEQLLRECGNPFADLAGAGATVAVALIAHSGDVRRFKDKGAYARFCGVAPIRCGSGQTAGHHRFDRGGNRQLNAALHRIAVVQARVDPRAQAFLTRKRAEGKTTREARRALKRHLANVVYRRLHAWAENALPT

SEQ ID NO: 486088 - protein, 294 aa, unidentified
MNTTQVFEKRKIAVAIGIDLAKDHCDVVAYNADNKICFTKANWAYPHLMEWLANAQPAVVLMESCKGCHVRARDIADLGHDTRLVKGADVKALRNVCQKNAIRDADYIARLLYVPGTKFVFVKNQRQQSLQFLQNEYKSIQELRIQVGNQIHAGLEEFGCPGPKSKKFIQSRMMAHLEKNAELIPDEVMSSFLRRREMWLNLFEQEEEAKKRMEEITKTDDDAQRIMTVPGVGAQTAVGMLVHIGGDIGRFKNSGQFAASIGLVPKQNSTGGNTTLNGITKCGPKRLRANLVQC

SEQ ID NO: 486089 - protein, 411 aa, unidentified
MLFVGDDWAEDHHDLEVHDAAGGLLTRRRVGEGVAGMARLHELVAEFLADDAGPEQVVIGIETDRGPWVRALLAAGYQVFAVNPKLAARHREMVSLSGAKDDKTDARTLADLVRTRRHQLRPVTPDSDLADGVKVIARAHQGLIQDRTRHMLRLRAALREYFPAALVAYQQGPLTLTGVDVLALLTKAPTPAEAAQLTIAQITAALKTAGRRGDLAGRAAAIQAALRTEHLGQPTIITAAYAATVRSTVAILQTLNAQIPALQEGVEASFGRHPDAEIYRSQPGLGPILGARVLAEFGDAPDRYADAKARKNYAGTAPITRQSGKLKTVHARFIHNNRLVNAIDLWAGAATLHDPHVRAYYHQLRARGLGHHAALRQIGNRLVGILHGCLKTHTPYNPHTAWAHRTQTHAA

SEQ ID NO: 486090 - protein, 356 aa, unidentified
MDEEESPNSVVVCVLQNAANQAGQLVKKVVKRKKITLSTELEELQHFLDPYCSAQHQATVESTYNWYNIANLFERNGWHLKLADPTTVKNNKTKFSDDITDAEFLADQMRLGALKAADIIPKQDRAFRDLVRLRVDLVQDRARYRTVLKNFFNNQRYMKITTEHLNRMAEQYCDGDATELYSIFDNDNTCLKAGHYLMAMHHLNRQIQQLEEQIKAQEIKNDLTCHRYLPRLYSMKGCGFILRSIIATEIVDINRFRTDKDFVSYCRLSPAVRLSNEKKKGDGNRKNGNAYLSWAMTELANLMVFHNPVIKKKFDRQLKKSHLRAKAIRSIAAKLARCIWHMLKKDKDFQIEQAFK

SEQ ID NO: 486091 - protein, 356 aa, unidentified
MKNNQLDFSGQTLYVGIDVHKKNWQVTIILNGMKVKAFSMNPDPKELYNYLTNHYPNANNYSAYEAGFSGFWADRQLRSLGINNIVVNPADVPTKSKERRTKTDKIDSSKLARELSVGHLEGIYIPSTKAEALRTLVRLRRQLVSDQTRQKNRIKSLLLFLGYSVPEDIQTRHWSQRYITALKDLDIKHEESKVTLNELLNNLNFIRSQLVEILKRIKEFIAKDPQADKTVRLLKTIPGIGSILAVILYSEIIDISRFKNLDELASYVGFSPAIYSSADKEINLGITKQKNKYIRNYLIESAWTAIRKDPALQMAYGKLCQRMPPNKAIIRISKKLLNRIRTVWMNQQEYVKAVVK

SEQ ID NO: 486092 - protein, 375 aa, unidentified
MYEITRGAIVRVGADLAKRVIQVHGVDAAGRRVVSRALKREQFMAWCAQLPAGCLVAMEACSSAHHWTRKLRALGLDARLIAAHFVSPYRMEGKSGKNDMTDAAAICEAASRPSMRFVPVKTCEQQGVMSLHRVREGLKEERTGCINQIRGVLAEFGLVFAQSPKVLRTVLADVIEDASNELSAMARRVLQRAFDHWRELDEHMRWCDSQVGQHVRSSPAARRAAKITGIGELGASACTAGVGDFHQFKGGHQLAAWLGLVPRQNSTGGKTSLGRITKRGDDYLRTLLIQGAKSAVMSAGKRDDPTSRWLVQVTARVGWQKACVAMASKNARILWAVMTRDEGFDARHLSEKPQAKKSANEQLAASTPNMTPCTA

SEQ ID NO: 486093 - protein, 320 aa, unidentified
MLSFCGIDVSKDRLDVMVLPEEQCCSVPNDASGWAALVERLRNFSIMAIGLEASGGYERGVMRALLAAGMSVRQVNPFKLRQFARASGVLAKNDPLDARMIASFVGIMPTRPAQRPTPATEQLVETLAVRRQLSAEKVAAENASRLLEETILRRLSRRRIRRLAADIEVLDERLLEIVATDAVLARRYRLLTSMPGVGSLLACTLIALLPELGRMNRKQVAALAGVAPYAFESGTLRGRRCIWGGRANVRQVLYMAALSASNWNPALKAFHDRLEAAGKKPKVTIVAVMRKMITTLNAMVRDDVVWADRHSGRNSVTTAR

SEQ ID NO: 486094 - protein, 323 aa, unidentified
MYPIKAVGIDLAKLDFSIHGVDEHSKCKLRKTVKRKKLLVEVAKLPPCIIGMEACSGAHYWAREFTKLGHDVRIMACKFVIPYRQNEKNDANDAEAICEAVTRPKTRFVSIKSEEQQAVLCLHRIRQGAIKDRTARINRLRGLLAEFGIIMPKGRYPAQKAIGSILEDAENNLPFLARELLNDLWQSIKGLNEEILKYDRKLYALANQMKAAKRLMSIPGIGEITATTVVATVNDAKHFDTSRSFAACIGLVPRQYITGGIVRLGRISKRGEKHIRTCLIHGARAVIANCKNKTDRTSLWVKVLLNDEVLNELQWHWPLKTLD

SEQ ID NO: 486095 - protein, 403 aa, unidentified
MAREAPPDSPTVANGPQSTFVDRAAIDMVCLRLSLSSGEGGPEYWLHKYLAVEENDDHVIFLGLDVAVKSVSICVVEADGTVIARGEVSSDPDQIAAFLFSHAPDAERVVHESGILSIWLTRELEDRGLPIICIDARLAHKALSGRLNKSDRGDAEGLAHLARTGWFTQVHIRSEASQRIRVLIGTRERLIKMRKDLEGHVRGVLKVFGVCMSGVHRAKMRQGFRDQLLTAGAVDPAISVMVDMFTPIHLALCSAADAMDVELRAIARGSSLALRLMTVPGVGPIVALAYISTLDDAARFKKSKDVGAFLGLTPRRYQSGAMDWSGRITKCGDRDLRRLLYSAATTLITQVKKPSPLLTWATRLNERKGFKKAAVAAARKIAVIMHCIWRNGSVFDPKMGSLA

SEQ ID NO: 486096 - protein, 619 aa, unidentified
MSTATLLDRIGVGIDTARYGHRVSFLRPDRQPAAKPFTVLENRKGYQALQDRLEQLHAQHPQAHFHIRIDAAGQYAANLEQFLRSLPLPITLSIGEPKRNKDYQKAHFPKRTTDDTESQAMARFAVVELPGATAPVSPEMIVLREVAGRLQAKVKQSTQAINRLHNLLARVFPELAALTKDITAAWVLDLLDKYPSAQRIAQARLVSLQNIPYLEPELAEQVQLVAQQSVASLQGDVAEGLMRDLVAQVRHTQHSEEQMRQLLRDAFAALPASPHVQVATIPGIGIATAAAVVAKVVDINRFATPEKLVGYFGVFPEENTSGVDKDGNPLPAGAMHMSRKGNDLVRSYLWNAARSAIRHNPAIGALHQRLRSKRKRGDIALGHCMRKMLHLIFAVWKTNRPFDPERCNAKQPSGDAPPVVSAAPTASPDPTGPVSAAGADRPTPVVSNSTPGANAGQAGPGTGKADLPANEKAVGHKRDLPAEEVVTTANTTVPPKPTVVNATPPAKRQDRPKVDFAFLRQQVTMEQVLRRLGLFDNLRGRGLQRRGCCPIHSQPDDSQRTFSAHLGKNIFQCFHADCRAQGNVLDLWAAVHHLAPYEAALHLAETFHLPRNETEKRNP

SEQ ID NO: 486097 - protein, 414 aa, unidentified
MDILYSRCAGLDVHKKTVVACRVFDDQNGKSVVEVRTFATMTVDLLALGDWLAEVQVTHVAMESTGEYWKPVYNSLEGQFELLGVNAHHIKAVPGRKTDVKDAQWIAQLLQHGLLRASFVPAAPQRALRDLTRHRSTFIRERATLSNRVQKVLEGANIKLASVATDVLGVSGRAMLDALVEGQSDAVAMAALAKGRMKGKRADLEKALEGRVQATHRLILSELLTQIDSLDASIARFDAAIEEACAPFSEAVAHLDTIPGVARATAELIVSEIGTDMARFATPGHLAAWAGVAPGNNESAGKRLSGQIRRGNQTLRTGLVQAAHAAAKTRNTYLSAQYHRLAGRRGKKKALLAVAHSILVIAYRLIERAEDYKELGGNYFDQKRPEATVRHLTSRLVQMGYDVVLNPKTAATAA

SEQ ID NO: 486098 - protein, 363 aa, unidentified
MAKLEGDQTQNGEDSMQFYTNLHPFYCGIDLHARMLYVCILDERGEILVHKKIKDSPEQLLNLLAPYIGNIVVGAECMHCWYWLSDFCEHHNIDFILGHALYMKAIHGGKTKNDKIDAYKIAKLMRGGNFPLAYVYPKEKRAIRDLLRRRTHAMRHSAELKAFIKNALSQYNLPVPDKSDLSYTTGRDAMRGYFSNPQVQRSIDMNLRLIEVYDHEVSSIECHVEKLTKHDNGRDYYLLRSLPGVGRVLALTILYEIGSIQRFDSVQKFASYSRLVKCKAESAGKSYGTQGNKIGNAHLKWAFSEAAVLFLKGNPPAQAYLAKLQKRMSKAKALSALAHKLGRCMYFMLKNQTVFDSERFLAG

SEQ ID NO: 486099 - protein, 340 aa, unidentified
MTHHNLVSIDLAKSVFQVCLFTDDIKIVSNKKVSRNKLSHQIAQLSPTTIAMEACYSAHYWGRVFEQYGHTVKLVPAQHVKPFVRGNKNDANDAIAIAEASLRPHMKFVRVKTVEQQDIQSLHRIRERFVGSRTRIGNQTRGLLSEYGLIGGAGFKALNILIQQALESDTLSALFKEEIASVYEELLDLEYRLKRVNRKLKALAEHYPLCRLLMTIPGIGFINATAIYAAIGDGKQFETARHFAVWMGLTPQQYASGEKSYTGKITKRGNRYIRKQLVHGARSLLIRAKGKKDRLSVWANTIRERRGLPKACVALAHKLARIIWAVLTRGEEFKLQTMAA

SEQ ID NO: 486100 - protein, 384 aa, unidentified
MDQTTSTLSANTLHGALELSKNSWLLAIQFRDREQPSLYPIEGGNTDKLMAKLAAARDCWAKVNGALPAITLCYEVGHDAFWLARFLKARGIECLVIDPGSLQVNRRARRVKTDRVDVKMLLRTLIAWCRGERHVWSLVRIPSVDEEDLRRSHRERSRLVRERTAHINRIKGLLFAQGVRGINIKSQYKTLAVDQLVTGDGHRLPPRLVCEVAREIQRLAMVQEQIAKIERERDTAPTPCEATERKRRLLLRLKSIGPAISALLSREVYYRQFANRRQVGSFLGLTPSPYSSGEEERCQGISRAGSGHVRAIMIEAAWLWIRHQPKSALTRWFLERTAGQSTRMRKTMIVAVARKLAIALWRYVEHGLVPQGAILNPPTTGNAR

SEQ ID NO: 486101 - protein, 312 aa, unidentified
MKKVFIGIDIAKDKIDICILPSGECWTAGITQTALSETIDRLTALKPTNIVMEATGGYETRFAASLTIAGLPVAIVNPRQIRDFARALGILAKTDAIDAQVIALFAEKVQPECRPLPTDDERTLKELIVRRHQLVDMRTSESNRRQQIVSQQVYESITTLIESINHQIDDIEREIDNRIKTSPVWRAKDKLLQSVPGIGKTTASMLIVALPELGTLNRRQIASLVGLAPMNRDSGTFRGRRMITGGRASIRAGLYMPILSAVRCNPKIKPFYDRLIAAGKLEKVALTACMRKLLTMLNAIVRENQPWHSIPA

SEQ ID NO: 486102 - protein, 427 aa, unidentified
MNYTQNRKIAQVTETTLVVGVDIGSQWHYARAFDWRGIEITKKAFRFSNDLDGYTAFEKWVRETAKNSAKMEVLIGCEPTGHYWYTFARYVGLHGMKLAFVNPYHVKQSKEMDDNSPRKTDEKDPKTIAKLVTEGRYSFPYLPEGIYAELREAVSVRDQIVKAMNAAANRIQRWLTIYFPEYLKVYKVFDSVSGLTMLWQAPLPEDVVKLGADGIVALWHEKKLRAVGKKRAQTLIEAAKSSIGMPGGNCAKMDLHLLLEDYFTKKEQLERITAVLQEELLKVPNSEKLLAVKGIGIITVAGFLAEVGDLRRFTSPKQIQKLAGLEPKENSSGKHKGRTSISKRGRRKLRRLLFQAVLPLIRSNEDFREVYTYYSTRKDNPLKGTQAVIAVGCKLIRIFYVLLSHGADYSSTRFRADILRPGQAKAA

SEQ ID NO: 486103 - protein, 346 aa, unidentified
MRFYTNQHKFYCGIDLHAKTMYLCILNQEGKIVLHRDIKTSPDIFLNTIAPYREDIVVAVECIFTWYWIADLCSEENIPFVLGHALYMKAIHGGKAKNDKVDSHKIAVLLRGGMMPMAYVYPSEMRSTRDLLRRRNHLSRKRAELLAHVQNTNHQYNLPETGKLAYKSKRKGVAERFPDISVQKNIELDLSLLDHYDQLLLRLEHELSLIAKVHDADSYFRLRSVPGIGRILGLVILYEIHDINRFPRVQDFVSYCRLVKSAKESAGKKLGTSGKKIGNAHLKWAFSEAAVLFLRRNPQAVKYREKLARKHGKAKSLTILAHKLARAVYYILKRKEVFQPEVFFAK

SEQ ID NO: 486104 - protein, 343 aa, unidentified
MQTITTIGLDIAKSVFQVHGVDADGQVVVRRQLKRRYVLAFFEKLPPCLVGIEACASAHHWSRELQALGHTAKLIPPAYVKPYVKRHKNDAVDAEAICEAVTRANMRFVATKTPEQQSCLTLHRTRHLLMRQQTAVINAIRSHLAEFGIVAPVGRNGVEQLLGVVADSNDKRLPEVARACVAALGAQLRVLKVQILEFDRMIRAWHRSSEASMRLDQVPGVGPVLATALIASVADPKAFRSGRDFSAWIGLVPNQNSSGGKERLGNISKRGDRYLRSLFTTGALAVIRYAKIHGTKHRPWLTSLLARRPTKVAAIALANKLARMAWAMMAKGERYKEPAALAA

SEQ ID NO: 486105 - protein, 310 aa, unidentified
MENIIAGIDVSKDRLDVAVRPGGEAFVVERNATGLDVLVARLRELSPYLVALEATGGFETVVAAALAGAALPVVVVNPAQVRAFAKAIGQRAKTDPIDAKVIAHFAEATRPVPRPLPDEATQLLADMVTRRRQIVTMIGAERQREKRVMNSHMCKSITRLIKALEKELASLDADINDTVRGSPAWRDKEDLLASVPGVGPIIARTMIAELPELGQLGRKQIAALVGLAPFTRQSGQWRGRSFIGGGRTAVRTVLFMGAMVAKQHNPVLKAFFDRLVAAGKPPMVALIAVARKLLTILNAILRDNRPWQTA

SEQ ID NO: 486106 - protein, 370 aa, unidentified
MKEYSEAFVAFDTAKKKHAVAIADVGREGEIRYLGEIDSSPLTIERMIRKLAGRHEKLHFCYEAGPTGYGLYRQVRALGHNCSVVAPSLIPKKSGERVKTNRRDAVSLARLFRAGELTSVWVPDAIHEAIRDLVRARETASQDLRRKRQQLLSFLLRHGRIFSGRQHWSRTHSHWLAQQKFDHPAQQIVFQDGVDAIDDAATRLRRLDEQVATIVPSWSMAPVVDAYQAMRGVSFIVAVTFVAEIGDLRRFDNPRQLMAFLGLVPSERSTGERVRRAGLTLAGNRRARRVLIEGAWSYRYPARVSQTLQARLEGLPKAVREIAWKAQIRLCGRYRRLTAAGKKLPVVIAAIAREMAAFLWAIARHVAPAV

SEQ ID NO: 486107 - protein, 313 aa, unidentified
MATARVHVGVDVSKENLDVYMPGGKTVRTGNTVSAVRRLVRGVKAKDPSAMFCCESTGGYERTLVDVCREEGQPVCVMNALQCRRYAEHRGMLEKTDRIDARVISMAADDKNPAALIHPGGRQRKLKEMWTLRTHLASQRDGERNRLEHLHEKEAVAAVKRIIASYERQIERLEKLCRDEVSQEEKSQTLLDRFQIVKGVGPLTALALVALLPELLFLDDKRLSKLAGVAPICDQSGTLDGPRHIMKGRGLVRHALYWAAVSASQHNKILAAFYNRLVEGGKAKKVALVAVMRKLLCLVRRIAQNPEFVPAEG

SEQ ID NO: 486108 - protein, 346 aa, unidentified
MEHYAAIDVSLEWSSVCIVDATGKIVREAKVRSEREAVVEFLQATGLTFTRIGLEAGPLSQWLYAGLVDAGLPAICIETRHVKAALKAMTVKTDKNDARGMAQLMRLGWFRPVHVKTLVAQEIRALLTARRLLLAKLCDIETSLRGILRGFGLKVGPVSKLRFESRIRALVTGQAMLERVVEPMLRVHAALRGEYAILHRALLATVRDDEVCRRLMTVPGVGAVVAMSFKSAIDQPERFQHSKAVGAHLGLTPRKYQSGEVDRTGRISKVGDAAVRTALFEAANIMLTRAARWSSLKAWALRVGNRQGMKKAKVALARKLAVVLHRMWLDGTVFRWGGQAGPGAAA

SEQ ID NO: 486109 - protein, 403 aa, unidentified
MNAVGIDVSKGKSMVTILRPFGEIVSSPFEIKHTSSDIHSLIKLIHSIEGESRVVMEHTGRYYEALAHQLSAADLFVSAVNPKLVKDFNNDSLRKIKSDKADSVKIARYALDKWQSLEPYSITDVLRAQLKVMIRQFHFYVKQKTAMKNNLIGLIDQTYPNANTYFNSPTRSDGSQKWVDFVSTYWHVDCIRKMSLNAFVEHYQNWCKRKKYAFNKSKAEEIYTKTKELVPVFPKNEITKHIIRQAIDQLNSTSVTVETIRTLMNETASKLPEYSIVMQFKGIGPSLGPQLMAEIGDVTRFTHKGALTAFAGVDPGVNESGSYAQKSVPTSKRGSSNLRKTLFQVMDVLIKTMPQDDPVYQFMDRKRTQGKPYYVYMTAGANKFLRIYYGRVKEYLSVLPDPS

SEQ ID NO: 486110 - protein, 482 aa, unidentified
MKKTNIYQNQSQELLYLFEDAGSYNKVMCVPMDYAKNDHLVMFCNGHGDILRKPFSVKNTPEGIAYIDDQVMRSCRRRGIKKEHVFFGGEDANSFAKNFVSSLRSKGYLVANVNAHDAKKQRISVQASTDRIDLMGIASMLLNCRGNCCPAQTGIYRNLRTIVRHRRKLVQMLTEVKNRVHGIVDELFPGFLKEQNTGIVPFTQSSLYLMEDRFSPKQIQRRRRQKLVEVLKRFGTSKAEQTAAKLQQYAAKVLQAPVEYVDTMQLSLSQHVKHIRCLKESIVQMETEIALNLSQTQGAFLTSIRGIGFVLAAGVTAEIGDPNDQTSLNNLASYAGIVPRVKQTGGLDGKTYTGPVVKRCNRILKDYVVQSAHHLGWHGPKDLMNDHKRRNASGQHADFGIGRKYLRMAMCLMRTSQVYLPPDLREERYTLEEKAIYYIMNWPYLREKWKKVGALEEAFGMNRPLGIWRQIIQQLYDIKLKL

SEQ ID NO: 486111 - protein, 340 aa, unidentified
MLYVGVDLHQHYLFSTVMDEKGKVLTQDKVDTDIDSVKDYFGRLVESDFLELAVEPISSWYYFYEIVESLGCSVHLVNPLKVKAIASARIKTDKIDSNILAHLLRTNLLPEAYIPNRSIRDLKELLRTRASLVHLRTEVKNKIHALLHKNGVQHDWTNLFGKGGREFLDELEFRQPYQEALEHYLELTDILTKQIDQLGFEIQLRAEDDEEALLLTTIDGIGYYSALLIKSEIGDIKRFPSWRHLASYAGVAPSVYSSGGKTRTGKITRQGSKWLRWAITETAVRQSRAESRIAEFYRRTKSRKGTRIARVATARKLLEVIYSMLKNGRPYVAFPEGYSS

SEQ ID NO: 486112 - protein, 418 aa, unidentified
MTMTQVSVSEQARPGRREVTGGVDTHKDTHTAAAVDARGQVLGHREFPATQVGYAALLAWLRGFGQLLVVGVEGTGVYGAGLTQYLQAAGVELVEVDRPDRTARRRHGKSDPVDAQAAARAAQSGRATGIPKTRGGRVDALRALRVARRSAVAARADAQRRIKSLLVTAPDPLRRQLRELGVRELVAHCATRATRRPDRGAAADPTTATVLALRSLARRHQQLSAEIAELDALITPLVTALNPTLLALAGVGPDVAGQLLVTAGDNPHRLRSDAAFAMLCGAAPLPASSGRTTRHRLNRGGDRHANAALHRIVLCRLHWDPRTRAYAKQRTTEGLSKPEIIRCLKRYVAREVYTALLTPHPLTPDPSSVPASSCTAPEESTCSARSAARTNDVDTDQRRKTIPAGGRTTPGNPLRNTA

SEQ ID NO: 486113 - protein, 341 aa, unidentified
MNTTTYGLDIAKGVFQLYWVEPSGECFNRRFTRQALLNFLTKRAPGRVALEACASAHWWARQLVALGHQPVLLHAAFVRPFVQTNKTDVADAKAIWTAVHQPGMRQVTPKTEAQQAILALHALRTLRVKMRTMLVNQLRGTLFEFGANFRRGRRAGLEEIRQHMAELEQQLPRVLFDAVREQLQSIARLDEEIAQIELRLNTWFKEDRDCQTVAAIPGIGPLTATALVATIGEVGTFRSGRQLAAFLGLVPRQRGTGGKVNLGGISKRGDTYLRTLLIHGARVVLSHLRRKGQSHWGTTLLQRRPANVVGVAMANKMARTAWALLAHNRIYDRDYVSVRPA

SEQ ID NO: 486114 - protein, 314 aa, unidentified
MKTKEQSPAYAGVDISKDRLDVSLAGQGPSHYANSASGIGQLIKVFESLPGPVRVICEPSGGYERALLEGLWEAKIAVSLVNAARGRAFARAQGLLAKTDQIDATVLREFGELLQPEEQEAPSPPRQRLAALVQRREQLVTMLLIEEQRLTQTRDKVVRKLGEALVKELEKQVKHVEKLIEEQIDDDDTLKGQSERLQQVKGIGKVTASTLLAELPELGKLTRNEAGALAGVAPYNRDSGMHRGRRTIRGGRIKVRRVLYMAATVAARFNPILKAFYQRLVAAGKPKKVALTAVMRKLVVLLNQLLKKPEFTLA

SEQ ID NO: 486115 - protein, 428 aa, unidentified
MQSSTARKLAQIPGKSLIVGVDPHKRTHAAVMITQQAEVCARLKIENTRVDFEHLVKRAQAERIKAGADSIIFAIEAGSHCWRNLAYYLHEQKLAFRLISPYTLKRQREGEDLTRRKNDYRDAMMAAELLRTGKFTETRLLEGGYAELRARNQCYRRLRSVHSRIRNQIRALLDGVFPEFCSEFSDPCGQTSAAVLSSCPLPSVIAAQNARAFIATVRQAYVGQRLAIGKLEALHALAASSVGIEADAKAVAEELGLLVQQQRLVAGQLERVEHELREMLHTFEESQYLLSIDGLSALTAAGIMAEIGPFGNYRDAKDLVKLAGVNPTQSESGGKSQSHTPMSKKGRAGLRGCLWQGAVSMLRANQEYREWAEKLQNRSAANHPLHRREVLGAAMNKLLRLCFALVTKKQMYRRPEAEPKLVPVAVAA

SEQ ID NO: 486116 - protein, 340 aa, unidentified
MLKFTIGADISKDKINFALRYLNDFPLEREVENTTSALNKFIKEVLSFVKKFAKENKSIHSIDFIMEHTGIYGNLLIECLAGHKLNMYVVSGLEIKNSTGISRGKNDKIDAKRIADYGLRFADKLKPYTLCDKMLTELKGLNTKRAQLVRIKSQLTQANDDNKKFQRKILKKLNKIDDPIVKALEDAIEKIEAEMLELIKSNPAFYDNYKIAQSVPGVGKIIAIAFICATNNFNKFESAKALGSYCGVVPFGKESGRFKGKDKVSPIANKTLKTLLHLGALASISGKNAFAVYYQRKVTEDKKNKMLAINNVRNKIVKTLFACIQNKTKYTADYSFKFAA

SEQ ID NO: 486117 - protein, 410 aa, unidentified
MEVLYQRCAGLDVHKKSVVASVRLATENKLITEVRTFATTTSGLLALSDWLSENGCTHAAMEATGVYWKPVWHVLSDGEIELVLANAAHVKNVPGRKTDVSDAAWLVELMAHGLIRASFVPDAQTQELRALLRTRKQLVRERTRHIQRIHKTLESANIKLDGQISDVLGKSGRSILDAMIAGESDPVRLAALAHPNVKCSRASLEEALRGRVTRHHRFLLQLHLGQTDGLDAAIAAIDQEVEANLAPFQVAVDLVSTIPGVSTLSAEAITSETGIDMSRFPTAGHLLSWANMCPRNDESAGKRRSTRMRKGGNWLKTTLIQCAWAAKRKNGSYLQAQFLRLRSRRGEKKAICAVAASILTAVYHILKNGTPYQDLGADHFQRRSKITHTQRLVRRLESLGYDVDIKPIAA

SEQ ID NO: 486118 - protein, 350 aa, unidentified
MPRKFDTAVVTIGIDPGKNTLHLVGLDARGEIVLREKVARTKIVSRLANVPPCLIGIEAGMGTHYVTRELLALDHDVRQVPPVYAKPFRQTHKNDFRDAHAVAEAVQRPTTRCVPPKTDEQLDLQALHRVRYRLVGQRTAIINQMRCFLLEHGITVRQRLHWLRHALPDILAQRTDVLSPRMVRILEDLAQDWRRLDDRIEAVTDEIDALSKNTEPCRHLMTIPGIGPIISSAVVAAIGNGTAFACGRDFSAWLGLVPKQISTGDRTILGRITKRGNRYLRMLFMQAARVVLLRPRNWMKHGFGPWLTAAAQRLHHNVLATALANKLARIAWSVLVQHREYEARLSVAAT

SEQ ID NO: 486119 - protein, 321 aa, unidentified
METTDYAAAPAVCAGIDVSKAALDVALRPSGEHWRSANDEAGIAELVGRLRPLAPRLMVLEATGGLERLVVAALALAGLPLAVVNPRQVRDFAKATGRLAKTDALDAAALAHFAEAIHPEPRPLPDAASQALAALVERRRQVVGMLTAEKHRHQQALPPVRAKVAAHIAWLEQALKELDTELEQTLRASPLWREREQLLRSVPGVGPTVSLTLLAHLPELGSGSVKRVATLVGLAPLNRDSGAWRGSRAIWGGRRQVRAALYRAALVGVRHNSVLRSFYEGLLARGKPKKVALTACMHKLLTILHALLRDGTPWQPTLLAT

SEQ ID NO: 486120 - protein, 351 aa, unidentified
MPRTTTVHAVTAIGMDMGKNTLHMIGLDARGAIVLREKVSRGRIALRFANMPPCLIGIEAGLATHYVARELAALGHDVKQVPPAYAKPFRQGHKNDFRDAHAVAEAVQRPTTRFVPAKTDEQLDLQALHRVRSRLVSDRTAVINQIRGFLLERGIIVRQGLRFLRQALPDILAKRTDVLSPRMIRIVADLASDWRQLDERIEAVTDEIETLAKSDDSCRRVMTVPGIGPIISSAMVAAIGSGGAFARGRDFSAWLGLVPKQMSTGDRTILGRISKRGNGYLRMLFMQAARVILMRPASWPKHGFGIWLARAAQRLHPNVLAAALANKLARIAWTVLAQERSYEARVTMTAA

SEQ ID NO: 486121 - protein, 419 aa, unidentified
MNYVGFDWASRAHDVTVLDEAGGVLDRWAFPHSETGWVTTLDRLARHGSAAEVPVIIERTSGLIVDRLLAAGHPVVPVHPTAFYAARPRWGASGAKSDPGDSYKLADYLRTDGHRLRRLTPTDPGLHELQALVRLRDDQVRARTAATNQLTAILDTYWPGPKQLFMSLASQIALAFLTDYPTPTSAAHLGEARMAAFCRRHAYRGGKSPAELLSRLRAAPVAPVGLPPATLAAMVTAQVTLLKTLQTVISDVERLIAVRVVAHPRSNLFENLPGVGMINLAQLLAEVGPILDRVDSAEQAATECGAAPVTRSSGQTRGVYFRWAANTRARKAITSFAHNARMQDDWAAALYADARARGKRNPHATRIVARAWLRVIWACWTSGQPYNLDRHHSSRFLHRCHPAGAQARSRWSPPPEERS

SEQ ID NO: 486122 - protein, 340 aa, unidentified
MAIVGGLDVHRRQITFDYLDTETGQVRRGRIAPADRRLLRRWLMSVTGRPAAFAVEACTGWRFVVEELCRAGIQAHLAEPAETAAARGPKRRAKTDRADARQLRELLAAGRLPESWIAPEQVLEIRGLLQLFKDLRDEHTGWVQRIHAVLFHHGVAAAVGDLLGGDSRQRLQAGTGLSPAGHQAVLAALRVVDMLEAELGPLRKQIATFARRQPACKALQAQYGVGPVTAAVIWAELGDCRRFSASRKAVRHTGLDVTVYSSDDKRAPGRLSRQGSPLLRWALYEAAKCAARSSSPDYAYYSRIKERIGGNRAALSVARKIVRRSHHILRSLGDQALTAV

SEQ ID NO: 486123 - protein, 375 aa, unidentified
MEGAPMLDTTTFIGLDVHARSIKAVSLDVMTGEVRAATFGYDAGAVAEWVRSVDPGARCVYESGVTGFDLQKRLTGLGVDCVVGAVSKMIKPSADRRRKNDRNDAEFLARMLSVGNVVEVWVPDDECEAARDLTRALEDARDDLSRSKQRLSKFLLRHGLVFDERTPTGRRKGNWTRAHWSWIESIRFAEGADNDVLAYYVDAVRRAAEEKARLEGLVEAEARKPRWRKRVDSLRCLKGVDTASAADLVFEAGEFSRFRNARSFAAWVGLTPSEHSSGESDRRGAITKAGNKHLRKTLVEAAWHYLTCSGRPKDLAKGQAPDRGARRHAAKGVRRLVERREALLARGVHGNKANVATARELACWVWAVGLMAEEA

SEQ ID NO: 486124 - protein, 405 aa, unidentified
MDVIIERACGMDVHKDNITACIMTPDGKEIQTFPTKTVFLLKLIDWIKEHDCTHVAMESTSVYWKPIVNLLESEGIEFLVVNAQHMKALPGRKTDVKDAEWIAQLLRHGLLKASFIPNRIQRELRELVRYRRSIIEERARQHNRIQKVLEGANIKLGSVVSDIMGVSSKDMLRAIADGEDDPEKLANFARRTMKKKKAELELALQGYVNPHQRLMLKTILTHIDFLTEQIEMLDQEIAQRVNSYEEDIERLDSIPGIARRMAEQILAEIGTDVQNQFPTAAHLCSWAALVPGHNESAGKRKSTKSKKGNKYLRSALTEAAQSVRGSKNYLGALYRRTAGRKGNKRAAIVVAHAILRIAYYLLTRKEMYVDLGEDYFDKQRQVSIVRHSVRRLENLGYTVTITEAS

SEQ ID NO: 486125 - protein, 333 aa, unidentified
MYYSGIDLHSDNCYITTLNDDGSVVKQQRVENIDEQILAYFNSLDGSHQTVVESTTGWYWLNDLLGDHGIELVLAHAKYLKAISYAKVKTDKVDSQTLALLLRQGLIPQAHKISRELRGLRDTMRIRLRLVQQRSDTLRRLKSIQAKFNGFVPDPYRCQIAALEHTRDSISEQILTLEKSLHPTLIPNDDIQRLLYIPGIGKLSAFTIYLEIDRIERFDSDKHFVSYCRLVPAADNSNRTVHHRSSKDGNKYLKIAFSEAAVHAIQYYPEFKRFFQKRAKRSGEAVARTCVAKEIAKIVYYVLTNKSQYKGFKNQPISRQKSAQWPRLSSPDA

SEQ ID NO: 486126 - protein, 336 aa, unidentified
MEITTIGLDLAKHVFQVHGVDVDGTVVEKRRLRRGQVLNYFAKLPPCRVGLEACATAHFWARELCRLGHDVRLIPPQYVKAYLKRGKNDAADAAAICEAVTRPSMRFVPIKSEEQQAVLVMHRSRDLLVRQRTQLINALRGHLAEFGLIEAQGPSHIRRLLESMRADRTVPDLAREILSLMAATLDAVDAQIGSIEVRITAWHKANPTSQRLATIPGIGPLIASAITATVADPASFRSGREFAAWLGLTPRQKSTGGKQRLGRITRKGDQYLRRLLIIGAQTVLLRSKAAKANPWIQALLARCARLKVAVALANKTARIVWAVMVRGDRYRQVAVA

SEQ ID NO: 486127 - protein, 403 aa, unidentified
MNAVGIDVSKGKSMVAIMRPFGEIVSTPFEIKHTSNDINSLIELINSIEGESRIVMEHTGRYYEVLAHELSAANLFVSAVNPKLIKDFDNDSLRKVKSDKADSVKIARYALDKWQNLKQYSVMDELRIQLKTMNRQFGFYMKHKTAMKNNLIGILDQTYPGVNSYFDSPARSDGSQKWVDFASTYWHVDCVRKMSLNAFIDHYQKWCKRKKYNFSQSKAEEIYGKAKELVPVLPKDEITKLIIKQAVDQLNSASSTVEELRTLMNETASKLPEYSIVMNMKGVGPSLGPQLMAEIGDVSRFTHKGAITAFAGVDPGVNESGTYEQRSVPTSKRGSADLRKTLFQVMDVLIKTMPQDDPVYQFLDKKRAQGKPYYVYMTAGANKFLRIYYGRVKEYLATLPESN

SEQ ID NO: 486128 - protein, 423 aa, unidentified
MDVIHKRVAGLDVHKKMVVACVRITAGNRVSRECRSFATTTAGLLALLAWLTESGCTHVAMEATGVYWKPVWNILDDGSFELIVANAAHIKNVPGRKSDLNDAMWIADLLACGLVKASFVPPADLQELRSLMRTRKQLVREQTSHTQRIQKTLEEANIKLDAVICDIMGRSGRRMIEAMIQGVRDPHELAALADRRLKATPKQLYEALHGRLRDHHRFLLQLHLGQWDALQEAIVAIDREVERHITRIDEQEPPAGQAPFCEVIANLSLSPGISILAARSIVAEIGRDMSRFPSAGHLLSWAGWCPSQNESAGKRKTTRLRKGAPWLKTILVQCAWAAVRKKGSYYQAQFLRLKRRRGPQKAICAVAASLLTAIYHMLKNRIPHRDLGAKHFERHSPEAKAKRLAAQLAKLGYQVQLQPAAAA

SEQ ID NO: 486129 - protein, 416 aa, unidentified
MKIYPRTRPIQRYIALDIHKEYILAGGMNTSQEWILPPRKLEMSRFEEWAKRHLCESDAVVIETTTNVWDIYDIVQPLVGHAVVAHARAVRQIAEARVKTDKEDVKRLIRLLIADIVPEVWIPPQPVRELRGLISYRQRLVKTGAMIRNRLHSFLHRHNLLLPEGGLVDGEWWAQQEKISTLEKLQIQQELSLLAQIEAHKAELDRELGRQSLGEIWGKQAIRLMQLPGMGVVIAMTVLSAIGEIHRFEDANHLVGYSGLGAGVHDSGQEHIEKRITKSGRKELRWAMVEAAWRAVRMSPYWKEQYEKYLHRMRRPNQAIVVVARKLLVAVWHVLTKEETDERASEEDLAYKMLLWSWSLSEEARQGLTHKQFAKYALMRLGIQTDLTRFVRRNVPRRIASQEEVRLRMAELGLND

SEQ ID NO: 486130 - protein, 399 aa, unidentified
MFYGLDVHKEFIQVCALAAKGTKREEYRVGGSAEEVEAFAKKLQPSDQVVLEATFHTWILHDILSRHVDRVVVANPLQVKAIAQAKIKTDKVDAFTLAKLLRADFLPEVQLPDPKAWALRQLVSHRRLLVKQRTATKNSIHAVLNRRLVHNPNKDPFSKRARQWMKSLELPAAESFLLQNSMTLLEDLDDRIDAVNQELLEQASIEPNARLLMTIPGVGVTAAIGLIAAIGDVHRFATPDQLASYFGLVPRVSQSAGRCHHGQITKTGSSTVRSLAVESAQILARSSSPLTATYWRVRRKRGHNVAVTALARKIVVLVWYLLTKQEPYRYGEPLLARRKLRKATLPELRQRSKRVPQTLDAVYEEAGLPPLAHPSKAERRTVAINRRARTRISNSLKSN

SEQ ID NO: 486131 - protein, 452 aa, unidentified
MEEEKISMEIVNPHAAGIDVGSRSHWVAVGQRETDIREFGVFNQDLFEMAVWLSEKKVKTVAMESTGTYWQNLYAVLISKGFHVILCNGKFTKNIKGKKTDVKDCQWIQKLHSLGLLSSSFLPDGKTEELRTYCRQRANLLHQAAATSKKMQKNLRLLNLRLDVVVKDICGLTGLLIIRAICDGEANPQKLASLRHGNCRKSEEEIAKALQSNSRKDYLFALRQELDTYDHLQKKIQQCDVEIEKMLEEIIACDDNKRQHHIDPKPHKRINKNTPENIDLNLKSYQMFEGTDLLAIEGVSYSTVLALMSEVGIEGIRKFPSAKHFCSWLRLAPNNKVSGGKVLSSKVPKGSNRLKIALRNAANAIGNLKESTPLRDFFQRINFRKGRVSAISATARKLAVIIWNMVANGTPYHNPAGYLFLDQKRKLGLVKRIKKQIDKFGLTNEELGIVSD

SEQ ID NO: 486132 - protein, 322 aa, unidentified
MLYVGIDVSKLSFDVAILNNTSYQNVQFDNNSEGFKALSKGVKSFKKEAIFCMEATGIYGLALAKYLYDKGEKVIVANPIKTHAFVKMEMSRNKTDKADAQSIARYCKHLDDKGEVTQNLFKPKGEAFEKLQFLITRLEQLDKIATQEKNRLDVSLDKEAVRSIKSMMAHIDKQIIKIKKVLKEIVIQDETLKQQVELLMSIQGIGEKTAWSILAYLGDISLFSNAKQVTSYAGINPKIEQSGTSIHKSSLSKVGNKRLRKALYMPALTAAKHNPLMKDLYERLQQKGKPNKVALCAVMRKLLVLAYGVLKSGKAFDPCYQR

SEQ ID NO: 486133 - protein, 409 aa, unidentified
MQPILKSCCGIDVHKSMIKASIAQGSLDKPPKFMTRTFSTMTSDLLKLKDWLRENEVEAVAMESTGVYWKPIFNILEDEFPIVLANPQYLKKVPGKKSDVKDCEWIASLLRCGLIPASFIPPKPIRELRELNRTRRKLVGTMASEKNRIQKVLEDANIKLASVVSKIDGVSSMNMIQALLKKDSLSKEDIAVMARGKLKSKVDQLAEALNGKVTDHHRFLLRLHLNNIAFQAEQIQEIDERIQKCMIPFRKEETLIQTIPGISKITASAIIAEIGVNMAQFPSDAHLASWAGICPGNNESAGVKKSGKIRKGNSFLKATLTEVAWAASRTKGSAYGAIYNSIAKRRGKKRALVAIGHRILLDIHRVLKTREPFVDEGAEAVYQRNSKARQQSAIRFLEQSGYTIAKASA

SEQ ID NO: 486134 - protein, 424 aa, unidentified
MNLTQNDRLKQVTSDTLIVGVDVGSQTHFCRAFDWRGFELSRRVFKFSNTGMGFLTFLRWTEELMNKTEMKKVIVGCEPTGCYWLTFQKFLQDHDIQLVTVNPFTVNRSMELDDNSPEKSDLKDPKTIALLVKDGRYSTSYLPSGVYAEIREASVCRDQIMKQHVRLSNQIQGWLQKFFPEYFECYADWNSTSGLMLLKEAPLPQDILRIGAGGINQIWRDAKVRAAGIKRAQTLVEAAQNSVGLEAGEAARLEIWVLVNDYILKAEQLKRLDEYLEEKVKEVPNVEKLLAIKGVGKSTVIGFIAEVGDIGRFTDPKQIQKLAGLEIVKKSSGKKKGQPRISKRGRRKLRRTMYESARALMTWNPAFQDVFLYYRNRQKNPLGGMQAKIAVACKAIRVFYVVLQTGCDFDEEKFRRDIIRPEAA

SEQ ID NO: 486135 - protein, 343 aa, unidentified
MTKLNVIGVDLAKNVIQVSLLSPSNRELCNRAFTRSKFAEYLARQRSSLVAFEACATAHYWARVAHRHGHQTKIIPAKAVAPFRQGHKTDENDALAVAEAARRPNVKLAPMKTVEQQGMQAIQRSRQLLLHQRVALSNHIRGLLLEFGIVIPQGFAALYRQLPEILEDGENELPDLYRPTLYLLQQRLCDLREDLEQLNDELKMLVQQHPVCRRLTALEGIGPVCSVLLYATLGTGEAFANGRQFSAYLGLTPKQFSSGGKVNLVGISKRVANRRLRAVLIQGARAYVYRLKEPKTAKDHWLWAIIERSGKCKAAVALANKNVRTAWAMLTHDTEYQRYPLAA

SEQ ID NO: 486136 - protein, 343 aa, unidentified
MTKDIMIGVDLAKNVFQLHAASMTGQLQFRKKLSRQSFSKFMAEQAPAVVVMEACGSAHYWAREMIRLGHEVKLIAPHYVKPFVKRQKNDAADAEAIVIAAQRPEMRFVEPKSAEQQSRAILFRARERLVHQRTELVNALRACLYEYGHVVPQGIHQIKRIEEILDDPHSDLPDLMREECRELLEQIGEQTIRINARTGKIKALAAEADTARRLQTIPGVGPLTALAVEAFAPPMKSFRCGRDFAAWLGLVPRQFSSGGKERLGRISKAGQSDIRRLLIIGAMSRLNWLGRKSIPEGSWLARMAARKPRMLVAIALANKMARTIWAVLTKNEDYRDLTLAVAA

SEQ ID NO: 486137 - protein, 452 aa, unidentified
MRRKKKMELEIVNHNAAGIDIGSRSHYVAVGQALEDVKEFGVYAEDLTAICIHLKEYGITSVAMESTGDYWQNLFTELIKHDFEVILCNGKFTKHAKGKKTDVKDSRWIQKLHSLGLLTSSFLPDETTETLRTYCRQRINLIHQSSAASRKMQKYLKFLNFRLDVVVKDVCGLTGLRIIEDICKGNLDPTSLAEHRHYNCRKSKEEISKALHGNNREDFLFGLKQEFESYQFFQKQIKACDRKIQQFVNTALKKTPKKLKLKTSDKPYKRLNKNAVDIKNFNQVAFQYFNGVDLLAIEGVSHATILSLMSEIGPDGFHKFKTSKEFVSWLRLAPNNKISGGKVLSSRIPKGSNRLKIALRQAANAIGNLKDTDLSDFFRRIAYRKGRQAAVSATARKLGVIIWTMITKKVPYKPSREYLFLDQKRKLGIVNRIQKQITKFELSEENFEFTTG

SEQ ID NO: 486138 - protein, 477 aa, unidentified
MPAGQQVEVEVDEHEEIVGRVAAIDVAKASGMVCTRVPHATKAGRRVTRVWQVPSTTNQILELAEQLAGEGIERVVVESTSDYWRPFVYVLEARGLVVWLVNARDVKHLPGRPKTDKLDAVWLCKLNERGMLRPSFVPPAQIRRLRDYTRLRADLTADRTRHKQRLEKLLEDALIKLGTVATDIFGVSGRAMLEALIAGQRDPKVLAELARGRLRVKHAALVQALTGRFDDHHAELARMLLDQIDTLSGQIDQLTARIEQTITAIPAAQPPAPATGPGGDAAATLHAGIESAESVPGHPNSDGVDPETGELLAAPLPVVDRLDEVAGIGHHAAQVIIAEVGLDMGQFPTPAHLVSWARLSPRTIQSGTRHRAGATGKGNPYLKSVLGEAATAAAKTDTFLGERYRRLVRRIGKRKALVAVARSILVIVWHLLADPTARFHDLGADYHASRIDRDRKTRNLVHQLQALGHKVTLQPAA

SEQ ID NO: 486139 - protein, 343 aa, unidentified
MEVITIGVDLAKNVFQVHGVDAEGDVVIGRQLRRSRVLPFFKKLPPCLIGMEACATAHHWARQLIGFGHEVRLMPPHYVKPYVKRGKNDAADAAAICEAVTRPTMRFVSVKGMEQQSVLMLHRTRELLVRQRTMVINAIRAHMAEFGIVAPVGVLQVKKLLGIIADTDDARLPSLARTCLESLARQFLSLHDEINTAEKRIHAWHRSNEVSRRLETIPGIGPITASALAASITDPEVFKNGRELAAWIGLVPRQTSTGGKQRLGKISKQGDQYLRWLLVAGAMSVIRHAKRRGTTNLPWLAGMIARKPTKVAAVALANKTARIAWGVLMRGGTYQKPVAVQAA

SEQ ID NO: 486140 - protein, 417 aa, unidentified
MELTPIYRRVIGLDVHQAKISACAITEQSDATVTVEMREFGGFKRDRGALAEWAKSVNPEAVVMESTGIYWKSPYAALESVGIIAWVVNARHVKNVPGRKTDVADAQWLATLARSGLLHGSFIPPANIRHLRLIARQRQKLGGMLAAEKNRLHKILADAGIRLGVVVSDIHGQAARAMIKAIIAGKPMADVLDLAGRLQASRKELFEALQPEELSDAHLFVLTEIMAHIEELEARMGRFELALLQGLSAWQPQLTLLQTVPGIDAMGAAMLLVEIGVEMQSFGSAERLASWVGICPGNNESAGKRKSGKIRKGNAWVRRLLCEFAQAASRSRSALKDKFTALSIRKGHKKSIVALAHKMLRIVFAILKTNTPYRDRSVDYEGLSVQKNAPRWIKMLKKHGFLPTSETTSVSSAALAA

SEQ ID NO: 486141 - protein, 349 aa, unidentified
MFVIGVDAHKSTHTLVAVDDIGRQVGQRTVKATTEGHLSAIEWAAQWPQVQFALEDCRHVTRRLESDLLRRGHAVVRVKTQLMALHRRSARQPGKSDPIDAHAVAMAALREENLPIAQLDEPTREVKLLSDHRRNLVCERTKLVNRLRWHLHELDPELVIPVRGIRRYCVMDELAERLTAFTGVVAQIAGDLLDRCRQVTEQVNDLERQIRDRVRRIAPSLLAIPGCGVLSAAVIIGETADARRFPSKDAYAKFNGTAPIPVWSAHERVRLNRGGNRAVNSALHAIATTQVARGGPGKDYVAKLQAAGKTKREAVRLLRRRVSDRVFQVLRTNESSIENRTQGPLSAAA

SEQ ID NO: 486142 - protein, 330 aa, unidentified
MKNVRDVIGIDVSKKTIDATAYQSEHHAVFTNDRAGYSKLLKWANHQVGSDSYFLCFENTGNYSLKLSVFLSESGVCYVEESPMRIKRSTGLTREKTDKLDSYMIARFGWIYREELQPSHMKPQIFQELGRILSLRDQLVKDRSGLKSTLKENKHLLSSPSTDVCCKILERSIKHIDKQIEALESQMKTLVKTDDTLRQNYELLRSVKGVGLILSCQLLYHTSNFIKFSTWRTFSSYCGIAPFEYSSGSSIRRRKQSHYIGDRKMKTLLSMAAVSAIQSDQELKKYYHRKLEEGKHKMIALNNVRNKILARSFAVIKRGTPFVNIAAVNY

SEQ ID NO: 486143 - protein, 310 aa, unidentified
MDTIAIGIDVSKDRLDVAVRPSGEAFAVERNASGLDRLVERLRALSPQFVALEATGGFETIAAAALGAAGLPVVVVNPVQVRAFAKAIGQRAKSDPIDAAVIAHFAEATRPEVRPLPDAATRLLADLVARRRQIVEMIRAERQREKRITVPRLRKSIARVVTMLEKELSSLDTDIDDAVRGSPVWREKEDLLASVPGVGPTIARTLLADLPELGTLSGRQIAALAGLAPFTRQSGRWEGKSFIGGGRAPVRTALFMGALVAARHNPVLKAFFDRLRAAGKPKMVALIAVARKLPTILNAIVRDHRPWQTA

SEQ ID NO: 486144 - protein, 364 aa, unidentified
MIRKEYYIGMDVHKDSVQMAVFAETGEEPIYERRLRNDTDLLVKEVIAFCKKGKTEVAYEAGSLGYVIYRAMTQAKIPCYVLPANKVAKRRTDRIKTDKRDARLIGRELRSKSIKPISVPDDVDEATRDLMRCREDVSEDLRRSKQRLLKFMVRHGYIFTEGKEFWTLKHWRWMDKTEFKQEHERTVYEEYRSQIRSYEERLVRIEEKIVATAESPRYRAAVSRLRVFKGIDYIIALSVLCEIGDFKRFASAKDFMSYIGLVPSENSSGGKRNQGSITKAGNSHLRRLLIEGAWHYTKNARAGKRLEKRRQGCSAKMIDVADRALHRLHKKFVRLVFNGKHKNVAVTAVARELAGFIWAVQVSA

SEQ ID NO: 486145 - protein, 380 aa, unidentified
MASIGDDVRSNTTVYAAIELSKKSWVVAIAHPDRDRPSIHRIAGGNVADLIGRLRKAAGKNQRIVVCYEAGYDGFWLARSLANIGIDCRVLDPASIQVNRRARRVKTDRIDSLALLRALIAVDRGERHVCAVVRVPTVEEEDARRSHRERQRLIRERTGHINRIKGLLFAQGIRGIEPKRRRTRIDFGQMTTAEGRPLGERLRRELEREYQRLELIESQLRIVEKERDTVDAQDPAVERKRELLCALHGVGGASAAILVREVFARPFASRRHLGSYLGLTPSAYDSGSTTRCQGISKAGNSWARRVLIEIAWLWRKYQPASPLSEWYARKTADQSPRIRRIMLIALARKLAISLWRYVETGLVPDGAVLAKKAPHQTAAT

SEQ ID NO: 486146 - protein, 372 aa, unidentified
MKTNTTKTSPPPSVVLPSPAAVGSGFTLGLDLGDRQHHVCVLDAAGQMVREASLPNTRPALAQLLVDYPRATIALEAGTHSPWISRFLTDLGATVLVANPRKLHAISRSERKCDRRDAQMLARLARVDATLLHPIQHGSAQAQHDLLGLKLRDALVRNRVSLINAVRFTLKSLGHPVRNPSSESFHKNVLQDIPADCLPVVQPLLKVLAQVTEQIKLMERDLVRRSKQEYPVTQQLQQIAGVGPLTALCFVLKVGDPQRFSRGRDVGAYLGLCPRRDQSGGTDKQLRISKCGDGLLRRLLVSAAHYVLGPFGPPCALREHGQRLTGTGSAREKKRAVVAVARKLAVLLLSLWKHGTDYEPRSTTSKLVMIPA

SEQ ID NO: 486147 - protein, 343 aa, unidentified
METFYDIGLDVHKKTIAYCIKTITGKLASQGVISADRKTIRQWLTDLPGPWLGAIEATIFTGWIYDFLKPHAVELKVAHPEMLKAITAAKKKNDRADAEKLADLLRVNLLPECVMMPEELRELRRILRYRNMVVRTASAMKNKMSGLLMEVGATYDKRRLHGKRYFKNLLERVEDVPESVKELLSLSRGGLDLYEGVQKKLVKTLRENALIRERVERLMSIAGVGEVLALTWVLEIGEVERFSNTRQAVSYCGLCSAQRESAGKEQRGPLSKKRNKHLQTMLIKAANLAPRWNQHLAAVHEKEMLRGNKNQATIAVARKLVEYLLAVDRRGTPFTAEAPRLVA

SEQ ID NO: 486148 - protein, 324 aa, unidentified
MDKDTEPHRYVGIDVGKDQIEVYIRPDGIAFSCGTDPGDLAALVTRVTPFRSTLKVIVLEATGGYEAVIAGALSAAALPVAIVNPRQTRQFAAALGQLAKTDKIDAPVIAHFAEAVKLEPQPPADAQITELRALLSRRSQLIEMRTAEKQRVAKAVNKLARRSCEKILRQLEAEILLIEKAIGKLIDASPVFQGKAALLKTIPGIGDIVARMFIAELPELGQVDRHSIAALVGVAPINRDSGRSRGHRYIKGGRPQIRAVLFMPCLAIVKHNQPLREFYNRLIKAGKPKKLALIAVMRKLVVIANAMIKSGKPWSGASIDAAPV

SEQ ID NO: 486149 - protein, 342 aa, unidentified
MYYIGLDVHKKTISYCVKDASGRVHQEGKLGATRRELDIWMRTLPQPWTVAMEATIFTGWIYDHLHPHATQIKVAHPLMLRAIAAAKKKNDRVDASKIADCLRCDFLPECYMAPTEIRDRRRTLRYRYLLVRQMVQTKNRISGLLMETGVTHNKQRLHKVGYFRELLASNEEVSESIRPLLRLSRDTIARLQKTERALVSSLQRDPLLTERIKHLRTVPGVGPITALTWALEMGEISRFRSIRQVISYCGLCGDERSSAEKSLRTPISKQRNKNIQFVLIEAAKLAPRQDHDLALLYEREKQKGNANRATLAVARKMVAYLLAVDRGQRDFVPAKDCRGAAA

SEQ ID NO: 486150 - protein, 316 aa, unidentified
MEAIAIFIGIDVSKARLDVAVCPSGQSESVTNDEAGIKTLVKRLGEIQPALIVLEATGGVERQLTRALVNAELPVVVINPRQVRDFAKATGQLAKTDSIDALVLARFAEAVRPALRPLPNEVTLELRALIARRRQLTEMIVAERNRLGGASKTVRKRIDAHVRWLEAELQRADGDLDQSIRQSPIWQEKEDLLRSIPGIGPVISRTLLAELPELGGLNRKQIASLVGIAPLNRDSGTLRGRRAIWGGRATVRAALYMAALVASRRNSVISVFYKRLRTAGKAPKVALVACMRKLLTIINSMITHKTRWSENILQTS

SEQ ID NO: 486151 - protein, 370 aa, unidentified
MEEGIKFFVGLDVHKETIAVAVAEAGRAPARLVGSIAHDVNQLLKRLARYGEPAQVHVVYEAGPTGYGLQRALARRGYQAQVIAPSLIPKRAGSRVKTDRRDSLRLAELSRAGELRAVWIPDPADEAIRDLARAREDAVNARTQVRQQLKGFLLRHDVRYAGRTSWSKTYYRWLATLNFGETGAQTAFTDYWQAVSAADERVGRLTTALVESIAGWRFASIVAALQALRGIDEINAIGLVAEIGDIGRFAHPRQLMSYLGLVPTEASTGERVVRGSITKTGNAHARRLLTEAAWNYRFQPRIGTRAQRRAEDLPQAIRDVAWKAQLRLSGRFRRLHARGVHLNKVCTAVARELAGFVWAVARARTELPQS

SEQ ID NO: 486152 - protein, 463 aa, unidentified
MQKNCDKNSKPDKEVGIEGLPVIRPNVAGIDLGSETHWVCAPNVERTGLEVETFGATTPELERMAEWLKARKIESVAMESTGVYWIAPHEVLERHGLEIVLVNTRELARVPGRKKTDRVDCRWTQRLHSCGLLKGSFRPNEPVCMLRTLVRDKGNLVAEAGDWLRRMQKSLDQMNVRVHRAVSDIDGVTGMRIVRAIVAGERDAHELAKLRDRRCGKSEEEIVEQLSGHWREDHLFSLRQALKMYDAIQERIADYEREILRKLAEMERAECHGQEPAKLKNPQKAKAIQKRGEEPLRQALYRLSGVDLTGIDAIGVETVQVVLSEYGPDLSRFPSEKQFVSHVTLAPRQALSGGKPVKKKKRGSASTRVAAALRMAALSLRHSETALGAYYRRISRRIGGDVAVFATARKLATLIYRLLRWGQPYVDVGAAAYENRYRQARIQHLAAIVKDLGYQLTPTPTNA

SEQ ID NO: 486153 - protein, 360 aa, unidentified
MKRSYFIGIDVHCQFCEIAVVDVVGKVVCRDRCTTTIPTLLAVLEKVPRPRSLVVEEGSLAGWLWRGLAGAVERMVVSEPRRNRLIAKEGDKDDDLDAEKLAQLLRGGYVKEVHQVQSLERAVFKQQVAVYHFRVRQRLRESLRLTWLFRQHGVMIRERDYANAKDRPALLARLPENAALRHMVTTLWSSYDALVEQEETWRKCLLQVASQEKVVQRFVAMPGLGWIRAATLYAYLDTPWRFRSKSALWKYLGIGLERHRSGNGPEHLGVPKLAHRLLKSTILGAALSAVAQGDNPFAELYRRWLAKGLSSKLARRNVARALATTLWGLWKNGSAYHPKWVGVPAAASAAARSRLGAAGC

SEQ ID NO: 486154 - protein, 349 aa, unidentified
MRFYTQQHRFYAGVDLHARTISLCVLDANGQVVREATIDATPAAFLAALAPLRDGLVVGCECMFAWYWLADLCAAESIPFVLGHALYLKLIHGGKSKNDKIDAHKLATLLRGGAFPQAYVYPKGMRETRDLLRRRTFLVRQRSHLLAHLVNTNSQYNLPPLSQKVCYARNRVALDLPSRFADPSVRRNVETDLALVDAIDEQVRGLELYLTRSAKVDDPQAYQRLRSIPGVGPVLALVLLYEIHDIKRFAEVGQFLSYARLVRCSHESAGKVKGSGGRRIGNAHLRWAFGEAACLLLRESDQAKKWLARTERKSGKGRALGALAAKLGRAVYHLLRKGEAFDAKRFFAS

SEQ ID NO: 486155 - protein, 391 aa, unidentified
MTRISVGVDVSKNRSTVCIMDQDGKFIMRPFLVWHSTEELDFLADTLKRLNGEVRVIMESTSVYQYPIALQLKERGLFISIVNAYEMKQFANIDFRGGKTDKKDSRTIASYGISYWDKLVEWQIPKDTYFNLDLLNRTYMNAKKHRQIILQELQHYIDCAMPGMDKELHSLNLSTKKDFMLDFVEKFWHRDEIVNKTETEFTEVFTAWAKKKGYRPVEGKAAKIYAIAKSCIPYYPANPTVKTILQCIVDKLSGVNRTLVTIVTQMIEEAKKLPEYQIVREMPGVGDPLAARFFGYAGDIRRFKNSKALVAYAGIDSPPDESGDFSSTHRHITKKGSKVFRDTGYEIMMALRAQKRTWEKVRKNPEVYDYMLKKEAEGKPPPKLNELARFN

SEQ ID NO: 486156 - protein, 487 aa, unidentified
MHPRTTNKFLETFDVYRFSFESAGALALDNEYSGFAVLPAHYIAFAERKRARPWTSIYHCGRYDVKPLATQQFTAYVGIDWADTKHDVCLQVPGNELREFDCIRHQLADIDQWAQSLHQRFGGPIAVALELAKGPIVYALQKYDFFVLFPINPLTLAKYREAFMPSRAKDDPTDAELALDLLMRHPERFTPLRPQSVQMRTLLSLTEHRRELVGDKTRFTNRLTNTLKQYYPHALDWFEQHDTLLFCDFLTRWPTFPQVKRARRASLEAFFYAHNGRRPNVISARLGAIKAAIPLTEDMGVIAPCRLQVLVLIEQLRTTLQAIDRFDREIAQLAPRLPDYCLFQDLPGAGPHLAPRLLAAFGEDRQRYQHADELQKYAGIAPVTERSGKKSWVHWRLRCPTFLRQTFVEWAGQTINKSFWAGAYYRQQRAKGSSYQATVRSLAFKWIRILHRCWQTRTPYDESKYLNALRKRGSPLLKHLELDAQSA

SEQ ID NO: 486157 - protein, 407 aa, unidentified
MARTLYVGIDLGKGFHQVAVVDERKERLGEPFKIGRGRSGIELMLKRLGLWGAKPEDLVVTIEATGGYWNELVWALVNRGCRVYLAQPKKAHDLRKFYADHTKTDITDSEALARMPLVDEGLRPVWVAPPAEQMLLRMCRLRWKYRCRIADLKRRLSTLSEMVMPGIDGVMPVRYSKSARLFLRRYIAPSRARRLGRRRLVELLTKSAWGKFSERKAEDLWACIENAPDLGWQTDDLLLEVNVQLDELEMLERQVERLDERIAELYSEVDPEQRLMKIGGLGEFLAAALTASLGVDVRRRFPSTKHVVSFAGLAPRVKSSAGHTKAGQGITKRGNPFLRAWAYLGASCARQYDPELEAYYHRMRDRGKHYNLVICATAARLLERCYEALSQGGVAEMENQEHEVRTG

SEQ ID NO: 486158 - protein, 359 aa, unidentified
MAIVAHSYRFIVGVDTHAKNHVLSILECITGAQIVCHSFANTPSGHARARAWIAKHTKAEACKVLVSMEGTASYGARFRIYLEQTGYRVVEAPRLVAHGRKKLAKNDAIDAFQIAARTLGKDETELTIPRQGDYREALRILLAARRQLTRATTVNINSLTALARCSDLGVDARRALSVKQIHQLATLEPQPGDAIDVLITKQEAHRLANAIIDARAQLTENQTQLAMIVELIAPALLEIPGIGSITAAQMIVSYSHPGRVKSEAAFAALAGTSPIPASSGNKIRYRLNRGGDRALNNALHTVALVRLRNDDQTRAYMEKRLAEGKTKRETIRLIKRYLARRIYRLLTKELIEKQITLAA

SEQ ID NO: 486159 - protein, 388 aa, unidentified
MSQHFRFDASRSLTALEQDSTIVAVIEMSQAKWLVAALVPGIERQPLKKFDAQEEMLLKLLHRWRCEAGQAGRNIKRIVVAFEAGRDGFWLARWLRARDVETHVIHPTSIAVSREHRRAKTDRLDTELLMRVFLGWLRGEKRHCSMVAIPTIEEEDARRPNRERQNLVTEQTRIINQIKAIFSRFGIRSLRTTMRKLAEGLEDLRTAEGTPLPQNTLSELRRHLARLRFVRDQIRAVEQERQRKLAVAPKSEDAMVCLIARVVGVGVETADMLVNEIFLRHWRDRKAVARYAGLTGSPDESGSRRRERGLARAGNVRVRSGMIQLAWRFVRFQKNSALAQWFAARTADGRASTRKTMIVALARKLLIALWRLVTRDEVPRGVVLRPAP

SEQ ID NO: 486160 - protein, 341 aa, unidentified
MTEYIGLDVSMKETAISIRREGKRIWRGKCASDPNIIAELIRKRAPTVKRVVFETGPLSVWFYHALRAERLPAICIDARHAKAALDMAANKTDANDADGLAHLAEVGFFREVRVKGFDSMLARTLVAARTRLVRMTTELSNQIRGIMKTFGLVVPAGKGNTFEKNVRSLLINHNDLADIVLSMLDAWLGLRIRAAELGRQLLADARQSQACRILMSIPGVGAITATSFATAIEDPGNFRKSRAVGAWIGLTTRRYQSGEVDYDGHISRRGDRHLRGLLYEAASVILTRSSKESYLRTWGLQLRERIGFKRAAVAVARKLAVIMHTMLKTGEFFNPDAGAAS

SEQ ID NO: 486161 - protein, 451 aa, unidentified
MATKRKKRVQDLPVLHPDAAGIDVGASEIFVAVAADRDAEPVRSFATFTRDLNSLADWLQACGIRSAAMESTSVYWIPLHQILEARGIEVCLVNAQHVKNVPGRKTDVSDCQWIQYLHSVGLLRASFRPPAVICAIRSLWRHRDSLIQMAAEHVMHMQKALDQMNLQVHRVLSDITGFSGLRIVDAILAGERDPIKLAQLCHSRVKSSQDTVAKSLEGDYRIEHVFALRQSLAGYRYYQGLIAEVDQEIQRQLADLKTADGDSKPPKRTKKTPYQRYRYEPAGFDLRGELYRILGVDLTDVPGISSVTAHTILCEVGTDVSRFRNASAFASWLGLCPERQISGGKVLYTKSRRVRNRVALALRLGANSLHHANNYLGEFFRRITRKLGKAQAITATAHKLARIVFHLLNTKEAYNESVFRRCEEEALKHAELGLRKHAARMGFQLVSVAND

SEQ ID NO: 486162 - protein, 372 aa, unidentified
MHQSSTLYVGMDVHKESIAVAYVAKDHDAEVISLGTFGTRQCDIDTLMRKLQSKAKHLVFVYEAGPCGYWLYRYLAKKDYVCWVVAPSFMPKKAGDRVKTDRRDAMPLARLMRSGDLTPVYVPAVDDEAIRDLSRAREDTLRDLKAATLRLKAFLLRHDIRYTGRANWSPAHLRWLSEVVCPTPAQQIVFQEDVQTVTEQSERLGRLELELHEQVKTWRLAPVVEALQALRGVQFTVAVTTVAELGDLTRFENPRQLMNYLGLTPSAYSSGGRRQQGGITKTGNTHARRALVEGAWAYRYPAKVSRHLQLRLEKLPTAIQAISWKAQVRLCQRYRQLMATGKHANQVVVAMARELRAFMWAIAKQVAGSPQA

SEQ ID NO: 486163 - protein, 388 aa, unidentified
MQTVADRPEAPNAIRTDLGAIFVSLELSRSTWLITSLSPDGGEKMSKHAVRGGDVAGLLERFAQLRKKARARTGKVFPFVVIQEAGLDGFWIDRVLRKEGIESHVVDPASITTSRRRRRAKTDRIDGEALVRALLAYKRGEPRVCAMVKAPTPEEEDRRRLCRERKVLIVERVRHVNRVKGLLFSQGISGYEPLRRDRRKQLDTLQTGDGRLLPDHLKAQVRRELDRLELLLDQIKAVEAERDALLAVQQGAASAPAAMLLNIKGIGPEFAAILWSEGLFRHFDNRRQVASYAGLAPTPWQSGSVDREQGVSKAGNPRLRTTLIQLAWLWLRNQPQSALALWFKERVNRNGGRLKKTTIVALARKLLVALWKYVTAGVVIEGAIMKSA

SEQ ID NO: 486164 - protein, 478 aa, unidentified
MAGLYSGNPAYICGVGHPLRDQRLAQTSSPKTYLFQIDSILPDDQSLLNFLNLYLRRSEVAFKIFRKNCCGLDVHKTWIYGCIGITDTNGRTEYKRARFSSFSKGLRDLAGWLAKYGCTEVCMESTGKYWIPVFNILEKSCLVTLAHPKYTKPQRGNKTDRKDAKWICDLFMCDMIKPSFIPPLDIRQLRDLMRYRMKLTNMLTSEKNRALNCLTVSNLKLDDVFSDVFGKSSRSIISYILEHPGETFDVTPFVDRRCKHPIEEIQAAVDGAISREQAAKLKECLQHMDEISAHKKNVEKEILRLAEPYSIQLALIRTAPGISGDPMTAIAILSEIGADMSVFPSAKNLVSWAGCCPRNDQSNGKVKSTRISRAGAYLKPILVQIANAVIKSDKYPECKERYRRLKARRGHKKAIIAICRMLLTAIWNILSKLEPYSAAGYIADKLTEHSVVITQAQGLALLRKRGYIFKDDLAADSG

SEQ ID NO: 486165 - protein, 421 aa, unidentified
MHTKNYNRQVEKRQRIGNATLVIGMDIGCEFNAMCVMNKEGTVLGRYPKIYNSWKGFDYFHTVIESIKKKYGFNDVLIGMEPTGNYWRKIAFFAIDKGYEVRFIRTTALKHQRELDESSSSKNDMRDAYTIANIVREGKYIDTVIEDGIFRQLRTLAHTRERIQRSNAGSKHALKGVLEDYFPELKNIFWSMKAKGLWALLERCPFPEDVLNITPDILTDIIAKSTRRKMKAREKALKIYEAAQQSVGLKHIGQADRHRVATYLSEIRHSEEQLNEIEVKIKGLLEKIPFAGYILSIPGIGVLTCGVFLGELGNPDNFKDPKQIIKYAGYDPQEHDSGQRTGRKIISKKGRWLLRKYLYFMAIRAVHRSPFFKEYYENKQKTMKKKEALCAVVIKLIKVIFALLRDKRMFTEKQSRLAQAA

SEQ ID NO: 486166 - protein, 430 aa, unidentified
MGLVVQTAIHPEQDDHDMPYEWFVGIDWGSQQHQVCVLDRDRRRVGERAVDHDGASLARLATWLWSMSAGQPQRVAVAIEVPRGAIVEGLLERGCHIFAINPKQLDRFRDRHSVAGAKDDRRDAFVLANSLRTDRPSFRRLQLDAPQLLVLRERSRAEETLREAFRRSANQLRDQLHRFYPQMLQLCSAADETWLWDLIDLAPTPAHVALLNEEHVQRVLKAHRIRRVQAQEVLTCLQAPALPVAPGATEAAQAHCGFLLPCLRVLAEQLQACSQQVSALLHTLAQEPSEGVGPSDVAIVQSLPGVGRKITAWLFAEAAQPLAQRDFQVLRTHGGVAPVTRQSGKRRQVVMRRGCNPRLRQALYHMARVAMQRDAHFSQVYEALRAKGQRHGQALRTIGDRLLRILMAMLRDRICYDASRIHREPVVQRG

SEQ ID NO: 486167 - protein, 457 aa, unidentified
MAKKRNHHSKKIVHLDALKQINFHAAGIDVGDSEMYVAVPEDCDKQFVRVFGTFTRDLVSIAQWLLQCNITTVAMESTGVYWIPLFEILVEHGFEVLLVDARKIKNVSGRKTDVEDCQWIQQLHTYGLLNGSFIPDQRIRALRDMIRHRANLLRYRASHIQHMQKILQLMNLKLTNVLSDITGTTGIHILRAIVDGKTDPHYLSQFRDPHCRTAQAEIEKSLEGNYRSEYVFQLKQMLNLYDHYALLIAELDHETEAMYQQLPSLREPKEHPLKPLKRNTNRKSKNSPVFDLRTQLYRITGVDLTQVDGLNASTVQDIITDIGTDMSKWPTSKHFCSWLRVSPENKKTGGVVFSSFTKKTKNRANKALRMAAFALAHAHCALGAFYRRVRAKHGGPAAITATAHKLARIIYKMLKDKVEYVDLGPDYYEERYKSRIIHSLKNRAESLGYQLVPFSAQ

SEQ ID NO: 486168 - protein, 393 aa, unidentified
MMDTSNGRLCSSNHETKTEASMQQNIIHIGLDVDDTQYHGAAFNKETGEVIDFKCRPTLKGLMSQLDRMARHFKGHKIKLCYEASYVGYCLQRDLISNDVHCDIVSPSSIPSPRGKAVKTDRIDAGYLAQFYANDLLTIVQPPDAEQEQDRDFLRSRQKLLQQQTQLRKHLQSVLRRNGLHYKAETGNKSHWTKHHYCWLARTIDGLSGSLKVNLELLLRQLKGLNEILAEYGQQIEALAAAPRYQQAVQSLTCYKGIKNIFALTMITEIGDVKRFPHPRKLVSWIGMDIREYSSGGKHNHFGITKHGNRYIRTAFIEANQRGYRTTKIGKDLKARRKDTAPELINIADRCLRRLSKKGNRLLLAGKHPNKVKVACAREMVGFVWESLNKVAA

SEQ ID NO: 486169 - protein, 458 aa, unidentified
MKKKVKKTEKQKDIVEMSLVNPHAAGIDIGDTEHVVAVPEGRDKERVKKFGTMTCDLEAIVLWLKACLIKTVAMESTGVYWKPLFAMLVRNGFEVYLVNSKHVKNVTGRKTDEDDAMWIQKLHSCGLLRSSYLPGDEQEALRTLVRFRKSLTQDMSRFINRMQKSFELMNIKFHTVIDDITGKTGTAVIEAIIAGERNAAIFLPFIDRRIKASHETIQKSLQGNWRDEHLFTLEQNYELYKTYKQRIEVCDLQIEKQLQHYEASRNEGIIESSKEKKDEPVVKKKKAKAKNHPKFDVRGYLERIHGVDVLAIFGLSDIGGLELLGEVGTDLSKWENESHFTSWLNLCPNNKISGGKIISSKLMRKKTGIASQAFRHAANSVQKSDHWLGDYFRRKKAKGGNKYAVVATANKIATIYYKMIRYKEEFKPLDLEQYQQKYKQAKIAYLERKLSELKMPAA

SEQ ID NO: 486170 - protein, 433 aa, unidentified
MKSKPEEQNKRATNHPTQHHWHEMNRKQRREMTRQIQSEDLSLEVIHPDAAGIDIGNESHYAAVPPSRDSQPVREFGCTTAELKAMAAWLKQCRIRTVAMQSTGVYWVAVYDILEQAGLEVYLVNARDTKNLPGRKSDVQESQWLMKLHTYGLLRNSFRPSQEIRVMRTYWRQRNDLVQSAGRHILRIQKALTQMNLQLANVLTDISGATGQAIIKAILAGEHDPHKLEFRDPRVKASEEQIAQSLEGNWQPDLLFLLKQEQDGYEFCHKQMAECDRQLAQYLQQREDRSQSAPLPEEKRKGRLKKKKGNAPQFDLREGLFRMTGTDLTRIDGIDVMTATTVISEAGYDMSKWQTENHFVSWLRLCPDNRISGNKVIGKGRLPTNNPISIALKMAATTLRESKTYLGAQFRRLRTRVENPSLRLCRTGLLRIR

SEQ ID NO: 486171 - protein, 338 aa, unidentified
MTVVMGLDQHRAQITAEWIDTETGVVSRSRIVPADRVCVRRFVGRFSDRELEVALEATTGWRFVVEELRRVGAQVHLAEPAETSGLRGPKRRAKTDGADARHLRELLMIERLPESWIPPDHILDLRARVRLRHTLSHQRCEYQQRIQSVLYHHGCPSRRSLMVGDGREWLAAQALSGAAREQVTVCIAMIDALDGQLSPLDKDLRSYGRRQPGCKAVQRHYGIGELTAVTILAELGDASRFSSSRDVVRYAGLDITVKQSDQRRSPGHLSRQGPPALRWALYEAAQVARHPRSPDRDYYLQAAERIGGNRACLAVARKLLKRCYHTLRELGEDALQPA

SEQ ID NO: 486172 - protein, 345 aa, unidentified
MDLTPVGIDIAKTVFQVHYINQDTGEVVNKPIRRAAFLEHFSNRAPCLIGMEACGGAHHWARKLVEMGHQVKLMPGEFVKAFNIRNKNDAADARAIWLAVQQPGKAVAVKTEMQQAMLALHRAREQLVKFRTMQINSLRGLLAEYGEVSAKGRASLDKAIPGILARVADRLPAVLIDTLREQWAGLTKLDEQIAAIERRMREWKKDDRAVKAISEIPGVGLLTATAAVAMMGDAKAFRSGREFAAWAGLVPRQTGSGGKVNLHGISKRGDTYLRTLLIHGARSVLIHANEPGPWIEQLKKRRHPNVVIVALANRIARTIWAVLAHDRPYQKGYVSARPAGTASVS

SEQ ID NO: 486173 - protein, 391 aa, unidentified
MVCVGIDVAKDKHDCCILDSDGTTLVDCFTIPNNMDGFKSLLQTIQDCSQKSDKIKVGLEATGHYSYNILGFLLDNDLPVYVMNPLHTNLYRKSLSLRKTKTDRVDAKTIATMLLSDVDLKSYTDTAYHNEELKSLTRYRFDKVQERAKLKQSVSRLVTILFPELEQLVSSIHGTSIYALLSEYPGAKQISEAHLTRLANILVKTSRGHYRKDKATHIRDAARTSIGSVMPAKSLELKHTIKLIQELTSEINEIEDAIRKIMDELKPPILSIPGMGFHSAAMILAEVGDFSNFNSPDKVLAYAGCSPSTYQSGKLTNCYAHMEKRGSRYLRYALYTATKYVCYWNPVFTEYLTKKQAEGKHYNVALSHATKKLVRLIYALQKSGKAYLAVT

SEQ ID NO: 486174 - protein, 342 aa, unidentified
MKLYGGIDLHSNNSVIHIIDEQGVSQLKKKVANDLVTILALLKPFQDELTGLVVESTYNGYWLVDGLMEAEFEVHLANTAAIQQYSGLKYGDDDSDANWLANMLRLAILPTGYIYPKEARMQRDLLRKRMQLVQQKTANMLSIQGMYDRHLNRRINSNKLKQLTLAQLDNDFGDPNVRLAIGGNLTVQHCLAQQIKVIEASLTKQLKLTPEFIRLTSINGIGLILALTIMLETGDISRFDQVGNYASYCRCVSGARYSNGKKKSSTNTKNGHKYLAWAFIEAANFAIRYNDTVKRYYQKKLAKTKMVIARKTVAHKLARACFYVLRDQVDFDVNKAFGYSKL

SEQ ID NO: 486175 - protein, 347 aa, unidentified
MFVGIDVHKDTHTAVGVSPFGEKMFEITVGNYKKDFEILTKKVTEISGSLSPYYGLEDCHGYGERLSAYLYDAGHQILAVPSVMVDRDRQKATHPEKSDSLDAFGVAKVMMQNIDSLPAYTISEESKKAKQIKELSMDREYLVEERTRLKNHLHNLLHRIWNTEYQEKFKDPFTLKALRYWSKSKPKCDPFLLRSMKRKTKRLLDIYHEIIDLEKEMEILLDENYTIQTASGCGVTIAGMIVGEIGDIARFHSPGALAKYAGCSPRECSSGKKHRHMKTRSGNRRLNCAFHRMALSQISRSGNDKAKAYFKRKVSEGKSKSQALVCLRRHMVNIIWCIMKNKTVYRF

SEQ ID NO: 486176 - protein, 326 aa, unidentified
MDNTYYIGIDISSKTIDVAIYSNTKKKAPYKQFNNDPKGHKEMLKWINKPAKALHITMEATNVYWEELAHFLVSKNIKVSVVNPKRIKGYANSLNLRNKTDKIDAILIARYCAKEQPEAWEAPNANERSLLLKLRQLEHLKKCLTAEKTRRSMLKESFSLESCQRTIDFLVDEIKLVEKSVNELIKSDDKLSANAKLLRSIPAIGASSVPWLLAYLGDGSRFDNSKQATCFAGLTPMIHQSGTSVNGKPRISKIGHSEIRKILFMPAMGFSFGRFKDRVYAPFVQRLLAKGKSKSLIITALMRKLLSIAQGVLKSQKPFDESLHKV

SEQ ID NO: 486177 - protein, 424 aa, unidentified
MSKKKSSVAGLGALYARVCGLDVHKKVVVAWVRILDAKDGTVQSTLRQFGTMTADLVELRQWLAEARVTHVAMESTGVYWQPVFNLLEGHFKTWVVNAQHIKKVPGRKTDMKDAEWIAQLMQCGLLRPSFIPDRQQRELRDLTRQQTKLVQQRNAVDNRIEKVLETANIKLGSVASDVLGVSGRKMIEALIAGEKDVTVLAELAQRKLRDKIPQLQRALEGELNDHHRFLLRQLLGQYDFLEKEIASVSERLGAIAPPSFRAAVEQLDAIAGVGERGARALLAQTGTDMSRFPTHKHFTSWAGQCPGNHESAGKRRSGKTPAANRHLDAVLTEMAHAAVRTKNSYFKSQYHRLAGRRGKKRAIGAVKHSLLVTVYFMLRDNKPYKDLGVDYFDKLNPQQRIRYHVRKLQDLGQQVELSPIADAA

SEQ ID NO: 486178 - protein, 496 aa, unidentified
MTPYKDAFPEPCPPPPTVPEPTVLTLPLPLYNPHAAGIDIGEAEHWVAVPPDRSPQPVRRFGTFTADLETLADWLLDCGITTVAMESTGVYWIPVFELLETRGLQVMLIDPRQAKRVPGRPKTDRLDCQWLQRLHAYGLLAAAFRPAEQICVLRSSLRHRQMLLTYAAHHIQHMHKALQQMNLKLSQVVSDLTSVTGMAILRAIIAGERDPLTLAKLRNPHCHHSEEEIAKALHGTWRAEHLFALQQAVELYQFYHQQLTVCDQHLQAHLGTFADQSHGQPLPPKPRRHKKVNEPRFDARTPLYRLAGVDLTTIEGIEEGTALVILSEIGTDMSRWPSVKHFCSWLGLAPQHKISGGKVLSRRVRPGAQRVAVALRLAARTVQHAHTALGAFYRRMRSRLGAPKAITATAHKLARLVYSLLKHGSAYVQQGLDAYESQYRERKIKAMARQAQALGYTLVALSTPEVPRLDAVVAPIVTSNRLCTAPSSLQGKSVSS

SEQ ID NO: 486179 - protein, 404 aa, unidentified
MGQVYVGIDWADDHHDIHVTDDTATALDSFTIPHSRDGMEKLMKRVDKCSPDREAVLVAIESHQGLLIYALLEAGYSVYPINPKAMDRYRDRYRMSSSKSDTQDAMVLANILRTDRHLYKPLPKEIAADVRLRQLTRTHKTLVQEKVKLLNQLTSQLKSYYPVALRLFSRLDHKITLAFLEHFSTPQKAADASLEDLRGFFREQSYSHQWKIASIYASLQQLSLRAPRELEEIHQTIVLSLVAVIRSMSGQIEKLADEISQEFEVNPAHEIFSSLPTGEMTAARISGELGSDGTRYPAREYVQTAAGTAPVTRRSGKTVVVFFRWQCNKHLRAALQDLARESVKRCPWAREYFTGQMRLGHKPSRAYRALANRWATIIWKMLQTGQCFDQSRLGKYLPRVPAIN

SEQ ID NO: 486180 - protein, 411 aa, unidentified
MKLFCGIDWAETHHDIAIVDGGGNLVAKKRITDDADGFAQLVELLAEAGDSAEHRIPVAIETPRGLLVASLRATGRSVYAINPLAVARYRERHSVARSKSDHADAMTLANILRVDAHVHRKMPADTELCQAIAVLARGQQDAIWRRTKASNELRSLLREFYPSFLAAFKGRFQIGIASLEARAVLAIAPTPAVANKLSASRLAAALRRAGRTRNIDQVAAEIKTALRAPQLRQLPLVESAMGRQTLALLAALDAACVSVDELGQAAAELFHTHPDYAVITSFPGLADSTGARVLAEIGDDRTRFADAKALKAYAGTAPITRASGRSISITRRRIKNDRLAAAGWVWGFAAMANHPAAQDHYRRRRDQGDHHAAAIRHLVNKFLGQLHYCLQNQQMFDTVKAFPPPNEGLAA

SEQ ID NO: 486181 - protein, 450 aa, unidentified
MAQRSGLTRGDRRRNSRIEALRAVVRSDRAVLAIDLGEDKQVAALIDHDCRVLGRRVVKAKAHRLGGLLAWAGELAGRQGFAGVVVACEPTGHRWRSVMGLADEARMGFVCVQSLRVHLEREADDYTRDKTDHKDAVLIGRLVTRLECYLPERADADWARLRHLGARRAGLVTEATSCQQQIADLLGCCWPAVMDAAAKPLESKTWLACLGAVVDAGADLAALARDGIDAFTVAARAHTRRFDARRLYHQIVRDFFAALADPAGVAAQRPGALERVGLVLADWRSVRARLSDVESRMVGVLDAMGLTALVTSIPGVSAVGAAVILAETGDPSRFASARSVVKHAGLNPVENTSATFRGTTRVSHRGRPRLRVAAWRAVWGALPHNRVLADRYTHLTTRARDQLAPGQARAACAATLLRWLYAIVTRRQAFDPTVASGQARTTGQPETLAA

SEQ ID NO: 486182 - protein, 347 aa, unidentified
MRFYTTQHPYYCGIDLHTRTMYVCILDQAGETLLHRHRQATPEALLKAIAPYHDQIVIAAECMFTWYWLADLCAEHSIPFVLGHALYMKAIHGGKAKNDTIDAHNIAVLLRGGMLPQAYVYPREMRATRDLRRRRTHLARKRGALLAHVQNTNSQYNLPAIGQKIAYQANRDGVAERFTDPAVQKSIEVDLALIGCYDELLRDLELAIVRAAKHHDANTLYLLRTVPGIGKILSLVLLYEIHDIERFPRVQEFASYCRLVKCAKESAGKRSGTSGAKIGNAHLKWAFSEAAVLFLRDNPAGQKFLARLEKKQSKGKAFTILAHKLARAVYYMLKRKTAFDMHTFLQA

SEQ ID NO: 486183 - protein, 416 aa, unidentified
MNAAGIDVSSRKSTVAVLRPFGEVVKLPFDVYHSAEALTALAEQLKSIEGETRVVMEHTGRYYEGIAKVLHEAGLYVSAINPLLIKEYGNNSLRKVKTDKADAMKIAKYALDNWNELRDYTPMDTIRYDLKTLNRQFQLASKQKTATANNLIALQEQSFPGIRKLFDSPVRSDGTQKWVDFTHDFWHVDCVRSGSQNAFTERFRKWCKRNRYQFSMEKAAEVYTLAKSAVVLVQKTSVTKTLVQEAANQLTAISRSVETYRSEMNKLASQLPEYPVVMEMYGVGESLGPQLMAEIGDVRRFERKQSLVAFAGIDPAPNESGDYCSRSNKTTKRGSPYLRKTLFNIMTVHLQRAPADEPVFQFLDKKRAEGKPYYVYMTAAGNKFLRRYYGKVMAYFSTLEDLPPVDMDSTGLQHAE

SEQ ID NO: 486184 - protein, 345 aa, unidentified
MNIIRVGVDIAKSVFHVHGVDRHGQTRWQGKYSRNKWLNALSRKVPVGTEIGMETCASAHHWARELQRRGYPVRLIAPQFVKPYVKSNKNDRVDAEAICEAMSRPNMRYAAPKTAAQQDVQAAHRIREELVSQRTAKANQIRGLIGEYGIVAPVGIQQMRNALSRWLEDAENGLSDRFRILLNGLAEDLRYLDDRIVALDEEIAESVKQDPVARRLMTLRGVGPLTASALSGALGDGKAFRRGRDFAASIGLTPRQHSTGGRDRLLGISKRGDSYLRKLLVHGARAVLRHVDGKDDGLSRWLKGLASRKHVNVATVALANKTARIAWALVHNESTYDEGLATAAA

SEQ ID NO: 486185 - protein, 372 aa, unidentified
MLSDRHADDFTTHRMKDGRTSMTNQLLERVVVGGVDTHKLTHHAAVIDATTGKLLADQEFPAKPDGYARMLAWFLERGTIARIGVEGTGSYGAGLQRHLQAHGVTVIEVVRQNQQERRARGKSDPIDAINAARATLSDAATTIPKNRDGFVEAVRLIRTTRRSAVKARRSTINQIHGVLWSAPEPLRAKLAGYDRAALVARCARLRVTDTSEDPAATARRMLRRLARRVQHLDEEIADADTELREILTTHAPHLMAMNAVGPEAAGQIIATAGENIDRIHSEAALARICGVAPIPASSGNTTRHRLHRGGDRDANSAIHMIVINRLRWHAPTRAYMNRRVTDGKTKKEIIRCLKRAVVRELYHALQADLLRT

SEQ ID NO: 486186 - protein, 350 aa, unidentified
MLIIGCDFHSRFQQIAMLDPANGEVIERRLEHENEEAKKFYATLPSPARVGMEATCDAQWFERMLREHQHELWIGDAAEIRAAMVRKQKTDSRDALHILDLLLTNRFPRIWVPSPEERDLRQMLRHRHKLVRFRTAVMNQLHALAMGQGLCRRKKLWAQIGRMELQGLILDPWASLRREELLQLLDQLDPWIKKLDEAVLQAAKSRPSAACLMQQAGVGPVTALAFVLTMGPVSRFVNSKKVVSYLGLNPSEESSAGRQRLGAISKQGNPMMRYLLVEAAQTASRLDPELRREYQRLKFRRGSAVAKVAIARKLAVRLYWKLREAAQPVPSARMQGSPASPVVGESLSAN

SEQ ID NO: 486187 - protein, 516 aa, unidentified
MACHWMRLWRKRMGAAFIIRLSCYCMIWKTKADGVEETVRKLVSSSHQPSAWGERTPVCLRCERPKRIVPPGSPDCIVESVLHRECLNRNTKHRRLAMGLQSALKEVHMEVYIGIDWSQSKHDVAMMNEAGAVVVQGVIAHSEEGFLKLELLRRRLGVQPEQCMVGLETAHNLLIDFLWSRNYTHVYVVPPHVVKSNRGRYRQSGARSDASDAVVLADLLRTDRGRLQPWHPDSALTCQIRAKVSLICFLTREIVALSNRLRASLLRYYPAAVSVFSSLRTRIALQFIQAYPTPEAAAALTFSDFASFARQHGYHRPKDLPACFERLQAGHPPTMAHTLLAYKDEGPFLAQRLLQTLEAKASLLSQLQLLFQQHPDYPVFSSLPGAGQFLAPALLAKFGDDRQRFPTPGAVQALAGTCPVTDSSGQYKVIRFRYACDHEFRHITQQWAVAATWHSPWARGYWQQVRPRCRSDSQAYRCLANRLLAIAWKLWQTRKPYDEAYHWQQCILRRKPRENS

SEQ ID NO: 486188 - protein, 416 aa, unidentified
MSLALPPAEFFVGVDWAAEVHAVCVINIEGKVLSQFTVAHSADGIALLLRRLAKFGEPIDIPIGIERRDGRLVDLLLEAGHPVVPVSPNAIKTWREGEVLSGAKSDAADAAVIAEYLRLRRHRLTAAAPYSAETKAVRTVVRTRDDLVQMRVAAVNQLAALLDAYWPGATAIFADLESKIALEFLSRYPTPTAAAHLGEKRIAGFCAARGYSGKRSAAELLTRLRAAPAGTAEPHLTVALHDAVLALVGVVKAVNTAIKDLDKSVAARLGEHPDGKIFTSLPRSGQINAAQMLAEWGDCRQAYEAPDSIAALAGCTPVTKASGKHKAVHFRWACNKRFRVAITTFADNSRHASPWAAKIYNDARTAGKDHPHAVRILARAWIRVIWRSWHNNTPYDPTRHGAAQPLSAHSSVNLAA

SEQ ID NO: 486189 - protein, 343 aa, unidentified
MDHFAGLDVSVKETSVCIVDDTGRIVKELRVASEPDALLRVLGNPAYRFKRIGLEAGPLSQWLFSALAEAGLPVICVETRHMRAVLKAQINETDRNDARGMAQMMRAGLYRPVHVKTLRSQKLRMLLTHRKLLQSKAIAIDNDLRGTLRNFGLKVGVVGTVKFEARIKELVESFPDLAELVEPLLIVRRTLREQIGILHRRLLAIVRNDDVCRRLMTIPGVGPVVALTYRATVDVPARFRNSKAVGAVFGLTPSRYQSGEIDRPGAISRCGDEMMRAMLYEAAHIMLVRLAKWSWLKAWAMKIARHRGMKKAIVALARRLAVIMHRIWVDDTEFRWSQEVTAA

SEQ ID NO: 486190 - protein, 412 aa, unidentified
MKVIHEICCGIDVHAKMLVACLLLANGEREIRTFSTMTDDLLRLRDWLVAAHCTHVAIESTGVYWKPVFNILEDALTVILINPEHAHALRGRKTDVKDAEWLADLLRHGLLKPSFIPPPEIRELRELTRYRESLVREQSSVANRIQKVIESGNIKLGQVVSDALGVSGRAILWALARGETDPVKLADLAQRQLKEKVPQLRRALQGRLTVNQRFVLGELLHRWEELETVDRRVTREHDKYLQARPKLARAREILDSIVGIGPRVAEVVTAEIGVEMKARFPSDAHLASWAGICPGNKATGGKRLSGRTRKGNTYLRSALVQAAWGATMKKNCYLSSQYFRLVKRLGRKKALVAVAHSLLVIIYHVLERDQTYTELGGDYFDRHHVEQQREYFIRRLQMLGLTVNVQELAAAA

SEQ ID NO: 486191 - protein, 414 aa, unidentified
MSNTSGVAESGSGDFEVFCGIDVAREVHHAVALDDHGQRLIDRPLPNAEPDLVGLFEDLEGHGRVLVVVDQLASIGALAIAVARSRGIAVAYLPGLAMRRIADLYPGETKTDARDAYVIADAARTLPHALRRVGSDEQTTVELSVLAGYDADLAAESTRLTNRLHDALLHVHPALERLLGKHFRRRGVLGLLAATGTPNSIGGLGEPGIRALVAAGSPRMARTLPVQVLTALAEQSVTIPATEQYGRVIRGLARQLLTMLDQRDTLRTELDDLLATHPLAEILTSMPGVGPRTAIELLRTVGDGATFASAAHIASYAGLAPATRQSGRSIKGEHQARRGNRALKGALYMSAFASLKHPPSRTYYDRKRAEGKSHTAALTCLARRRVDVLHAMIRDRQSYQPDHLVSATKQVPAA

SEQ ID NO: 486192 - protein, 413 aa, unidentified
MRLFVGDDWAEDHHDVELMDSAGRRLAKARLPEGVAGIARLHAMIGEQLGEDADEDDAGQVAIGIETDRGPWVAALIAAGYTVFAINPLQASRYRERHGVSGAKSDTADAHVLADMVRTDSHQLRPVAGDSAQAAAIKVVTRTHKTLIWERTRCTQRLRHALRDYFPAALEAFEDLDAADTLELLARAPDPASAARLTTAQISAALKRARRRDIAAKAERIQAVLRAAHLGQPDIVAAAYAASVRALIAVLATLNEQVKTLQGQVEAYFGQHPDAEIVLSQPGLGPVLGARVLAESGDDPGRYISAKARKNYAGTSPITRASGKKKTVMARHVHNDRLIDALISQAFTALRTSPGARACYDHQRARGAGHNPALRQLANRLTGILHGCLKTRTLYDEATAWPQHAAATKKTAA

SEQ ID NO: 486193 - protein, 348 aa, unidentified
MNALHYIGFDVHKKTISFCVKTAAGEIVEEGSMLARRAEVRQWASARPQPWRGAMEATLFSGWIYDTLKPYGEQLEMAHPAKMKAISAGKKKSDTIDARTIADLVRCNLLPACYVAPPRIRELRRLLRYRSLVVSEAVRMKNKMAGLLMETGAVYVKEKLHRKKYFATLLEELEEVPESVIDLLRLSRGALEMFENTQKRLVRELLADPELAERVERLMTIPAVGEITALTWALEVGDPQRFHCNSDAMSYCGLTAALKSSAGKQQRGPISKQRNHWLQTTLIEAAKLAPRWIPQLAALHARELERGHRNRATLAVARKLVAYLLAVDKSGQAFQAHAPLEVPTQNAA

SEQ ID NO: 486194 - protein, 429 aa, unidentified
MNYNTQNAKIASITEKTLIIGIDVGSETHYARAFSWRNYEYSKKPFAFSNDEAGFAAFKEWMGDIVEKHGMEVIIPGMEPTGHYWLNLGAYLQEQGMKPVHVNPHHVKKSKELDDNNPSKNDRKDPKTIAGLVNEGRFSYPYIPTGIYAEIRNLSNLRIQTQEEITRIKNRMARWFSIYFPEIKDVYRNPDAVSGLMVIKQAPLPCDIRELGVEGVNKIWRDARLKGAGIKRATTLVTAAEHSIGNTEAPRSARKEIRNLLEDYEGYKKRMDELMEEIEKTLSEIPYIDKLMEINGIGIKTVSCFIAEVGDIGRFDNPKQVQKLAGYAIVADSSGKHNGESRISHRGRKRLRYALYEAAISVIGKNKEFKEIHSYYRTREKNPLKKMQSVIAVACKLIRIFYTILTKGVDYDGQKMLNDIVRPEIQPAA

SEQ ID NO: 486195 - protein, 387 aa, unidentified
MPQLNDLSRSLVALDQDSTIIAVVELSQSSWLVAGVLPGIERQPQKKLEPSAERLLGLLHRWRDEAVRAGKKITRIALAFEAGRDGFWLARWLNARGVEAHVIHPSSVAVSREHRRAKTDRLDTELLKRGFLGWLRGERGHCSMARVPTIAEEDAKRPNRERECLVGERTRIVNRMKATLARLGVRNFKPTLRKAAERLATVHTPEGTPLPPNVLAELQRDMARLGFVVSQIREIEDTRQKRLEQEPETGHHAMVRQVARVIGIGIETADMLVNEVLSRPMRDRKAVARYAGLTGSPDESGARRREQGLAKAGNARVRRGMIQLAWRFLRFQKHSVLAQWYRARTADSRLGTRKTMIVALARKLLIALWRFVTTGETLEGVILRPAG

SEQ ID NO: 486196 - protein, 343 aa, unidentified
MSQIKRIGIDTSKAVFTLHGVDQTGQPVLRTNLRRAQMIPFFKNLPPTEIAMEACASSHHWARLLAALGHTVRLLPPQYVKPFVKRGKNDRNDAEAICEAAGRPGMRFVPVKSTAQQAEGMVLKVRETLVCQRTQLVNALRGHAAEFGVIAAKGIRQIPPLLEAIAAETAIPSDAREMLALFGQEIEHLDSRLKAIEVKLIAMHKANPISRLLATIPGIGPIIALTLAIEVDPAAFKSGRHLAAWLGLAPKEHSTAGKQRMGGISRAGNERLRQLLVTGATAVIKVATRPGNKLATDWLLKLLQRRPRKLAAVALANKMARTAWAMMTSGEAYRHPPVAAVSA

SEQ ID NO: 486197 - protein, 409 aa, unidentified
MEVVHERCCGLDVHKETVVACVVVPGAGKQPHKEIRTFNTMTADLLELADWLTAQGVTHVALESTGVYWKAPWNILESSFTLLLVNAQHIKQVPGRKTDVRDCEWIADLLRHGLLRASFVPDLPQRELRELTRYRTTLIRERAAERNRIHKTLEGAGIKLGSVASDVLGSSGRLMLEALVEGTTDAATMADLAKGSLRTKLPQLERALTGKVGAHQRFLIAHQLAHLDGLDELIDQLSQEIAERLRPFQNKLERLDGITGVGLRSVEVFLAEIGTDVARFPSAAHLASWVGICPGNNESAGKRKSGKTGKGDVWLRTALTEAAQAASHTKDTYLASQYQHLAARRGKKKAIVAVAHSILRIVWHLLDHDCEYVDLGSRFLEERDRQQIERRLVRRLERFGYTVKLEPAA

SEQ ID NO: 486198 - protein, 344 aa, unidentified
MTKTPIAVLGIDLGKNSCSLAGLDATGAVVLRRRMTREGVVAFAAALPACIIAMEACCGAHFLGRTLAGQGHAIRLMSPEYVQPYVKAQKTDDRDAEAIAEAATRPTMRFVTLKSEAQLDLQVLHRARERLVQERTALINQLRAVLLERGLILPKGRSALARRLDELMGASLALSARANRMLEDLREEWAGIDQRIKAYDDEFAALTREDAQARRLATIPGIGAINATALLAAVGDGSAFAKGRDLAAWLGLTPRQHSTGGKTKMLGISKRGNCYLRKQLIHGARAALPHLAAKPNALGAWLQHLLARAHPNVVVVALAAKLARIAWAVLRNERDFDQQALVAA

SEQ ID NO: 486199 - protein, 320 aa, unidentified
MSGAYEGKQIVGMDLHRRRSVVVRMTDTGERLETVRISNDPDYLRAVMARAGDAPEVVLEATYGWYWAADTLAELGANVHLAHPLGVKMFGLRRVKNDERDAADLADLLRMGRLPESWIAPPATRELRGWVRHRAKLVGLRSSVKNQIYAVLAAAGVAVSMSDLFGVAGRQLLATTLLAVESRSRVDSLLRIIEALDFEIDLYARLIAGRLRTDPGYHAIQTIPGVGPLLGAVFVAEIGDISRFQRPEQLASWAGLTPKHHESDTTVHRGRITKQGSRLCAGPRSRPCNACPHTPGSARPATGSDNDGAATSARSPPPGS

SEQ ID NO: 486200 - protein, 321 aa, unidentified
MNASIFVGIDIAKFSLQIACLELKLDTQLPNSLVGWNRLVKLLKIHGAKVLLICEATGGLERGLVDQLQKADLKVCVLNPRQARDFARAANRLAKTDKIDAAMLAEFGRRMAPRPAAKVAPWVRTLAALVGRREELTAMRTAESNRLEQNFLSFVAKQLNASIKRFNQDLKALEVQIDRLIESSPELKTKHQLLCAVQGVGSITATTLLATMPELGSLEPNQVANLLGVAPLNCDSGQWRGKRRIYGGRRFARRVMYMASLTATRHNDILKAFYGRLVQAGKPKKLALVAVMRKLIIYLNRVLKPKNIVTFPVPTAQAPCF

SEQ ID NO: 486201 - protein, 351 aa, unidentified
MDRYIGLDAHSSSCTVAVVGPSGRRLQSQVLETNAKVLIDFLKTIPGTLHLCLEEGTHSHWLYEVLSPHVKELVVVAVGRSTGSKSDERDAFGLAEALRIGAIRTRVYKGLGEWEQLRELTRAHAMVVSDSVRVQNRIKSLYRSRGISTAGKDVYRSSSRETWLDKLPEKVRPLARILYEELDAVRKLQQRAEKEMLDESHRHRISRILETCPGLGPIRVAQLLPVVVMPYRFTNKRAFWAYAGLAIVMRSSSDWVRTQDGKWARLPVQQTRGLNRNHNHTLKQVFTGAATTVIQKSQEEEPIYRHYQQLLDGGTKPNLAKLTVARQIASIVLSMWRSEEVYNPTKLYKTA

SEQ ID NO: 486202 - protein, 353 aa, unidentified
MFSYYQTTTEYSCGVDLHSRQMYICVMDKDGEVQVHRNVRGNDFEYFLKLVEPYKHSLTVCCECTFNWYWLADACIDAGFEFVLGHALYMRAIHSFKTKNDRRDCWQIAHLLRSNLIPPAYVYPREKRTVRALLRQRTTFVWKRSEILTTLSMGVMAHGNKPLNSSNKPRDLWLEELRAVYADDPMLLLSAETSMHMVKEFDTIIGKLDWALQKHTKNSYGTQYSQLKGVPGIGVVLALIILYEIDDINRFKSVQDFLSYCRLVKGTVASAGKIKGAQGGKIGNGYLKYAFNEAAVLGKGSNPELKKYFQRLEAKKGKHLANGILACKIARAVYFMLRDEKHFNVKKLIRKAA

SEQ ID NO: 486203 - protein, 362 aa, unidentified
MSKAIICGTDAHDNSLVCRVGVDRGEPETLSFGNTRSGRKKLFDFLNAQKQKHGAERVVLAYEASSLGFGIYDDCVSSGIECFVLAPTKMRKSRKDMKQKTDVKDAQLILETLRAHILGGNELPSIWIPDDQTRDDRELVRCRLDAAHKLTALKTQVQTLLKRNGVIKSKSAGNSWTKTYRAWLEVLLLPNGARIGLSSLLRQIAHAEAEIKLLDAEVERLSESRRYAEPAKALVEQLKGVGLLTAMVYLTEMGDLRRFSNRKQVGSFLGLAPSSNESGEVSDHKGHITHAGPPRVRKVLCQASWCRVRLDAQEHLVYERLVAKNPKKKKIAVVASMRRLGVKMWHVGLEAQVNANVFDKAA

SEQ ID NO: 486204 - protein, 327 aa, unidentified
MTASVASHNQIFIGIDVGGLSFEAAWHRGGSTQYQNRPDAIAAFVARLSVEKQIIRIAVEPTGGHEKALVKALRGAGLPVEMVHTSRFAAYRKLIGAKAKSDTSDARLLAAYAAAPEEVRGRKAGHVVLPQDDVREQLAELAARRDQLKHMIHAETCRLSTVRSPSIRDEITAHLQALRQADRKTHDAMMQLVRQRDELRNAKRLLQTIKGIGDKTALTSIAAVPELGLISNKAAAALVGVAPFVRKSGTMTAPAHIHGGRALVRNAFYMAAVTASRHNPVLAPFYARLIAAGKPVKVALVAVMRRLVVYANAVLRSGQPWKGAEIG

SEQ ID NO: 486205 - protein, 421 aa, unidentified
MTTIRCTTDQATWVGIDIAKKFNDVLIEQPGRRRQHFKVANQLEDYRRFAKFLGDLDERPVIGFEATGNYHRPLAFFLAEKGFSLRLISSVAAARTREALYNSWDKNDPKDAQVIVHMLKTGVTQLYHDPLVQGINELQELSKTHFQISLHKVRVQHSILTHYLPLYLPEAEKYMKSKRAQWFTHLIERYPCQAAVTKFSQKEFIDDAWTYVGRKVNKTAFLEDFYATASQTIGLPVSEDSEAIRMFRIVLREHQRLCEIRADIEKEAESFLANNADYARLKTLPGVGPIVALTILAEAGDLRRFSHHRQFLKFCGLDLSSQQSGQFRGKKKLSKRGNRRLRYVFWLAATVAIRMRENSFRDKYARYVASDPTNADLKRKAFTAVAAKMARVAHGMIKHETNYRPFYERAVPGGTIPAQGR

SEQ ID NO: 486206 - protein, 351 aa, unidentified
MVLIGSDFHPSWQQVSWLNQETGETGDVKLVHEPGTVEKFYRRFPAGSRIGMEATGNCQWFVELMASLGHEVLVGDAAKIRASDSRQQKHDKRDARLLVQLLAEDRFPQIWVPSREQKDLRQLLMHRYKLVRIRAQVKNGLQHLAMNQGVLKKHKLWSVAGQKALRELALASWASRRREDLLKMMSELDAKIDLLDQAVAEAAEKNEKARLLMTQPGVGPVTSLAFVLTMGDVSRFPRGKQVASYLGLIPREYSSGGHQRLGSISKQGNRFMRMLLVEAAQVAVRCDPQLRQEYLQRCHQDKPKGVAKVAAARKLAVRLYWMLRTQKPYPEIVHVESSSRVPLAAEARPKN

SEQ ID NO: 486207 - protein, 341 aa, unidentified
MQHELRTVAIDLAKKVFHLVGTDTLGKILWRKRLTRHALMPFIAQLPPVLIGIEACGGAHYWARRFREHGHDVKLMAPQFVKPFVKSNKNDMRDTEAIAEAVMRPTMHFVPTKEIDQQDMQALHRVRERLIGARTALINEVHGLMHEYGIVLPTGVSKFRQAVVDKLESEKEKLTALSQEMFRKLVEEFGELEKRLAYYQDKLEALATMHPECQRLMTIPGIGPITATALVAAVGDVGVFKNGRQFAAWLGLVPKQHSTGGQTRLLGISKRGDSYVRKLLIHGARATLRWVKLKTDDRSRWMRGLLARCGWNRTAVAVANKNARIVWALLSRGGVYGDNAS

SEQ ID NO: 486208 - protein, 412 aa, unidentified
MISVGIDVSKGKSTVCILKPYGEIVSKPFNITHTHKDLSELSSMLFRLNDEVKIVMEATGIYHLPVLTYLQEKGFFVSVINPYLMKSYRNESLRKAKTDKIDSRIIANYGIDHWFKMKEFQISGVIYEELKLLGQQYRHYMKLHLLSLAELTHLLDLTMPGIKNLLASWNETNRKDKRSDFVERFWHYDVITSMSEQEFTEKYILWAKEKKYVPSQEKAKVIYTLAQESIPTLPSETSSVKMLVTEAVRVLKEVDATLGLILSRMQEIAKTLPEYSVVREMGGVGNTLAPKLIAEIGDVRRFRNGKALVAFAGIDPPPYESGQFVGCNRKISKRGSASLRKVGYETMRSLKMRSRPEDPVYRYVVKKESEGKSKKSAKIAGLNKFLRIYYARVTELYKNCLLYTSPSPRDCS

SEQ ID NO: 486209 - protein, 363 aa, unidentified
MKKSSRSSRAAEWKEKPAFTVGLDLGDRFSHYCMLNKDGEVVEEGRIPSNEAAMRRQFEGEARQRIAMECGTHSPWLSRWLKKLGHQVMVANARKLRAISQNESKNDRADAEMLARLAYSDPQLLSPIQHRSVERQRDLNLIHARDTLVRARTMLINAVRGLVKSAGGRLPKCSTEYFAVQGVAWLPTELKPATDPLLEQIAALTLQIRRLDQEIEKLAERYPEIRMLRTAPGVGPVIAAAYVLTLDQPDAVTSSRGAGAFLGLRPKQSQSGDSDPEHRITKTGNIYLRRLLVQAAHYVLGRFGPDSALRRWGLKLAASGGKRGKKRALVAVARKLAVILHCMWRSGQIYQAFPELAVTAATA

SEQ ID NO: 486210 - protein, 339 aa, unidentified
MQVTTVGLDLAKNIFQVHGISENGDVVFNQALRRAQLLAFFEKLPPCLVGMEACGSSHYWARQLTKLGDDVRLIPAMYVKPYVKRGKSDAVDAAAICGAVTRPTMRFVAIKSEEQQGVLFLHRARDLIVRQRTQLSNMLRGLLAEFGIVIAQGVGSAIKFAKGVLDGDKPGIPDVAIDVLANLSNQLIALHLRVRWYEMRMRLQAKQDPRVMLLRTIPGVGPVTASAIVATAGDVSQFRNGREFAAWLGLTPLNRSSGGKEKLGRITKMGDRYIRRLLVTGMTSRLRQVKTHPERVDPWTRALLERKPVRLATVAMANKTARIVWAVLTKNEYYRPHNA

SEQ ID NO: 486211 - protein, 349 aa, unidentified
MIIIGVDFHPEFQQIAFVDTDTGEFREQRLTHREEAERFYRTLVAAGQRVRVGMEASGHGRWFERLLGELQLELWIGDAAEIQRKRVRKPKTDRQDAQLILKLMLKDDFPRIWVPSWENRDLRQLLWHRHRMVQARSRIMNQLQAVALNEGLRCKKRLWRSRRPQLESLPLAPWAQRRRHDLLELLDRLNPTIAELSQSVEREVEKCPEAQRLATHPGVGALTAMAFILIIGKAERFPCGKQVASYLGLVPLEDSSGNQRRLGHITKQGSSLLRFLLVEAAQVTVRSLPQWRSRYFHLMMRRGRKIAKVAMARRLAVHLYWMMREGWDYQELVKFGSHVGQPGNRHGVQ

SEQ ID NO: 486212 - protein, 405 aa, unidentified
MFEIEDVGVFLGLDVGKSTHHGHGLTPTGKKICDKPLPNSEPKLRTVFDKLTAKFGTVLVIVDQPASIGALPLAVARDAGCRVAYLPGLAMRRIADLYPGEAKTDAKDAAVIADAARTMPHTLRSLELTDEITAELTVLTGFDQDLAAEATRTSNRIRGLLTQFHPSLERVLGPRLDHQAVTWLLERHGSPAALRKAGRRRLVELIRPKAPRMAARLIDDVFDALDEQTVIVPGTGTLDIVVPSLARSLAAVHEQRRALEAQINTLLEAHPLSQVLTSMPGVGVRTAAVLLTTVGDGTNFPTAAHLASYAGLAPATRQSGTSIHGEHAPRGGNRQLKRAMFLSAFACMNADPASRTYYDKQRARGKTHTQALLRLARQRISVLFAMLRDGTFYESRTTNHAELAA

SEQ ID NO: 486213 - protein, 355 aa, unidentified
MKILAIDLGKFKSVACLLDTETNITDYHTLASDAGYLRSFLSAVTAELVVFEACSLAGWVHDLCVEMGFEVLVCNPNQEAWKWKNVKRKTDKDDALKLAKLGALGQLVPVHIPAKEARGYRRLVKYRKTLVGRVGRIQNNIRALHVQQGRSMPVGQRAWTEAGLESLGKLRRPLAECGWHELWRGELDLELTALDQAWAQLKAADVRLDALAAQDERVQLLQTIPGVGRKTAEVIVSQLDRPERFRNARQVSAYAGLVPRRYQSGNMDRQGGITRRGSRLLRSALVECGWVMLRYNPWARAHYDRIHGGQKTRKKQAIIAVGRKLLVRCWAMLRDKTAWSGPEETELGPVPEAAA

SEQ ID NO: 486214 - protein, 333 aa, unidentified
MTSLPVFVGIDYHQDSVQVCVLDGNGKRLTNRSVANDAAEVARVATRHGRPARVAIEACCGAADIAEELATSQSLPVELAHPGYVSRLKRSPDKHDLGDAHLLADLARVNYLPTVWLAPESTRQLRRLVRHRAQLVRRRRDVKLRVRGLLRENRVRCSHAVAWRKAWMEWLQREAPLADSDRWIVDDHVAELTSLSQRITAVEARISAAVAEDPIVAKLLEQAGVGLVTAVTMRAEIGRFDRFDTGKQLARFCGVTPRNASSGARQADAGLIAAGNPELRTVLVELAHRLICRIKGRWADLAHSMLVRGKPKNVVVAAVANRWVRWLHHELRR

SEQ ID NO: 486215 - protein, 391 aa, unidentified
MGVARRVVIGMDPHKRSVTVEVMEADERIVGHCRFGTDVAGFAELVGFAGQWADRVWAIEGCEGIGRHVAQRLLAAGEQVVDVPAKLSARMRMFATGQGRKTDDTDAHSIALVGVRISGLQPVVSDHQLEMLRLLVDRRRRIGQEHVTKICQLHQLLLELVPGGAKKDLSAAQARKILAGVRPGDEVGKLRKRIALELVVDLERIYQRKKQANKELVTLLKTTGTGLVDLHGIGPTGAARLLVEVGDITRFPNRGHFASWTGTAPIDVSSGDRQHHRLSRGGNRQINMVLHMMAVVQLRNRTEGRAYYDRKVAAGKSHNEAMRCLKRRLSDIVYRAMLDDYVTAKATGPGGHRGTTHQSSVAGSHPHTSTSDKPLPGPVTTKPTTTLPKAS

SEQ ID NO: 486216 - protein, 343 aa, unidentified
MQIRSVGIDLGKTTFHLVALSAAGKVLLRKKFTQKQLITFTANMQTCLIGMEACSGAHFLGRVLREQGHDVKLIPAQFVKPFVKSNKNDFLDAEAIAEAVERQNMRFVPIKTDDQLDLQAMHRVRDRLVARRTSVINQLRAFLLERGMVFAKTPFKLKQAMPEILENADEDLTPRMRNLLALLWNEWKDLEQQLVDLNQEVERIASSDAACTRLRQIPGIGPLVATAIVAAIGNGAAFRKGREFAAWMGLVPKQYSTGGKAKLAGISKRGNRYLRKILIHGARAVVLRSKRDRIAMGPWMTSLETRAPRNVLIVATAHKLARIAWAVLSTGQDYRAVPEALTA

SEQ ID NO: 486217 - protein, 343 aa, unidentified
MQVSTIGVDLAKNVFQVHGVDSAGKVVITRQLRRKQVLEFFRKLPGCLVGMEACATGHHWAREICKLGHTVRLMPPSYVTGYVKRSKNDAADAAAICEAVTRPSMRLVPIKSTDQQALLMLHRTRDLLIRQRTQLINALRAHLAEFGLVAETGREGLAQLGAIITDESNHESLPSAMKQALQAIVDQLAALELQVGALDRAIHAHHRANDMSCRLETVPGIGVIGATAIASTVTDPSDFKSGRDFAAWIGLVPRQHSTGGKERLGGISKQGDRYLRRLLVIGATAVVRQARLHPQKHPWIMRLLAKKPAKLVAVAVANKMARIAWAIMAKGGYYRAPELAAAA

SEQ ID NO: 486218 - protein, 351 aa, unidentified
MPRKTDTAVVRTIGIDTGKNTVHMVGLDERGAIVLREKVSRHRIAARLVNVSPCLVGIEAGMATHYVARELVALGHEVKQVPPAYAKPFRQGHKNDFRDAHAVAEAVQRPSTRCVPIKTDDQLDLQALHRVRSRLIGDRTAVINQLGGFLLEHGIAVRQGHRFLRQQLPQILATRSDVLSPRMTRIAGDLVDDWSYLDERIERVTDEIESLAQTDVSCGQLMTAPGIGPIIASATVAAIGNGAAFAKGRDFAAWLGLVPKQMSTGDRTILGRITKRGNRYLRMLFIQGARAILLHPSSWAKHSFGPWLTAAAKRLHHNVLTVALANKLARIALTVLVQGRNYEPRIAPAAA

SEQ ID NO: 486219 - protein, 340 aa, unidentified
MTVYAALDVSMEKTTICVINAEGKTVLEASTSSDAEAIAMCLDPYCAELDQVGLEAGPLAEWIARGLGYHGMRVVLMETRHVRAALSAMIAKTDRNDARGMAQLLRSGWFRPVHVKTVPAREQRALLAARSTLVRRHRDVENSVRGLLKGFGLRIARALRGRWDNAVREAIAGNSVLLSIIDPLLVARQAIRDQLAILDKRVRDVARADNVCRRLMTAPGVGAIVALSFRAAVDQPERFKSSKAIGACFGLTPRKYQSGESDRDGAISKAGDASVRLALFEAAHVILTRVSKWSKLKAWAVGVAKRRGAKRAKVALARKLGIVLHRMWIDATDFRWGQAA

SEQ ID NO: 486220 - protein, 352 aa, unidentified
MQSQTINAKYFCGIDLHKDNMFICVVDSQNKILVHKRIPANFPSLSIELGDYLSDTAVGIESTFNYYWLQDACRQNNVQFYLGHALYMRVGVHKKKDDKQDSYHIAQLMRNGNFPFSYPFPPVYRGLRELLRSRLKAVRQRASYYAQFYIKLLQYNGWSPSLEENPFRDPGNRVRYIRSISDPGLKLSFQYLHTQILTLNSSIQLIEKTALEVTQKLAFQKLRLLTSVPGIGNILGMTILVETEDIGRFKSMQNYSSYCRLVHTQRSSSGKTVDSKNQKSGNVFLKWAYSQATSLAIVHSPEINALYKKLAKRKGAPKARAIVRHKLAVAVYQMLKYNIPFDIKLFTKSEKF

SEQ ID NO: 486221 - protein, 423 aa, unidentified
MKKHIYRAVDVKALNLDELREVVKNQKIVLGVDVAKEDFVAALMNEKREVLSTIKWKHPMETEILLDVVLHKLLWSSLDVAMEPSGTYGDALRALFLGNGIKVYRVSPKRCHDAAEVYDGVPSLHDSKAAAIIGRLHLDGASVEWSLPEKAQRELRAAIKTMEIYDDAYYRNINRLESLLVRHWPEVTQHLKLTSATLLELLITFGGPDQVAAEPEKAVELMRRVGRSNLLVEKIDKVVESAQQSMGVPCIEEERRHLMELCREARRLQQKARTAQDRVERLTQDTESVNAMVDVIGKKTAAVLHSELGDVSRYDNAGSYVKSMGLNLKEHSSGKHKGKLKITKRGSGTVRMYLFMAVLRLIQNNFIVQAWYQCKIERDGGTKMKAVVAVMRKLARALWHVGQGKRFDAAKLFDVSRLNLAPV

SEQ ID NO: 486222 - protein, 410 aa, unidentified
MAERFVGIDVGLREHRIAVLDRDGEAVGQSFTIAASTDGVATLLRTLAARDATAAQTLIGLEASGHLWENLEAALGGAGYRVLVLNPLQTRRYRDVVRRKAKTDDIDAHVIAGLLRSGAAQASYVPDEPIQSLRELARLRARLMADRQDYQRQLVAQLDVVLPEHRAVLGDLLTARARGILAQFPTAQHLANANPRAIRRAAEDAGARGFSLDDATGVRDRARRSLYSGKAAAARAHVVRTLVSQLERLTSAIDEVDHAATTLLPPSEPGTGPSDAELLQTIPGIGPQTAATLLGELGAFTRFTDARALVAYVGFYPVIQESGDRAATPRLSRVGSRIARRSLYLAAVNAVRGSGEWRTIYLRKKAQGKTAQQALVVVAVKLLHALYAMLKHRQPYNPSRLLVAPATIGS

SEQ ID NO: 486223 - protein, 386 aa, unidentified
MQKLNDFSRSLIALEPDGTLIAVIEMSLSSWLVAGIVPGVERQPLKKLAVDESALLKLLHRWREEAEKAGRRIERIAVAFEAGRDGFWLARWLKARSIEAHVIHAASVAVSREHRRAKTDRLDTELLKRAFLGWLRGARDHCKMVDIPTIKDEDAKRPNRERENLVSEQSRIINRMKAALIRLGIRGFNPKLKRATARLDGLRTPEDEPIPPNTLAELRRDMERRRLVRDQIRQIEEARLERLDHAPGDGPHAMVRLLARVIGVGIETADMLVHEVLSRNMRDRRAVARYAGLTGSPDESGRKRREKGLARSGNARVRRGMIQLAWRFLLHQKDSALTRWFRARTENARGTRKPMIVAMARKLLIALWRLVREGVVPDGVVLRPAQ

SEQ ID NO: 486224 - protein, 343 aa, unidentified
MQVTTVGLDLAKRIFQVHGVDAAGKVVIRRRLQRSEIAAFFADLPACLVGIEACATAHHWARLIGASGHQVRLIPPSYVKPYVRRSKTDAADAEAICEAVGRPSMRFVPVKSAHQQAALLHHRARDLLVRQRTMLINAIRGHLGEFGIIAPAGRHRVADLVNLLQGADDAEVPALAREAVQSLFAELSALEIRIKVVEAVIMREHRSNAVSRRLTTIPGIGPITASALAGTIADPFAFKSGRELAAWIGLVPRQHSSGGKQKMGRVSKQGDRYLRRLLTVGATAVMRRLPGKTDGLSLWVRALLDRRPFRLVSLALANKMARIAWAIMVRPETYKASAMTAAA

SEQ ID NO: 486225 - protein, 315 aa, unidentified
MDILGIDVGKEYIDCELLSEKRATKRVNNTVRGFEQLQTWLRHRNVRKVHACMEATGGWSEELAYFLQERGHVVSIVNPMQIRAFGQSELTRTKTDKADAGLIARFCKAMQPAAWEAPTPAERRLRQLVRRRRALIEMRTQELNRLAAPGTENVEKSIRDMIATLEKQISELDADITKTIDDDDDLKGKRDLIESIDGIGPTTSATLLAETPHIEQFESSKALAAFAGVCPQLKQSGRSVSKSYTTKIGNRELRRVLFMAALAARRSNAVIKAFADRLQERGKRPKEIIVAIMRKLIVLVFGVLKTRRPFDPNWA

SEQ ID NO: 486226 - protein, 455 aa, unidentified
MKKKSEKNSVVKMGKGLPVFNAHAAGIDIGDTMHCVAISDGLGGHEVKTTSAFTCDLHEIVDYLKINGITTAAMESTGVYWLALYLLLEEAGIEPYLVNASHVKNVTGRKKDDTDAIWIQRLHTCGLLQKSFQPDTEIRLLRDYTRQRKNLISLSSDSVRRMQKALELMNLKIHTVISDILGKTGMLMVKAILSGERDAVVLSKLRDSRIKASEEDIIKSLQGIWREEYIFMLEQAVENYEFHQAQIKNCETKIQAQLLKQVAIVNHGDISCLDDNSKKKKKGKTKGKKNQFNFSVSPYLKSLTGVDLCQIPGISDATALEFISEVGTDMSKWKSAKHFAAWLNLTPNTKITGGKVFSSKLMNKRNKAGQYLRQAASTLSKNKTPIGDYHRRMKGKLGGRGATLNTAHKLARVIYTMLRNKTEYNVIMVNENHENYKQDKIMRLEKQLERLRKAS

SEQ ID NO: 486227 - protein, 408 aa, unidentified
METLHRRCAGLDVHQKEIVACRRIVSGRKVRSELARFPTTTQGLLALSAWLAEAKVTHVAMEATGVYWKPVWHVLCHDFKLVLANASHIRNVPGRKSDANDATWIADLLAHGLIRASFVPPQPIQDLRDLTRTRRELTREIVRHTQRIQATLEEANIKLTSVISDILGWSGRRILKAIVSGQSDPRRLAELGHPQLACTREDLAAALEGGLRDHHRFLIGQHLKTIEQIEATIAEFDARLEAALAPFRDAAERLKDIPGVNDNVAQTVIAEVGADMDAFPSADHLVSWAGMCPRLDESAGRKRSRRLRKGAPWLKPVLVQAALAATKVKNSSLRARYFSLKPRLGHKKAIIAVAAAVLRIIYHMLKDGTFYQDLGPDYRRPRNPERAARNLANRIRSLGFVVEIKKAA

SEQ ID NO: 486228 - protein, 364 aa, unidentified
MGDYNIWIGIDDSADQLDVAALYGNEVVPRHEFHVVNDAQGWGRLCKKLKSLPGEVRCVYEAGVNGYHLYRVLEKHGIACDVVAPALTPRKPGERVKTNKRDARKLASQHRSGDLTAIMVPKEEQEALRDLMRAREDALEDLQRMRHRLGGFLLRRGLRYRAGKAWTAGHLKWLKGLSFAHPHFQQALDEYRLALDEAAERLKRFEGRVEEVAEQAPYQKLVSFLMALRGVRVITAMTIIAESVDLKRYWSAPGYMAAIGLVSSEYSSGDKRRQGGITKTGNAHLRRVLVESAWHYRWAPGPSKALKMRRTGLPPEILAIARKSDQRLHRKYTSLVNRGKSNKIAAVAVARELAGFIWAIGQAA

SEQ ID NO: 486229 - protein, 440 aa, unidentified
MRRCIGLDVHREFAEVAIFEDGIVRSVGQVKTTPEALRLFAESLAPTDEVALEATCNTHAIARLLERHVARVVVSNPAKTRAIAEAKVKTDKVDAQVLAQLLAADFLPSCWLPDDETHALRRQVARRAHIVRQRTRLKNGVHAVLHRNLVPRCPATDLFGHKGRGWLAEQELPADERHAVLALLRQLDFAGEELRLIDSELGQVGLRRPEVARLMTIPGVDATVALSIVAAVGDFSRFSTPDRLVSYLGLNPRVRQSGGQPAQHGRITKQGRAHARGMLVEAAWAASKTAGPLRAFHERIKARRGMQVAVVATARKLAVLCWVLVVKDEDYAFARPSLTVKKRRALELRAGLPSRRGQRGKAAAYSLKEVRQRENELAAQGEHAYRQLVADWQAKRPAKLGVAAATGARLSRPSEGQAARQESAPDPALCSGVDHARPGA

SEQ ID NO: 486230 - protein, 357 aa, unidentified
MEIAYDGRQVVGVDLHRRRSVLVRMTEDGRRLGTARITNSPQELRAQIARAGKSPRVVLEATYGWYWAADTLAAAGAEVHLAHPLGVKAFTYRRVKNDERDAADLADLLRMGRLPEAWIAPQEVRELRELTRYRQKLVHLRTSCKDQVHGVLAKLGVPPACTDIFGVAGSAWLDQLGLPQPYAGKVTSLRQLTGELNSEITMVSGVIADLAAGDRGYQVIQQLPGIGPVLAAVIIAEIGDVTRFSNAAQLCSWAGLTPRHRESDTKVTRGHVTKQGSRMLRWALIEAIQRAGADTVTGAIKDAIIARRGKQARNIAKVAAARRLLTLVFYGIRDGQIRCLSTTPGGSPPTTRAARAA

SEQ ID NO: 486231 - protein, 364 aa, unidentified
MKKVSRSSRATELKAKPSITVGLDLGDRRSHYCLLNEDGEVVEEGRIATTEAGIRQQFEGEPTQRVAMECGTHSPWVSRLLKHLGHQVIVANARKLRAISQNESKNDRADAEMLARLAHSDPRLLAPLQHRSVERQRDLNLMRTRDTLVRARTMLVNAVRGLAKSAGGRLPACSTGYFIEHARPALPAELKKATAPLLNQITSLTRQIRRLDAEIEKLAEQYPEIALLRTTPGVGPLVAAAYVLTLDRADAVSTSRAVGAFLGLRPRQSQSGDSDPEHRISKTGNIYLRKLLVQSAHYILGRFGPDSALRRWGLRLAGAGGKRAKKRAVVAVARKLAVILNCMWRRGQPYQPFPEQKPAALAAA

SEQ ID NO: 486232 - protein, 339 aa, unidentified
MGMYCGIDLHATNSWLCVIDEEGRHQLDVRVENRLEVIASRLEPFRAQLLAVAVESTFNWYWLVDGLAAAGYPMRLANPSAMKRYEGLKYSDDRHDAHWIAEMLRLGILPTGYIYPKAARAVRDLLRHRSRLVRNRTARLLTVSNLIARETGRRTAGNELKRMTIDQIGAIGLCRETNLALSSSLEVIALLDEKIKEIEKMVLRGVKDRAELKLLRTVGGIGQALGLTILLESGEIQRFGSVGKYVSFGRLVPTARRSNERKKGEGNRKNGNPYLSWAFSEAAEFAKRFQPEARRFFDRKRAQANELVAYRALAHKLARACYFILRDRVAYDPSMLFRN

SEQ ID NO: 486233 - protein, 377 aa, unidentified
MNKCHSNTELSSLEETGRQFNGGKCAIKSAEGRIRPVCGLGIDVHQGFYVVVEQVEGANPKPAQRFGKQAFLHWAAKVKNQAREVHAVYEACGFGFSLQRQLAALGIDCHVVSPQKLDEQNKRVKTDGLDAKALCLKLDRFVQGNRDALAVVRVPTEQEEHSRAIHRLREQLVSARKRLEAQGRSLMVNHGVEPVQNWWKPRTFAALAVAQWMRELLGKSQPLLLALQERIAALTLQLQSVAAPNQPRGLGKMTSVIIDREIGDWHRFNNRRQIASYTGLCPGEYSSGNTRLQSCVTKHGNPRLQSCLGGVGLETGPLPTQLQASGQMAADPRARHPCHRSGTQKSNRSCGSPTGCRSVENQNRPAHCPAVGIKNLK

SEQ ID NO: 486234 - protein, 454 aa, unidentified
MRKPQVVPDEDHEVVYERVAAVDVAKASGVVCVRTPGTKRPGRFVNRIWDNVPATRARIAELGRELARCQVQMVTLESTSDYWRIWFYVLESVGLAVQLVSASQAKNLKGRPKTDKLDAMWLARLTQWGMLRPSFVPPAAIRAVRDFTRARQDLIRERTRCLQRLEKLLEDAMVKITSVVSDGMKAKSSVAMVQALIAGERDPRKIADLAKGPLRGKRDQLAEALDGMFDSHHGVIAQMLLDQVAFLDQRITAMEDQAIAALAQVQESWGVDATGETGPGCGTGPDSQVLAAAHRLAEIPGISLMLAIVIIAEIGLNMAAFPTPAHLVSWMGLCRSASQSGTRHGKGKQKKGNSYARAAAAGQAAIGAAGTATFLGERYARIARRRGKAIAQVAVARSIMIIVWHLLNDPAARYRDLGPDWHASHITRDKKIRTHLRGLQALGLTITITADEAA

SEQ ID NO: 486235 - protein, 435 aa, unidentified
MEEVEDEPLFCERVAGIDIGKAAIMVTIRVPGLTGSGRRRQETREFRTVRKDLLALADWLREWDVTKAGMEATSDYWKPVYFLLEREGFDCDLYPAARVKALPGRPKTDRLDSAWLAKITERGSLASSFVPPEDIRVLRTHTRYRRRLVQERTAEMGRCEKLLEDACVKLSSVITSIHGVSGRDMLNAIIAGERDPKVLAQLARRRMRGKIPQLEEALDCTFFTEDHAFILSMKLENIDHLSAQVKKLDDRIAVLCEPYERQIAQLDEIPGYGITTAQDLIAEIGVDMSVFPTAGHLCSWARQAPGVRESGGKRKGKNATGRGNPYIGGALGEAAIGAGRTQTFLGARYRRLVTRMPKKKAHSAVARTQLVITHALLSDPEARYHDLGAGYYEQRQNIRRQARGHARALERLGCKFAIEVPDPETGGYLPIATAS

SEQ ID NO: 486236 - protein, 455 aa, unidentified
MNEPHTVFEETRRNVAGIDIAGTADHYVCGPRKEDGTHDTTHFGTTTAELHRLLAWLRERKVESVALESTSVYWIPVADLLEANGIEVVLVDTREVRMVPGRKSDVKDCQWIQKLHSCGLLHAAFRPPESMVAVRTLLREKENLVATRTQFIQQMQKSCDQMNIRIHHAVSDIDGATGMAIIAAIIAGERDPLALAKLRDRRCKKTVVQIAEELRGTWREEHLFNLTQAHGMLVSVDEAIARYDEKIASMYRRIAENFPRTPSLRPPPEKEGPIARAKRLRDAEGKQDIARIMGSDLTMISGVAYGTTAVVVSELGWDFAKFPNEKHFASYIGLAPSLGKSAGKNVRQKKRHRNTHRVGRALCMAAATLHRSDTELGAFFRSVARRSDRKTAIKATARKMAHMIYRAVRYGVEYVDKGAQAYEERIRAKTIKTVKFLIKSLGINELELSSMLATA

SEQ ID NO: 486237 - protein, 680 aa, unidentified
MKCEYCGYDGDGFEEGEFGFWCPDCQGLLYKNGKEDYSQADIILEKPVSDHRPIIQKSRLKKQLSPLRYPGGKSKMIDQLLPYIKGKKYFVEAFCGGASFGLSLLESGMIEKLILNDLDPNVYAFWDTVCNEKYEELIDKIRKYQPSRESYFLYQKRMLKASISTIDRAFYFLVINRCSFSGIQTANPKSNMEDRWLPDTLIKRIKKIHSMSNQIEVTNKNAMELIEEMYWNPDTCIFVDPPYIEKGDCLYPVKFHLHQELAELITELLRETICNDPQVCRIVDLPVYYELKTNNGNRDYRIQIGGHYMNYNTVYVGMDVHKESFTLCSCKYEDEKASHYQRTPASYKNVLRYLAFLRTIYGEDTRFVCGYEAGCLGYSLYHQLENFNVECVILAPTTMLEQRSKRRIKTDKRDAEIIARSLAQHNYSPVHIPTETDNQTKEFIRMRDDHKAELKKIKQQILSFCLRQGYQYDGSGNWTAKHVKWLRSLKPAGLYKEILDEYLLTYTILTDKLNRLDQRIEELAFKEEYKESVSKLTCFLGIKTHTALSVIVEVGDFQRFVSARKFAGYLGLVPGQHSSGDDRNGLGITKAGNTHVRRLLVESAQSYTRGKIGYKSRVLRSRQAGNSPQVINYADRANERLRRRYYKMVLKDGKKYNIAKTAIARELACFIWGMMTDNIY

SEQ ID NO: 486238 - protein, 323 aa, unidentified
MALKIVYKICCGIDVHKTFVVACIASTDNKGITSYESHRFSTYTSGLKDLLQWLLTRNCKDVCMESTGKYWIPVYNILESNCSIVLAHPKYVKAIRGKKTDKKNAKWIADLFKHDLVAGSFMPPADIRQLRDLMRYRFKLICFKSSEKNRLQNCLTVSNIQLGNVVSDTFGKSAQAILDKLLENPADTSFDLEPLVFRSLKKKLPQLRDAIDGYITPEQAGKLKIIKTHYENLESRKAELEELILALAAPYQQELTILQTAPGICSDFTAIRIISEIGTNMEAFPSAKHLCLWAGLTPTNNESAGKKKSVRVSKAGCYIKPLL

SEQ ID NO: 486239 - protein, 317 aa, unidentified
MAVHRSFVGVDISKDRLDIWLESAKRFERVTNDAAGWTALIALLRAQGPQSGTVVAFEATGGYERGVRGALLEAGFEVRRLNPFRVRLYARSLGRNAKNDRIDARVIARYAAAAETHPEILDAVREDLAELVSHRQRLVSERVAVSNHARTLRAKALVAQDRKRLALLEQQIAEADELILKALGDAPDLKAKAALLKTLKGVKDVTATTLVALLPELGRLNRRQIAALVGLAPFDHDSGKYAGTRSIAGGRAAVRTALYMAARAAALSKSPLATHYKRLIAAGKTPKVATVAPMRKMIVTLNAMLRDGRPWSHADAH

SEQ ID NO: 486240 - protein, 365 aa, unidentified
MHKLNSAATLIQRTTTEAPRDHMYYIGLDVHKRTISYCVKDAAGHVHQEGKIGSTRCELDAWIKTLPQPRMMAMEATIFTGWIYDHLLPHAEKIKVAHPLMLRAIAVAKKKNDKIDAAKIADCLRCDFLPECHMASTEIRDRRRTLRYRNLVIKQMVQMKNRVSGLLLETGVSFNKQRLHKVGYFADLMSTNDEVYESIRPLLKLSREHIVRAQRLDYALVCSLERDPLLAERLTRLRTVPGVGPITALTWALEIGDFTRFRSIKQAISYCGLCGDERSSADKVMRMPLSKQRNKHIQRVLIEAAKLAPRHSHELAMVRERELQKGNPNRATLAVARKMVSYLLAVERRKQNFVPAEQFKCTAAA

SEQ ID NO: 486241 - protein, 341 aa, unidentified
MSGGQNKIWIGFDVGKESFSAAVDQLKNTGKDKVTSLPCRNFKRTPAGVEQFFDWVKNHLDDQELHIVMETTGCYSQHLADWITQSHPEISITIQNARKIHAYIESLNLPHKTDKTDAQAIARFGTERQPEPTNRPSQTIMILRELSRERTALIKARVDLQNRRDSIISPVVRKINAQTLAALTMQIEKIEKEIKACVVADEELLTEVHIMTTMPGVSFISAYSILAEIGSLKQYSAKELSAISGLAPRIKQSGSSVDYSFMSRRSSGRLRQILYLDSVPGLPKIPFLQDFYQRLIAKGKTKMTVRCACMRKMLLMLRSMVVHNTPFDENFLKNHQKALDF

SEQ ID NO: 486242 - protein, 444 aa, unidentified
MARKNHQQPLRVVHDHCAGIDIGSREHWVGVDPDRCDNPVRRFSTFTDDLLGLADWLESLEINVVAMEATGVYWIPLFEILDARGFDVYLVNSRATRQITGRKSDVLDCQWIWQLMSYGLLRGAFRPSDATCSMRSIVRQRANKVRDQAQALNRMQKALSQMNIQLANVISNIAGVTGMKILRAIIEGERDPRKLAAYRDRRIKADHETIERSLRGNWRQEHLHALAQEVACHDFLEGQIAECDQAIMQALEQLPTLNDASQPSTKVLRSPHRCALEQAALHQALWKIMGVDLTAIPTLGVDTVLVLSSEIGPDLARFPTSEHFCSWLGLAPPTRISGGKALPGSGPKVLNRAAQALKQAASNARNDKSFIGASHRSRLARMDTSCAIKATAHQLARLIYAMLTKGQPYVEQGIEAFEAKSQQKQVRALLRKAQKLGLQLVKAA

SEQ ID NO: 486243 - protein, 375 aa, unidentified
MPTMTQPGTDEQTCVQVTGGVDTHADTHTAAALDQTGGLLGHRQFPATPPGYAALLAWLCGFGQLVAVGVEGTGAYGAGLAQFLQILQTAGTAGTAGVELVEVDRPDRRARRRSGKSDPIDAEAAARAAQAGRAVGVPKTRGGRVDALRALRVARRSAVTARAEAQTQMKSLIVTAPEPLRTTLRALSDRELVAHCTTRRPDRTRVEDPTVAAMLALRSLARRHQQLTEEITELDTLIGPLVAALNPALLALTGVGPDTAGQLLVTAGDNPQRLRSEAAFAMLCGAAPLPASSGRTVRHRLNRGGDRHANAALYRIVLCRLRWDPRTRAYAARRTAEGMTRKEIIRCLKRYVAREVYTALLNPHPSSVPGSPCAA

SEQ ID NO: 486244 - protein, 354 aa, unidentified
MLAEMVDHVIGIDPDRDWVTAAVLEASTARVLATGRFGANSAGYRQVVAWADEYSTATERAWAIEGTASYGRGVTAALARCGEWVIEFDRATQKPAKDGSKTDELDAIRAARETLGRTKLASPRTHRGFREALRVHAVARDSAVQARTAAINELKAFVVTADESLRSELRGLRTAGLVKRCARFRHSTNRTVEAACTRAVMRAVARRIIHLNDEIAIHTKALTALVDQAAPQLVAEVGIGPVTAAGFYIAWSHPGRCRNEAAYARLGGTAPIEVTSGQTQDRHRLSRRGDRQLNKALHQVAVTRLRCHPPTQAYKQRRTAEGKTDREIRRCIKRYIARRVSRLLEHQTPPQTTT

SEQ ID NO: 486245 - protein, 347 aa, unidentified
MAFIGVDLHTNSFTICRLDDDGTEGFETFTLSASALQAFCQSLDADDEIAVESTGNTAWFCDEIRACVGRVVVVNPRQFQVIRKSVKKTDRNDARALAFFLSKDMLPETRLKSTAEAELSSLVATRDVFVKQRTMLLNKVHAMFVRRGCKLKKEGLASKKRMAELDLSQFTALEQVELTALRNQALGLTETLAELDKAIEAAGAELPGHECISSIKGIGARSAAILLSGIGNIDDFESADKLAAYVGIVPKVSQSNDTDNRGRITKRGNKLMRTTLVQCTLVAKRYSGYLNAFYQRIKERRGAGKAIIATARKLLSIIYDTLKNGWVFEDFTEFKIKENQCPAGQPS

SEQ ID NO: 486246 - protein, 361 aa, unidentified
MQSCIGKMTSQQTKGDLTMNNTKEQQETSNRGSYNEREYDHYIAIDWSIKIMAIARMTNKSSKVKVIEQPSDIRELKTYFMALRGKKILTIEETTSAQWLYVELHDVVDRIVVCDPYRNRLLSDGPKTDKIDATKLCILLKAGLLKEVYHTLENDYRLRNLVSSYEDVIKAGVRLKNQRAAIYRGEGMKQHQALSDPTLELIVEQIDNGIQWYEQTVATYETQFNKLSRKEKRIRRQIDIPGIGLKGAVKIVATVLNARRFADKGHYLAYCGLVNHAKDSGGRNYGYRKPRFDHTLKSVYKTAALSVLRGNNSLRNYYEHLRTKGVAEHNARNAVARKIAAISYGMLKNESVYQEREIKTR

SEQ ID NO: 486247 - protein, 425 aa, unidentified
MDIIAYRAAGLDVHRSIIAACVVLTPPHGRATKNRHQFAATAAGLAALAAWLKSLGVTHVGMESTGVYWMPVYAALEQAGGFELIVANAQHIKAVPGRKTDVKDAEWLAELVRFGLMRKSFVPPKPIRDLRDLTRYRRTLVDVQGSERQRLIKLLEATDIKLAEVVSDVFGKSGRAMVRALIAGETNADVIAKLARGNLRKKVGQLREALAGRLDDHHRDMLSIQLARVEAAEADIESLDKQITVRLAPYDQQMGLLIRIPGVDWVGAATIIAEIGVDMSVFPTAGHLSAWAGACPGNNQSAGKNKPAGARKGNIHLKTALCNAAVGASRKRDSFFKSKYTKLKLRRGGGRAMLAIGHKLLVCVYHILSTGSLYQDLGEHYQDRRDHERAKSRCIRRLESLGYAVTARPIGEAANAVQPNPAEAA

SEQ ID NO: 486248 - protein, 464 aa, unidentified
MRTLSVINPNAAGIDVGSEKLFVSIAGDEPAVFGTVTDEVYRLRDFLKQEGVTTVAMEATGVYWLYAYGVLEAAGLQVIFVNGRYVRNLPGRKTDMSDCQWLATLPAHGLLRGGFVPPAEIRRLQDYQRLRADHISEAASQVQKMQQALERMNIKFHDVISDLTGVSGMKVIKAILAGERQPERLLELCDKQIQKKKSERVLESLYGVWAPEHLFALGQALSVWEFYQKLLAQCDRQIEAVLKDLAGPPPASPPSSPESGETKAKGPKPPGKNAPQIDDLHALLVQICSGRDATSLPGVADYLWLQLVAETGTDLSAWATEKHFVAWCGLAPGTKQSGKRKGSVRRQCNRAGRLFSAGARSLVQSVDKGLGGFVRRISRRKGGLVATKALARKLAGLYYRVLRHGLEYAERGLREYEQKYEESQRRLLAKLAAKHGFQLVSQQALALKAAISQAASPNPSQSHA

SEQ ID NO: 486249 - protein, 418 aa, unidentified
MEKHNNSRKKSEPTSKRPKTRGPMRRDTKEVLAELVGKLKEKLDPKKVAATSAREEHERGELRPNLDRLTVGVDLGDQWSHYCILGLEGETLAEGQLRTTQEDIAEFFQALNAARVVFEVGTHSPWVQEVICGSGHEVLVANPRLMEGSKRRKRKNDRIDANKLARLGRVDPQSLHPMQHRSREVRQDLVVLRARDALVAARTELINATRGLVKSMGSRLPKCSSPSFAQKVEETVPVELRDALLPLVRMAAALSDCIQGYDEKIEKLGREKYEHTALLRQVKGVGPITSLAYVLTLENPERFVKSRDVGPYLGLVPKQEDSGESQPQLGISKAGDTMMRRLLVGSAHYILGPFGPDTDLRRYGLRLCERGGKNAKKRAAVAVARKLAVLLHCLWVSGEVYEPLRQGMSATMTPAAAA

SEQ ID NO: 486250 - protein, 342 aa, unidentified
MEAKRYIGIDLHRDCFTACLRLENGREYLKAWKLEDMAKFTGKLRPTDQVAVEVTGNTRLFHDAVAPHFARVVAVNPSQFQVITHSVKKTDTNDARNLALYLAKDLLPEVRMKDKTQAQIASLTQTRDTMVKLRTALKNKVNNLCSAQGVNLHKESLSSEKGLKAVLEMHFALLVNLELKIIIDQIRSLNKSIAELEETIGKQGQKLEGHKNLTSIKGIGGLSSGILLSIIGDIGDFADEGKLASYFGIVPRVSNSNETEHSGRITKRGTKLGRTTLIQCALIAQRYSPYLKTYYEKMKSRRGTGKAIVALARKFLGIIYRTLKNKWVFEDFPNFVLAEEAA

SEQ ID NO: 486251 - protein, 346 aa, unidentified
MKILALDLGKYKTVGCAYESESGAHQFKRGLTTPAGLARMVQEVKPDRVVIEICSIAGWVCDLLWGLGIEVQVANTSDDAWRWRKVKQKDDRRDALKAARLSAVNQIREVYVPANEVRQWRTLITYRQQLVRRRTKIKNHIRDLLLREGQILARGSSCWSQVGLAQLAAQARPFSECGPAELWRGELQLELEQLRAIQRQLSTVTAQLDKMGADEARVQLLRTIPGVGPRLAEAIVALLDQPQRFRKASQVSGYIGMVPKALDSGETERRGHITRQGSRLVRSLLVEVAWAGLRHNAWVRQTYQRLSGGKKARKKIAIVAVGRKLLVRCWAMLRDNRAWDWQPQVT

SEQ ID NO: 486252 - protein, 430 aa, unidentified
MNYTQNQKIEQVTESTLVLGVDIGSSEHYVRAFDYRGRELTRKVFRFSTDINGFNSFYDWVTQICIKHGKNEAMIGCEPTGHYWYTFYQFVKDYGMKLAFVNPASVKKAKELDDNSPKKTDLKDPKTIAKLVIDGRYSFPYVPEGIYAEIREVTSSRDRIMKELNAASNRIQRWLKIYFPEYLTVYKKFDTTTGMMILEEVPLPTMVTALGVDNIIKIWREHKVRGKGASFNRAKTLVDAAHDSVGKSGGQGAVMEIQMLLEDYKVKKQQLEMVTSVMEELIMQIPNAEKMLSVDGVGLVTVAGFISEVGDISRFKNPKQIQKYAGFELVENSSGKHKGRTTISKRGRKKLRKIIYQVVLPLIQSNKEFRSIYDYYRKRIKNPLKGRQAMIAVGCKLIRVFFAIMTKGVVYNGSKMIEDIHRPTQLPQAA

SEQ ID NO: 486253 - protein, 345 aa, unidentified
MEPIIDEEEVYYERCAGIDVHKKLLVVCLRIGHKQEIREFGTLTHEIREIAAWLKGNGCQMAAMESTGPYWKPLYNIFEQEGLPVMVCNAYHIKNVPGRKTDVNDAKWIARCLSQGLLKPSFVPDRQQRELRDMTRFRKSQIEERARNINRLQKFLEGANIKLGSWLSDVEGQSATELLELVIGEPDFTLDDVAERMHRNLKSSAEELFLSLEGYITPRQREFFKHIMNVIREQTAQIEKTDAMIQDNLDDNYKAAIKALDAIPGIGKVSAEQIVAELGVDMSRFHGPDQISKWAGVCPGNNSSAGKRKCGRTPPGNKTLKSTLAQSAKSARRKKDSFFLRSTTV

SEQ ID NO: 486254 - protein, 367 aa, unidentified
MKKISTVAAKPSRNISQQKLTIGLDLGDRNSWYCVLDEAGQIQLEQRVRTSAKTLYEVFGAMPRSRIALEIGTHSPWISRLLRELGHEVIVANARKVRLIGESRKKDDRLDAQTLARLARIDAALLCPVKHRSAQAQADLMMIRARAGLVRARTGLVNTARGLAKSYGERLRGCNVRNLNPEKAEGLSPELQRALEPLLSAIAELSQRISEYNDRIEGLAQASYPQVALLQQIKGVGTLIALTFLLTLEDPHRFGKSRDVGCYLGLQPGRRNSGQSEPQMHISKEGDPYLRTLLVQGAQHILGPFGVDCDLRRWGLKLAERGGKNGKKRAIVATARKLAVLLHHLWVSREVYEPLHNSSRVTVAAAA

SEQ ID NO: 486255 - protein, 493 aa, unidentified
MENAPSIFAKQHPKIRQILEQAGSPAKAMCVAMDYAKAKHVALFCNGFGDILKKAFPVDNSAAGLESLLAEVRRTCQHRTIRKKHVFFGGEDNPPYVQNFIRALAAQGYLVVRINAWEAKHQRDNHQASTDTLDLLGIAKTLLQKASYCDQDQSPASHALKELSRTRAAFVGQLTECKLQIHHYVSRLLPGFLNPKRSGIAAFGSASLALMAESFSAPQVRHWRGARLIRFLERHGEPEPEKAAERLKGLAAQALDPCAELLSCWQNSLSQYLRQYQSLTQSIQCLEQALAGALAKTPGALLTSIGGIGVVLASGLVAELGQAGSWRALRCLCSYSGIVPRVAQTGGPDQPAHTGSVQRRCNHRAKNWVVQAGCSVGKHGPAELKEQYRKLERNGQNADFIMAKRLLRIAKDLMRRTTVYRPKALLDAQTPNSELATYYAELWPRLLAKWNHLLQNWEQLFNPNSALGQWRQMVQQLYQLSLPLPHKGRGQTK

SEQ ID NO: 486256 - protein, 369 aa, unidentified
MGENTTFVGLDVHKETITVALADSGERGEVREHGRIANSPEALKGLLGKLERANRKLRFCYEAGPCGYGVQRQLTAAKHECVVIAPSLIPRKPGERIKTDRRDAISLARLHRAGELTPVWVPDPAHEAMRDLVRARLAAVRALRQARQQLSGFLLRHGRHYGRPAWTLMHRRWLSGLRFEQAVHHVVLEDLIAAVEAATERRDRLTRQIEAVLSEWSLAPVAQALQALRGVALVNAVTLLAELGDITRFASPRQMMAYLGLVPSEQSSGQSRRQGGITKAGNGAARRMLIEAAWSYRFPARVSRELLLRQEGLPQPIRETAWKAQLRLCRRYRRLAHAGKPATVVTTAIARELAGFVWAIVRQTAIQAS

SEQ ID NO: 486257 - protein, 349 aa, unidentified
MTDIIRIGIDTSKSVFQLHGVDRAERPVLLKQLSRREMIKFFEKLPPTVVALEACGASHHWARVLSDLGHEVKLIAPQLAKPYVKRGKNDAADAEALCEAVSRPTMRFVPMKTTDQQAALMLVGMRTRLIKRRTQLANAIRGLAAEFGVTAATGMCRIEPLLGTIAADETIPQLARELFVLHSEEYAGLKREIDRVEEKLMAWHRSDECSQRLAKIPGVGPIGASLLMMKTPDPGLFKSGRDFAAWMGLTPRGHSTAGKTRLGGITRAGDELLRSTLVVGATSVIRHARQTQGRNASPWLLNLLDRKKPKLVAVALANKIARVAWKLMVTGEQYRRNMVLPTSAVSIPA

SEQ ID NO: 486258 - protein, 408 aa, unidentified
MNAVGIDVSKGKSMVAALRPMGEVALMPQEFLHTEVGLEQMDYAILALGEDTRVVMEATGRYHEPVAAALYACGIHVCVLNPLYIKQSGGGSIRKVKTDKADAMKIAKYALDNWVDLREYTPMDTIRQQLKLCSRQYNLYMKTVVSLQNNLISLTDKTFPGVNELFSSLERTDGHQKWMDFVMTFWHCDCICHVSENAFTERYQKWCNRKGYHFSEEKAKDIYAGSCGHFTTLPKNDNTKLLITTAARQLLAGKMTLAALRTEMTRLAKQLPEYETVRAMYGVGETTAAQLIAEIGDVRRFPRRSSIVGFAGVDPGVDSSGKHNAKSVPTTKRGSTHLRKTLYQIVCTYLKKSPIDEPVYKFLDKKRNEGKPYFVYMTAAQNKFLRIYYARVKECLETFDAHQKAAQD

SEQ ID NO: 486259 - protein, 373 aa, unidentified
MPKYSTAFGMDVHLRSTTVCALDADTGEAVTRRFPGNPWGEIAGWMDGFPGPSLAAYESGYLGFAPQRELAGLGVECVVAAVSKIPRSAADSASKNDRNDAARMAKAILAHDISPVWVPSPEVEGIRDLAGAYDGATARLATAKQRLLAFLARRGFVYGGTTPAGNPRKYWTYDFLRWLDKVRPEDDGGVRALAALRNEVEAAAEARADLLSEYRAAVDASPIAAEAAALQSIKGCAFALAAAFSAEVGDFTRFRSGRQVTAYFGLAPSQRSSGDSVRLGGISGAGNALVRKLAVEGSWCYAAARHQPKLMPRDTGVPLEIRMHGRKGSERLLRRREEMLARGVPAAKANAATAAELVRWLWALGMMCREGAE

SEQ ID NO: 486260 - protein, 420 aa, unidentified
MEVNKVDYAAWIGIDWGSEQHAICLQAAKSSSLEQYTLEQKADSLHTWFANLRSRFGGRMVAVAIEQSKGALINFLLGLDFVHIYRIHPLSMKDYRHALYPSGAKDDPTDAELILKFARLHQDKHRPWVPDEVDSRLLLRLVEGRRKTVNKRVRLTNELTQLLKEYFPQALDWAGELDRVMACDFLMKWPTLQKLQKSKPDTVRRFYTRHGSRSRTLIDTRIEQIRLAQPLTTDRAIVESSVLMTKTIVLQLRTLIKAVADFEESIEAVYQKQPDSEIFSSFPGAGPVLGPRLQAAMGADRNRFEDSEEVTKYSGIAPVTEISGKKKWIHRRFACSRFVKQSFHEFAGQSIIGCAWARAFYESKRADGMEHHAALRALAYKWIRIIFRCWKDHVQYNEQKYMESLRRRQPAWLSFLPAAT

SEQ ID NO: 486261 - protein, 371 aa, unidentified
MSNDAIGFSRLLGDLKTVHKPEIIFEATGVYSRRLQSFLDEHGYAYTRLNPLEAKKQLDSLRVRKTDQIDAEKLAQSQFVLNRKTTYVQEEIYQNLRDLSRFYQNLTEDIVRAKNRLHKALQVTFPELENILSTPSGEQYWNLVIAFPCKDFVLDLSKDELSESIRQSTSKRISDKRVAYLAEKLIALANQSYCAVKKTSPMLEEVRYYAKELFRLSEQRQTILDEMVELAQPLPEYDILLSIPGIAETTATSIIGELGDIRRFQSANQINAFIGIDLRHYESGNFLAKEHITKRGNPYARKILFKCIHNIASASHTNPCHIADFYEKRKRQSQTTSTKPHTIASIHRLIRTMYYLIMHNKLYDYASTQNR

SEQ ID NO: 486262 - protein, 324 aa, unidentified
MSKDTIVCAGIDTGKHKLDVAIDASAHKLQVDNTAPGHVALSAWLRQHLVERVGIEASGGYEREVVAHLRREGFIVIVFQPAQVRAYAKFLLQRAKSDKIDAGLIAACTAATKKIHAPPDPRLAPFAEQMTLIDQLKNDESRFKNRLESCHDAHNREFWKAEISRFKSAQRIEIRALAKAIRQHPDLAERLDLILSVDGVGLPTALAILVRMPEIGRITREQAASLVGLAPFDDASAEREGERHIAGGRARLRERLYMAAFPAAMHWNPELIAIYERLTAAGKPHKVALVACARKLLIFVNTVVERGTPWESKRSPSAVLDAAT

SEQ ID NO: 486263 - protein, 350 aa, unidentified
MTRTIEGVTVGIDTHTDVHVAAAFDHMGHPLGHLEIPTTPAGYRQLLAWARRLGPVAAFGVEGTSSYGAGIARYLADAGCQVVEINRPNRQTPRRRGKSDPIDAEAAARAVLAGEARGAAKVDTDAAGMVRALRVARGSALKARTQAANQVQGIHVCAPAPLREEFRRLSVADLVKLAATFRPRRVTTTTTASKLALRSLAMRHQALTDEIELLDVELRRLTTATAPALCRLKGVGPDVAGALLVAAGDNPERFRSEASFASLCGASPIPASSGKTNRHRLNRGGDRIANNALWRIVMVRLATDEPTQNYMARRTQEGRSKREIIRCLKRCVAREVYHALLAPVALAVAA

SEQ ID NO: 486264 - protein, 391 aa, unidentified
MTERKTETVNDLSRCLDPLDMDATLIAVIEMSQSSWLVGGIVPGVERQPLKKLAIDEHALLKLLSRWRAEAEKKGHRITRIAVAFEAGHDGFWLARWLAAQGIEAHVIHASSVAVTREHRRAKTDRLDTGLLKRGFLGWLRGERGHCKMVAVPTLAEEDAKRPSRDRETLVGEASRIITRVKAAFVRLGIRRFNPKLKTAAAGLEALRTPEGEPIPPNTLAALKRDLERHRIVKQQIREIEQTRLERLGKAPAEGSHAMVRLLARVIGIGVETADMLVQEVLSRNMRDRRAVARYAGLTGSPDESGSKRREKGLARSGNARVRRGMIQLAWRFLMFQKDSALAQWYRQRTANAPSTRKTLVVALARKLLIALWRLARDGVVPEGVRLRPAA

SEQ ID NO: 486265 - protein, 346 aa, unidentified
MEIIRVGVDLAKNVYQVHGVDGEDKPVWRRQLSRKNWLAAIVKKVEPGSEIGIEACAGAHHWARELQARGYAVKMVAPQFVKPYVKSNKSDYNDAEAICEAMSRPTMRFVSIKSVEQQDIQAMHRIREELVGARTAKSNQIRGLVAEYGLVAPQSLAKLRAAIPQWLEDAENGLTNRFRGLLAGVWADLLALERRVKELDDEIGALAKSHPAARRLQELRGVGPMTATALIATLGSGEQFCKGRDFSVSLGLTPRQHSTGGKQRLLGISKRGDPYLRKLLVHGARSAIHAAKDKDDPLSQWLMRLTSRRHMNVATVALANKTARMAWSMIRNELDYEPQRAASSLG

SEQ ID NO: 486266 - protein, 343 aa, unidentified
METIATIGLDLAKSIFQIHAIDSAGDVIVRRAVRRANLLDFFRKLPPCLVGMEACASAHFWAREIRACGHEVKMIPPIYVKAYVKRSKTDAADAEAICEAVTRPTMRFVPIKSAEQQAAGLVLKTRDLLVRQRSQTANAFRAHMMEFGIAAAKGMASLEKHAEAIRDPEYRAIPDAARQALLEMVEQIDALSSRIEHLDDDIRKCVKEDETARRLTTIPGVGPIIAATVRAVVHDAHGFKTGRNFAVWTGLTPRAHSSGGKERLGSISKRGNEQLRTLLIVGATSIIKLGKRGLKLPAWLAGLISRKPFKVAAVALANKMARIIWALLTKGGVYRKPVPSTAG

SEQ ID NO: 486267 - protein, 407 aa, unidentified
MQEATQHDAVDVFVGVDVDVGVDVGKGQHHAVALDRNGKRLYNKALPNDEVKLRALIAELKTHRRLLFVVDQPSTIGALPVAVARAEGVLVAYLPGLAMRRIADLHAGEAKTDARDAAIIAEAARSMPHTLRSLRLADEQLAELTMLRGFDDDLAAQVTQTSNRIRGLLTQIHPALERVLGPRLDHLAVLDLLERYPSPSALAAANEKTLANRLTKLAPRLGKNWAAEIVQVLNEQAVIVPGTQAAAIVMPRLAQQLAALRKQRDEIAAEVERLVLAHPLWPVLTSMPGVGVRTAARRLTEAAPKAFATATHLAAYVGLAPVTRRSGSSIRGEHPSRRGNKVLNRALFLPAFAALRDPVSRAYSSRKIQQGKRHNQALIALARRRCDVLFAMLRDGTIYPPKSAPDA

SEQ ID NO: 486268 - protein, 388 aa, unidentified
MTQAPGALPTPGVLDYERTLILAIELSNTSWVLATQIPGLPGVKAKRSIEPTPEALMAAIGSYRVRAEKAGRNVDRVIAVYEAGWSGFWLVRWLAKYGIETHVIQPSSVPVDRRARRAKSDGIDAEHLLRTLLAWLRGEPRVCSMVPMPTEADEDARRRVRERAELIAERVGLVNRISAILATLGAGEYNPLRRDRRQRLDELRTALGDSLPTHARAKIARMLDRLELLLIQITELEQSRDAVLEDKNPDRAASMIQQLAKLRGVGVQTATVLVHEGFVREFTNGKALGSYAGLTATPYSSGGIEREQGIGKAGNARLRTVMVELAWLWQRYQSDSAQVSWFRERISGTGRRIRKVMVVALARKLLIALWRFATQGVVPKGAVMKPAS

SEQ ID NO: 486269 - protein, 343 aa, unidentified
MGEVSTIGLDIAKSVFQVHGVDDTGTVVMRKRINRSKVLQFFGDLSPCLVGLEACPSAHYWSRELQALGHRVKLMPPSYVKAYLKRSKNDANDAAAICEAVTRPSMRFVPIKTQEQQTGLMLHRTRQLLVRQRTMLSNAIRGHMAELGIISAKGRNGTAELLRIIRDVADDRIPPVARFCLDLLARQYLALNAEVSAVDKRIHAWHRSCQESRRLEEIPGIGPIVATALVAEIGDWGAFRSGRNLAAWIGLVPKQHSTGGKERLGSITKQGNRYLRWLLVTGAMAVIRYARRHGTKRPWLTRIMGRRPAKVAAVALANKIARMAWAIMVRGEMYKEPKLLLAA

SEQ ID NO: 486270 - protein, 348 aa, unidentified
METDQRVVGGVDTHKDTHVVVALDHLGRQLGASSFPSTANGCRALLDWLRQLGQLDRVGVEGCGSYGAGLARLLRAEAVEVVEICRPNRQMRRRRGKSDLLDAEAAARAVLAERDGVTPKSADGPVEAMRALRVARSSAIKARDQATNQLHALIVTAPQDTRDRLNEPRIDKLAAQLLGAEPGTISDQAGYEMAVLSLARRWQALDTEAADLAGQLKTIVTKTAPPKMLELQGVGPDVAAALMIAAGDNPQRLHSEASFAALCGVSPLDCSSGKQDRHRLNRGGNRDANMALWRIVMVRLRWDPTTRAYVDKRISEGKTRRGAMRCLKRYIARDIYRLLTANPTLNTP

SEQ ID NO: 486271 - protein, 408 aa, unidentified
MKRYYIGVDWGDRLHQVYVGDDEGKKVREMKVQESPEGLAEIGRWLDERRAEGIELWAAIEKPAGRIVDFLLDHGVEVYPVNPKAVDRVRDRYRMSDSKSDAFDAYVLAEFLRTDQAHLKVLRPNSEKAQELKMLSRDQRRVGRHKSRLLHQLTTTLKEYYARPLEVFDDIETEVALDFLTRYPTPAHLSALKRKEFNRFATKQHHLSKQRCEELWEKLKKPQLAVPEHVVRAKAQLVEVLIEQLRAAIKAVKIYNHKVESFFASSPAAQFAKTLPGGKSGTLVAAIWAELGDAQGRWESSRHLQAEAGAVPVTKASGKSRVVHFRFACNKHLRHTMYWFSFVSVNHSEWAKLYYRGHRDKGHSHHQALRALGAKWLKIIFVMWRDQKPYDENYHLANIARQKMRQAA

SEQ ID NO: 486272 - protein, 376 aa, unidentified
MRTIGAETPNTEVAVILGVDTHLDFHVAVALDHLGRRLGESSVPTTPKGYERLLRWAEGFGPVRCFGVEGTSSYGAGLTRHLRAVGIEVLEVERPEHHRRSSRRNLQKSDPSDAEAAARAVLAGEASGVPKSADGRVEMIRTLRAARRSAVKARTQAANQLQGLRLTAPEQLRNRLRGLSTKELVRVAARFRLAGDPSDVPAATKFALRSVARRYETLSAEIAELEAHLGRLVAQAAPELLSLPGIGTDNAATLLIVAGDNPERLGSEASFASLCGVAPIEASSGKVVRHRLNRGGNREANRALYMICLARMRRDLRTKEYVERRTAEGKSKREIIRCLKRYIAREAYRVLISCGARSSPAGTKDEAHIAAGRGAA

SEQ ID NO: 486273 - protein, 323 aa, unidentified
MTQIICGVDISSTSLEARLGRDGAAGSFANNPEGIAELAAFCQSHQVELVAMEATGGYERQPFALLSEAGLPVAILNPRAVRRFAEGMGLLEKTDALDAGVIAWFAEVKRSQPQSLQSASLQQLRALVCRLRQLTALRTAQRNQSRLVTDAVVLAWFAELLEVAARQVRELESAIAALISQDPLWRELDQAFRSIKGVADRTVARLMAEMPEIGTLSNKAISKLAGVAPLAHDSGKVQGKRSVRGGRASVREILFVVAGVSGRYEPDFMAFHQRLQAAGKPGKVIRIALAHKLLVRLNAKAREVRQQFNAQQGSRTALLVAVN

SEQ ID NO: 486274 - protein, 428 aa, unidentified
MEHPKMGYTYVGVDSHKESHTAVLIDCFFEKIGEVRFDNLPSAFPGFLERVRALASDGTEPLFGLEDVTAYGRTLAVFLSESGCGVKHANAGLVAAERKARGLPQKTDAIDAECAARVLLSRLGSLQDADPQDKYWVLRALVARRWQVVRGNTSLKNHLHALITTHYPNYGGFFSTIDRKASLAFLKAYPSPHSLEGAAVGDVARVLSDASEKRLGEKRAAAILETVRQGGYAPVRFQGVRDAAVRSAIRQFESNVRELAFLDSELAKFLAHFDQTLTSMVGIEAVTAASLLALIGDVGRFPTAAKLAQYAGVAPLSRDSGKGGVRFANRRGNRQLNSVLFNLAVRVSSTAGSNNKAVNPIFYEYYHRKMSEGKTKRQALKCVQRRLVNIIWTMLTNGEEYVNPPMANVPKDGGDGGDNYKDNGKKNR

SEQ ID NO: 486275 - protein, 474 aa, unidentified
MIKSVGIDFHQGKHVVRCLDERAQLCDSFSFQTTPEGLDTFEEHIFHDGSNPVIVFEPAGLTWFIMAICIRARHPDCRLVRAKGQKVAALRRYLRGSSKNDRLDALTLAKMVFIDPEQLDEVYLPPAKIHALQRLARQRKRLESDIAARKTRIGAIVESYVPGVRKAFSDPWSAQARAFLRCQLNPLSVTCDGEKALHSFLTKTRHRNKTDKAESHRVFLVCKSAADLYQLSSRAEAVDDEFFSVFQEEIERELRLMELEEAESEAIAKRMEELYRELHPSDNLRSIPGVGRVTAPTFLATVGDPARFHNQSAFVNWTGVVPRTRQSSEVEAKGLRMTKAGPAIMKWALFQAGDIGRRFDPQLASLYYREMVHHGKNHKQAMGAVMSHLAARVLKVLQDGRPYELRDNEGKAISPAEAKKLILHNYQVPENIRCERRRRNPIKRGYLKSQGTALLRTNEAAVAPQPVKVTIPEN

SEQ ID NO: 486276 - protein, 410 aa, unidentified
MGYETLIPRAHVMTKKNTLKSLPTDTEFRVVGLDLAKSDVSVAAIPVDDNTPSLVDRMTYADLLDWAGKISPTLFAMEPCNGYSLLCLQLENLGHEIKVISDSTVSMWINTHLSGQKTDLNDAIALARLAVSDAELTPIRHKSITEIRIQTVQAVRQQLMSQRSKSIVSFKALAQQWGIPCAAGHRNLKKLRESIEAKVDLITRPVANAMLFLLDAVKSLDRQIGQLNQTLQELVMSDERGRLLQSVLGVGTQISARVITVVGNVERFNSPRSLVAYVGVAPRNFITGHKNLTKKKHGNCPDLSHKGQGKISRRGDKLLRSLFIQGAACLYMQFCKDQLPECQLKRWILKQLAMQKNYGKLIVSLAAKLIRIVWAVLTYGEKFNIQKAGMTRSMWSEMALETPLNKEVPA

SEQ ID NO: 486277 - protein, 342 aa, unidentified
MEISTIGIDLSKTTFHLIGLGPHGDIVLRKKLSRKQLLTYTATRKPMLIGMEACAGAHYLARALRVQGHDARLMPAQYVKPYVKTNKNDYLDAEAIAEAVQRPTMRFVPIKNDEQLDLQALHRVRDRWVARRTAVMNQIRGFLLERGIAIRKGPSYLVTQLQAIFTQGDSSCSDTLLHLICELKHEWDELERKIAEASAELARIAKIDDGCHRLMEVPGFGPIVSTALVAAIGNGISFRKGRDLAAWLGLVPRQHSTGGKTRLLGISKLGNEYLRRMMLHGARSVVMQMERKPSALGEWLTSLSARRHRNVTVVALANKMARIAWAILSKGTHYSAPAFVAA

SEQ ID NO: 486278 - protein, 401 aa, unidentified
MPPAALTVWAGIDVGKTHHWVEVVDATGATLLSRRVLNDQVEIDELIAAVVPLADSVQWAVDIVGAPSALLLALLAQARQQVRYASGRVVSVMSSAFTGEGKTDAKDAHVIAETLRLRRDLSVVDQTTDLARNLAVLTAHRADLVADRVRGINRLRDLMTSVFPALEREFDYGSCKGALVLVSGYATPDRLRRAGRARLAAWLRARHVRGYAQLADRALNAAGTQRVVLPGQDITAGIVSELADSILALDVRIKDVDARIAATFELHPQAAVITSMPGFGPFLGASLLAAAGDLRAFPTAGHLAAAAGLVPLPNDSGRRSGNLHKPRRYSRPLRHVFYLSAQTAIMRPGPNRDYYLKKREHGRTHTQAVIALARRRIDVLWALLRDNRLFTEQPHALTEAA

SEQ ID NO: 486279 - protein, 313 aa, unidentified
MNELCVGIDVSKARLDVAAGEGEQFSVANDLTGYVQLSERLAAVKPRLIVMEATGGWERSVAAHLTAQALPIRVVNPRQVRQFAQAAGILAKTDQLDAAVLVRFAQAMQLEPRALPSEQVQALQALIARRNELTEMLTMERNRLRLAHKSVRPHLKKSIRWLESQIGSTDHDVDGMLRECGIWRDKVELLESVPGIARVTSLRLVATLPELGTLNRRQISALAGVAPFNQDSGQWRGKRRIYGGRAAARTALYMAALVGSRHNPVLRAFYRRLRAAGKPAKVALTACMRKLLTILNVMLREKRAWSPRLACAA

SEQ ID NO: 486280 - protein, 365 aa, unidentified
MTTRQRSTSSNTDPPVRREVVLGVDTHGEMHVAAVVSPLGKVLGNESFPATAAGYRQLLVWARKRGTVRRAGVEDTGTFGAGLSRYLVTQQIQVFEVNRPDRSARRLLGKSDPLDAQAAARAVLSGRARAQAKSGDGPVHSARIYKLAKDSAVKARTQAINQLKAVLVIADPALRERLSTLGNAELFRTCATLSPPDGGREEDAVAHATHMTLRMLAERIEQLTGQINELNQRLTRLLERHAPQLLVPVGIGPDSAVTLLITMGDNPERLNSEASFAALCGVSPIEYSSGRRSTRRLNQGGDRQANAALHRIVFTRLRHDPRTQAYYERRTQEGKTRREIIRCLKRYAAREVFNLVRPVSLAPAL

SEQ ID NO: 486281 - protein, 338 aa, unidentified
MFIIGIDPHRGSHTATVLDGAEEVLDQLRVTADGRQRDRLLDWAAPFAPRLWAVEGATGTGSLLAQQLVAAGERVVDVPPTLSARVRLLDSGRSDKTDSHDARSAAVVALRHQSLRQVKAQDHLAVLRLLAKRHHELIAARTRAVCRLHSTLCYLAEGHFPRRMTTSQGAAILAGIRPRDAVSIERKALARDLLAEMRRADRDIAELRARIKSAVSASGSKVTEIHGVGPVVATYLLGHTGEIGRFPSAGHYARYNGTAPIEASSGPTKRHRLNPRGNRQLNHALHMAAVTQVRNDTPGRDYYLRKQAEGHSRKEAMRALKRRISDAVYRHLLADTGR

SEQ ID NO: 486282 - protein, 344 aa, unidentified
MNYYAGIDVSLRTVNICVIDDQGEFVAETKLDSEVTDIVAYLDGLNLDVSSIGLEAGTLTQYLTYGLQSAGFEVVCMEARQVKAALSAMRNKTDKNDARGIAQLLRSGWYSPVHVKSMASHRIRALLSSRKAVLRKCIDLENEIRGLFKVFGIKLPPKLGHGPFDAAVRDIIETDATLSFALLPLLDARLVLYHCFRELDNRTRNLAHADPVCTRLMSAPGVGFITALTYKAGVDDPYRFKHSRTVAAHFGLTPRRFQSGEIDIDGHISRCGDRDVRSALYTAANALMTRSSKWSSLKVWGMQVAKTRGHRRAVIAVARKLAVILHRMWIDDTQFQWGSEDARS

SEQ ID NO: 486283 - protein, 429 aa, unidentified
MKIIYPRVCGIDVHKKFIVAVICISESVEPIYLKKRFSTFHNDLIRFREWLIQNDCQNVCLESTGKYYIPVYNVLESHISNIVVANPKWVRAVKGEKDDDKDAKWIADLFKFGIVRSSFIPQKDFRILRELTRYKYKLVNMRSSEKNRYQNALTSGNCKLDMVFTDVFGKSASNIIDLILSDNPYTDEDILSKVHKNCKASPDMILNSINGTDLTPVQKSRIELVNDHIKQLSSNIQRLDKLIDLMIEPYEDYISFLCQIPGVSRNSAIIILSEIGVDMNQFTSTRRLTSWAGLTPSSNQSAGKKKSVRISRAGVYLKPCLVEVAHAAVKDKNHPYYANKFNKISKRRGKKRAYIAIARKILVAAYHMLLTGEIWNPADLSEVETPVEQRIKYVKNNLKSDIKQLLDIGLTVEELTLMIQQNANTMTAQ

SEQ ID NO: 486284 - protein, 346 aa, unidentified
MMIIGCDFHPSWQQVSWLDTETGEAGEQKLVHASGDAKAFYQQWAAPALIGVEATGNSQWFIELVQDLGHEIWIGDAAQIRASYVRKQKTDKRDAAHILKLVVEGRFPRLWTPDREQRDLRQLVLHRHKLVMIRSRVKNELQHLSLNKGMQRKAKLWSQAGQKLLRELPLQPWAACRREDLLGLLEMLNQQIGKLDQAVQFAADEHPQAKLLMTQPGVGPNTALAYVLTIGDVSRFPRGKQVASYLGLIPREETSGGRQKLGAITKQGNRLLRSLLVEAAQIAVRFDPGFRKQYWHRCHQKPKGVAKVAAARKLAVRLYWMLRTQKPYPEIVRIESSPRVPLVGAS

SEQ ID NO: 486285 - protein, 424 aa, unidentified
MNCNQNFKISQVTEGTLVLGIDVGSNTHYARAFDWSGLELSKVFKFKNSFEGFQSFVLWVNDLCCKYNKSKVIAGLEPTGHYWFSLGELLKENNITIAIVNPYHVKQSKELDDNLQTKNDSKDLKVIAKLVIDGRYSFPYIPEGIYGELRVADKLKNDITQQIISIKIKIHRWLSIYFPEYENIYSSIDSKSGFLLLKETPLPKDIVELGSEGIVERWKQTKLRAVGLDKAKKLEEAAKKSIGCKNITSSARFEIKLLIEDYEYKQNQLNSITEELNKLCEKIPMIKEIAEIKGIGIATAISFVAEVGDIRRFKSAKQVQKYAGLALKENSSGKHKGLTRISKRGRKKLRTILFRATIPLIGFNKEFSSIYNYYIERKDNPLKKKQALTAICCKMIRIFFTILSKGIKYDETKMLHDIKRPVAA

SEQ ID NO: 486286 - protein, 339 aa, unidentified
MYAATIGLDIAKNVFQVYGANAAGDPLFNRRVSRAAILDFFSKLPPCVVAMESCSTAHYWGRSISALGHQVRLIHPAYVKPFVNRDKTDANDAEAIHEALFRRSMRFVPLKSTSHQASTMLFKTRALLVRQRVRAVNALRAHLAELGIVARPGTSNVSSLISIVRDRQSKSLPPSAITALKIIARQIDTLTKDIESLEKTLKGQAKEDDEMRRLMTIPGVGPMTATAIKAFVPDIGVFKSARHFASWTGLTPKSFSSGESIKIGGITKMGNADLRSLLVTGAMSVIRNTKTDDNKSWTASLKRRRPFKVAAIALANKNARTIWAILTKGGSYETAPTRA

SEQ ID NO: 486287 - protein, 321 aa, unidentified
MTYVGIDVSKVTFVVAYSSVKTNKTRTFKNTVNGVHEFVQTISASEHNCVLEATGNYSALLVYLLSEAGITISLENPLKIKNFARVMLTVTKTDEIDARLIALYGEKMQPAPYKLRSDAILVLKQKRTVLRQLKKQLVATRNLKGSMEVLPFFDPKCKKTIEKTITFLEKQIKEMEEELASLAQGEYKKQMDLLTSIKGIGVTLAAPLIVATGRFSYFDNAKQLTRYLGLSPPYQQSGTSVNVKGHINRNGDSSLRSQLYVAAFSSLRCNTECKACFDRLRSNGKPGKVVVIAVANKLVRQAFAVVTQGKPYVDGFKSEKP

SEQ ID NO: 486288 - protein, 377 aa, unidentified
MEKDSRFVGLDVHADTIAVAVAEPEGEVRSLGTIPNTPEAVRRLVKRLGSAARLRVCYEAGPTGYVLYRQLAALGVRCAVIAPTLVPVKAGDRVKTDRRDAEKLARSYRSGDLTPVWVPEADHEALRDLVRAREAAKKDELRARHRLGKFLLRQGRRPPAGLKAWGVKHRAWLQAIHLAHPAQEATLLDYLTEIDHAAARIVRLARAIDVAVETAPAPVRAVIAALQALRGIAKLSAVSIVTEVGALSRFAKPRQLMGYSGAVASEHSSGPHVRRGGITKTGNAHLRRIVIEAAWAYRHRPAIGGTLRSRQAGLSEEVKALAWKAQHRLHGRYARLLAKGKAPTQVVTAIGRELLGFIWAIGVHVERRTADGAPAAA

SEQ ID NO: 486289 - protein, 400 aa, unidentified
MISVGIDVSKGKSTVCILKPYGEIVSKPFNITHTQKDLSELSSMLFRLNDEVKIVMEATGIYHLPVLTYLQEKGFFVSVINPYLMKSYRNESLRKAKTDKIDSRIIANYGIDHWFKMKEFQTSGEIYEELKLLGQQYRHYMKLHLLSLAELIHLLDLTMPGIKNLLASWNETNRKDKRSDFVERFWHYDVITSMSEQEFTEEYILWAKEKKYVPSQEKAKVIYTLAQESIPTLPSETSSIKMLVTEAVRVLKEVDATLGLILSRMQEIAKTLPEYSVVIEMGGVGNTLAPKLIAEIGDVRRFRNGKALVAFAGIDPPPYESGQFVGCNRKISKRGSASLRKVGYETMRSLKMRSRPEDPVYRYVVKKESEGKSKKSAKIAGLNKFLRIYYARVTELYKNI

SEQ ID NO: 486290 - protein, 336 aa, unidentified
MKKEIIKQNVGVDVSEANIEAALSYLTTDYRVVVCSTRKFANTVKGFKQFEDWANSKKHSLEEVHFTMEATGVYYEQLAYFLYEQNYCLHVVLPNQVKKYGQSLGIKSKTDGIDARTLAQMGLERELRLWQPISPALLELKELTRERDALVRNRTTVANHLHAYRHQGKPNKDSIARSIKHITFLDKQVKQIEKEIKDFVNRNKKLKTGIEYLLSIPGVGLLTAATIVAETNGFAAFESIKQLTSYAGLDVRIAESGKWKGKSKISKRGNSYIRKALFMPSLSKIRHNQQTKQFYERLKEKKGIGMIATVAVERKLLGLMFSLWKKEEMYRPAPNK

SEQ ID NO: 486291 - protein, 319 aa, unidentified
MYKVIGIDVSKATLDGCFLDGSQKESFVVSNTQQGFKKIALKAKGALVVMEASGPYYLQLSNYLHTHGIEVSVVNPLVIKRFSQMNLQRAKTDKKDAETIANYGRIYAPKRWSPNSKNTNSIGQLHSAMELLDKQIRQLKGQQEAFDNSGELASLLRKELKSMVNFLVKKKLFLEVERLAEQEFGEKIDKITSIPGIGKKTAIMLNVITDGFTKFEHHKQLTAYIGFSPRVYQSGTSVKGKGHICKMGNAQIRKLLYLCSWTAKFCNKACREMYERLKEKGKPERVIKVAIANKLLKQAFAIGKSQMNYSENHGDNICF

SEQ ID NO: 486292 - protein, 341 aa, unidentified
MRFYNRPHTYYCGIDLHVKTMYVCILDGAGQVLVHRNVPSTPAAFLEAVAAYREGLVVAAECMFTWYWLADVCAAEGITFVLGHALAMKAIHGGKAKNDRIDSHKIAVLLRGGMLPQAYVYPAAMRSTRDLIRRRLHLVRKRGQLLAHIQNTRAQYNLPVFGRKLAYRTNRDGVVEHFPDPSVQKSIAVDLALIDQYDALVIDVREAKRHNADAFHRLRSVPGIGKVLALTILYEIHDITRFDRVQEFTSYARLVKCKKQSGGKTLGTGGAKMGNVHLKWAFSEAAVLFLRHTEGKKLIARIEKQHGKGKAHSILAHKIGRAVFYMLSRGTVFSMEKFLAA

SEQ ID NO: 486293 - protein, 434 aa, unidentified
MDEVTDEPLYRDRVCGIDIGKAGMAATIRVPSDKDPSRRAAETRTFGTTKREVLALADWLRCWQVPAVVMEATGDYWKPVFYRLEAEGFECVLADARQVKNLPGRPKRDPSDSRWLAACFERGSVTGCFVATPEFRIIREHTRYRRDLTAERTREKQRTEKLLESAAIKISSVITELHGMTGRDIMDHLIGGERNPRALAELARGKARPKIGRLTEALEGAEFFTPEHAGLLRLMLERIDRIDSDITRLSRVIEELLAPYEEQLQQAASMPGWGRRAAEDVLAETGADMSRFPTPGHLASWAGRTPLDHQSGKRAGRARRKHGNRYIGAVTGETAASAGRTQTREGARYRRISRRAGPSKAKVALGNTQMRVYHVLLSNPGMRYADLGPDYYEQQRNIARQVSHHVGKLSSLGYEVTLCRRPEPDEPSEDTQAA

SEQ ID NO: 486294 - protein, 376 aa, unidentified
MSTTTVTRVDQDTKALYVAFELGEEEWKLALSPGLEERPRLRSLRARETSRLLEILEKGRQRFGAQRIVSCYEAGRDGFWLDRFLRAHGIDNRIVDSASIEVRRRARRVKTDRLDAQKLLTMLQREALGEKDLWSVVHVPAVADEDARSLQREYRTLVKERSRSSNRIKGLLASQGLVAPRIDGRFPEWVTSARLWDGSEVPSGLRARVEREFARWRFTHDQVLALEKERRDRTKDETNQSLEKVRALYAIKGIGLGAAWTWGLEFFTWRNFRNGKQVGALSGLAPTPYQSGDSEHELGISRAGNRWVRGLAIEIAWGWLRHQPDSALTRWYNERFARGGPRARKVGIVALARKLLVALWRYVETGALPEGAVLKA

SEQ ID NO: 486295 - protein, 327 aa, unidentified
MLVIGIDVAKAKLDVCVLLDERKRAKVVANSNAGVIQLLAWLQQHWPEQPLSQMHAVLEGTGVYHESAACALFDVGVHVSIVNPAQVRDFAKGLGIRTKTDGVDSQVLARYGALVQPAPWTPPPAHVRTLTALLARREAIAQDLRRERNRQEKALAAQSVALVRHSLETSIAFLLQQLKDIERQIDQHIDGHPDLKGDVRLLQSIPAVGDKVGTQMTSLLRSHCFTTAEQLAAYLGLVPVERQSGSSVCAKARLSKAGPATMRATLYMAAVVATRHNPHIKALYERLLAKGKSKMAAIGAAMRKLVHLCFGVWKHQCPYQADFVQRA

SEQ ID NO: 486296 - protein, 414 aa, unidentified
MYYIGMDWADQKYDVAIVDHNGTIVSQHLTFKKSLAGFAQLLDKLRHLSENPQDCKVGIETPNNLVVDFLVDLSYPVFALFPGAMKSLRKRYRTSGARDDRFDAFVIADALRTAQAGSKAPSVWRAVDFGSELVREIRLVARDHHDLTAEHVRLSNSLRSTLKEYYPEYLQFFVDVACPCSLAFLEAYPDFDAGARLTRQQLADFFKEQHFRRRETVNKIYEIFHRPHFKVPAALISTKKLKALACIKRLHALMPTLEEYNQRIKELVEQHRDGKFFLSYPGVSYLTAARLLAIFGDNRELYRDVRELQGRTGTCPVTEKSGDDFRIIYFRRACNKFYRDVMQLLAFSSLRAASWAMKFYQKHRALGHTHSHALRCLANLHVRILFAMWKNRTCYDENIFLAQRARHLVAQQKF

SEQ ID NO: 486297 - protein, 372 aa, unidentified
MQQKSKVFVGLDTSKLKISVAVAEDGRQGEIRFLGEIDNTPEAVRRLVHKLASRHGELLFCYEAGPTGYGLQRQIAALGHECAVIAPSLIPKRPGERVKTNRRDALTLARLHRAGELTAIWVPDPGHEAVRELVRAREAAMADLREKRQHLQSFLLRHGQIFPGRQPWTRAHARWLAELIFEHPAQYLVLREYRQAIEEAEARLDRLTQQVAEVVATWSMAPVVEAYQALRGVALLTAVTFVAEIGDVRRFDSPRQLMAYLGLVPCESSTGERVRRGRITKAGNARVRRVLIEGAWTYRFPARMSRLLQERQKGLPAAVRAIAWKAQVRLCARYRRLMAAGKRQTVVTTAIAREMAAFLWAIGREIEPRSAA

SEQ ID NO: 486298 - protein, 362 aa, unidentified
MKEKKTRYIGIDLGKRTYVMAVVGKGGKVAMSNGVTNPEGRQKLYKKLQSTDKIALEAGTLAFIMAKELEAAVGCKVYVLNPYRLSIIYKSMKKTDKEDALKLAHIIEDFQEERLPLVNVPSDEEMKRRKILASYRRAQQGRGREINRLHTLFVNQGITTIVKKDLATEEQRGESIKMLTGLDREEAQYLVAIIGSHEKRIETLVKKMEKETEGNEMIQRLQEIPGVGPMVSFAFSAHVGAERFENTGQLSNYLGLVPRVYMSGDTVRYGSITKRGNSYIRALLVQASWALIRSRNGGKLKERYEYMTIVKSISKKKSIVAIARRLAEMMYVLMRDGTRYRTNSFVHKNEMVRDISGVKFCA

SEQ ID NO: 486299 - protein, 352 aa, unidentified
MKADIKYAGIDLHQSTCVVSVEDEYGKVVSESVVKTDADPLRSFFRGFGGTIHVAFEVGTQSAWLYEILKPMVTSVTVCDVRKLKRRGNKNDRIDARQLARWLRLGELKAVYQGDRNVRKLRDLAHAYLATVSDSTRVMNRIKALYRSWSIPCGGRDVYYKRNRDEWLSKFPIPESRLRASFNYTQLDLLREQRKEAKKVFLKEARRYPVEKILRSVPGFGPVRSAFAIAVIGTPHRFRTERQLWSYSGLAVIVHSSSDHAIIDDRIVRKKHKHDTRGLTRDFNRILKMVFKGAAVEAIRKDPIKTLYKRKVDTGMRPEMAILSIARRLVAIALILWKRGEKFDVAKLISSN

SEQ ID NO: 486300 - protein, 418 aa, unidentified
MTTFKDPGQVVAGIDTHSLTHHVAVLAATGARLGDREFPATPAGHGAIAAFIASFGTVSRVGIEGTGSYGAALSRSLRAEGLSVAEVIRPKRAQRRRGKSDPIDAYAAAEQALANTHLPIPKDGDGVVEQIRALLSVRRSAVKARASAMQQIKSLLVTAPDQTRARWRSASDKQLISGLAATRPEAATLSVVAATTTALRILARRYQHLSDEITAIEADLHVLVHQANPELAAAFGIGITTAAQILVTAGDNPVRLRSEAAFAALCGVAPIPASSGKTTRHRLNRGGDRDANRALHTVALVRMSHEPRTRDYVARRTTDGKTTKDIIRCLKRAIAREVWHLLTHPTPVPDITDLRPLRVSKAITIDTAARHFGHWSITISRLERGELRDDNLATAYRTWLATLPNATPTKRMLTLNTR

SEQ ID NO: 486301 - protein, 404 aa, unidentified
MKQLLYAGIDWATKTHAVGVVDDQGGIRARFQVANTGKGFGGLIRRLTKLQVTGVAIERPDGPLVEAMLDAGLRVVVITPRQVKALRSRYGAAGAKSDAADALLLADVLRTDGHRLRPLTPDSDATQVLRALSRTRKDLQKARVALCNQLTAQLERCFPGAVGLFADLHSATAIAFLRRYPTSQAAADLTPATLAAFLRRIHYCGRTPVAVLLERVKAAPAAATSPDQAAGRAVCVAALLDAIQACHGRERELEAEIIERLEVHTDQAVFTSLPKAGHGVRAAALLSEIGDVRTRFPDEEALAALAGVAPVTRASGKARSVGFRWACDKKLRAAVIDFADDSRHASPWAAKVYTDALARTRRHPQAVRILARAWIRVIWRIWQDHTSYDPAKHGRAVRLLTAQA

SEQ ID NO: 486302 - protein, 370 aa, unidentified
MTECNVNKKVTKTKLSTTGYDHYIAIDWSQVNIALARSTKKSLEPKVHLWEESDVKIVKDYISALSGTIIMTIEETTTSHWLYVELKEYVDKILICDPYKNRLLSSGPKTDKIDAVKLCQLLRAGLLKEVYHTDDKLYNCRQLLSAFNDLKNMGVRLQNQRSALYRAKGFHYSKAELPELKKRLDDRDFTKFITDWQDLTIEEYYRNKELFEKIIFDIVKNNKIMKNLSGITGIGTISAFEIVSIVVQAERFKNRGNYLSYCGLVLHQKFSGNRSYGKRRPRYNRTLHSVYKRAARVAINGKNNAIYEYYEVLIKKGLNHKQATLSIARYIAKVTFGMMKSGKKYEPYKWRKEDGVEKKSSTLPTNKHQA

SEQ ID NO: 486303 - protein, 335 aa, unidentified
MNNIALIGIDLGKHSFHVHCQDNSGRALIRKKFTRTKLFEFLANTPSAKVVMEACAGSHFMARRISSLGHEARLISPQFVRPFVKTNKNDYVYAEAICEAASRPSMRFVQPKTENQQAMQAMHCIRDSLIRDKVKTTNQMHAFLLEFGIGLPKGTAVIKRLSAVLTENELPPYLVQMLTRLHAHYCYLESQIKELDQLLQQELKHDDTGQRLLTMPGIGPITASILSSQLSDGKQYASSKDFAASTGLVPRQYSTGGKNTLLGISKRGNKNLRRLLVQCARSIMIHLDKYSGSLANWIKNQLCRKHSCVVACALANKLARIAWAITTSKTDFKFS

SEQ ID NO: 486304 - protein, 341 aa, unidentified
MEIDILGIDLAKQVFQLHGADRRGRPVHRAKVSRGSLLEAVRSLNPRTVVMEACSTAHHWARRFQSLGIEVRLISPQYVSPFVKTNKNDRNDAEAIVEAASRPAMRFVTVKSVEQQDIQAAHRMRAILLRHRTAMINQMRGLLGERGLTISRSPEAFKRAIPELLSKSADELTSFCQTLLTELLQHLKAIEERVHLIEASIQSFMKQSALCKKISEVPGIGPITATAMVAAVGDAKQFRNGRHLAAWLGLVPRQYSSGGKPRLHGISRRGDTYLRTLLIHGARAVLRYSATKCDPQSVWLQQLIARRGHNCAAVALANKNARVIQALLSSDSAYITRSAAA

SEQ ID NO: 486305 - protein, 343 aa, unidentified
MKLHVLGIDLGKTVFHLVGLDSTGRVVIRKKCSRTQLLAFTANLQVQLIGMESCSGAHFLGRALREQGHEVRLMPAQYVKPYVQTNKSDFLDAEAIAEAVQRPRMRFVPIKTEEQLDLQALHRVRERWVMRRTAVVNQIRSLLLERGLTLPKGRGYVDRQLPRILEDGELRLSGSFRVLLAQLKIELEQLTARIEEMDRVIQKTAKENEACQRLTEIPGVGPVTATALIAAVGNGSTFQKGRNLAAWMGIVPGEYSTGGKQKLLGISKRGNKYLRTLFIQGARSVLQQRDKQAPGLSSWLAQLLARAHQNVVIVALANKLVRMAWAVLCKNERYRAPVLAVTT

SEQ ID NO: 486306 - protein, 384 aa, unidentified
MGNDLGYQSGTDEVVLAVSLELAARKWKVAVHDGRRERPAVHTVEQPQAAARLQAVLALIDAHRHSWSLPAGVRIVVCYEAGPDAFWIWRALQAQGIECYVLDPASIPVERHKRRAKTDRLDVIKLVINLRAWLRGERDRMHVVHVPSAQDEASRHLMRERGQLQKEVLQHLDRMRKLLATLGCWENVTPRSFADRLARDEVRCHDGTPLPPELRERLLRECERLVLATKQLAALEKTRQASVPAPSRARSDALARLKGIGEVGASRLALELYWRDFHNRREVGACVGLVPQPYDSGESQTDQGISKQGNGRVRALLVEMAWTWLRYQPGSALTQWFNRRTQGTGPNRRARRIAIVAVARRLAIALWRYLKDGVIPDGAQLKSS

SEQ ID NO: 486307 - protein, 368 aa, unidentified
MERKSSKLFVGMDVHKESIDLATGEAQGEVRHYGAIGGDLAALARVVRKLESQGRALVFVYEAGPCGFGIYRWLRSRGHECWVVAPSMTPRQASDRIKTDRRDCLKLCRLARAGELSPVYVPDAADEAMRDLVRTREDAVVMQRQARQRLAALLLRNDVRYNGKTAWTPAHRRWIAEIKLPHAAQHIAFEEYVQAVEEAGHRVARLTQAIEAQRAHWRWTPVAQALAAFRGIQAIHGTRLVAELGDLRRFARPRALMGYLGMVPSENSSGERRRQGSITKAGNSSARRALIEAAWAYRYPARVSVGIARRQSDLPKPVTDLAWKAQLRLCTRFRRLCARGLHRNKIVVAVARELAGFVWALGQQVAPR

SEQ ID NO: 486308 - protein, 468 aa, unidentified
MKKLDPQHSNSNRQAQQATMDEDREGLPVIRPLVAGIDLGSEQHWACAPCRDGAGREVTVFGATTPELEKMALWLKERKVESVAMEGTGVYWIAPHEVLERNGLEVVLVNTRELARVPGRKKTDRVDARWIQRLHSCGLLRGSFRPVEQVCILRTYVRDRSILGAETADWMRRMQKSLDQMNVRVHRAVSDLDGMTGMAILRAIVGGERDAVKLAQLRDRRCRKSEEEIAEQLTGHWREDHLFSLEQALKVYDGLQERIADYDRKILEKVEEMTWEERRGLQAPELKNKEKARCIQRRGEEPLRQALYRMSGVDLTAIDAIGVGAVEVVLSEYGPDLSRFPTEDEFVSHVNLAPRKPVTGGKPMKKKKRGSASTRTAGALRMAAVSMRNSKTALGAYYRQVARRIGGDVAVFATARKLAQLIYRLLRWGQPYVDEGAESFEKRYTEQRLRRLKASANNLGYELTPKTA

SEQ ID NO: 486309 - protein, 401 aa, unidentified
MKQFNPINVKGENESALAHVRQTQSKIKQYAGYVGLDVHMDTIAVVLALPDGSLPSYYGEVANTPAAIKKLLKKLSPNGEVMSFCYEAGPTGYGVYRQLTAMGHHCIVVAPSLIPRKPGDRIKTDRRDSESLARLHRAGELTQVWVPDQEQESMRDLTRAREDMKQLERQSRQRLSMFLLRHGKHYDSGKKKWTKVFFSWLETVQFEHPVQQIVFQEYIDSVKQQQDRVASLLKEMEKALKNWRLAPVVEALMALRGCKLITAMTVMAELGDITRFDSPRQLMAYLGLVPSEYSSGKTTRRGGITKCGNGHVRRVLTESAWSYRFPARKTTHLQRTAKYTSESAQVIAWKAQKRLCGRYQHLMTRGLLKVKVCTAIARELAGFIWAIACDVMGKKPQLAMQ

SEQ ID NO: 486310 - protein, 353 aa, unidentified
MEKVTRVGIDLGKHVYQVCGMEASGAVVFQRQVKAPRLMELMSRLAPCLVGMEASCGAHHWAEKLRELGHDVRMMSPQFVRPYVKSNKSDYHDAEAICEAVSRPTMRFVPYKTKERRALQQIHRSRETMIGVRTQLSNQLRGFLREYGIVLPQGLAVIKREVPAIASDPERALPGDFRALLYMQHQALMQVDEQVADLTAMLERESKENPLCERLMSIPGIGPMVSTALVASVGSGWAFGSGRQMSAFLGLVPRQESTGGRTVLRGISKRGDRYLRALLIHGARAVLRTAHKGERTRLKEWALDVKRRRGANVATVAVANKLARIAWAVLRHDERYSDERHVGGRARDSRAAA

SEQ ID NO: 486311 - protein, 387 aa, unidentified
MYFVGIDISKYKHDCFITTETDTIITQNLSFQNNKDGFNEFLNLLKSLDNSQEIRIGFEATGHYHFNLMLFLEENGYSFMEFNPALVKKFISTTTLRRTKTDKKDASAIAKYLMSVNYKPYPKQFYHKYALKSLTRRREAFVHQRSYFKVELTNILDIIFPEFKPFFSNSFSATALFILSTYKSAEAIANMSDYDSVRKVSRGKFSYAKFLKLKELASNTVGLDSDIYTFQLDSLLSLINTMDKQISLIEDKISKIVDLLNPRCLSIKGIGNILCASIVAEFGDFNRFKSANACLAFAGLEPSTIQSGCAEHNGKMVKHGSPHLRASIMNAADFVFMHEPTFTIYYYKKRSEGKAHRVALSHVAKKLVRVIYKIETSDIPFDSSKLK

SEQ ID NO: 486312 - protein, 341 aa, unidentified
MPSKADTAVARTIGIDTGKNTLHMIGLDERGAIVLREKISRARIAARFVNLPPCLVGIEAGMASHYVARELVALGHEVKQVPPAYSKPFRHGHKNDFRDAHAVAEAVERPSTRCVPIKTDGQLDLQALHRVRSRLIGNRTAVINQIRGFLLEHGIPVRQGHHFLRKQLPLILATRTDVLSPRMIRIIGDLMADWKYLDERVERVTDEITVPGIGPIISSAMVAAIGNGAAFCKGRDFAAWLGLVPKQMSTGDRTILGRITKLGNRYLRMLFIQGARAVLLRPASWVKHSFGSWLTAATRRLHRNVLAVALANKLARIAWTVLAQGRRYEARVEPRVEPAAA

SEQ ID NO: 486313 - protein, 346 aa, unidentified
MSKHGVAAGDIGALLARFSEFKQKAFARTGKSFPIIVIQEAGLDGFWIHRVLQSEGIESHVVDPASIATSRRRRRAKTDRIDGEALLRALLAYKRGEPRVCAMVKAPTPEEEDRRRLSRERKTLIGERVEHVNRIKGLLFCLGVSDYEPLRRNRHQRLDELKTGDGRALPDHLKAQISRELDRLELLLEQIKAVEAGQNTLFAAAKAEAPTPAPVTMLLDIKGIGPEFAAILWMEAFFRSFANRKQIAAYAGLAPTPWQSGAVNREQGVSKSGNPRLRTTLIQLAWLWLRHQPQSALALWFKERVTRNGGRFKKTTIVALARKLLVALWKYVTAGIVIEGAVMKAA

SEQ ID NO: 486314 - protein, 392 aa, unidentified
MQGQKSPERSAEPGVYVGVDVCKDWLDVYLHPVGQKLRVANTPQGLKALKRRLAELPVALVVMEATGKFHRQAHRALHAAGFAVAVVNPLRARLFAEAVGQLAKTDRLDARVLALMGQALEPSALAPAPEAIEALQELARARSAAKADQTALLNRRGASQTAFLKAELGRRLKVLAGHIERLDAEIERRIGADPALKRRYDIVLTIPGVGPVAAVALVIGLPELGACSAKAASLLAGLAPLARDSGARPASATSGADAPSCEPASTSPPSPRPAATRNSAKTTNASGTQAKKPRSPSPPSCESSSSSPTSSSKRIAPGSQSMLDFQHRCSPCLSPVRGYGMHTSQKRGAPSPLLREEGVARLDEAYLSERQQKIDLCGYRSATRGEEGKGLG

SEQ ID NO: 486315 - protein, 418 aa, unidentified
MQTELSNYTAIIGIDWADKKHDVCIHVTATGKQELLQIPHRSEEIDEWARSLHRKHGGPMAVALELSKGPIVAALQKYDFFVLYPVNPSSLVSYRRTFTPSGAKDDPTDAAYILNLLLRHPDQFHPLKPQSVEMRALMTLTEQRRRLMNDRVRLTNRLRNALKQYYPQALEWFDHIDTRLFYDFIRRWPSVPQARRARKATLETFFRAHNMNRKPLLEKRITAIKSAMPLTSDDGVVIPYRLLALTLVEQLETMLGCLDSFDQEIAALAPQHPDHELFDGLPGAGPVYTPRLMVAFGEQRERFNNAAEVQKYGGIAPVTERSGQQLWIHWRWQAPTFLRQTFVEWAAQTINKSYWAGLYYYQQRAKGCSYQAAVRALAFKWIRILYRCWKTRTPYDEARYLKALQERGSSLLKTAEAA

SEQ ID NO: 486316 - protein, 356 aa, unidentified
MPTQVTKKIDFTGKQLFIGLDVHKKSWSVTILVDGIEHRTFTQPSDPESLNSYLHRMFPGGEYNSAYEAGFCGYGIHRSLNQLGINNIVINAADIPTSQKDKLQKRDPVDSRKIARSLEKGSLHGIHIFDRELEELRSLNRTRFYLMRDLRRSKTRIKSFLQYYGEPIPVEFDNNQWTLKFVSWLKQVRMQTISGQDAFSNLICSYEYHRSQLLTLSRQIRERIREYDSELYTLLKSVSGIGPLTASALITELGDINRFANIDQLGSYVGLIPRIRESGETTYTGGITFRCNTFLRTLLIESSWQAIRLDPAMMQYYHSHLVNNKGHKVVIKVARKLLNRIRYVMKNRQPYVTGVV

SEQ ID NO: 486317 - protein, 422 aa, unidentified
MNAIGIDVSKGKSTVAVVRMYGEIVKKPFDVYHTKKGLEELVDIIKSLEGESKVVLESTGRYSDPVVKALCEAGIFVCVVNAKLIHDFGGDTIRRNKTDKTDSLKIAVFCASKWPKLERYSPEDELRKTLKIYNRQLAEYMKIKIMLKNNLIALSDQVFPGVNRLFTSPARDLDGHEKWVDFLARFWHSGLVYSISMQAFSSAYQKWCKKHGYNYSASKAGQIHTAACETFATLHKDDFTKKLVSQAVAQLNSLCETIAALKSEMTKLAKMLPEYETVMAMHGVGKTLAPQLIAEIGDIRRFPKRTSLARFAGIEPPENQSGVYNQHSRRISKQGSPHLRKSLFQVMCCVLQLGNGNEEVFQFLDKKRKEGKPYKVYMIAGANKFLRIYYARVKECMDKLENQANPVKLNTDERGADTSHAA

SEQ ID NO: 486318 - protein, 456 aa, unidentified
MIPSKNQPISCVCPNASQNAYVNVHAQVISICPYQAMSNMNTENEIVCGADIHRDFLVATMISRKGLKLQERFSMNQDGLLEFKSWILNHKCQRVAVESTGSYWYPIFYTLEGYVEFILANAFQIRNIEGKKTDKLDSERIAVYCLNDLIKPSRIYPKDYRDLRSITRSREALVNARSKLKNQIHQLLATCCIKLSSVISDSFGKSGRYILDRLLEGKSIDQIISGIPSKRVRNKEDELRNAIRNGLDPVQLLLIKTNLDAIDDLSEKIKILDAEISIKVKPFEEDLNILLSVPGIGLTSAATILAEMGDYRDFASADKMAMYFGIVPSVYQSAGKLRTGKITKRGSKHMRRILVEVAKAISKTKKNSNLKRFFMRVYKRSGKKNVATIALARKVLCIIYHLLMNREEYQEPEIKKTKPKISICGSPISAMDIDEMISTLSRAGYLVEKGFKEGCG

SEQ ID NO: 486319 - protein, 354 aa, unidentified
MFYSGIDLHKNNCFITTIDKDGLIVKQAKLPNEEHVILNFFFSTGNIHKAVVESTSNWYWLSDLLRNHQIDLTLAHAKYLKAISYAKVKTDKVDSQTLAQLLRMNLIPTAHQISPDIRGIRDTMRARLRLVQKKTSSILSIHRILEKFNVPIPENRKLQFISTLPHLKDLPLSDEYQFQVDCCCDQIRLLHKQIKLLEKSLHPQLIPNKDIQRLLWIPGIGKISAFTIYLEVDGIERFPDVKKFFSYCRLVPGASNSNQRNKHKSGSKDGNRYLKIAFTEVAVRAVQYYTEIKQFYQRKSRKTNKPIAKTIVAKELARITYHVLKDQTEFKTFKGITLSREKTLQWPRLPSPAA

SEQ ID NO: 486320 - protein, 422 aa, unidentified
MSKRRNKVCGADVHRDLIVATIRDDDNLLFQNEFGTTHAELKRFRDWLVVNNCEQVAFEATGVYWLPIYDFLSPYIDTIVANPWKIKNIPKDKTDSKDSQWIASLCLNGQIKRSRILSKNDRDLRTMTRARSGYVKTRTQFRNRIHKYLALNGIKLSSCISDIFGESGRYILGGLVEGWSIDTILDGIPSGRVRKKRDLIKAAIGSGLDEISRMLIKDTMDLLGHLETKVEAPSQEVINRLQTKSKDLAIVMSIPGIGFVSGSVILAEIGDYHDFKTPEQLAKWCGLSPGENESAGKKRPCGITKQGSKYLRTMLVQIAHVVARKSNTKLSRFFQRLSKRKEYNVAITALARKLICLVYHLLINQELYQEEDCERRKSKPAKSDPTSSYSPEDQLEDKVAAIVDAFYHLKANGRKRSSDGSG

SEQ ID NO: 486321 - protein, 311 aa, unidentified
MTSQFAGIDVGKDSLTGNLYGQDVVKDYPNTSRGIQRLSTWLQKHEVHLVVMEATGGYEKMASRQLERAGLAVAVVNPTYVRRFAQGMGTLAKTDPIDARMIAWYASVKQPKPRPPRSEAAEALSACVDRRDQLVAMRTMEKNRLGSAAAYVQSSITAHIESIDEQIKQMEVEIDHLIDQEEEWQSRIACMTSCKGVGKVTAVTLLAEMPELGHEKREQIAALAGVAPMNRDSGRKSGRRKTRGGRSKLRRVLFMAAMSAAKFNPVIHAFYQRLIEKGKPKSVVMVACMHKLLTILNAMLRKNEMWRPDFA

SEQ ID NO: 486322 - protein, 329 aa, unidentified
MDSLLPFPVVGIDVSKDTLAVCYHVADQVKHLEVSNSKAGFQHLIKACGAHCRFVMEATGTYNLALAYYLHEQGGQVAVLNPLVIKRFIQMHLSKGKSDRKDAQWLLRYGQQQAVKVWHPEETTLVECRQLEQVNEQLLKQKTMVHNALEALQQQPFVSKLAVKLLQQTLKALTQQVEAVEAKLLVLLHKRFASEMKLLCSIPGIGPKTAGMLLLFAGGFTRLDNYRQLIALAGLSPREHSSGTSIRGKVRITKMGGGLIRAKLFMCSFAAKKANAACQALFDRLVAKGKNKKLALIAVCNKLLKQAFAIVKSGVPYQADFSSKLALNP

SEQ ID NO: 486323 - protein, 357 aa, unidentified
MSNSKYVGLDVHQASTSIAVLDHSGKLVVEATIKTKADAIRDFISGLSGTVHVTFEEGTQAAWLYEVIKPLVAELVVCDPRQNKLLKASNKGDRIDANKLAQLLRAGLLKAVYHGNQQTKTLKQLAHNYSSMLSDTTRVMNRIKALFRGQGIPCAGRDVYYRRNRDKWLARLTEPGLRTRAQFLFEEFDAIKPLRRKAKSALLREARRHQAFEILSNIQTLGPIRVAQIIAAVGSPNRFRTRRQFWAYCGFAVVTRTTDDYRFDEGLAFRRRRPAATRGLNRNYNRRLKHVFKSAALYGIRKDPFKSYYQARVAGGMRPEMARLTLARKIANITLTLWKNGGEFDGQKLANNEIEPK

SEQ ID NO: 486324 - protein, 475 aa, unidentified
MPARKKNASEDGAPGQPGGAGAEVAEERVEVVTYAAAIDVAKGSGMVCTRVPGSRSDRKRQTVWQVDAAYHAVIALMDHLRCQGIQRLVLESTSDYWRIWYYLAEAAGLEVWLVNARDVKHLPGRGKSDREDCVWLCKLNERGMLRRSFVPPQPVRDLRSLTRTRSRLAQDQARHQSRVEKVLEDALLKISVVISDLFGASGRRFLDALVAGERSPQALAALGDPRLKATRQELAGALTGRFRDVHAFEIGVHLRLIDAINDEIARLDAAIEQQLASIPRTAPACTGCGLIGGGHSPGCARDGTPVLGLVQRLDEMTGVGVRNAQVFIAELGTDISVFPTPGHAAAWTRLTPRNLQSGTSDRPGRTGKGNPYLRGALGQCVMAAAKTDTRLGEQYRRLARRRGKQKAIVAVSRVICEIAWILICDPGARFTDPGPGYYTPRSPARQTRSKIREIERLNPGMKITLTPIDPASHAA

SEQ ID NO: 486325 - protein, 343 aa, unidentified
MDEYDGRQFVGIDLHRQRSVIVRQSESGELLSAVRIVNDPVALGLQLEQAGSDPEVVLEATYGWYWAVDVLHACGARVHLAHPLGVKGFRYRRVKNDVRDAADLADLLRMGRLPEAWIAPPETRELRELVRYRAKLVAIRSGLKAQVHAVLAKAGVLIAVSDLFGVAGRQRLAKVPLGAAYAERIRSLLELIDILDGHEARFAAMIAERLRAHCGYQVIQQVPGVGPVLAAVFVAEIGDVHRFAGPAHLCSWAGLTPTHRESDTVVRRGHITKQGSKLVRWAAVEAIQRQPDTTKITLDRQRIEARRGRNIAKIAAARKLLTLVYYGLRDGHIRAVARRQVAA

SEQ ID NO: 486326 - protein, 344 aa, unidentified
MQITTIGLDLAKSVFQIHGVDATGQVAVRKSLRRSQMLPFFAKLPPCLVGIEACGTSHYWARELIRLGHEVRLMPPAYVKPYVKRGKTDAADAEAVCEAVTRPTMRFVPVKSPEQQAALSMHRTRDLMVKQRTQLINMIRGLLAEFGVDIPKGLERALLMARQIVDGKAPELPIEATRIVTTLSQQALDIHVRLREIDRDLAVWLRGNDVARRLMTIPGIGPVSASALAASVTDPHQFRSGRQFAAWLGLTPLQKSSGGKERLGRISKMGDKYLRKLLIVGMTSLVRRAKYNPGKIDPRLADLLARKPTRVATVAMANKTARVIWAIMARGETYRTGHQPALAA

SEQ ID NO: 486327 - protein, 350 aa, unidentified
MNITTIGLDLAKNVFQVHGVDERGKVVLQKQLTRTKVLGFFAKLAPCLIGMEACAGAHYWARELMARGHTVHLMPAQYVKPYVKGNKNDGNDAAGICEAVTRPHMRFVSINTPAQQDTQMLHRIRERLVSARTALINQLRGLCGEYGVVFSAGPASVQRGLVKVLGENAPGLSELALELLLDLHQQWQTLDERIAAYDARVVQACRGDECSQRLDAIPGFGPLTATALVAAVGDATQFPNGRQMAANLGLTPREHSSGGKQRLLGISKRGDVYLRTLLIHGARTVLQYAANKTDRLSRWVMAVQARRGKNVAAVALANKLARIAWAVLARGRTYQVDWQERVTAPFAGGA

SEQ ID NO: 486328 - protein, 412 aa, unidentified
MKRIRERVAGLDVHRDTVVACCQVKQPDRSIEVTKQTFATTANGLGQLAAWLSGAGVDTVAMEATGVYWKPVYYCLEGLFDELWLCNAQHVKNVPGRKTDLSDAEWLADVAAHGMVRPSFVPPPEIRELRDVTRYRKTQVEARAKEIQRLEKTLQDAGIKLSSVASKVWSQSSREMIEAMIDGERDPAVLAQMAKSRLRAKIPQLEEAFSGRFGSHHALVCHQVIEHIDFLDRSIATLTADVTERLCPFESAVTILCSIPGVSRTTAEVMISEMGVDMTRFPTSGHLCAWAGVAPASHESAGKRHPAGTRKGSTWLQRALVEAARGASRTKGTYLSAQYSRLARRRGSNKATIAVAHSILDVSWHLLTNGALYDDPGARFFELRHDPAVEAKRLQRRIEDLGFEVSIAPAAA

SEQ ID NO: 486329 - protein, 344 aa, unidentified
MTSMNFIGFDIHKKTISYCVKEAAGEVLAEGTILSTRQSLDVWMRTLCEPWTVAMEATMFTGWIYDYLLPHAAAVKVAHPLMLGAIAAAKKKNDRIDASKIADCLRCNFLPECYMASTEIRERRRTLRYRKLLVRQNVQLRNKVSQMLMESGVVYNKQKLHKVGYFKELMTTNPDIGEGLRPLLTICRETIVRIGKTEGALVRSLARDPLLSDRVQRLMTIPAVGPITALTWVLEVDDVARFGSVKQAISYCGLCGAERSSADMVKRMPISKQRNKHLQSVLVEAAKLGPRLSPDLALVYETEKQKGHANRATIAVARKLVAYLLAVDRSGREFVVAGERREAA

SEQ ID NO: 486330 - protein, 386 aa, unidentified
MESEARVASILYVGLDVHKDSIDIATADAGRDGEIRHIGQIGGELVALDKSLRRLISRGHRLHVVYEAGPCGFVIWRHLVRQGIDCEVVAPSSIPRAPGERIKTDRRDAMLLARLSRSGDLKAVRVPDVADEAFRDLVRAREDAVREQRNARHRLKALLLRNGIGYEGKSAWTAAHLRWLSSLKLAQPAQQIGFQEYLHAITESGARIARLEQALREQLTTWGLRPLVQALQALRGVQVIAAITLVAELQDFMRFEHPRQLMAYLGLVPSEHSTGGRQRQGGITKAGNSAARRMLVEVAWHYRHDARVSPIIARRHDELPKAITDIAWTAQLRLTAKYKRLAARRVMKTKAVVAVARELAGFVWAIGQHVQTTGWAGLPEPGTNAH

SEQ ID NO: 486331 - protein, 351 aa, unidentified
MPMLEGNIDHVIGVDTHRDAHAAAILDRNGGLLGHLEVPSSQAGYEELLGLVAQQAPGRRCWALEGTGCYGAGLASFLADQGEWVTEIDRPKRTGRTQAKSDSLDAIRAGREALSREHLATPRQRGQREALRVLQITRAGAVKVASDARRHLKALLVTAPEPLRAGLRGGTWLRQARACAALTAQSSDPVEYRATVRALRITAERALAAHQEASQLGKELAILVRMVAPALLAQPGVGPVTAAQVLISWSHPGRLRSEAAFAMLAGAAPIEASSGRVVRHRLNRGGDRQLNRALHTIVMLRERYHEPTRCYVARRTAEGRSGREIRRCLKRTVARQLYRLLERTAGRPVAG

SEQ ID NO: 486332 - protein, 366 aa, unidentified
MKKNRTVTKNRNEILKQPKLTIGLDLGDRSSHYCILDEAGNVILEHRLPTTPQGIQQVFSRIPRSRIALETGTHSPWVSRQLTQLGHEVIVAHARNVRLIGESSRKDDQLDARTLARLARIDPELLGPVRHRSAKAQIHLTVIRARAELVRTRTALVNTARGLTKSYGERLRKCGTGQVSRDLGAGLSAELRDVLEPLLGEIESLNERIAEYDRRIERIAKEVYPEVALLQQVKGVGTLIALTYVLTLDDPHRFRRSRDAGCFLGLRPGRRNSGMSEPQMHISKEGDGYLRTLLVQGAHYILGPFGEDSDLRRWGLKLAERGGKNAKKRAIVAVARKLAVLLHKLWVSGEVYEPLRNNHRLMNAVA

SEQ ID NO: 486333 - protein, 346 aa, unidentified
MKITTIGIDLAKEVFQIHGVDEHGKTVLRKQVRRSKMAEFFANLKPCLIGLEACGSSHHWARKLGGFGHTVKLMSPQFVKPYVKTNKHDMADAEAICEAVTRPNMRFVPIKNIEQQAILSVHRARQGFVKARTAQANQIRGLLSEFGIVIPQGIQSIGKRIPDILEDAENGLPGTMRRLLERLNNHLKELDRQVSELELQIKLWHKENEASQRLEAIPGVGPITASAIVATVGDAMEFKNSRQLAAWLGLVPKQYSSGGKQILLGISKRGDTYLRTLLIHGARAVIRFAEKKVEPGSWLYKLIARRNKNIAAVALANKNARIIWVLLTKKTIFHPDHATVVTAATL

SEQ ID NO: 486334 - protein, 379 aa, unidentified
MEAKRKDPPSIRHQCARVEMSSNHSQDRGSDMQVTTYGVDLAKSVFQVHWVETDSGEVRRKMLTRGQLQAFFACRAPGVVAMEACGSAHHWGRTLKALGHQVRVISSQFVRPFVKSNKTDAADAQAIWEAAQRPEMRFVALKSEQQQALMGLHRIRAQLVKQRTMQANQVRGLLYEFGVVVPKSWRALLAQAAPILADASRGEIPDLIRGELQQQLQGLRDLTGRIEQLERSIGAYRAQDEQCRRIEAIPGVGLLSSTAIVGSVGDARTFRSGREFAAFLGLVPRQSGTGGRVKLLGISKRGDPYLRTLLIHGARAVVNHSSRPGRSMPRWLRELLSRRPKNVAIVALANKIARTIWALLAHERTFDDRWGQAMPIPVL

SEQ ID NO: 486335 - protein, 330 aa, unidentified
MFQVHGVDDAGAVTIRKRISRSKMLEFFADLGPCLIGIEACSSAHYWGRELQALGHTVKLMPPSYVKAYLKRSKNDANDAAAICEAVTRPSMRFVPIKTKEQQTALMLHRTRQLLVRQRTMLSNALRGHLAELGIVSAKGRNGTGELLRIIADGADSRLAPAVRGILEVLARQYRAIGTEIGSIDKSILVLHRSCEASRRLAEIPGIGPIVATALVAEIGDWKTFSSGRSLAAWIGLVPKQHTTGGKDRLGSITKQGNRYLRWLLVVGAMAVIRSAKMRGTKNRPWLARLMERRPTKVAAVALANKIARMAWAIMVHGERYKEPKLLMAA

SEQ ID NO: 486336 - protein, 318 aa, unidentified
MAQLHAMVGKHVGEEEDSYQIKIGIETDRGPWVHALVAAGYEVFAVNPLQAARYRERHSVSGAKSDRADAHVLADMVRTDSHQLRAVAADSALVEAIKVVARAHKTLIWERTRHSLRMRHALREYFPAALEAFDDLAAPDALALLTKAADPATAARLSLSQISAALKRARRRNVAEKAAAIQAALRTPQLRQPEPVNAAYGVTVRSSAAVLAVLNAQIATMAAQVDAHFGQHPAADIVLSQPGLGTILGARVLAEFGDAPDRYASAKARKNYAGTSPITRASGKRKTVMARFVHNDRLIDALHAQAFAALNASPGARA

SEQ ID NO: 486337 - protein, 323 aa, unidentified
MSTKATKKRRSFIGIDVSKKLLEVGVHQSDYHFRCPNDPKNFPALITELISLRPARILLEATGGLERALLQALHAAGLPVVVVNPRQVRDFAKALGLLAKTDRLDARVLAHFAAAIQPAIRPVKAQQETELDALMGRRTQLSDMLVQEKNRRGSAATKDTRDDIEEHIEWLEERIQELDEKLKEQLKCSAVWQQKDKILQSVKGIGFVTSLSLLAGCPELGQLNRHQVAKLVGVAPLNRDSGQQRGARHIWGGRAQVRGKLYMATMAAIRFNPVLKSFYERLIAKHKPKKVAMVACMSKLLTIINVLIRENKLWNVDAQQLSA

SEQ ID NO: 486338 - protein, 315 aa, unidentified
MADLVTPIMCGIDVSLETLDIAISDDQVETIPNQASDIKCWLNSLPEQTCLAMEATGHYHEILLDLALTAKLSVYLINGRQLRHYREAVGPRAKTDTADALLLRRYLQREHRDLKPVKILNKKEKRIWKLLKRRAALVKVRVQLGQSLGGLSETQEVVREITVKINTTIRQLEHLMRSLARELGWQGLIANCQSMPGIGPLNALALATCYNRGDFRNSDQFVAFLGLDVRVRDSGKLRGKRKLTKRGDPEMRRLLYNAAMSFARDPRYKPLYERLRERGLSSTAAYVILARKLVRVTFTLMAKDIEFDPKSFRAA

SEQ ID NO: 486339 - protein, 342 aa, unidentified
MSEVTIIGIDLAKRVFQLHGAREDGSVVFRKKLSRGQILVFLAQQPACVVAMEACATAHGWGREFEKLGHDVRLIPPVYVKPFVKRQKNDAADAEAIVEAALRPTMRFVAVKTADQQARAMLFRTRQMFVGQRTQMINALRGHLAEHGLVAATGTAQLKRLADAIEDSETALPEGVRDLSQMYLGQIAGLNARVAELDQKMRAAAKEADVARRFQTMPGVGPITALAIETFAPDLATFRRGRDFAAWLGLVPKQHSTGGKARLGKTSKMGQRDIRTLLVSGAMAVLQAVERFGIPNNGWLTRMRARKPRMVVAIALANKMARGLWAMMTKQEDYRNPVATMA

SEQ ID NO: 486340 - protein, 400 aa, unidentified
MKEFNAKAVHIETMSALDTVRQAKDSRNYPAYIGLDVHKETIAVSVARAGRSEPDACREIANTPKKVAELIDRLNQEFDGVVLLFCYEAGPCGYGLYRQILGLGHDCQVIAPSLIPKKPGEKIKTDKRDAQKLARCSRAGDLTAVWVPDEEQEAMRDLTRARGDMKQLETKARQQLNGYVLYHGHAWPSSKARWTKTHYNWLESLKFAHDWQQVVLQEYIDGAKAATQRVVSMTTQLERVLPQWSLAPIVYSLVALRGIDKLSAMVIMAELGDISRFKSPKQLMSYLGLVPSEHSSGGRRRQGSITKTGNSHARRMLVECAWSYRFQARQTAHLKRKAVTASNEAKAIAWKAQKRLCGRYRTLLQAGKNTKQTTVAIARELIGFIWDITCVEMRKIQHAA

SEQ ID NO: 486341 - protein, 343 aa, unidentified
MQVVTTIGLDIAKSVFQVHGVDAQGRVVVRRQLKRRYVLPFFKKLSPCLVGIEACATSHHWSRELQALRHTVRLMPPAYVKSYLKRQKNDAADAEAICEAVARPNMRFVETKTAEQQSCLMLHRTRHLFVRQQNAVINSIRAHLAELGIVAPVGRNGVEELLDVVADPEDDRVPEVARECLAALGAQLRMLKAQILEFDQRIVAWHRSNETSKRLDEIPGVGPALATVLVASVADPRAFRSGRDFSAWIGLVPKQNSSGGKEKLGNITKRGDRYLRSLFTAGAPAVIRYAKLHGTKHRPWLTALLARRPTKVAAIALANKIARMAWAMMAKGERYKEPAALAA

SEQ ID NO: 486342 - protein, 331 aa, unidentified
MSVNQQGREAVAVLRPCAGIDVSKAHLDAAWAGRTERVSNDAGGWDALAAKFKAAGVDVVVMEATGGYENAAACALQAAGLAVVVLNPRQARDFAKALGELAKTDRIDARVLEQFAGVIARHPQRERYIRELPEAQRSHLAALVMRRRQLLAMRTEEANRLELAHRATQQSLRAMLKAIDKQLAAVDHDIDQHMQHHFKEVAGLLESAPGIGDVSTSTLVALLGELGQLPRRPIAKLVGVAPLARDSGTHRGARAVWGGRSEVRTVLYMATLTAIRHNPAIRQFHQRLIAKGKPSKVAIVACMRKLLTILNAMVRDGTCWDNSRHLKTTPD

SEQ ID NO: 486343 - protein, 457 aa, unidentified
MSQRRRKSRKSQINMNNLPPHLRHINLFAAGIDIGSDRHLVAVPEGSDKVSVRQFGAFTSDLHEIADWLKRCGVTTVAMESTGVYWIPLFELLEQRGFEVKLVDARHVKNVSGRKSDVLDCQWLQQLHTYGLLQGAFRPSDEICVLRSYMRQKEMLTQASSMHVQHMQKALQQMNVLLHNVVSDITGVTGMKIIKAIIAGERDPNVLAVNRQKECRNTEQTIAKSLVGNFRDEHMFALKQALDLYEFYQAKIAECEAAIVKHLGSRPDITDDQPPESGKTVRARERMRAGVDVRHKLFKMTGVDLFATPGLAADTLLTLASEVGFDLRSWPTVKHFTSWLGLCPGTRVSGGKALDRRTKRNANRAAQAFRMAASSLARSQTALGAFYRRIRSRTGGKQAITATAHKLARLFYFMLTRGTTYVEQGQLQYEQKFKEQRIKALKKQAHSLGYQLLQLAS

SEQ ID NO: 486344 - protein, 373 aa, unidentified
MPKYSTAFGMDVHLRSTTVCALDADTGEAVTRRFPGNPWGEIAGWMDGFPGPSLAAYESGYLGFAPQRELAGLGVECVVAAVSKIPRSAADSASKNDRNDAARMAKAILAHDISPVWVPSPEVEGIRDLAGAYDGATARLATAKQRLLAFLAKRGFVYGGTTPAGNPRKYWTYDFLRWLDKVRPEDDGGVRTLAALRNEVEAAAEARADLLSEYRAAVDASPIAAEVAALQSIKGCAFALAAAFSAEVGDFTRFRSGRQVTAYFGLAPSQRSSGDSVRLGGISGAGNALVRKLAVEGSWCYAAARHQPKLMPRDTGVPLKIRMHGRKGSERLLRRREELLARGVPAAKANAATAAELVRWLWALGAMCREATE

SEQ ID NO: 486345 - protein, 405 aa, unidentified
MQNVYERCCGIDVHKKLIVACFRNGEKAELRKFDTLTSSIKELGNWLLDNGCQMVAMESTGAYWKPIYNILELLNLDVMVVNAHHMKNVPGRKTDVKDAEWIADLLQHGLLKASYIPDREQRELREIVRYRKNLVEERSREINRLEKTLEGANIKLSSFVSDLTGVSSRNILQLALTGEVNEENIENLMHPSMKATKSQLFQAMDGVLSPVQKKLVRAILDHIDDMTRRIQDLDKIIDDQIRVYENAIKNIDELPGIGKRSAEVILAEIGTDMNRFPSAAHLASWSGLCPGNNESAGKRKSGKTTKGNRYLKSTLIQCAKAAIKNKDSFFHAQYQRLVVRRGANRATVAVAHSMLIAIYHILKDDVPFKDLSSDYYTKFNTEAKARYYIKKLQDLGLSVPVSLAT

SEQ ID NO: 486346 - protein, 475 aa, unidentified
MRELDGIIDGDRYFLSPRIETLKAILAKIRPEPPKASHPSGEPVCEPLSPPPKRYAPPRAFLGGTDRCYGRAAGTWQLRRCINRWSAAMPQPNDLSRSLVALDHNSTIIAVVEMSQSSWLVGGMLPGIERQPRKKLEPSPERLLALLHRWRDEAVKAGRTITRIALAFEAGRDGFWLARWLAARGIEAHVIHASSVAVSREHRRAKTDRLDTELLKRGFLGWLRGERGHCSMARVPTLAEEDAKRPNRERDCLVGERTRIVNRIKSTLVRLGIRNFKPTLRKAAERLATVHTPEGTPLPPNTLAELQRDMARLGFVISQIREIEEARQKRLEQQHETGAHDMVRQLARIVGVGVETADLLVHELLSRPMRDRRAVARYAGLTGSPDESGARRREQGLARAGNARVRRSMIQLAWRFLMFQKESALALWYRARTADSRSGTRKTMIVALARKLIIALWRFVTTGEPLEGVVLRPAS

SEQ ID NO: 486347 - protein, 411 aa, unidentified
MLFVGDDWAEDHHDVEIQDETGRKLAARRLPEGAAGIARLHELIAAHLGEGGDPGQVAVAIETDRGLWVQALVAAGYQVFGLNPKQVARFKERYNLSGAKSDAADAHALADMVRAERHQLRAVAADTAGSQAIKVVARAHQTLIWERTRHTLRLRSALREFFPAALVACTDLGLTATDTLELLARAPAPAAAAKLTLSQISAALKRARRRDIPARATVIKDALRAPQLAQPAAITAAYAASVQATAAVLTTLNEQITRLETQVEAHFLQHPDAQVYLSQPGVGPVNGARVLAEFGDAPGRYASAKARKNYAGSSPITRASGRSKIVLARFIRNNRLTDALHSQALSALTTSPGARAYYDRQRARGLGHNASLRQLSNRLVGILHGCLKTSTRYNEATAWPGDVVLTEPLAA

SEQ ID NO: 486348 - protein, 461 aa, unidentified
MSAKKPTGKQKGAVQKKADWKGLEIVHPDAAGIDVGGSEHWVAVSPDRDLEPVRRFGCFTADLREMGRWLVEKGVRSVAMQSTGVYWMPVFEVLEQQGLEVYLVNAQHTKNVPGRKSDVQECQWLLKLHAFGLLNNSFQPTDEIRIARTLWRQRGNLVAEASSVIQRMQKVLTEMNVQLSNVLSDISGLSGMNIIGAILEGERDPWELAALVESGVKATQEDIAKSLEGNWREELLFVLRQQVELYRIYQEKITDCDLPLRRHLESFTSKLDLKTQPIGPRPKGKKNSRNAPSFDLRTELYRITGIDWTQINGIDVLTAQTVIAEAGGDLSAFPNEKQFASWLGLCPTNEQSGGKILNRRTRKVVNRATVAFRNAAMTLVRSQSYLGAQYRRLRTRLGAPKAITAMARKLACLFYRLIKHGQQYVDKGTEYYEARYREQQIRSVAKRAQKLGLQLVIPKTA

SEQ ID NO: 486349 - protein, 419 aa, unidentified
MTRKDYSKIIRIVHPICCGLDVHKESVSACVIFPDDKGEEQYEVKVFGTFTDDLTRLREWLLEHDCPVVAMESTGVYWRPVHNVLEETVQVVLVNARDMRNVSGRKTDIGDSRWIAGLLRHGLLKGSFIPPKTVRQWRDLTRLRKKYVQSAGDYRKRTHKLFESANIKIDSVVSDLFGVTGRNLMQLLVTDRKLTLSDIQTCVRGKLKGKEAELFRSIQGFFTDHHRFVLKTILKTIAMLEAQIEALDHEIHRVMKGHEPLLDRMKEAPGISDVSSCDILAEIGPTLDSFPTDTALVSWSGLCPGNNESAGKRKSGRSPVRKHHLKAIMLEVAWAAVKKKGSYFKDKYYRLKARRGAKKAIVAIAHRILLGIYHVIKDGVVFRDLGEDYLTLRNKSQRVFHLRKQALALGFDIVPQTAQ

SEQ ID NO: 486350 - protein, 346 aa, unidentified
MSKLYVGVDWHKRTSTWVAINEERKKVYKKVWDCTPEAVKVAVSSLPTQPEEMKLAVEPVCGWRWMTDLCEEIGIDVRIANTVKLRQIADSGKKTDKNDALTLAELLRADYLPEAYKVPTDIYELRMLVRERAHFISQSTATKCRIHSICTQRGSHVTAEQPLHKIGKETLYTKESGLYEMYHSLEETKVHVTNLEKRILETIKETETYQILLTLPGVGPVTASAIYAEVSDFRRFDSPSALISYAGIYPKERSSGEMKRYGSISKAGSRVLRYSIIEAAMRIRDTEKSHNLYTHYLSAKARNKTPKQARIVVAHKLLTIAWHLVNKGLKYDDHLVKPAQREITSY

SEQ ID NO: 486351 - protein, 374 aa, unidentified
MSHHSEAFVAFDTSKLRNAVAIAETGRAGEVRFVGEVDSTGIATAKLVKKLAAKYDRLTFCYEAGPTGYGLYRQIRTLGHDCIVAAPSLIPQKPGDRVKTNRRDALSLAKLLRAGELTAVWVPDERHEAMRDLSRARGAAVEDLRGKRQQVSSFLLRHGLHYPGKKTWTKAHTVWLASLKLAHAEQRIAFEEMLLAVRQAQERIERLEQAIRAAVADWSLAEVVTALMAMRGLDLISATTFLAEIGDLSRFQTPRELMAYLGLVPSEASTGDTVRRGPITKTGNRRARRILVECSWSYQHAPRVGKKKLEKVAAAPSVVREIAWKAQCRLCARYRALIRKGKPKNVAVTAIAREFAGFIWAVSREATSAGAAAA

SEQ ID NO: 486352 - protein, 341 aa, unidentified
MGQASTIGLDIAKWVFQAHGADATGRVVFRKRLVRAKVLEFFAGQPPCLVALEACGGAHYWARELGKLGHTVRLIPPAYVKPFVKRQKNDVADAEAICEAAQRPGMRFVPVKDEAQQANAVVFRARDLLVRQRTQCINALRGHLAEYGHVVPQGPAHVDSLVALVEDPKSSVPESARGILQVLIRTLNALEEQLKELDGEIARRAKTDPVARRLMTIPGIGPIAATAITALVPAPEGFRAGRDFAAWLGLTPLQNSTGGKHKLGAISKMGERTIRRLLILGASAVVRWASRRGAAAGSWLARMLARKPRMLVTTALANKMARIVWALLVKGGTYRAPAVAA

SEQ ID NO: 486353 - protein, 348 aa, unidentified
MVADQLDYVVGVDPHRDRHAVGVVDVRSGVVVFETSVAADSGGYAKALRLAEAHAPGRRAFAVEGTGSYGAGLTRFLTSNGERVFEVGRLPRERRGGGKTDALDAVRAARSVLAQERPATPRTSGEREALRALMAAREGAANAKRAGLCQLRALLVTTPEPLRDELRSLTRARLLACLAATRPERRADPELRGILLALRAVARRVQQLTVEERELAREIKTLTEKLAPQLLDQPGVGPLLAAQVVLSWSHKGRIRSEAAFAHLAGVAPIPASSGQTVRYRLDRSGDRQLNRALHMIVTTRRRSHPATIAYIERRISEGKTRREANRCLKRYLARGLFRLLENGAPQDA

SEQ ID NO: 486354 - protein, 374 aa, unidentified
MNQIIRIGMDTSKSVFELHGVDAAEQPVLRKKLRRQQVLSFFAKLPPTRVGLEACGGAHHWGRELAALGHEPALMPAQYVAPYVKRNKNDGIDAEAACEAMGRPSMRFVPVKSAEQQAALMLASVRERLIMRRTQLSNMIRGHAAEFGLVAAQGLDKLELLLARITIDSGVPPLARELFTMLAQEYDALKLRLRKIEARLMAWHRQNAQSRRLAEIPGIGPIGAALLAMKVTDPRAFRSGRDLAAWVGLTPKDHSTGGKQRLGGITRAGDEALRSVLVAGAMSVIQQVKNGRGHPPPWLVALLKRKPKKLAAVALANKNVRIVWKLMISGERYQASCAAAAPRRCAALADGSAPRPKGAARSKPCRPVVRAAQA

SEQ ID NO: 486355 - protein, 318 aa, unidentified
MNTKLKQSINVGVDTGKTQLDIHIRPLDIFFSVENTDKGIKEALRIINKYSPERIVIEATGRLEMPFVLACAEAYLPIVRANPVHIKRFAGAIGRRAKNDRLDAELIAHYGDAIKPQLTIVKAENIRLMSDLVIRRNQLLSMQTMEKNRIQVLPKSLHSTIKPMLTAMKNQITKIENKLVKLIEDSPEYQAKNTILQSVPGIGNIAAASIISNVPELGYITNKQAASLIGVAPITRESGRYKGKRVIQGGRTQVRTVLYMAMMSAMQCNPVFKATYTRLVAAGKPKKVAIIACVRKMVVILNTMLRDGVMWDENIAKN

SEQ ID NO: 486356 - protein, 400 aa, unidentified
MPFHGGLDWGSASHAVCVINETGQVVTRIEVRHDADGLAGMLARLKRIAPPAELPIAIERPSGLIVEALVAAGHPVIPIHPNVVKACRPRYRAAGSKSDPGDAYMLADILRTDGHRFRPLMPASDEIKALRPLVRGRDDLVAQRVALANQLRSLLEDFWPGAAVLFAAIDSPITLAFIDRYPTPGSASRLGEKRLASFLAQHAHPGRRSGAELLARLRAAPAGLASDAEAEAKREIARVLAVMLERLVAEIAKLSSRIERAVAQLPDGRIIMSFPRAGRINAAQILAELGDVRERFPTEDQLAAAAGVCPVTHASGKSRGVVFRWACNKSLRTAITCFADNSRHHSAWAASIYRKARNRGCKHAHAVRILARAWVRVLWRAWQDRTPYDPVSHAGAARLA

SEQ ID NO: 486357 - protein, 337 aa, unidentified
MEREYVGIDLHRRRSVIIRKNAAGELISKVHIDNSAEALVAAVAAAGPEPEVVIEATFGWYWAVDLLTEMGAHVHLAHPLGNNWGNRRVKNDERDAADLVDLLRLGRLAESWIAPPEVRELRELVRYRHKLVRLRAGLKAQVHAVMGKHGVLPTRTDMFGPGGTAQLDALELPDGYARRLASLRALIKVYDTDIAELDRTIAASLVHHRGYQVIQALNGVGPIVAAVLVTEIGDITRFPSPDRLCSWAGMTPTHRESDTKVKRGSITKQGSRLIRWAAVEAVSKNHGDDLIKAAYRRIAERRGRNIAKVAAARRLLTLVYYGLRDGEIRCLTGPARG

SEQ ID NO: 486358 - protein, 310 aa, unidentified
MTAYVGIDVAKATLVLCLQPEGRTWKRPNTPAGQAQVVAELQAVQPERIALEATGGYERAIWQQLQAAGLTVVRLQPRRVKALARALGWQAKTDPLDAALLAEAARILVVPVTMAPDAATEALRALVDLRRQLVSQRDDNQRRLKQSSAVVAQRVLNRINASLQREIHQLDRKIKAQLAVTAAPDLATAPGVGPVLQATLAARLPELGRLDRRQIAALVGIAPYNADSGAHQGKRHIRGGRADLRRVLYMATLASIRANSIIATTYRQLLARGKLKKVAIVACMRKLLIMLNAMARDHTTWAPPTLSGAA

SEQ ID NO: 486359 - protein, 383 aa, unidentified
MTDRIGAPTVAQDDRIYGALELSRESWLVVLRVGVSGRLSRHRLAAGDVAGLLGVLDRAGRGRGMRAASCYEAGPDGFWLHRRLVAAGVENVVIDATSVAVDRRSRRRKTDRLDGEAMVQALIEWLGGKKRALRVVAVPSPALEDARRTERERGRLVKERTGHMNRMRGLLTGLGIAAGGRLAAPDWPAWLDRQRQWDGTPVPVHLAAELGREHARLMQIDRQLAALACAPASLPPEAAKQADALLQLKGVGRAISTGLAGEALWRGFTNRRQVGAYLGLDPSPWQSGAVAHEQGIGRAGNRRARTLMIQAAWLWLQHQPGQALSRWFHDKVGDRTGWVRRSAIVALARKLAVLFWRIATTGLIPDDVQLKPAAMKPAAMTAA

SEQ ID NO: 486360 - protein, 391 aa, unidentified
MFYVGIDIAKKNHEASIIDSSGKLLDKSISFSNSQAGCDKLISFFGKLKANTSNTIIGMEATGHYWVSLYSYLIDLGFTVYVINPIQSDAFRKMYIRQTKNDSKDSFIIAQIMRFGEFSTTSLVDEDIMALRQLSRYRLALVDECSDWKRKCIALLDQVFPEYSKLFSNTFGVTSKELLSKYPTPEDMLSVDTNSLAELLSKASKGRFGILKANEIQESASNTFGVGFAKDAFAFQIKQIIAQINFIEEQLKELETEISNLLHKTNTIITTITGIGDVLGAIIIGEISDISRFEKASQLVAYAGLDVAVRQSGDFEGTKTKISKRGSPYLRRAIWLAATVAAFKDPALSVYYQSLRARGKHHLTAIGAVARKMCNIIFAVLRDNKPYVSHI

SEQ ID NO: 486361 - protein, 415 aa, unidentified
MQVQYERCCGIDVHKDTATACLIIPGVDGQPVKETRTLSTMTGDLNVLAQWLNDKGCTHVAMESTGVYWKPVYNLLEGTFEILVVNPTVIKKLKNKTDVADAEWIADLLRHGLLRGSFIPSAQQRILRDLTRYRTTLLDDRTREVNRLQKVLEDANLKLASVATDIMGVSGRAILTQLIEGQTDPTTLAELAKGKLRKKQALLEKALAGRLKPHHRFMLIQHLSHIDSLDELLAQLDAEIEEQMRPFQAGRLKPHHRFMLIQHLSHIDSLDELLAQLDAEIEEQMRPFQATVDRWDQLPGINQRGAQVIVAEVGADLKQFATAEHLASWAAMCPGNNQSGGKRKSGKTNKGNVWLRRALVEAAHGAARTKKSYFSALYHRLAGRRGKKRAKVAVGHSLLVTGYHSVASSHNQKYP

SEQ ID NO: 486362 - protein, 338 aa, unidentified
MNNSHIIGIDLGKNSFHLVGHDHAGNQLFKKKLTRQKLLEFLSCHEPVIIAMESCGGSHWLARKCTEFGHTAKLIPPQYVKPYVKTNKNDFIDADAIAEAASRPTMRFSSAKTESAQVISTIRKIRSGYIRERTACMNRIGSILLEFGISLPKGHASMKGLFQWLVDKNQNLPPLIIFELSELHEHNQNLNERIDSQADKVERILADNEQMKQLQSVPGIGPVIASACLSSVGNPNDFKNGRNFAAWIGLVPIQYSTGGKSTLLGISKRGNKELRTLFIHAARSILWRDKSVKKYFGSWLVELKKRKPFNVAVVALANKIARIAWAVLVSKKSFEIRT

SEQ ID NO: 486363 - protein, 412 aa, unidentified
MQDILTCAMGLDVHRDVIVACLAKGELGTDPEIEIRSFSTLIPEMRKLRDWVIETGCHHIAMESTGIYWQPIYEMLEPCFDGQISILVVNARHMKNVPGRKTDMRDAQWIATLLRAGLLKGSFIPDKTFRELRHLTRYRKSIVHDITAQKNRIDKFLQSSGFRFTAFLSDAFGASGRNIIRHLMEHGSISKEALDKCLKTQTRKRIDEILVSLNGSLSEHQRSFLQMTFGHLELLEQHRHAVEDAIAEEIVKHENALGLLCSIPGIDVTAAAAIIAEIGTDMSAFPDSQHICSWAGLSPGNNESAGKRKSAHINKGNPYLKSMLCEVGWVIAGKRTLYLSGWYWRIKQRKGAKRATIALARKLLALIYTMLKTETPYNEECFEIRRKQSERKRASRMVNELQKMGYFVVAPD

SEQ ID NO: 486364 - protein, 391 aa, unidentified
MLKGAPQPPQAAIRTDLGAIFVSIELSHRTWLITSLSPGAGEKMSKHSVPASDVAGLLHRFAELRRKAAMRTGRDFPIIVIQEAGLDGFWIHRVLQSEGIESHVVDPASILTSRRRRRAKTDRIDGETLVRTLMAFKRGEPRVCSMTRAPTPQEEDRRRVCRERRTLIGERVRHVNRIKGLLFAQGVFGYEPLRKSRRERLEDLRTGDGRPLPVHLKAQIIRELDRLELVLAQLKTVAAERDALLKPATEEAASPPAMLVQLKGIGPEIAAVLWSEGLFRRFDNRRQVAAYAGLAPTPWQSGSIDREQGVSKAGNPRLRTAMVELAWLWLQNQPTSALSLWFHERVERLGGRMRKTIIVALARKLLVALWRYTTAGVVIEGAVMKTAPVTI

SEQ ID NO: 486365 - protein, 359 aa, unidentified
MSQHTFIGLDVHARSVWAGVLDGVTGEVRSCSAPVCTSELVPWLRAQGEALAVAYEAGPTGFGLARACEAVQIPCLVAAPSKIARAPGERVKTDRRDALRLAKLLRLDELTAVRVPSACEEGARDLVRAREDARSDLMRARHRLSKLLLRQGLVWEAGAWTQAHERWLATQRFAERGLQIAYGEALAAVASVRARRDALDAAIVEEAAEPRWAEVVGRLSCLRGVSTLTAFGLAAEIGDWERFDGRSIGAYLGLVPSENSSGERRRQGAITKTGNGHARRLLVEAAWQQRRPSSHPSRELTRRRAGQPALVRVRAEAAGRRLHQRWRRFDARGKRSTVAAVAVARELAGWCWSLAVMDA

SEQ ID NO: 486366 - protein, 442 aa, unidentified
MLRRIYKRVAGLDVHKKTVTATRMRITADERLQWETETFGTTTPELLQLHDWLLAWECTHVAMESTGEYWKPVYNVLEDTFELLVVNAQHVHRVPGRKTDVTDAEWLAELQLHGLLKASFVPPKPQRALRELTRYRTRLVQERVRVVNRVQKLLEGANIKLSSVASDIMGVSGRAMLAEIVDGSTDAAALADLARGRMRSKIPALKQALTGRVGDHHRFLLAKQLAHIDFLDEQIADLETAIERQIETLPPLAGAPEAPTDAGATPAGEPDDEPLTWTKAMVLLCSIPGVDFHTAAVILAEIGIDMNQFPTAGHLAAWAGVAPGNHESAGKRYSGRTRKGNRALTSALVQAAWGAVRTKGTFLKARYHRLAARRGKKRAIVAVAHSMLVSIWHMLTLRQPYRELGSDFFDERKREATVSYLTRRLEKLTGGEVRIELQTAAT

SEQ ID NO: 486367 - protein, 416 aa, unidentified
MNAVGIDVSSRKSTVAVLRPLGEVVCLPFDVTHDIAGLASLVEKLKALDGETRVVMEHTGRYYEAVEKALHEAGLFVCAVNPLLIKEYGANSLRRVKTDKADAVKIARYALDNWADLRDFTPMDAIRYDLKTLNRQFQLASKQRTASANNLIALLEQSFPGIRKCFDSPVRSDGTQKWVDFAHSFWHVDCVRKQPFAAFCERYRKWCKRHAYLFKLSNAEEVYALAKRAVVLTPKSKVVKVLVQEAANQLSSISRSVEVYRAEMDRLAAMLPEYPVVMAMYGVGKSYGPQLMAEIGDVRRFERKQALIAFAGIDPMPNQSGDKNVRSNKSSKRGSPYLRKTLFNVIRTYLQCAPQDEPVFQFLNRKRAEGKPFYVYMLAAANKFLRRYYAKLRDYFASLDTLQSVDPIPATLKASL

SEQ ID NO: 486368 - protein, 399 aa, unidentified
MDPVIGLDIAKGESQVQAFLQRKKTYKQSFKFAHDLQGLNVFYQFYQEVEQVSGQPPAVIFESTGHYHMPVLQFLENQDITYYLINPVISYEARKTSLRKVKTDKADAFHLGELYYKEDLDSYQKKTEKALNLRLLTRQHSALTESYVDIKLQFQAALDQVFPEFQSVFSDLYGTLSLNTLAHYPTALDIQRAMPQELADGMRQFGARRSKAWFLDKASQLKEASKRNPFQSPVCHGQLVSLNMYIQMLFQFQQHLSKLKKEIDALAKTFEDYELLKSIPGIGNKIAATIISEIGDINLFQHPKKLVAFAGLDPSVFESGKFKASISHITKRGSSRLRQVLYSAVQCGLAKNRNKKLIAYYQRKRNEGKPHKVAVIACANKLVHWIHAILKNKKVFVDL

SEQ ID NO: 486369 - protein, 385 aa, unidentified
MAPTRMPEAVIGLDVGKSSHWACVATRDGEVLLSAPVANREGDLDSLFGRFPDALVVVDQSRNIGALALARARAAGMSAAYLPGLAAHGAARLFAGDAKTDERDAMVIAKTALGIPDALLPVGDPGPTIAAARALAAQRNFLTCENTRNKNRLRSILLESCPAFEALVDLSDGSQLRLMASLGGAWSVADAGPRRAAALTRGAARGKIEALVRSTASSTRPDASAVAAEDRAVKLLARRISENSAEIEAITAEISALLEGDDTYRCLLTVPGIGPKTASELAISIDIEDFPSHDRLASYCGLAPRNRQSGTSISSVTASRQGNKRLKNLLIFSCNCLTRTEGRWGDYYTRCRERGMSHGKALKALARKRLKVIYAVMRDRVPYAA

SEQ ID NO: 486370 - protein, 316 aa, unidentified
MVFKCFIGVDVSRGWVDIAVHGVTAVQRIDNTAEAIGGWARALDSAGVGLIAFEPTGGYERTLRRCLVEAGLPFARVHPNEIAAFRGRRGGKVKTDRLDAILLAAFAAVELSGRGLTAVDGDAVLAEMVARRRQLVAMLQAERCRAATAHGAWVKDSLATLTATLAAALDALDAAIASHVAATPALADAAACLRTLKGTGPVTAATLLGELPELGRLSGKEIAALVGLAPCTRESGKQRGRARTGHGRAGVRQVLFNAARSAIRWNPVMRNFYERLVGERRRPGKVALVAVMRKMLVTLNAMARERKPWKHACQPA

SEQ ID NO: 486371 - protein, 346 aa, unidentified
MKITTIGVDLAKNIFQIHGVDTHDKPVVRRALKRGEMLPYFANLEPCLIGMEACGSAHYWARKLMEYGHTVKLMAPQFVKPYVKSNKNDARDAEAICEAVARPDMRFVPTKNVEQQAVTSLHRARQGFIKARTAQGNQIRGLLSEYGLIIPQGISYISKRVPDILEDAENGLPGTMRGLIDRLTEHLKELDKQVLALDKEIKQELASNELGKKLTEIPGIGPLTASALVATIGDAKNFARGRELAAWLGLVPRQCSSGGKSVLLGISKRGDTYLRTLLIHGARSVLQYVEGKQDKTSEWAQRLLARRNKNVAAVALANKNARIVWALLTKESMFRPDYAAVQPTAA

SEQ ID NO: 486372 - protein, 361 aa, unidentified
MSTIAEDDVRVVAGVDTHKEFHVVVVLDELGRQLDMATFAATPRGYRELTGWVTDFGEVLAIGVEGTGSWGAGLCRHLRERGLNVIEVNQPDRHKRRRKGKSDRLDAEVAARAVLAGDATALPKSGDGPVEALRQIRVARAGAMKARTAAANQLHSVCDTAPDQIRSQLRGLSTRRKIAIASRYRPGDPLTPTGAAKRALVTIARRWAALDAEIAELDRAIKTILDAIAAPLLARHGVGYETAGALLCTAGDNPERLATEASFASLCGTAPVPISTGNSNRRRLNRAGDRRGNSALWTIVMARLRSGHAPTVEYLQRRVAEGHSKRDAIRCLKRFVAREVYGDIQAITAAETTTSPLEIAA

SEQ ID NO: 486373 - protein, 308 aa, unidentified
MNSPLVHLGADISDSHIDLYAPILPGLPTRITNDKKAISRLLKKLQALPRVQIICEATGGCERTLLHACHHAGLPISVLNPRQVRDFARARGHLAKTDQIDARILSEFGSTLLPKTTDPINPRLQKLAILSTRRRQLIDMRSAEKNRSHRADPALAASLRASISFLTHQIATLDRSMAALVKECSLLRAKLLAMTSVQGVGPTSALALLASLPELGSLSKNQAASLAGLAPFNRDSGAFRGQRHIHGGRTPVRNALYMPALVASRSNPFLKPFYLRLRSNGKPAKLALTAVMRKLLIHLNSLLKKLHA

SEQ ID NO: 486374 - protein, 369 aa, unidentified
MENIIYIGMDVHKERLSLCALHGTTGEIVGEARCASNVSLVKKFVEKLKTKYREDINIKARYEAGCLGYSLHNLLEQNGIDCDILAPTTMYSSSKNKMVKNDKFDAKMIALNLANGTYKEVYVPEEEDVAVKEYIRMLGDFKTSLKKIKQQIKAFLLRHGYVYEGISSWTITYMKWVRNLDLQGLFKETLGEYLLQYEVLVDKIERFSLRLEELSHRERYEEPIAKLRCLKGIDTTAAMNVYVEIADFTHFPTAKAFMAYLGLTPIESSSGDKISRSSITKQGNSTVRSTLVECANALVKGTIGLKSKRVKARQKGQQSEVISYADRAVERLQRKYHRMMYQGKPRNVAITAIARELECFIWGLETGKI

SEQ ID NO: 486375 - protein, 339 aa, unidentified
MQKKYFIGIDVSKHTLDVCFIIREQDSLSKPLWQQFANTPTGLKRMQKWLATHKVPLSEQTIAVIENTGIYHRLLWQFFSQLQVDLCIENAAQVKWSLGIARGKNDKVDSRRLALYAVRHADRLKPTPALHQQVTVLKDLLSLRNKLLQQIGSITTGVKELKHAGISASFTKTSVKLLQPAIDGLKQSLKKVEKQIKDTIKKEEVLYNTYKRLITVPGIGHITAIYLICCSNVFTLCTSGKQLACYCGVVPFDYQSGISIKGKHQVHKMANKELKHLLHMCALTSIKNHPEFKNYYNRKKAEGKHALSILNAIKNKLVLRAFAVVKNKRDYVDNFKKIA

SEQ ID NO: 486376 - protein, 383 aa, unidentified
MTGAEPHAEETGLMGTITYVGLDVHKATVCVALAASGRGGEVRQLGVFENRPELLLKLAARLSKGGRPLSFCYEAGPCGYGLHRLLTGCGHDCVVVAPSLIPIKAGDRVKTDRRDAVMLAKLHRAGELTPIWIPDAAHEAMRDLVRARATAGRVLSKARQHLQSFLLRHDQIYRGVRAWTLAYRRWLTTVRFAHRAQQIVLEDYIHAVQGAEARLDRLTRQIEELLPSWSMAPVVAALQAMRGVALVVAVTVVPEVGDFRRFANARQLMAYLGLVPSEHSSGASVRRGGITKAGNVLARRVLIEGAWTYRMPARISRKLHDRNEKLSPAIRDIAWKGQIRLCSRYRRLAAAGKSKVVVTTAIAREMVGFIWAIARIAQPALQG

SEQ ID NO: 486377 - protein, 350 aa, unidentified
MAMTTMTDSTHRVTGGVDTHRDIHVVAALDEHGAELGVESFPTTPAGYRAALRWLRSFGEVRRIGVEGTASYGAGLARFLAAQGLEVVEVNCPNRQRRRSHGKSDPVDAIAAAKAVLSGDAVTQPKAGTGKVEAIRALRTADRSARHARVKALNQMRALLLTGPEDLREQFRGTNVFKLVRTAAKLRPGDPATAHGATKYALRLLAMRVLELESELTELKAILKPLVTAPAPKLIARHGVGFETAGALLVAAGDNPERLRDERAFAHFCGVSPIDASSGTVVRKRLNRGGNRHANSALWRIVMVRMVSDPATRHYMERRTKEGLSKPEAMRCLKRYVARELYPLLAQNAP

SEQ ID NO: 486378 - protein, 402 aa, unidentified
MTYDYVIGMDVGKYFHHACVLDIDGTQVLSKRINQNEKSLRTLFSTFSAHDHKVLVVVDQPNNIGRLTVAVAQDIGIDVRYLPGLAMRQLSRIHAGNAKTDIRDAYIIAHAAKNLPESLRSVDRVEEAFLQLKVLNGIDEDLARSYTRLINQIRSALVGCYPQFEQALRGQIIHRKWVLHLLARYGGPTKVKRLGKAKAAAFARRYKARNPEPVLDAIFAAISEQTVTIAGAHYAEMGIAMSAKDALLKLEHRKQIEQEVIELINDIPHTQILLSMPGIGPKTAAQILMTAGDMSDFPSAGHLASYAGLSPRTNQSGTSIMSNSLNRAGNKKLKNALWQSSFASIRFHERSRQFYERKRRDGKRHNAAVVALARRRLNVLYAMMRNHECYRDPALQQEGIAA

SEQ ID NO: 486379 - protein, 420 aa, unidentified
MKTAQTILHVGLDVHKESIAVALAGSDGSLRRYGTIAGHLQAMDKLIHKLQKPGQELRFCYEAGPFGFVLCRHLRRQGYLCEVVAPSLIPKRAGDQIKTDYRDAEQLARLFRAGELTPVRVPDESDEAVRDLLRGRLSAVFDQRRARQRLKGFLLRLGFRYPGKTSWTPAHMNYLSKLKMPHPAQQIVLEEFIQAVQSATERLERLSTQVQGQLSGWRWEPVVRALMCLRGIGVINAMTLVAEIGDIDRFDNPRQLMSFLGLVPSEHSSGAKRHQGAITKAGNGACRRALIEAAHHYWIAPRVSPSLRVRQHGQAEAVRQIAWKAQQRLYARQRALSARKKKSVVVVTAVARELCGFVWAICRALKPHAPAPNPMLVDGRRSYLLKPPLKFKRGAGRSRLGSSAAAPAARASKEPTSLAS

SEQ ID NO: 486380 - protein, 435 aa, unidentified
MEEAGDEPLFCERAAGIDIGKQMVSVTIRVPSETRRGGRQQETREFGTTRRQLLELADWLRCWGVTRAGMESTSDYWKPVFFLLEREGFDCLLYQASQVKALPGRPKTDRLDSAWLARVTEQGSLAGSFVPPEDIRRLRTHTRYRRRLIQVRTAEKQRVEKLLEDAHLKLSSVISDIHGVSGRDMLSAVIAGERNPRVLAGLARGVMRRKLALLEEALDCSFFTPEHAFVLQMMLGNIDHLTAQIAVLDERIAVLCEPYERQVAQLDAIPGFGVTAAQDLIAEIGVDMSAFPTAGHLASWARLAPRARESGKRKGKSATGRGNPYIGGTLGETAASAGRTRTFLGAKLRRLCRHMPKKKALGAVMRTQLVTAHALLSDPGAEYRELGPGHHEQRAGTRRQARSHVRAIERLGYKVTIEPLDPAAGPRELITRTAS

SEQ ID NO: 486381 - protein, 331 aa, unidentified
MVTKIIAQNERIVIGTDVHDMKHNVAVVDSEGKIVRETAMPAHRRSWENLLKKLPGCQVVVVYEAGPHGYNLHDLVEELGHKCVVVAPCKHVGIKTDKRDARAIARDYRAGRASLVTVPSFEKRVRRQLTRTRESLKKEVRKLKNQINGIQRFHGMGGKGLEAVRHDETGYVSQAINALYQAIADIEDKVKDLEKTMKEVSKEKEYNEDFKTLKGITGVGEATALEVILGVADIHKFSKSKQFSSYLGLCPGEWSSGNSRRLGHISKRGPGRLRGILVQCAWVRVRYDEKEKHKFTEQSRRLGKRRAIVAAARRLAVHIWWSLKESTPQAA

SEQ ID NO: 486382 - protein, 346 aa, unidentified
MNNNNSKGKVTVLGIDLAKNSFQLHGVDKQGNRVLKKKLSRKQLVAFIAQLPPCLIGLEACGGAHHWVRVFSELGHTVKMIAPQFVKPYVKSNKNDAVDAEAICEAVQRPSMRFVPSKSTEQQDIQSVHRVRSLLVGRRTAQANQIRGLLMEYGIVIPQGINQLRKAIPNILEDAENSLSSYFRDLLRELYEEIVHFDERIETIELKLKVISEQNEDCQRLLTIPGIGFLTATALIAAIGDISVFKSGRELAAWIGLVPRQHSTGGKPTLLGISKRGDSYLRTLLIHGGRSVVRVAHKHQDKRNQWIGEIKQRRGENISNVAVANKNARIAWALLTKKQDYCVIGG

SEQ ID NO: 486383 - protein, 339 aa, unidentified
MNYMGIDHHKQYSHMTLMDENGDVLRAGRVLNSRSEVEEFLRGVGEEVEAVIEAGFSSYVMVDLMEALGVRVKIANPSEVKAIAKAKIKTDKRDSKILAHLLRADLIPEVYRRSGENQRDQRVLRQRAFFVATLTRVKNRIHALLAKQNEEVLRDMNKVRDIFSKRGMELLKQLELPSTDKQLLEGLLKTYQHLKERIKESDELVKSLYKKMPEAQLIDTVPGFGSFLSVLVAIEIGDIRRFASAGKLHSYAGVIPTTHSSGERTYHGKLIKEGNRWLKWAAVEAVIPATKKDFDLRLFYTRHARRKDANIAKVATARRLLTIIYKILKERRCFEPYKR

SEQ ID NO: 486384 - protein, 344 aa, unidentified
MDVGKSKCRAALMDQKGNIEKEFFFENNQKGIQHLTSLLTSEDQVVMESTANLWLNLYESLEDKKIKVVLANPMKTKAIASARVKTDKVDAKILAHLLRADLVAESYVPPKQMREIRALVRHRLSLMKMRTMVKNKIHALIDKYGYRCEFSDMFGVSGLKWLKTLELNKLDGLVFGNHLSHIELINLQIEKTDEAIRECACEDEDVRLLLSLPGVDVRTALLLKSEIGPIGRFGDYKKLVSWAGLAPRVYQLGGVLWNGGIAHEGSGVLRWAMVEAAMTAVRCDEKFGVFYGRVKARRGGQKAVVAVANKMLKVVWVMLTRREAYSGVNKRLYEEKLNRVGFDM

SEQ ID NO: 486385 - protein, 369 aa, unidentified
MNDITYVGLDVHKATVCVAIAESGRGGEVREVGIFENRPDVLRKMVARLGKQRHRLNFCYEAGPCGYGLHRLLTGLGHDCVVVAPSLIPMKAGDRVKTDRRDALMLARLHRAGELTPIWIPDAAHEAMRDLVRARATAVRALSKARQHLQGFLLRHDRICHEARAWTLAYRRWLTTVRFDHPAQQIVLQDYIHTVEDAECRRDRLTRQIEELMPTWPMAPVAAALQAMRGVALVVAVTVVAEVGDFRRFTNARQLMAYLGLVPSEHSSGSTVRRAGITKAGNALARRVLIEGAWTYRMSARVSRKLHDRLEPLSAAIRDIAWKAQVRLCARYRRLAATGKPKVVVTTAIAREMVGFIWAIAQVEQRELT

SEQ ID NO: 486386 - protein, 346 aa, unidentified
MKDDLILAVDLAKNSFQVCYMDKNGGVSVNKAISRKSLITLLTGKNNFALVAMEACGGAHYWARLAKRNGHHVKIIPPRAVKGLQLKQKTDKNDAYAIAIAALLPHVSSSNVMTEEEQGLQCLDRARALQLAQRTALSNQVRAFMNEFGIVLPRGVASLMRRLPDILEDAENGLPMSLRQVLKSQADLLEIYTEQIEAYDEQIVVQTKQNKVCQKLSKLEGVGPMVALGLMVRLGDAEEFTKSRDASACIGLTPKQHSTGGKERLGHISKSCADKRLRSLLYQGAMSIVYKVTLRPPKTEKERWLKAMVERRGKKIAAIALANKTVRTAVALIKSDTEYCPLMLRS

SEQ ID NO: 486387 - protein, 310 aa, unidentified
MTPVLCGVDVSSTSLDAAVRHGEAPAARFANSVEGVAGLVAFCREHKVGLVVMEATGGCERLPFSLLWAADIPAAIVNARSVRQFAGAMGLLEKTDRLDAGVIAWYAETKRIGPRPPASATQQRLAALVQRMRQLTALRTDQTNQHRAATDADVKASFLPLLALVKAQLRDLEAEVARLIAADPLWARLDAAFRTVKGVANRTVARLMADLPEIGTLSNKAAAKLTGLAPIANDSGTSSKRRHIRGGRASVRSILFLVAEVVRRHDPDFAAHHAKLTAAGKPKMVVRCALARKLIVRLNAKARDTRNALA

SEQ ID NO: 486388 - protein, 386 aa, unidentified
MPQPKDDLSRSLVAFEQHRTLIAAVELSLATWLVGGIVPGIERDPLKKLVSDEEGLLKLLYRWRDEAVKAGHKITRMVVAFEAGRDGFWLARWLRARGIEAYVIHPTSVAVSREQRRAKTDRLDITLLKRSFLGWLRGEKKHCTMAAVPTLEEEDAKRPTREREQLVGKRTGIVNRMKAALVRLGIRGFNPKLRKAPRQLAGLRTPEGRPIPPNTLAELEREMAHLRFIDEQINQIETSRLKQLKQALQQGANTRVLQLQRVNGLGIETADMLTSEVLSRDLRDQRAVARYAGLTGSPDESGSRRREKGLAKAGNARVRRGMIQLAWRFLVHQKDSALAQWYQASVAAGKKRKTMIVALARKLLIALWRFVTTGDVPQGAVLRPAA

SEQ ID NO: 486389 - protein, 351 aa, unidentified
MKNHKYVAVDVHKASVTMGVRDGAGKCVGHAVVQTKAETIKELIAGLSGTIHVTFEEGSQSAWLYDLLKGRVAECVVCDPRRNKLLESGSKSDHIEVDKLSELLYLGGLRSVYHGDHGTRALKELVHNYESLVKDQTRVKNRLKAIFRGRAISYQGAELYQLKERQQWVSKLNERGVRQRTEQLYEQLAALEPLVVAARQKMLRESRQQKASKNLQYISTLGEISVAELIGTVDTPYRFRSKRQFWTYCGLAVVRHTSSDYRFEQGELQRRRKSGPTRGLNQNYNRRLKKIFKTAALTGSHTGPFKPYYERLVQRGLSPELAQVTLARKIAAVTLNLWKKGERFDPKKLQS

SEQ ID NO: 486390 - protein, 427 aa, unidentified
MVAVMIGVDPHKASHTAVVIGVAEELLAELRVRACASQADRLLAWAQAWPERTWAVEGAGGVGHLLAQQLLAAGERVLDVPPKLAARVRLLQAGNTNKNDPNDARSAAVAALRSPGVREARRDDHAAVLKLWSKRYQDLGRGRTQVACRLHQVLCELIPGGIPGEITAGQAERILASITPAGTVQAARRELAVELTEDLRGADARIRETRQKATMAVAAAGTSLTGLFGVGPVIAAAVIGDVRTVSRFPNRDHFAACNGTAPIEVSSGGRKVYRLSRRGNRRLNHAIHMAAVTQVRYRHSPGRAYYDKKLAEGKTGKEALRCLKRQISDAIFACLQAGARRAATAKSPGGQPGNHSASRAAGSHPGHRRFGQATPGPATHPTAPAAPAAFPAPLPPRANGRTGQGPGAARPRSGARRASSTRPPASR

SEQ ID NO: 486391 - protein, 369 aa, unidentified
MTFYTLKAAPAAGANQIRNSNKSAKAKRIWVGCDVHLRGYQAARKVDEGTIGVVDNFRSEEALLLYIEKQRQQAEQVVVVYEAGPLGVTLYRKLTATGVLCYVCAPDGSQQRKKRRKNDKIDARSLTSKLFNYLNGDRQALPLARVPSEAQEQRRLASRQHDQLVEERKRLGAKGNAMLLSQGLGSWSNWWRPRVWSQLSALAPQWLLERLQIWVDVLKILDEKISQAKAAAARSCSGPRPKGVGALSQMQLQSEVLDWSLYTNRRKIACLAGMVPSEWSTGDKESRGSITKVGVPALRRIIVEMVWRMVLFQPQYKPVQKWQEVLKGPNPALKKKAVVAIGRQLIVDLWRLQTGRLTAQQLHLIMIEN

SEQ ID NO: 486392 - protein, 358 aa, unidentified
MDKIKNSKLDCTGQPVYVGLDVHKKSWSVSVFSRYGEYKSFTQPPQVDTLVSYLKRHFPGGEYHSVYEAGYCGFWIHDQLKERGINCTVVNPADVPTKQKEEQHKRDRVDCRKLARGLCNGEMEGIYVPSRQMREDRTLVRTRQALVKKRTRCKNQIKGMLLFYGIHLTDEQTFAPWSERFIKWIESIRMERDSGNTALKAHLEELAYLRQLIATVNRAILKLAGSAEYATPVKVLKSAPGISTLTAMILLTELCDMARFASLDSLCNYVGLIPAIKRSGETEYVRGITPRRNAHLRWILIEAAWVAVRKDPALMMAFTEYCKRMRKNRAIVKIARKLLNRIRYILKHQTPYVPCIAK

SEQ ID NO: 486393 - protein, 372 aa, unidentified
MPRISRVFVGLDTSKLKISVALAEEGRQGEVRFLGEIDNTPEAVPRLASKLASRHSELLFCYEAGPTGYGLQRQISALGHECVVIAPSLIPKRPGERVKTNRRDALTLARLHRAGELTAIWVPDPGHEAVRELVRARDAAMADLRAKRQHLQSFLLRHGRLFPGRKPWTRAHARWLSELAFEHPAQYLVLREYRQGLEDAEARLERLTQQIADVVTTWSMAPVVEAYQALRGVALLTAVTFVAEIGDVRRFESPRQLMAYLGLVPCESSTGERVRRGSITKAGNTRVRRVLIEGAWTYRFPARMSRLLQERQANLPQIVRTIAWKAQVRLCARYRRLMAAGKRQTVVTTAIAREMAAFLWAIGHAVEPRSAA

SEQ ID NO: 486394 - protein, 349 aa, unidentified
MGEYIAFDSHKHYTFALREDQETGRTKERRIEHAPGAICAYLKDAAAGTPVAVETMGSWYWIVTEIEKAGLQPMLVHARKAKLMMGMINKTDKLDARGLNRLQRNGTLPAVWIPPAELRDLRELTRTRMVLVRQRTRLKNRLQATLQKYGLQVEGCSDVFGVGARRQWTRLLRLLPPQTRWTAQALLDQLDFVERQIKEFEERQRKLLAPTEEMMLLTTLPGVGPILGAVMALEIGDVGRFLTDERLASYSGTTPRVQASGDKTRYGRLRPDVNRYLKWAFVEAANVAAWQSSRHPNRHVSLLYHRLRLRKGHAKAVGAVARHLAEAAYHVLRKKEPYRDPTLGRTSKA

SEQ ID NO: 486395 - protein, 417 aa, unidentified
MKAWNDITHYAGFDWARDHHTVVIVDAQGQIVADFEFEHSLEGWQSFAQNTAAWPNLAVAIETNQGAAVDQLLQREYTVYPVNPLASESYRKRKAPSGTKTDHVDGWGLADALRVDGKGWKPLQPMDPLIQQLRLLCRDEVALIEQRTALVNQLQQALVEYYPVALQAFDDWTLPSAWDFIIEFPTPKALVAAGKRRWEKFLHTHKLWRPQTAAERLALFTQADQFKSSDPLTRAKSQLALSLSKLLRTLQQQLDEYRKTIEALFQNHPDHDLFGSLPGAGKTLAPRLMAAIGTDSERYGDFNVLQCLAGTAPVSYQSGQIHMTKIRWACDKFLRHTVHLWADCFRKGSAWGQTYYKNKRDQGMSHACALRCLGQRLLKIVFTMITDKTPYDAELHARNQLKHGSWVLQLMNANSAS

SEQ ID NO: 486396 - protein, 405 aa, unidentified
MLEAIVKRVAGLDVHKMVIVATILLTQEDGETRKETREFGTFRKHRRQLARWLKRCSIELVVMESTGIFWKSIFETLEIAAIKTYVVNARHVKNVPGRKTDIMDSEWLATLARAGLLKPSFIPPKDLRELRLIGRHRMKLHGMLAGEKNRLHKILDDAGIRLGGVVSDINGVSAREMVAGLIENKPVEELVRCARGRLKAKMKELHDSLSEPISERHKFLLRKIHAHIQVLENEIQEMDDYLFKAMTPYQEQWGILQTLPGVDKFSSAMLLIEIGTDMEQFGSSGQLASWAGMCPGNNESAGKRKSGRARKGNRSVRRVLCEVANAARKTNSQFKGKYQSLVIRRGHKRTIIALGHKVLRVIYSMLKNNQPYWDPGIDYEALTVRRNAPRWLRALNKYGYLPTEA

SEQ ID NO: 486397 - protein, 324 aa, unidentified
MNKYKETFGVDISKAVFDVQGSKCGPHQFSNSPNGFRSFLKLLPDDSLVVMEATGYYHYRLSQFLCKNKIAVSVVNPLSVKRFIEMKLSRVKTDKSDAQSICDYGIYNKVPLYNQISAVQSECRQLLSLKSSYLKRRTSTKNKLHGERVLDVPSKLVVRSLLLDKKHIDRELVKIEKRLLLLVKQSSQRELTLLKSIPGIGDKTAVFLIVATDSFRKFSNASQLCSYLGTTPMIKRSGSSVRGRSRISKMGNRNLRNLMFMCSMSAYKHNRSCKAIHDRIVSKGKSSKLALMAVCNKLIHQAFAIVRSGVEYNPDYVSVRKRLI

SEQ ID NO: 486398 - protein, 420 aa, unidentified
MCLPFIFSLATRLFEVKQSRTNGRDLEGSGALQLNNNEQTNTPMKKELYLGLDVHKDCIITAVAEEGRKGEVRDTGVISNDLHALEKWVGRLRKAHGRDVILRACYEAGPCGFGIARRLKQLGVECEVVAPSLTPKRAGERVKTDRRDARKLARLLRAGELTPVYIPEATDEAIRDLCRARTDAVDDRRRSRHRLKGFLLRHGYRYQGKSSWSAAHERYLRELVLPHPAMKVILEEYLQGIAAAGERIARCEVGMRALLEQWRLAPAVRALMALKGFQTVAAMIVVSELGEVDRFAHPRQVMAYLGLVPTENTSSDKRRQGRITKCGNAHARWLLVECAQHYATPPKVSQHLSRRQQGQPAQVRAISWRAQNRLHSRYTRLLGRRLQRNKAMVAIARELCGFIWELLHTQSCYHVQATSV

SEQ ID NO: 486399 - protein, 312 aa, unidentified
MERIFVGIDIAKDQVDVHVHPTDERFQLSRDDAGLAGLVARLQPLGPRLVVLEATGGYEIPVAAVLASAGVPVAVVNPRQIRDYARATGQLAKTDALDARLMALFAEAVQPEVRPLPTPEAQALGDLVTRRRQLVDMLGAERNRHHQARDLRLQRRIATHIRWLTKALAEIEADLATRIRSSPIWRERDNLLHSVPGVGDITAYTLIADLPELGHLDRRKIAALVGVAPFNRESGHWRGRRMIAGGRPAVRSVLYMATLTAVRFNPAIAHFYQRLTAAGRPKKVALTAAMRKLLTILNAMLRDQRPWQPESA

SEQ ID NO: 486400 - protein, 344 aa, unidentified
MNNHTTIAVDLAKNVFQVAVSHRPGRVDKQVRLSRARFLPFFDQHPNATVLLEACGSSHHWGRELVKRGHRVRLLPPHDVHRYVRRNKTDSADAQALLEASRNHDIRPVPVKSVDQQAIASLHRLRSAFLATRTARINTVRGLLREFGIVFPLGTGRVVARVRLLIDDARAPLPEVIREPIRIACDELDDIHRRVRTLESQLKQVAHQMPQARQLLAVPGIGVLTATALVAFVGDMRRFRSGRRFASYLGLTPREHSSGNRRRLGAISKKGDTYLRMLLIHGARSVLWAAKAKDEPDRLRAWALAIERHRGHNIAAVALANKIARIAWVVTAKEKPYQLFKVAA

SEQ ID NO: 486401 - protein, 387 aa, unidentified
MPASGPRPDQVAVQTSLAAIFVSLELSRSSWLITSLVPGGADKMSKHTVRSGDVAELMVHLAKLRDKAHARAGASFPIIAIQEAGLDGFWVHRVLERAGIESFVVDAASILTSRRRRRAKTDRIDGEALLRTLLAHKRGEPRVCAMVRAPSPEEEDRRRLCRERRTLVAERVAHVNRIKGLLFAQGICDYEPLRSDRRQRLEALRTCDGRPLPPYLKAQIGRELDRLELLLEQLKTVEAERNALLEPANDVAPVAVKALAALRGIGPELTAMLWSECLFRSFRNRRQIAAYAGLAPTPWQSGSVQHEQGVSKSGNPRLRSTMIQLAWLWLRHQPTSELSLWFRERVKRNGGRGKKTAIVALARKLLVALWKFSSSGVVIEGAILKAV

SEQ ID NO: 486402 - protein, 461 aa, unidentified
MNKKRFRGGQKGSARKKVDWKALEIVHPDAAGIDIGGSEHWVAISPDRDAEPVRCFGTFTADLHELARWLVEKGVRSVAMQSTGVYWMPVLEILEQHGREVYLVNAQHTKNVPGRKSDVEECQWLLKLHAFGLLNNSYQPTDEIRVARTLWRQRSNLVAEAASAIQRMQKVLIEMNIQLGNVLSDLSGVSGMTILGAILQGERDPWILASLVQPEVQATPLEVAKSLEGNWREELLFVLNQQVELYRIYQNKIVDCDLQLRKHLETFGSKVNLQTQPIGPKPKGKKGSRNAPHFDLRTELYRITGIDWAQINGMDVLTAQTVIAEAGADLSAFPTEKQFTSWLGLCPTNEQSGGKILKRRTRNVVNRASGAFRNAASSLIRSQSYLGAQYRRLRTRLGAPKAITAMARKLACLFYRLIKHGQQYVDKGTQYYAARYREQQIRSLARRAQKLGLQLVIPETA

SEQ ID NO: 486403 - protein, 412 aa, unidentified
MHHHLSSLLWHIDVHKKLIVACFRKGSRQEVREFGATTRELLELADWLRDGGCEMTAMESTASYWKPLYNILESSDLKAMVVNARHMKAVPGRKTDVKDAEWIADLLQHGLLQPSYIPDKDQRELRELVRYRKSLVGERTRELNRLQKMLEGANIKLSGTVSDINGKSARGILEYLLTGASIDGAKYDEMYERKIIAHNLKATKEQIIDDLNGVMSPLQRRMMKELLAHLDELNIHIKNLDDEIDNFMKPEEKQASQAIQDVTGIGNTSAQAVISVIGTDMGRFPTDRHISSWAGLCPGDNESAKKRKSGKTRKGNSLLRTTLITCAHAAVKNKKSYFHAQFMRISAHRGSKRAYVAVAHSMLIAIYHILKDGVAFKDLGADYYNQFNKERKINAYLKKLKALGWEVPAAAT

SEQ ID NO: 486404 - protein, 363 aa, unidentified
MSTITIGVDLAKSVFSVCEVDAAGRVLGRRDLGREAFALWLAQRPAGTVVAMEACSGAHHWGRRCLEYGLQPRLMAAQFVTPFRKSRTAKNDRNDAEAIATAARQGNMRFVPVKDVDQQARLAWHRVREGYKTESLAIGNRLRGLLAEFGIVVGKSDAALRRVLAALDQHAALPGEFKELLRDLCAHWAQLRTALDACTARIDAHARQDARCGRIGAIVGVGPITVDAMVASVGNAREFKNGRQLAAWLGVVPTQHSSGGQTRLGTISCRGDAYLRTLLIQGARSSLQRAKAVSVEKSTPEQIWIRELASRMPFGKVLVAIANKHARQLWAMLAHDLDYDPDAHVKHPMAQRPADQHALTAMA

SEQ ID NO: 486405 - protein, 321 aa, unidentified
MNESDGYWGIDVAQATLVVAQFGQGPSTTYPNTSEGHETLLALFSTARVQRIVLEATGGYERGIVATLGAADLPVVVVNPRQVRDFARATGQLAKTDAIDAQVLAAFGARVQPELRPLPTTEQVVLRDLLTRYHQVQQMLGAEQTRLLQALGRQAQRPLRKQLKRHIAFLERALHELDADLDDQLRQSPLWCEQDDLLQSVPGIGNKTARTMLAFLPELGTVTAGEIARLAGLAPLNRDSGTRRGHRRTGGGRPRIRAVLYMATLAAIRCNPLIRTTYQRFLKAGKPKMVALVACMRKLLVILNAMLKTKTRWQSLVTTST

SEQ ID NO: 486406 - protein, 317 aa, unidentified
MSKHTTVSAGIDTGKCKLDIALDRCPERLQVDNTDDGHAVLWGWLRQHRVERVGIEASGGYEQAVVSALRRKGFLVIMFQPAQVRAYAKYRLQLAKNDKIDAALIAACTAEAKKIHPPPDPRLAPFAELLTVIEQLTEDIARLKTRRATSRDEQTRRFWNEEIARLKRLQSQKLKQLVAAIREHRDLADRLELIVSVDGVGLRTAVAILVRMPEIGRITREQAAALVGVAPYDADSGSHVGLRHIEGGRERLRKSLYTAALPAAFNWNPELMAIYKRLTAAGKPHKLALVACARKMIIFVNTVVARGTPWVPRDALI

SEQ ID NO: 486407 - protein, 376 aa, unidentified
MRNVRFVGLDVHAETIAVAVAESRGEVRSLGVIPNRRESVRRLIGKLGKPEQLRVCYEAGPTGYVLYWQLSELGVKCDVVAPTLVPVMAGDRVKTDRRDAEKLARCYRGGDLTAVWVPDAAHEALRDLVRARLTAKGDQLRARNRLGKFLLRQGRRAPDGTRAWTGRYLLWVKQLHFEHQAQEATLLDYLHEVEHAAERIVRLERAIDTAVQSMPENLQAVIAGLQSLRGVAKVSAVTLVSELGQLSRFERPRQLMGYAGMVSREHSSGERVSRGAISKAGNAHLRRIVTEAAWSYRHHPAVGSTLKARQVGTSEEVKAIAWRAQHRLHERYRALMGRGKAKQKVITAVGRELLGFIWAIGCEIERSQSHQVRRAA

SEQ ID NO: 486408 - protein, 448 aa, unidentified
MSNGSGVSRGDRNRNTRLARLREAVPVSNAIAGVDLADSKQMVVVTDHESRVLARRTFRRRAWELGTALDWAATCAAGAGFAGVTVAVEPTGHRWRVVGQLAAERGMSFVCVQPLMSSWARRAEDLTFDKTDDKDAVLIARLTAQLRCYLPEPADETWARLRHLGIRRARLVADSVSQVQQMRDLLECVWPAVLDAARQPFKSTCWRAALTVALSRAGGDLSRVTRLGRRRFDAAVRRQVARWDAVNPWQKIIDAVFTACADPAGVTALRLGALERVALLLADWRDTQARLADTEQRMVTVLGELGLTELVTSITGLSAVGAASILAETGNLARFTTGRALVKHSGLAPRQKSSGSYTGRTRTTGQGRPALRLAAWRAVWGALKSNSVYAARFAYLTSREHNKLSTGQAHAAIAAALLRHLHAVITTGQRWDPATAAGGRPTPTLIAA

SEQ ID NO: 486409 - protein, 345 aa, unidentified
MTRTVLGIDIAKETVAVALLDGTRLEPATFPNTPEGAVKVLNWLHKRKVAHVHACMEATGTYGEVLALALHEAGHTVSVVNPARIAAYAKSQLARNKTDALDAQLIARFCLKEEPPVWTPPAPQVRDLRALVRYLEDLQAMRQAEANRLQAGTHPEAVQQALHDHLAFLDQQIAQVHTQIAAHIDQHPELRRQRDLLVSIKGIGERTAALLLAELGDMTAFANARAVAAYAGLTPRQFSSGSSVRKRTRLSKLGNATIRKALFFPAIVAKQHNPIVHAFCARLLAAGKSPMAVVGAAMRKLIHLAYGVLKTGKPFDPNHQPSLPADHPSSPLTPLDRPDQVPALA

SEQ ID NO: 486410 - protein, 348 aa, unidentified
MLADQLDYVVGVDPHRDWHALAVVRVVSGAGVFEGSVAADSLGYAQALKLADQHAMGRRAFAVEGTGSFGAGLTRYLAGRGEQVLEVGRLRRERGSAGKTDALDAIRAARSVLAQERPATPRASGEREALRALMAAREGAVNAKRAALCQLRDLLVTTPEPLRSELRPLTRAPLLRRLAATRPERRQDPQLRGALLALRSVARRVLQLASEERELAREIETLTRKLAPQLLDQPGVGPLAAAQLVLSWSHKGRISSEAAFARLAGCAPIPASSGQTIRYRLDRSGDRKLNRALHMILVTRRRTHPPTIAYIERRIQEGKSRREATRCLKRYLARTLFRLLEHGTPQTA

SEQ ID NO: 486411 - protein, 409 aa, unidentified
MPLFCGIDWATEHHDVAVVDDDGRVVARGRVSNDAAGFAQLLTLLAEAGDSAAHPIPVGIETDRGLLVAALRETGRVIYPINPLAASRYRARYAVSGAKSDATDAVLLANIVRTDPGAHRPLPADTELAQAIRVLARAQQDAVWARQQIGNQIHDLLKDFYPAALRAFAELPEGGLARRDARTMAAAPTPAQAAKLTPARLRRLLINAGRKRYLDRDTDRLREIFADTYLHQLPQVEVAMGIQLTALLGQFDAACTAAADLAEAATAHFEQHPDAKIITSFPGLGNLTGARVLAEIGDDRARFADARGLKAYAGAAPITRASGKKTVVLHRHIKNRRLAAVGPIWALGSLRASPGARRHFDARRATGDWNHQAQRNLFNKFLGQLHHCLQTRRLYNEHQAFPPPLELAA

SEQ ID NO: 486412 - protein, 344 aa, unidentified
MGEIIRIGMDTSKAVFQLHGVNRAEEVVLRRKLRRGAVLAFFAKLEPTVVVLEACAASHHWGRELEKLGHEARLIPPQYSKAYVKRNKNDAADAAGLCEAGSRPHMRYVPIKSTEEQADLMLTSTRDLLVRERTQLSNAIRGHAAEFGLVAAKGQDKIEPLLERIAADRSLPERARKLFEILGRQYAQLDARIEEIEHELKAWFKTSEEARRLADAPGLGPITASLLVMKTPDPKSFKSGRDFAAWIGLTPKDHSTAGRLRLGVITRAGDEALRSALVCGATSVIKQVQRGKGPNWPWLKALLARKPPKLAAVALANKLARIAWKMMTTGERFRPEEMQPRAAA

SEQ ID NO: 486413 - protein, 366 aa, unidentified
MFHKLNSAATLIQRTTTEAPRDHMYYIGLDVHKRTISYCVKDAAGHVHQEGKIGSTRCELDAWIKTVPQPRMMAMEATIFTGWIYDHLLPHAEKIKVAHPLMLRAIAAAKKKNDKIDAAKIADCLRCDFLPECHMASTAIRDRRRTLRYRSLLVKQMVQMKNRVSGLLLETGVSYNKSRLHNVGYFADLMSTNEEVNESIRPLLKISREHIVRVQRLDYALVSWLERDPLLQERLRRLRTVPGVGPITALTWALEIGDFTRFRSIKQAISYCGLCGEERSSADKVMRMPLSKQRNKHIQRVLIEAAKLAPRECHELAMVRERELQKGNPNRATLAVARKMVSYMLAVERRKQDFVPAENFKCTAAA

SEQ ID NO: 486414 - protein, 362 aa, unidentified
MRIIGCDLHARQQTLAMLDTTTGEVLEMTLKHEGDNVREFYSSLPRPVRVGIEATGSMQWFLNLMEELGIECLVGHPAQIRAAAPRKQKNDRRDAELILKLLAENRFPAIWLPSKELQDLRALLRHRHQWVRMRTRIQNALQSIALANGLRRGTALWSQDGQSRIASLSLAPHTAYRRSELQAMYEKFEAEIEKLNQRVEEQACQRPGARLLMSHPGVGPITALATEVFLGNPARFADSKALASYVGMIPREYSSGGRQRLGGLSKQGNPLLRFLWGEAGAHAARKDPELQRFYRRKLVQKGLGKASVAVARKLGIRLWIMLRDQIEYNEFCRRGQKQQKSSDACAGMPETRYGAKSHRPVD

SEQ ID NO: 486415 - protein, 443 aa, unidentified
MTTMNYIGLDVHKKTISYCVKDVSGRIQQEGKIGSTRRELDCWMKTLPQPWTVAMEATIFSGWIYDHLLPHATQIKVAHPLMLRAIAAAKKKNDQIDASKLADCLRCDFLPECHMMPRAIRDRRRTLRYRHLLVRQMVQMKNRVSGLLMETGVEYNKQRLHKVSYFRELLSANGEVPPSLRPLLKLSRETIERCQKTEYALVSSLQRDPVLADRIKRLRTVPGVGPITALTWALEIGDVSRFGSIKQAISYCGLCGEERSSADKAMRMPLSKQRNKHIQRALVEAAKLAPRQSHEMAVIYDQERQKGNSNRATLAVARKMVAYLLAVDRQQRDFVPAEERRTTAALKTAEINRMNKMRRLPGPACCRLSEGDHTPEALYELFRDWQRTQTQSSVTALQGPRLQMDVWFCRAQEPMPRGTLLRVEHPETVDLHALPSVPGTPVP

SEQ ID NO: 486416 - protein, 387 aa, unidentified
MGEVAKPKTQNGDKHMKKLDKYVGLDVHKDTSVIAVADGGRSGEVRLYGEISADLGALEKALRKLGGAGVTLHVVYEAGPTGFVIYRRLRQLGIDCIVVAPTKTPQEKGPRQKTDRRDALLLARLHRAGELTAIHVPDAVDESVRDLTRARADAVHDLTRAKQRLKSFLLRQGYRYTGKANWSEAHQRYLRELVLPLPALKAVLEQSLLAVEQATQRVVRLEELLAVQVPLWRMFPAVEALMTLRGFQLTAAAVLVAELGDVRRFAHPRHLMAFLGLIPREKSTGNSRRLGAITKAGNAHARWILVEAVQHAFLPPKVSAPLALRQQGQPAAYRALSWKVQVRLHKRGWHLLHRGVMKAKVTVALARELSGFVWDLLRQVPPPAPTG

SEQ ID NO: 486417 - protein, 403 aa, unidentified
MPTTTRLTATPHTPEFTATDGAMLYLALELSQRGWTLAFTTGRGQVARIRKIAAGALEALDAEIARARRRFGLPPTAPVVSCYEAGRDAFWVDRALLARGIVNVVVDAPSIEVNRRQRRAKTDRLDARKLVAMLVRWHDGERGVWHVIHVPSEADEDRRHLERERQTLVAEQTRLVNRLQELLATQGVTLALAGDVRAHLGTVRRWDGTTLPAGLRTRLEREWARIEAVRTALRALGSERHRRMTTAAPAPADAPVMAKARRLVQLRAIGETLAWVLATELFGWRAFQNRRQVGGFVGLTPTPFQSGGGPREQGITRNGSRELRALVIELAWLWLRYQPQSALSQWYRRTYAGASPRLRRIGIVALARKLLVALWRYVDFGELPAGACLKDAADAGAADAVAA

SEQ ID NO: 486418 - protein, 393 aa, unidentified
MRFAGIDIASETHVVALVAADGSVELKATPFGEDDLGYQKALALLGTPGEVLIAMEATGHYWKNLFAVLAAAGHAVALLNPLRTHRFAGVDLERTKTDAIDALTIARFAAQKRPAATTVPDALTEELRELVHLRQRLLQDFGDRVRQLHRLVDLGFPEFTRYVRTLDSELASAILRVYPTAAAFRGVSVRRLAALRYDGRHHVGLDLARLLTEAARRSVGQHHSATYRLQIRYACDDLDTLRRRLRDLDRDLDGKLREHEVGRLLTTIDGIGTHTAARVIATVGDPAHFRSGSALAAYVGTIPALKQSGKRQSVRGAVTPIGNAQLRAALWMPTLTAVRCNPWLRAHYQRLLARGKLPKVALVACMHKLLLAIYSVAKHRRPFVPNLTAPATP

SEQ ID NO: 486419 - protein, 316 aa, unidentified
MNSQVFVGLDVSKRHLDVAVRPHSRHFVTPNDDRGIKQLVKPLAALKPQLIVLEASGGYEFLVTAALAEAQLPVALVNPQAVRKFAGAAGKLAKTDKIDAQVLAHFAEALRPEPRSLPDQVHQVLKAALQRRQQVVKMIGQEENRREKTFMPTVRRDIEAHLTWLRQRLKELDRDLDDQIRQSPLWQDRDRLYQSVPGIGPVVSLAVIAQLPELGTLPGKKAAALVGVAPYNRDSGRFRGKRMIRGGRSYLRRMLYMAAVVASRFNPVIRAFYQRLVAAGKPKKLALTACRHKLVLILKAMVKNNQPWNQFINQVP

SEQ ID NO: 486420 - protein, 427 aa, unidentified
MKKADLLSTLFVGIDISSRENVVALLDFESSKPLLSFSVANNRPGAVELAQKLADFLSLHTGLSSLMIALESTSFYGIHIANYLSSCQLLMPFHTAVYCVNPKMIANYKKSFIDLGKSDYIDAFVIADFARVGRITCSPWRGSQFLALQRLTRHRLHLAKSLTKEKGYMLSNIFLKFSEFPLLDTDEQPFSNNFGAAASSVLTDFLSIEEISDMPIGALISYISEKGHNRFPAPEKTASLLQQAARNSYRLDQCLYEPLTVSIASSFNLISAYTAEMKVVNKAIEKTLKGLDPNAYQSLLSIPGIGPVMAAGILAEIGYIDAFKSQDALAKYAGLVWRENQSGGFTADDTKLSKAGNAYLRYYLVEAVSHVKNHCSEFAAFYQKKYDEVRTHQHKRALALTARKFVRLIFGLLAKHQLYSQSRVSQI

SEQ ID NO: 486421 - protein, 387 aa, unidentified
MPQQLDDLSRSRTPLEQDRTIMAVIEMSQASWLVAGIVPGIERHPLKKLEPSEVELLRLLMRWRAEATQKGRTITRIAVAFEAGRDGFWLARWLRARGIEAYVIHATSVAVSREHRRAKTDRLDTGLLKRVFLGWLRGEPDHCHMVAIPTLAQEDAKRPNREREGLVRERTRLVNRMKGCLARFGVRTFKPTLRNAPDRLATLQTPEGVPLPPNTLLELRRDMARLRFVMDQIKEIEEARAQELERAPPDKPQVMVRLLARVIGIGLETADMLVQEVLARTWRDRRAVARYAGLTGSPDESGSRRREKGLAKAGNARVRRGMIQLAWRFLLHQKESALAEWYRARTADARGGTRKTLIVALARKLLIALWRMVTTGEAPAGVVLRAA

SEQ ID NO: 486422 - protein, 381 aa, unidentified
MAGLDRSELTEYRRSKSCVLEAQTKEASRGTLCDRSGWKGIANLCAQRRRRILEERRCRTAALPTYLAGRPRSRVVVETCSEAFAIADAALAVGHEVRVVPATLVRTLGVGARRLKTDRRDAQKLSEVSCRIDLPSVHVPSQQARQRKTMCGMREALVGARTKLLNTVHGWLRAEGRRPRAGEVTTFSARVRAVCADTTLPTYVERQLRTLDSLNQEIAEADRELATIAKTDPIARRLMTVQGVGPSTSVRFVAALDEIGRFSGAHAVESSLGLVPGENSSAERQRRTSITKAGPPALRWCLVQAAWAAPRTAERSDATLGGRDREAPRQTGRGPGARAQAGGDPVCALARRDRVRAESVKRELIAPPARRSFSGRLLLSD

SEQ ID NO: 486423 - protein, 405 aa, unidentified
MNAVGIDVSKGKSTITIRKPGDVVLMSPCDIPHTQSAINDLIKQIKSLEGETKVCMEHTGRYYEPVATWLSDAGIFVSAVNPILIRDFGDDSLRTPKTDKADSKKIARYTLDRWAKLKQYGIMDKTRNQLKTMNRQFGFYMAQKTAMKNNLIALIDQVYPGANDFFDSPARNDGSQKWVDFIHTYWHVDCVRSKSLNAFTEHYQNWCKRKNYNFSAEKAAKIYQISSDLIAVFPKNDITKMLIWQAVALLNTASKTVESLRSKMNELASTLPEYPVVMDMNGVGATLGPQLIAEIGDVSRFTHREALTAFAGVDPGKNDSGKHIQNSVRTSKKGSPYLRKALFQIMDSLIKRSPVDDPVYAFMDKKRSEGKSYYVYMTAGANKFLRIYYGRVREYLSNLSNNETI

SEQ ID NO: 486424 - protein, 475 aa, unidentified
MACARKQVRRGAQAEPGKQVSQAVDLVITHRHAAGIDIHAAEHFVAVAPEDVPAGFVNPDRKLPPGVRKFATNTADLEAIADWLKGCGVTTVAMESTGVYWIALYDLLAGRGFEVLLVDPRQTKHAPGRPKTDVVDCQWIRRLHSYGLLTGSFRPGDEIVRWRGFQRQRETLIRYAAQHVQHMQKMLEEMNVKLTEVVSDIVGVTGMKIIKSIVRGERDPLQLAKNRHESCKRTEAEIAAALYGNWREELLFGLQQALELYQFYQKQLRDCEAQIAACLRSMKDKSDARPLPPSLRKRKPEKNEIRFGARALLFRMSGVDLTQIEGISETTALVILSELGIDLSAFPHEKNFVSWLGLCPQHRGSGGKIFKRGTRRGANRVARALRMAAQGCHRAQNALGAFYRRIQGRSGGAKAVVATARKIAERVERMLKDGQEYVRQSQEAYEQAYPLRLMKSLAKRAAAMGYKLVPETATI

SEQ ID NO: 486425 - protein, 408 aa, unidentified
MELTPIYKRVIALDVHQAKITACAIVEHDDGRQEMTKLDFGAFKRDRRALAQWALQIRPEVVVMESTGVYWKSPFAALETVGIIAWVVNARHVKAVPGRKTDMADAQWLATLARAGLLRGSFIPPVDLRQLRLVARQRQKLVGMLSAEKNRLHKVLVDAGIRINVLVSDVHGQSARAMIKALIKGQPMHEILNLKGRLGASREELFEALSTEQFSARHAFVADAIMQHIEYIEQRVARMDGYLLSALAAWQPQLNLLQTIPGIDQIGAAMLLVEISADMNTFGSAERLASWVGICPGNNESAGKRKTGRIRKGNAWVRRLLCEFAQAAARTQCALKAKFDSLAIRKGRKKSVIALAHKMLRTIYAMLSSGTHYEDKTVDYEAMSVARNAPRWIRMLKKHGFIGQTAAA

SEQ ID NO: 486426 - protein, 356 aa, unidentified
MRKADMTENLVLNNEQKRTKKYNYFIGIDISKNELDYAVFYNNQLLFHREAKNHPDDIVAFIAELKMLSKFSISKSIFCMEQTGIYSNHLLKCLKKLKANIVVENPLQIQNSNGLIRGKHDKIDSIRIAQYAQKNCYDLRLWMAKRPVMLDLASLYSLRNKMLSLKVALKTPLREQAIFLGKGIQKLNLQLCESSMESIKNDLIKINKHIDQLIDSDLRLKRLLEIITSVPNIGKITAIAIINSTNEFRNIQCPRKFACYSGVAPFAKESGLHKGKARISHIANKKMKALLHICALGALRYDTEMKAYYLRKTTVEGKPPMVVINAIRSKLILRVFACVNKDTLYVRLPKINEPAN

SEQ ID NO: 486427 - protein, 453 aa, unidentified
MCLEDRPVLEPNAAGIDVGAREMFVAVPPGRDAKPVRVFATFTEDLQRLTDWLVQCGVTTVAMESTGVYWIPLFEILEQRGIHPCLVNARHMKNVPGRRTDWHECQWLQFLHSVGLLRSAFRPEQDICAVRTVLRHRSELVMAASQHVQHMHKALTQMNLQIHHVISDITGVTGMAIVDAILTGQRNGAELARLRDPRMKVDTETIQKSLQGNWRSEHLFTLGQSRDLYRIYQQQIASCDLEIEKMLQRFEPRTDPAERPLPPDRKRNRNGRKKRKKNGHPHPEFDLRTETYKLFGVDVTQIPGLDENALPLFSEVGRDMSRWPTAAHFVSWLALCPDNDISGGTVLWRGARRIKNRAGHLFRLAAFSLHHSPTPLGNYLRRMKAKLGPKAATMATAHKIALIFYSMVKNQVEYDETIWATRDSQREKRLEAKIKRQAKQLGYELVPIEPKAA

SEQ ID NO: 486428 - protein, 339 aa, unidentified
MMTSFVGVDLHRNNFTYCIRENGEEKKIGKCEISDLKGFASLLGKNTVMAVEATGNTFMFCRFLKAHVGRLVVVNPSQFKVISMSTKKTDRHDAKVLAEFLEKDMLPEVRMKDDLQAKISSLTQTREKLVQLRTVLKNKVNNLLAANFIVLKREELSTETGLRKALSFHFDPITDTEMFVVVEQIRSLNQSIEKLDKAIEDHGSKMDGFKNLKSIKGIGSKGAATLLSTIGNIHDFRSSKQLAAYIGIVPRVSNSNDTVCHGRITKNGSKIARTTLVQCALIAKRYSPYLHAFHESVKSRRGGAKANIALARKFLDIVYRTLKNNWMFEDFTQFKLVKN

SEQ ID NO: 486429 - protein, 548 aa, unidentified
MATAVSGGLTGTSRGRLELASSQRANWTVAADISLAVIHKRAKRPGTARRSELVNNCAAGENFAGGRPAPARSQSQSPNLRKVSGRLLAEPEALAPTSNRKTPPEGHYISKMDGRAKRRKNHKEQKQTMNDSQQWQQHRAFGALDWASEKHSVVLVNQTGKVIEDFEIEHSALGWKKFREKLQPYGSIPFAIETSQGVAVEQLLEAGMLVYPLNPKSAQAYRERKAPSGVKDDRLDAWSFADALRMDGQNWKALRPEEPLIKELRLLCRDEVTLIEQRTAFVNQLRHALAEYYPAALEAFEDWTSVSAWMFLQRFATPEQLAQAGKRQWQKFLHSRRLWGSDQGPRRMEIFAHATEFTGTAPTVKAKSLLAQSLVQMLFAIEKQLAVYRQRIEALFARHPDHDLFGSLPGAGPKIAPRLLSEIGDDRQRFGGDPQNLQCLAGSAPVTKRSGKQRKYWPVHQRWACDKHLRHAIHLFSEQSLSRCAWAEIYYQHHRQKNQSHANALRRLSHRWLKVIYKMWIDRTPYNAELHHRNQLQHGSWIFQLQQS

SEQ ID NO: 486430 - protein, 334 aa, unidentified
MENIALIGIDLGKNSFHIHCQDHRGKAVYRKKFTRPKLIEFLATCPATTIAMEACGGSHFMARKLEELGHFPKLISPQFVRPFVKSNKNDFVDAEAICEAASRPSMRFVQPRTESQQAMRALHRVRESLVQDKVKTTNQMHAFLLEFGISVPRGAAVISRLSTLLEESMLPRYLSQLLLKLQQHYHYLVEQIKDLESQLKRKLDEDEVGQRLLSIPCVGTLTASTISTEIGDGKQYASSRDFAAATGLVPRQYSTGGRTTLLGISKRGNKKIRTLLVQCARVFIQKLEHQSGKLADWVRELLCRKSNFVVTCALANKLARIAWALTARQQTYEA

SEQ ID NO: 486431 - protein, 430 aa, unidentified
MKSNTQNAKIEAITEKTLVLGIDVGSETHYARAFDYRGIEYSRKPFKFSNTEAGFVTFKEWILDLKDRHEKEKVVPGMEPTGHYWFNLGKFLQDNEMKPVLVNPHHVKKSKELDDNNPTKNDRKDPKVIAGLVREGRYMIPYLPDGVYADLRTASNIRFQLQAELTRIQNRISRWFNIYFPEYKTVYGKPDAKSGMLILKAAPLPEDILTLGIDGVNQIWRDAKLRAVGKARAKTLIEAAGHSVGSKEGAVSARMEIRMLLEDYESRNMRLQEVMVLIEELVKGIPMAEKLLEIKGVGIRTVSGFLAEVGDISRFNNPKELQKLAGLALVENSSGKHKGGTTISRRGRKRLRYLLFEAAMSLVAKNPEFRELHNYYTTRRRNPLKKMQSLMAVATKLIRVFYAMLTKGVDYDPKKMVSDIRRPEAYLQAA

SEQ ID NO: 486432 - protein, 338 aa, unidentified
MPLYSAIDLHGNNNVTLVLDEQDQVVYQKRLTNHLPLILEALAPFQAQLQGIVVESTFNWYWLVDGLMEADYRVHLANPTAIQQYSGLKYTDDHSDARWLAHLLRLGVLPKGYIYPKEQRPLRDLLRKRGHLVEQQTSNVLSVQNIISRNTACRLSVNQIKQLTPDEVQVLLPNEDQVLSVSSTLRVITCLMEQIHLVEKRVQSRIKSTPLYELVQSVNGIGPILAQTILLETGDIDRFADVGDYVSYCRLVNSTKLSNGKRKGKGNVKNGNKYLSWAYSEASHFAIRFSPEIQRFYQRKASKTNVPVAYRTVAHKLARACYHIMRNKVPFDVAKAFG

SEQ ID NO: 486433 - protein, 351 aa, unidentified
MTQQTQPECITTIGIDLGKNTFHLIGMDARGRIMLRRKVSRGQLLQCVANLPICLIGLEACAGAHHVGRQLAALGHDVRLLPAQYVKPFLKGHKNDYRDAEAIAEAAQRPTMRPVPLKSAEQLDLQALHRVRSRLVGQRTAVINQIRGFLLECGIPVRQGPAGLREALPTLLSHRTDVLSPRMIHLIEDLAGDWRRLDERIETLTRDITAVARQDAGCQRLMGIPGVGVITASAMVAAVGTGAAFAKGRDFAAWLGLVPKQISTGGRTILGGLSKRGNRYLRTLFVGGAQVLLQRPRHWDGHGFGRWLQAAGTRLHRNVLAAALANKLARIAWGVLSHVNGYDPEFAARTA

SEQ ID NO: 486434 - protein, 335 aa, unidentified
MFNYIGIDVSKATLQVYIPIKDENISIKNTKKSLISLYSKLKKYYKKESRNLVIIFEPTGSYSALLKDFCSEKNINAFIINPRQSANFAKALDNRSKSDIIDAEMLYKFHVMLSTDDIAVPIVDNVQEGLSEALAYYKFIQKERVSFSNHLESLEVKNGSTLIIKKLKSEIKHLKAEEEKMIVMMKSLVLSDKLMKEKFENISSIIGVGEKAAIVLIHLFITYPEANRQEIIALSGLDAIENTSGTSIQRRTRISKKGNSIYRSVLFMPVLSAIQHNPYMKRFYDRLKNNGKHSTVAQIAVMRKIILIAHSLYKNNVKFDKNIYEKSIGIKKNDV

SEQ ID NO: 486435 - protein, 387 aa, unidentified
MYYVGIDIAKRGHFASVISSDGEVLIKPFKFTNDNDGFCKLLSALAPYECGSLIIGLESTAHYGDNLVEFLVSRRYQVCVINPIQTSTMRKNNIRKTKTDKVDTFIIAKTLMTQPHRFYTLEDIDMMHLKNLGRFRQKLVKDRTRIKIQLTAYVDRVFPELQYFFKAGLHQKGVYALLAEAPTPELISSIHLTHLTHLLEVASHGHFTKEQAKELRVLAQKSVGSSDKALSIQITQSVEQIVLLDSHVKQVESEMTEIMLGLDSVIMTIPGIGYINGGMILGEIGDIHRFAAPKQLLAFAGLDPTVYQSGNFNASHTRMSKRGSTALRYALINAAHNVVKNNATFKSYYDAKTAEGRTHYNALGHCAGKLVRVIHKMLSDDVAFNLG

SEQ ID NO: 486436 - protein, 406 aa, unidentified
MMQGRCIGLDVHRDFCEVAIWEEGEVRRAPQVPARPVPLEEFAGQLGPGDRVALEATGNALAIARIIKPHVAQVVIVNTRRLKAIAESKQKTDRHDAKTLAQLLAAGMLSGSWQPDETIRALRRRVARRARLVSHRARFKNEILAVLHRNLKERPPMSDAFGVAGRDWLTTQVLPEDERDTVDAALRQINFLTGEIDKIERDIACFAVASAEAQRLMTVPGVGLITAVAFLAQVGEISRFTDPRQLVGYLGLDPKVRQSGASQANTGRISKEGSALVRHILVEAAQTAIRSPGPLRAFFERVRARRGHAIAIVAVARKMCVLFWHLLTRGEDYAYQMPLVTKKKLRKIELKAGAPHQRAGWNLAGPNREERRKLKRESAQAAQTAYERNITDWHQQQTTRKQAARA

SEQ ID NO: 486437 - protein, 347 aa, unidentified
MRFYTQQHQYYCGIDLHARKMYVCIIDSKGKVRLHRNINTDLQLLFELIFPFLEDVVVGVECVFCWYWVADLCAEHQIPFVLGHALYMKAIHGGKTKNDKIDSYKLATLLKGGNFPIAYPYPAKWRATRDLLRRRMYLVHRCGELVAHIQNTNTQYNLPAFDKKLTRKFNHDGVAERFGDPAVRKSVEVDLAAVNALNQIIKPLEWHIEKTARQHDYHTLYLLRSIPGVGQILALVMLYEIHDIGRFPRVQDFSSYARLIRPMKESDGKWAGYSNKKIGNHHLKWAIKEAAILMLRESAQAKAYVAKLERKYNKGKALGIFTHKLGRAIYFMLKNKKAFDMKQFFSQ

SEQ ID NO: 486438 - protein, 343 aa, unidentified
MSAHYFIGLDIHKKMIAYCVKTIDGRLVDQGMVNADRTSLHEWAVSLPGPWVGAMEATIFTGWVYDFLLPYAVNLKVAHPEMLKAITAAKKKNDRADAETITDLLRVNLLPECTMLPQEIRELRRVLRYRNHLVRTAVKMHNKMSGLLMEVGASYNKRRLRGKKYFHELLEKVSDIPPSVKDLLMLSRAGFEMFQESQKRLIQSLRTDALIRERVCRLMTIAGVGEVTALTWTLEIGDPWRFGSIRQAISYCGLCSAQRESAGKEHRSPISKKRNKHLQTILVEAAKIAPLWNPQLAAVHQRELQKGNRNRATLAVARRLVAYMMSVDKNQKDFAMRGEQKAA

SEQ ID NO: 486439 - protein, 299 aa, unidentified
MSSSNVHIYGIDLGKNWFHIVAMDRQGHILWRKKLNRNQLKTFVINTPPAIVAVEACPGSQYWGRLFNDAGFSVKIIPAQFVKPYLKSNKNDFNDAAAIAEAGSRGTMRCVSLKTHEQLALQATHRVRQRFIVERTATVNQMRALLLEYGITVPVGRKVFERNLPSILEDAENGLPDFIRALVFRLRERWQHLDVQIDEMSVQLQQASIAPEKCQLISSVPGIGPIVATGLIAAVGSGTQFKRGRDMSAWLGLVPRQYTTGGKSNLGGISKRGNVYLRRQVIQGVKALKIHMNPHSGGG

SEQ ID NO: 486440 - protein, 337 aa, unidentified
MKLKVVAIDLAKQVFALYGRDGHDKVRLREKVRRESLRAKLRQIEPTLVVMEACGGAHFWAQEFEKMGHTVRMIAPQYVKPYVKTNKNDFNDAEGICEAALRPNMRFVARKSVEQLEMQAVHRVHEQYSKQRTALANEMRGILTEFGVILPLGINKVRTQVGDVLEDAENGVPDLVRNLIGQLRDRLRELDASLLQQEKLLKQLYQNNELCQRAGQLPGVGVMTATAVVAAGGDLKQFRNGRGFAAWLGLVPRQHSSGGKTVLQGISKRGNCYLRKLLVHGARSLVRVADKKTDARNLWIQSLKQRRGYCRTTVAVANKQARMLWVLLARGESYKPM

SEQ ID NO: 486441 - protein, 345 aa, unidentified
MSLMFFLGVDVSKKTLSVVLTDHKDKTLWSNKSIPNDEVGFKKLVETVIKNTSKKAGKEEYSIAAGMESTGVYGERLAYYLNGNSHNGRIVTYVLNPAAVRAFGTSVMAPNKNDSADAQLIASYLSMAVTKEQISPWKAPSPEGRALRELSRRREELTELHASECNRLEKLECMQEPPEAIVRNVRELISYLEDSIHNLEKEIEEHIDDDPGMREDIELLRSIPGIGDVTSVTLQGESDGLINFASVKGLVSFVGIAPSEHTSGTSVFKKSKISRRGNSKIRHHLYMATLVAARVNPVIKEFYERLLNRGKCKKLALVACMRKMLHIIWGVMKNRKRFDPCYSLK

SEQ ID NO: 486442 - protein, 345 aa, unidentified
MQTMYYIGLDVHKRTISYCVKDGSGTMHAEGTIPATRLDLDRWMKTLPQPWTAAMEATVFTGWIYDYLQPHAAALKVAHPLMLRAIAAAKKKNDRIDASKICDCLRCDFLPECYMASTAIRERRRTLRYRNLLVRQMVQMKNKIGMLLMEAGVSYNKQRLHKAGYFRELLATNLDIDEGLVSLLRLCRETVVRLQRTESALVRSLERDSLLLDRVERLMTIPAVGPITALTWALEVGDAKRFSSIKKAISYCGLCGAERSSANTVQRTPLSKQRNKHLQTTLIEAAKMAPRNSPELAMLYDKEKQKGNANRATLAVARKLVAYLMAVDRGQRNFQVVETSNGIAA

SEQ ID NO: 486443 - protein, 349 aa, unidentified
MNRTTYGLDIAKNVMQLHWVDGETGEIGRKKLGRAKLSEFFAQRQPARVAMEACGSAHHWARELGGLGHQVELLPARQVRAFVRGNKDDAADARAIWLAAQHSDIRRAPVKTVEQQAAMSLHRARSHWVSVRTATVNMLRGLLYEFGVVLPGGKMAGLKTIGAKRAEIDDKLPPLMRGLVDLELEALKGVELSIDQLEAEIAGQQRQLDKARTLREVPGIGVLGATALAATLGDASGWRSGREFAASLGLVPAHTGTGGKTRIGHLTKRGDPYLRTLLIHGARAVITHAKVKPASLEELLRRRPLNVAVVALANKMARTAWALLAHGRAYRSEWKSTPPSGCGAQAQVA

SEQ ID NO: 486444 - protein, 347 aa, unidentified
MRFYTQQHPFYCGIDLHARTMYLCILDQAGETLLHRNMPATPEALLKAIAPYREQIVLAAECMFTWYWLADLCAEHGIPFVLGHALYMKAIHGGKAKNDKIDAQKIAVLLRGGMLPQAYVYPAEMRATRDLLRRRMHLARKRGELLAHVQNTNSQYNLPAIGKKIAYKANRDGVAERFADPAVQKSIEVDLALITYYDELLRDLELTIVKTAKHHDAQTLYLLQTVPGIGKILSLVLLYEIHDIERFPRVQDFASYCRLVKCARESAGKRSGTSGNKIGNAHLKWAFSEAAVLFLRDNPAAQKFLARLEKKHSKGKALTILAHKLARAVYYMLKRQTAFDLHTFLQG

SEQ ID NO: 486445 - protein, 309 aa, unidentified
MEHFIGIDVAKDRLDVHTRPGGEVFAVARDSNGLAMLVERLQRLAPALVALEATGGYETVVASALGAAQLPLAVVNPRQIRDFARATGKLAKTDRIDAAAIAHFAEAVRPPARPLANAEARALGELVARRRQVIEMIIAERHRRRMASQRRVIRAIERHLALLQAELSELEGDIDDAIRKSPAWQADADLLASVPGVGKVTLRTLIAELPELGHLNRRKIAALVGVAPINRDSGTLRGRRTIAGGRPAVRTALYMAALVASRANPVIAAYYAKLRAAGKTGKQALVAGMRRLVVILNAILRDRKPWQPA

SEQ ID NO: 486446 - protein, 370 aa, unidentified
MKKYSELFIAFDTAKKKHAVAVADVGREGEIRYLGEIDSSSTAIEKVLGKLAQRYTTLRVCYEAGPTGYGLYRQICALGHECTVVAPSLIPRRPGERIKTNRRDAVTLARLFRAGELTSVWVPDAVHEAVRDLVRAREVASRDLRKKRQQLLSFLLRHGRIFTGRKHWSLAHRRWLADQKFQHPAQQIVFQDAVNAIEDAAARLRRLDEQLVAIVPSWSMAPVVTAYQSMRGVSFIAAVTFVAEIGDVRRFDNPRQLMAFLGLVPAERSTGERVRRAGLTLAGNRRARRVLVEGAWTYRYPARVSETLRPRLEGLPKTIRDIAWKAQIRLCARYRRLIATGKKTPVVIAAIAREMAAFLWAIGRHVEPVS

SEQ ID NO: 486447 - protein, 367 aa, unidentified
MKKVSTATRCEFGKFAGQRLTIGLDLGDRSSWYCILDEQGELLLEQKVATTPKAMKEVFGAMPRSRIALETGMHSPWVSRLLSELGQEVIVAHARNVRLIGESRRKDDRFDARTLARLVRIDPQLLSPVQHRSRKAQADLTVIRARAGLVRARTALINTARGLTKSYGERLRGCSPRKMNGELAQGLSPELQSALQPLLEEIGSLSERFREYNEGVKQIAQESYPEVARLEQVKGVGTLIALTYVLTLEDAHRFGKSRDVGCYLGLQPGRRNSGQSEPQLHISKQGDPYLRTLLVQGAHHILGPFGADSDLRRWGLKLAERGGRNGKKRAIIAVARKLAVLLHRLWVSGETYEPLRNSSRPMLATAA

SEQ ID NO: 486448 - protein, 348 aa, unidentified
MDILAMDLGKSKTVFCEYDGKSAEHKFGKVKTSPQQIHDLLVEKVPDRVVFEICSAAGWIYDIAKALNLEIEVANPSHQGWRWKKLKRKTDRDDALKLAQLSAMKQLPLVHVPNKAVRQKRSLIGYRRKLVERRTQIKNSIRALLDREGLSIPGGRAGWSQLALQKLKSMAVPISEISNDCLWRGQLWMELLQLEHIEHGLAEVTSALDSLGKKDTAVQRLQSIPGVGPRLSEAIVAYLDSPGRFDNGKQVGSYAGLTPKQYQSGSMDRQGRISGHGNVLLRSLLVEVSWSGIRYNRWMRETYNRLLRGSPSRKKIAITAVARKLLVRCWAMLRDEQNWHSEISSEAA

SEQ ID NO: 486449 - protein, 401 aa, unidentified
MNTMQENVQRVKRFRELKDTLRTKRDRLLVGLDIAQAEHVAQLRHAHTRIVVPTLTIPNTTRGFTQLWARIQQAQRATGCREVVCGLEPTGTYHQAIAAFLERQGADVLLLSSSVAYWNRRTQDGTWDKNDRKDAANCADLLEQGKVLFYSQPDGPLAELRRLVKCLRRARGELAACKARWRTSLRPALGPMGEPLPNRLRVELPAVLQAWERAAPGHPAVAQGRLPLGLATACADLGAQVTAVQARIAALEQALTPLAERLPPYALLRTIPGIGPTVAAVLLAEIGDVAWFTKFSQLRKLAGLDIVRVQTGKFAGQWRFSKCGRGLLRWALYQAAMGVSRTAGGRARLAALKAKRQGDRYAGFKAIVELAAKVLRVVWGVWRSGTPYDPRRAGGLQRQSR

SEQ ID NO: 486450 - protein, 414 aa, unidentified
MEQIHDRVAGLDVHRDSVVACVRATGPRGGAVADRERFGTTTAQLSHLKGWLTDRRVSLVALEATGVYWKPVYYAPEHRFAVWLCNAQHVKNVPGRKTDLSDAEWLADVVAHGMIRPSFVPPPAIRELRELTRYRKSQIDARVAEVQRLEKVLQDACIKLTSVASKVLTQSGRAMVEALIVGQRDPAELAELALGKLRPKIPERREALDGHFGPQHAVAARRIGDHVDFLDASIAALTEQIDARTEAYRGVFQLLLPVPGFDRLTIDTVIAETGADVSRFPSPGHLAKWAGVCPGNHESAGKRRPVGVGPGNRWLRRALIEAARAAARTGGSYFGAQYRQIAKRRGPNKAAVAVAHSLSDLIWHLLSTGECYQDLGNDYFQRRRDPEREPMRLVRQLEQLGYRVTLTATPPPAA

SEQ ID NO: 486451 - protein, 356 aa, unidentified
MSEKLNSAIAVIGIDIGKNSFHVVGHDRRGAIVLRQKWSRGQVETRLANLPPCLIGMEACVGAHHLSRKLQLLGHDARLMPAKYVRPYSKGQKNDFRDAEAITEAVQRPTMKFVATKTAEQLDLQALHRVRERLVSQRTGVINQIRAFLLERGIAVRQGLRFLRAELPGILAKRSDVLSPRMLRVIEDLAGDWRRLDERIEGLSGEIEALAQQDQACVRLMTVPGIGPIISSAMVAAIGTGDVFCKGRDFGAWLGLVPKQISTGDRTILGSISKRGNRYLRALFVQAAWVVLVKLGPKHWERFGLKSWIEAAKKRLHHNVLAIALANKLARIAWAVLNKGRAFACFKTDAMASRPA

SEQ ID NO: 486452 - protein, 365 aa, unidentified
MKKISTMQTSGKNIFEGHLTIGLDLGDRSSAYCVLNEAGEIVLEHKLATTPEAMKQVFGSMPRCRMAMETGTHSPWVSRLLTALGHEVIVGHAQKVRLITKSRRKNDRLDARTLARLARIDPGLLSPVKHRSAQAQLHLTEIRARAVLVSARTALVNAARGLVKSYGERLRKCGTEQFRRETTSGLSTGLREGLEPLLREVESLNERIQEYDRRIEKMANQTYPETALLKQVKGVGNLIATAYVLTIEDAHRFRKSRDAGCFVGLQPGRRDSGESEPQMRISKEGDEYLRTLLVQGAHYILGPFGEDCDLRRWGQKLSARGGKNAKKRAVVAVARKLAVLLHRLWVSGEVYEPLRNSQKMMNEAA

SEQ ID NO: 486453 - protein, 338 aa, unidentified
MRLYCGIDLHSNVSWVVVLDEEGKVVFQRKLLNELWRFLNELEPYKDNLELIAVESTYNWYWLVDGLQEAGYSVRLVNPAGAEQYSGLKYTDDRHDARWLAELSRLGILPTGYIYPREQRGVRDLLRRRTRLVRQRSSNLVSLQSAVERQSGERVTTNNLKRWGEAYVDAQSYDSHVKLNLKSTVKVTKALDEQIRCIEKVILRQAKEHPRFNVLKTVPGVGKVLAWTILYETGPIERFAKAGQYASYCRCVGSKRLSNGKKKGEGNRKNGNAYLAWAFMEATNYAIRYEPLAKKYYQRKVRRSHRVVALKALAHKLARASYYVMRDGVAFDPSKAFA

SEQ ID NO: 486454 - protein, 342 aa, unidentified
MAAADVSLTRMVAGTLRSEATRMGSMERVQSNTKVAGVDVGKHRLDVAVHGQAEQTHVSNDAAGMEALIAWLEARQVSRVGLEATGGYERAARQALEAAGLEVVVHQPLEVKLFARLKRLRAKNDRLDAALIAAATAQIEAVRAAQDPRLADLAERLTAYEQVSDQAAELKTFMEHVSLPDLEASLREQIQALVALKGRLLAQIVAAIKALPDLLARYRLLMSLPGVGPVVAASLLVRMPELGAMKRGQPACLLGVAPFDRDSGQWKGQRFITGGRARPRRMLYLAALSAKRFDPDFKAFAERLQAAGKPAKVAIVAVMRKLIEAANLVLQRGQPWTRRQAA

SEQ ID NO: 486455 - protein, 311 aa, unidentified
MSGVNAAIEVGKHSLEIALGSEGELFSEPNQSRAIAWLAKRLAELGCERVLIEGGSYQNVLVGGLRAAGLPVVIINPRRVREFAKSIGQLAKTDHLDARVLALYGERIQPPVRELPDEQNQILRGLWVRREQLIEMLVMEENRLEHAPKALHRSLRAHIDYLRKQIKQADNDLDREVRNSTLWEKYELLRSVPGVGPVLSVALLSDLPELGRLNRGEIAALAGVAPFNCDSGTLHGRRKIQGGRKRLRRVLYLATVASVRCNPTLRPFYQRLRATGKPAKVALVAAMRRLLLILNAMLKTKTVWRSPCPAA

SEQ ID NO: 486456 - protein, 373 aa, unidentified
MKKGSKSQKSQKATVKTKGTQERVTIGMDLGDKTSRYCMLSSEGEILREGQVTTTKAGMVEAFGSLGRARIAIEVGTHSPWVSRLLEKLGHEMVVANPKQVKLITESSRKDDRLDAQTLARLARIDPQLLRPIQHRSDKAQGALMFIRVRAALMGVRTSLVNTARGLARSMGERLPKCDADQMGVPQAVSLPPKLRQVLEPLLKEIESLTEKIKDSDREIEQIARKDYPETALLQQVGGVGPLIALTFILTIEDKGRFQKSRDIGCYVGLRPRRSDSGQSQPQLRITKEGDPYLRTMLVQGAHYIISRRGPDTDLKRWGLHLAKHGGKRGKKRAVVAVARKLGILLHRLWVTGEVYEPLRNHNARQEQKKIAA

SEQ ID NO: 486457 - protein, 310 aa, unidentified
MDCFVGIDVSKATLDIASLPDGESWTVTNDDQGLAELTPRLVALAPALIVMEATGGFEMLAAITLAHVGLPIAVVNPRQVRDFAKAMGRLAKTDALDAGTLADFAQRIRPAPRPLPDEAAQLLESLLTRRRQIVDMLTAEKNRLGFARGPVKRDISQHIRWLAKRLTDVDGDLQDAVAASPLYQAKADLLRSVPGVGQVTTLTLLATLPELGHLSRHQIAALVGVAPMNRDSGTLRGKRMVWGGRAPVRAVLYMAALVGLKHNPVLRVFYERLRAAGKPFKVAATACMRKLLTILNAMLHQNRRWDPQHA

SEQ ID NO: 486458 - protein, 412 aa, unidentified
MEVVHERCAGMDISKGDAKVCVRTPSTRAGFYHTEVTTYGATTNEVLRLRADLLAARVSVVVMEATGDYWKPFFFVLQEQLNVELVNAKQAKNIPGRKSDVSDARWLAELAAHGLLRASFVPEETQRQLRDLTRTRKHYAEEQNREYSRLEKNLEDAGIKLSSVASSLTLVSVRSILEAMVTGQRDPQVLASLVHPSMRKKTLPLVEALTGRFTDHHAFMVKTHLGTIDYLGEAITGLETRIEELMTPFRGARDAIMDIPGIAATVADGIIAEIGADMDVFPSPGQLASWAGVAPGQNESAGRIKSTKTTHGNHYLRGYLGIAVLSISRTKNTYLGVKYRRIASRRGKLKAVVAIERTLLVIIWNMLHNGVAYTELGADYYQKLNPQRTIDRAIKQLTKLGLNVSITPTAAA

SEQ ID NO: 486459 - protein, 392 aa, unidentified
MYIVGIDIGKNHHEASIVSPEGKQIGRSLRFATTHKGADSLMSFIFNNIGNSSCIFGMEATGHYWYPIYSFLKARGYTIYVINPIQSDSLRKMYIRQTKNDSIDSFLIAEVIRFGQFTTTSMADENILAMRQLCRYRDSVISSRTEIKLRISTIMEQIFPEYEKQFSSLWLSTSMGILEKYLTPENIENAPIDELFEIIKDKSHNKLTMKKAISIREAAADTFGIKIAQDAFSFQLKQLIDRMNFLDKQIEALDCQILEYYEKFDCYLHTIPGIGMIAAATILAEIGDINRFKSSSALVAFAGIDPTVRQSGEFSSTHNHMSKRGSPYLRHAIFLAATTCSFHNSPLNAYYKKKREQGKHHLTATGAVARKLTTVIYAVLRDGKPYEPKSFC

SEQ ID NO: 486460 - protein, 338 aa, unidentified
MSVTIIGLDIAKSVFQVHGADDAGNPLIRRKLRRRDVVRFFVNIERCLIGIEACHSSHYWARELIALGHDVRLIPTQYVRPFRRGGKNDANDAEAICDALSRPSINTVAVKSAEQQSVQSLHRSRERLIHQRTSTANQIRSLIAEEGVVCSRGITQLRRCLHEVIADPDGITPLLRSLIGQSLEQLAALDQWIGELDLKIHELARQSTVCRQLTRLPGVGPVIATAILGTVGSAHAFRNGRQFAASLGLVPGQRSSGGRTLLLGITKRGDAYLRKLLVQGARAIMRVVDRHDDRQSQWVRQLLERRHKHVVVVALANKLARTIWALLVKGEQFEMVRR

SEQ ID NO: 486461 - protein, 369 aa, unidentified
MDKDTTYVALDDSKRKIVAGILRPRDAEPELREIVNDPRQIRRLLERLKREGPVAACYEAGVSGYDLHRQLTALGVECAVIAPALTPRRPGQRIKTDRRDAAKLVRLFRAGELTAIHVLDESEEAVRDLVRCRDDLRRDVLRWRHRVLKLLARHGRAYLSGKNWSQGHWRWIREQRFDLPPLQRAFEATVFALEQALARQAELDKELEAVAGTAPYREPVRWLRCFRGIDTLSAIILLAEIVDFQRFRRPRELMAYLGLVPSEYSSGESQRRGALTKAGNSHARRVLVEAAWHYRHRPTIGRALASRSQGQPDEIVGQAWRAQQRLHRRYRHLVGHGKRPPIAVAAIARELVGFIWAAMTRPENRRQAA

SEQ ID NO: 486462 - protein, 393 aa, unidentified
MSIIDRPNALAATAVDNGIVAVSLELSRSKWLVTSLLPGSEKMSKHMVGAGDVAALLALLGRRRRQAEERVGGPVRVVAIEEAGLDGFWLHRLLEANGIESHVVDAASVAVPRRRRRGKSDGIDGETLLRTLLAWRRGEPRVCSMVRPPSPQEEDRRRVVRERAVLIRERIAITNRIRGLLMSQGITDYQPLRRDRRQRLETLVTGDGRALPAQMKRELIRALDRLDLLLEQLKAVEAERDAMQEVVAKATASEAAAIDDQARLLLRLRAIGPQTAAVLVLEAFYRRFDNRRQVAAFAGLAPSPWQSGAVVHDQGISKAGQPQLRKAMVELAWLWRRHQPGSALSRWYAERARGQDARRRRALIVALARKLLVALWRYVSAGVVPEGAAFKAA

SEQ ID NO: 486463 - protein, 325 aa, unidentified
MAAMTARFKYFTGVDVGKHTLVIFESRTQKLLEIPNHKTAIKRYLQMQVPYQADTFLVCETTGGYEALLLQTCAESGQTVHRANTFQVKAFIRSLGLHGKTDAIDARALAQYALERCHRLTQWHQPNENIKLLKQLMLRRQDLKQMATQEKNRLQAPDSNPFIQKTIRAILRSINTQIQAIDTKMALIVKQNDDLRKKEQIMTEITGVGSQTAYTLLATMPELGTMTRRQTASLAGLAPHPRDSGTATGRRVIKGGRRDVRAILFMAAMSARQHHPELKHFYLRLIQNGKKPIVAITAIMRKLITIINAKIRDFMIQNQLSLEQS

SEQ ID NO: 486464 - protein, 371 aa, unidentified
MAQRAEETAVNAGKDIVLVMDYHAENIAFRWFNEATSEERIGKYSTAEANILRQVEQAAGEVSPGGRVVWIMESTTGWARVKDLLGSRVKFLLANVLQMPLPPKAWRRKTDKIDTGRILREYEHGTLPLSFQPSAWWREVRRVVDCRQDLVERQTAIRNGITSLLHHETWQDRANLWSDKGRRRLAGMPLAPSDRMLVDWKARQLDELGRELEQVEARMEEIYRAWPEAQWVDEVRGIGMVTAVSVLAHIGPIERFATAEELISYAGLAPGTRQSDGTCHHGRIGGGGTDGHLRYLLIEATTWLCQIPRYRPAYERVQARRGKKIARIVLARMLLRSLHKMLRDRVRFQPASRPVCPTATTATTATAGWSR

SEQ ID NO: 486465 - protein, 420 aa, unidentified
MSLDPHEEPAAIQTHIGAIFISLELSRSKWLITSLVPGGGQRMSKHWVEAGDLAGLLARFWAIRDKVLARMGKSYPIVVIQEAGLDGFWIHRSLVKEGIESHVVDAASIAVSRRRRRAKTDKIDGEGLLRALLAFKRGEPRVCSMVRVPTPQDEDRRRICRERKTLTAERIRHVNRIKGLLFSQGIGDYEPLRRDRRRALEAARTGDGRALGANMKAQIGRELDRLELLLGQIAAIEAERDAMLARQAEAEAVQGAQGAPARVQKPTDLNGPGAETVPEAEAAPGVQKLMELNGLGGETVAMLWTEAFYRSFDNRRQLAAFGGLAGTPWKSGSIDHEQGVSMGNHRLRQTMIQLAWLWPIHQPNSALTRWYLERTKGATKLQKKKMVVALARKLLVALWRYVDAGVVIEGAVLKRAARAR

SEQ ID NO: 486466 - protein, 347 aa, unidentified
MAAVMIGVDPHKGSHTAVAIGPAEEPMGELRVRACTAQAERMLAWAVAWPDRTWAVEGAAGLGHLLSQQLLAAGERVLDVQPKLGARVRLLAAGAVNKNDPNDARSVAIAALRSPSRREVQADDHAAVLKVWSKRHRDLGRTRTQVACRLHAVLCDLVPGGVSKEITAGHAAQLLKAIKPSGAVEEARCELAAEFLEDLRRVDAQMGDTKKKLTAAVRASGTTLTEIFGVGPVIAATVIGYVRDVSRFPDRDHFAAYNGTAPIEVSSGNRKIYRLSRRGNRRLNHAIHMAAVTQIRYHHSDGRAYYDKKLAEGKTPREAKRALKRRISNAIFAHLQNDARKTSTVTR

SEQ ID NO: 486467 - protein, 354 aa, unidentified
MITIGVDAHKRMHVAVAVDEAGCEIARWHGPNSVAGWQGLAAWAATLGPDCRWGIEGAWNYGRGLAQQLVAADAAVYEVNPRWTAEGRRHARRSDKNDRLDARAIALYLRREVAALTAIVAEDDTTVLELLVTERDDLVAETTRLRNQLHQLLLHLDPEYTAHLPNPRTQGGVRDLEGYTSASPCPLRQQRAAGVRRLAQRLRLVAEQAKALAVQIRALAAQRFTRLTAICGVSLLTAGALAGLLGPGRRFASDAQLAAFAGVAPLEIPSAGRVRHRLNRGGNRRLNAILYRIALTQLRHSAQAQAYVARRVTEGKTKREALRALKRFIVRAIWRQWQQCQGTQTVAMVPAAVA

SEQ ID NO: 486468 - protein, 331 aa, unidentified
MVETKRFVGIDVAKAQLDVAIGPNGESFSVANDETGISELLRRLEPADLVIIEATGGLEVPVASALATAGIAVAVVNPRQVRDFARATGRLAKTDRLDAQVLARFGEAVKPEVRPLKDEQAQALEALVNRRRQLVGMLTAEKNRRANSPKVIHQSIDEHIRWLEKRLSGLDDELAGLVHETPIWRERDELLRSVPGVGKVLSTTLLAHLPELGALNRKQIAALAGLAPFNRDRGSLRGSRCIWGGRAQVRRVLYMAVVAAVRSNPVIKNFYAQLRARGKYPKSALTACMRKLLVILNARLRSKLSWQTPALASSTATLSPLLDAVPQHGCC

SEQ ID NO: 486469 - protein, 420 aa, unidentified
MDLLVERCAGIDVGKNEVVACVRTPDPAGGRRKETRTFPTFTEDLEAMADWFGSEGVTEVVMEATGSYWKPVWYVLEERALELKLVNARHVKILPGRKTDVADAEWLAELCEHGLLRASFVPSPVIRELRDLTRYRKRLVQAHTAEAQRIHKTMEDAGIKLDSVASDSLGVSGRAMLAALVAGERDPEKLAELAKGRLRKKIPELRKALRGRFREHHALLIGMCLEHCAHLEAAVAKLDGRVDALFEANQSEAGVPFERARDRLDTICGVGKRAAEVIIAEIGADMSRFPTPGHLASWAGMCPGNNVTGGKRRSGKTTKGDVWLAEVLVECAWSAARSRDTYLAAQFWRLARRIGKKKAAVAVGHSILVICWHLLSEDCDYEDLGGDWFTRRADNDKRRDDLIRQLQELGYGVSLQKLAA

SEQ ID NO: 486470 - protein, 358 aa, unidentified
MRYVGVDLHKNKFTAYFADTGRYRDYGTNSVGIMSFIHDCKRSDDCKGVMVGVESTGNTRYFKRMLEAEGIQVKVINTMKFKVIAESVTKTDKHDAATIAEFLEKDMIPEARLCSDYSEQLRRLLKVRKTLVETIVTIKNQIHGILAAYGYEDTRASLQSKRGRQRILSTLASTENGLVVQPLIQIIDELDEKVKHIEKIIEEFTKHDNQKRLLQTMPGCGDIIANTILAYTDDIRRFKSPKQYAAYAGLVPYVHNSNTMQRHGTITKHGPEPLRTAFVQLVLGTHRLPATRNYRIMKQYRALKQHKGSGKAIIAIARKYAEIVWHMLTYNEPFCPDKQLQIPCECNRSIQVNEQQPA

SEQ ID NO: 486471 - protein, 337 aa, unidentified
MAKVSIIGIDLAKHVFQLLGIDAQGRKIFSKRLKRYQLLAFLARQPECLVAIEACGGAHYWARQILALGHSVKMIHPRYVKPFVQVNKNDQRDAQAIAEAAARPGIPAVAVKTVDQQELQALHRVRERLVREKTSIGNELRGLLHEFGVIIPQGHKAIREAVPELLEDADNGLAPRSRELLADLQQQWLERDQRILRYDHELKSIARENPVCRRLQTVPGIGPVNATLLYSHAGDACYFASSRHFSASLGLVPRQHASGGKERLLGISKQGNKHVRKQLVHGARAAYKMLQSDEQSQLGRWLQRMKGKHPNTVITALANKLARIVWALMARGHSYQA

SEQ ID NO: 486472 - protein, 421 aa, unidentified
MTSILSNTQPTTWVGIDIAKRHNDVLVERPGHRRRRFRVANRLDDYQRFSEFLTDLPERPVIGFEATGNYHRTLAFFLAKKGFSLRLVSSVAAARTREALYNSWDKNDPKDAQVIIHMLKTGVTQYYHDPLIHEINELQELSKTHFQISLHKVRIQHSILTHYLPLYFPEAEKYMTNSRAQWFTHLIERYPCRAAVTKFSQEKFIDDAWSFVGRKVNKTAFLEDFYETATQTIGLPVSEDSEAIRMFRIVLREHQRLCEVRADIEKEAESFLGDNLDYIRLKTLPGIGPILSLTILAEGGDLRRFAHHRQFLKYCGFDLASQQSGQFRGRSKLSKRGNRRLRYAFWMAATIAIRMRENSFRDKYARYTQSDPTNADLKRKALTAVAAKMARVAHGMIKNETNYRPFHERAVPGGAIPSKGR

SEQ ID NO: 486473 - protein, 346 aa, unidentified
MSKQMVGVVRPEISHVKKLFCGIDVGAETLAVAVMDWDHPCIEREFANTVTGHKALLGWLGKMKAQVRVSLEATGIYSMDLALALDATEYVEVAVLNPKRVHDFARTLRRSKTDSADAQVLAEFSLRMPFAAWQKPSQGALAVRAVSRHLEALVVQQRREANRLHAAERSIATPRCVIADLKRSLAGVGRRIVKLRREAMTLIAADANLKERFHLLTGAPGIAAVSALQILGELVLLAPDMKVRQWVARSGLDPVHQDSGTSVHKPSRISRAGSRHLRRALYMPALAAVRWDPHMKAFYEALLARHKRKLQALIAVARKLLHAIYGIFRTRTPYDGRKLFPHLKTA

SEQ ID NO: 486474 - protein, 431 aa, unidentified
MEDTYRWYVGIDWATQSHQVCTVLPDRRVLDQRVVEHTGLAIAGFIAWLTDLTGGDPASAAIAIETPRGAIVEGLIERGFHVYALNPKQLDRFRDRHTVAGAKDDRRDAFVLADSLRTDRPCFRLVRADDPTTVELREVARIDDDLREELNRLTNRLREQLHRYFPQMLQVCPSTDEPWLWALIDRVSRPEQVSGLRVAEVQKILKSHRIRKVAAAAIVEALKAPPLRVAAGTVEAATAHIALLLPRLRLVHQQRAECGRRIEALLAQLPHEDTSGQKVEHRDVDILLSLPGVGRVISATVFAEASLPLKDRDYHAFRTLAGVAPVTKQTGKQGQPGSRRKVAVQMRYACNGRLRNAMYHWARVSAQKDDDSRTYYAAMRKRGHSHGRALRGSADRLLRIFFAMLRSRTLYQPGFRHNATNEAPSAQLAAK

SEQ ID NO: 486475 - protein, 340 aa, unidentified
MKIIGCDFHPSFQQIAMVDTETGEHTERRIGLKDAAEFYRALPGPVRVGMEGCGNTQWLERLLAELGHELWLGDAGRIRALEVRKQKTDRRDAELLLRLMLENRFPRLWVPNQEQRDLRQLLIHRHKLVGMRRQVKNQLQHLALNQGVQQKHKLWTRAGRRLLEELPLTGWTARRREQLLELLDDLEGRIVPLDQAVKQAAEKDRVAELLQTHPGVGSITALAYAVTLGEIKRFAHSRQVVSYLGLNPSEHSSGGRQRMGSISKQGNTMVRSLLVEAGQSAARQDTELKRAYQRLKHRKHSAVAKVMVARKLAVRLYWMWKNEQPYAATRMQGSPSHPVA

SEQ ID NO: 486476 - protein, 315 aa, unidentified
MNPNAESFVGIDIAKKHLDVCLLPQRHSFQLPHTEQGLKDLIRQLLQIKPTLIVVEATGGYERRLAAELLAAGLTLAVVNPARVRHLAKGHGTLAKNDRIDAFNLAQFAQIVRPTPRQKTTQKQAELTDLVARRRQLVEMITMESNRLEKQPAAEVRQSIQRMMDLLQQQRQEIDNRIAQELGSDDEWNGKIQKLQSVPGVGAVTAATLVAELPELGKLNRRQIAALAGLAPFDADSGSWHGRRFIRGGRKSVRVTLHMATLTATRCNPLIRTYYQRLIGKGKSFRCAMVACARKLLILLNTLLKENRSWSPLPS

SEQ ID NO: 486477 - protein, 404 aa, unidentified
MFYFGIDWSEDHHNLCIMNEAGARISQIKLEHSLAGFGRIELERRKLGVPTRECLLAIETSHNLLVDFLLGKGYVVYIIPPQATKSYRNRHRSSGAHTDDSDAALLASILRTDRDSHRIWRPNSPLTQQILAQLRLIESLRRSIQRQSNQLRAVLWRIYPQALGLFGDLTSQISLQFLIAYPTAQEAQALSLEQFTAFCREHHYTRSDLILRRYAHLTEPNPTANPAVVQAYRSHVHILAELLLPQVRCRNEAITQLKKLFERHPDHFIFASLPGAGEILAPALLAKFGDHRDRFPQAADVQALAGTCPVTERSGKKKIVKFRKGCDKEFRRIAQQFAQASVQQSGWAAAYWAEVRPHCDSNSHAYRCLANRWLAIIWKLWQTRQPYDEAYHLRQRALRRRPRS

SEQ ID NO: 486478 - protein, 408 aa, unidentified
MKISYFLGLDAAKHKIRAALADSPGRILFEKDLLVNIAGLRELLARLQTLVPDPEQLLVVIEATGVLHLNWSAALTKAGYSVVAINPLIARRLYSLQNCIRDNKSDPIDARELCGIARTQGEKLLALYRFRIKPAQLCLQRLQSVRKAVRKSLSNLKKSYGSLLDLSFPELGELLEIDGVGIRQLLAQAPVPAAIARMRRSTLEKNWMLRPKAAALKKLAATSIADPELAAASGPALLAMLQSIAAMEARLHELDRQIETLALQSVDAQSKALLETIPGFGPITAHKVLAFLPNELLHTGSNRKAAARLQAFMGNDPRLRQSGQWKGQTKMSKRGVEMLRTALFQAAFNASRHDPELRAFYLRKRGEGKLHEVALSHLMRILTRRIVAVLRSKQPYRSQELIPLKNAA

SEQ ID NO: 486479 - protein, 388 aa, unidentified
MQDVADQSVAPTTIGADLCAIFISLELSRSTWLVTSLSPGGGEKMSKHSVSAGDIAGLLARFSELRRKACARTGKSFPIVVIQEAGLDGFWIHRVLLSEGIESHVVDAASIATSRRRRRAKTDRIDGETLLRALLAHKRGEPRVCSMVRAPTPEDEDRRRICRERKVLIMERVQHVNRIKGLLFSQGASGYEPLRRDRRTRLDALQTGDGRRLPQHLKAQVCRELDRLELLLEQIKAVEAERDALLNAEQTKVSAPPPMLLGVHGIGPEFASVLWSEGLSRQFDNRRQVAAYAGLAPTPWQSGSVNREQGISQSGNPRLRTTMIQLAWLWLRHQPRSALTLWFQDRNERNGGRRRKTTIVALARKLLVALWKYVSAGVVIEGAMIRPA

SEQ ID NO: 486480 - protein, 470 aa, unidentified
MNESSTVPARRRRKAVARGSGLPASLKRVNLNAAGIDVGAAEHYVAVPEDRDPQPERSFSCFTADLARLADWLEACRVDTVVMESTGVYWIPLFQVLEARGFEVQLVNARHVKNVPGRKSDVQDCQWLQQLHTFGLLAGSFRPDDQTCVLRSYIRQRDTLIRDAAAHIQRMQKALTQMNVQLHRVISDITGATGMRIIRAILDGERDPLRLAAMKNPRVRSSREQIAKALHGDYRPEHLFALRQSLELYDTYRKMMADCDGQIEHCLAGFDAKVDPAQKPLGPPKQVHRKPRGNEAGFDLRAHLYRIAGVDFTRITGFDALTVQTILSEVGLDPSRFPSEKHFASWLALCPDNRITGGVVKHTKTRKVVSRVATALRRAAQSAANSDTALGGFYRRLRARLGPAKAITATAHKLARIFYRMWKYHDEYVDPGLECYETKYRERTLNSLRKRAGSLGFQLVQLPPVTAEVS

SEQ ID NO: 486481 - protein, 356 aa, unidentified
MSYDVKYIGMDVHKEAIVIAVVNEGGKLVMESVIETRASSILQFLHGLRGELHVTWEEGTWAAWLYDLLQPQVAHIVVCNPRRNALLKEGSKSDKVDAHKLANLLRTGMLRPVYHGENGLRTLRELGRSYQTISKDLTRVMNRLKALYRGWGIACAGTQVYAARCREEWMSKLPQAGVRRRAELLYQQLDGLQALRREVRPEFLAESRKHKAAKLLRQIPCIGPIRAARLIGLMQTPHRFRSKRQLWTYSGLGIETHDSAQYRFVSGQLQRSKKPQQVRGLNRNHNHEMKEIFKSAATRASCGRGPFRDFYTGLLDKGMKPEMARLTLARKIAAITLTLWKKEERFDVEQVKTQAA

SEQ ID NO: 486482 - protein, 340 aa, unidentified
MSLYGGIDLHANNSVIVLLNEQDEVIYQKRLPNALPTILGQLAPYHTEVKGLVVESTYNWYWLVDGLMEADYRVHLANPAAMQQYSGLKYTDDHSDARWLAHLLRLGVLPKGYIYPKAERAVRDLLRKRAHLVRQHTANVLSVQNILARNTGARFSIKRIHELTKQELTTWLAEETQVLAVTSSLMVLDCLRHQIKRLEQTVHKRLHHTPSYEQLLTVQGIGTILAQTITLETGAISRFPSVGHYASYCRCVDSTKISNGKRKGTGNVKNGHPYLAWASMEAAQFARRFQPAAQRFYQRKLAQSRNNVVLARKAVAHKLSRACYYMMRDLVPYEATKAFG

SEQ ID NO: 486483 - protein, 345 aa, unidentified
MHSTTVAVDLAKDVFEVAVTGPAGRVERRDRLSRTGFGRFLAGQQPSRVVMESCGGAHFWARQAQLHGHEVTVLPALYVKAYRRRNKTDRADCSALLEAVKNPEIRPVAVKGPHHQALQGLHRVRSRWVSTRTSRINTLRGLLHEFGLTMPKGAGKALDLLPERIDAPAVPDALKPMLREMLAEIRELTRRIGDVEKQLKALTRDDAAVQAVQSVSGIGLLTSTALVASAVDARNFRNGRHLASWIGLTPREYSSGSTRRLGRMSKKGDVYLRMLFIHGARSVLLQAGRLQRQGKGLSRLQRWALDLKARTNHNKAAVGLANKLARIAWATWFHGREFDANYAPA

SEQ ID NO: 486484 - protein, 324 aa, unidentified
MNIIGFDVSKDTLDCCLLKSSAKTDDALPHVKQENGIVGFEKIRQWIKQNKIRKVAIVMEATGIYYEAAANYFAQYYTVYVVNPLKIKKHAEKVFSRTKTDKADAALIADYGKRFLDALIPYRQPEQVEYRLGKLNGLCVQLRAEISRHKSQIHAVNDAFIIQAHQSVITELAKQLESAHQEIQTLSQENEKINRHCQRLQTIPCINQQTALLILQNLLGKDFKTANKFIAYAGLSPEIKQSGSSVKVKEKLTRLGNKRLKSALFMPALSAMRSNYFKPFVMRLRSNGKPSKVIVVALMRKLLKIAYYIYKTEKPFDSNYKASS

SEQ ID NO: 486485 - protein, 282 aa, unidentified
MDVHKDSIAVAYVAQDHGAEVMYLGAIGTRQGDIDQMIRKMPSKAKHLIFVYEAGPCGYWLYRYVMKKGDDGWVVAPSLIPQKPGDRVKTDRRDAVQLARLARSGDRTAVDVPKVEDEAMRDLTRAREDALSDLQDAKCRLKAFWLRQDIRYVGRANGGPAHLRWLSAVVCPTPAQPIVFQAYVRAVHAQTERLQRLDQALQEHVNAWRVNPVVEALQAWRGVPCTVAVTMVSEIGDLTRVDHPRALMKCLGLMPSEYSSGEQRRQGSITKAGNTHARRVVS

SEQ ID NO: 486486 - protein, 369 aa, unidentified
MKKTIKYIGLDVHKNSISIGIADEGRDGEVRYYGKIDNDMNQLDKVIRKLLSKGAVLKFVYEAGPCGYAIYRYLKNNDIDCVVIAPSKIPHQSGARLKNDKRDCLSLARLHRAGELTVVYVPTEADEALRDLVRAREDAIRALRVAKQQLGAFLLRHDIVYSGKSKWSKAHFNWLTDIAMPHPAQQIVFQEYIDTVTDCSNRGQRLTEQVRQQSKQSRQHEFIQSLQSMRGISLIVAATIAAELGDLTRFESPGKLMAFLGLIPSEYSSGERVSKGSITKTGNRHVRKALVTAAHAYRFPARKSRAISKRQENLPKVVTDISWKAQCRLCTRYQYLVAKGKNSNVTKTAIAREIAGFSWAIAQELSKAA

SEQ ID NO: 486487 - protein, 340 aa, unidentified
MINNFLGIDISKDRFDVSLSFISNKGKRETRKRSFKNNDHGFQGLLSFLQKHNVEQVKACMEATGCYSEALAEFLHNTGHFVSVVNPACIRFYAKSKLIRQKNDQTDAEIIADYCQRQEPIRWAPPSPELKKLKHLYRCSAALKDELTLVNNHLEKKERLPKEVANAWEDLAMNIKQKIERIKNSLRELLNKHKELLENFQLLLTIPGIGEESAVAILAEVPNIKAFKDARQLAAYAGAIPRNITSGTSVHAKPRLSKSGSRTLCKAMYFPAIVAKNHNPTIMTFCKRLKEKGKHNMAIVGAAMRKLLHIVFGVLRSKKAFDPDHIKNYRARSLAESLVL

SEQ ID NO: 486488 - protein, 341 aa, unidentified
MTIVTLGLDLGKNWIHMVGFDGDGGIVLRRRVRRHQLPALTANMPACLIGMEACSGAHHLARALQAQGHTARLMPPQYVKPFVKANKNDYRDAEANAEAVRRPTMRFVPVKTESQLDLQTIHRVRQRLVGRRTALINQLRAILLERGITVPQTRRALETRLPGILADEGNGLSPRMRRLIEDLREEWRDLDRRIAAFDAELVAVAKHDADCRRLCEIPGIGALNATALVAAVGTASGFTRGRDLAAWLGLTPREHSTGGKQRLLGISKRGNKHLRTLLIHGARAALPHLARRCDAQGRWLQSLLARAHRNVVIVALANKMARMAWAVLTGQSYRHPTVTAA

SEQ ID NO: 486489 - protein, 351 aa, unidentified
MSEYIAFDSHKRYTWVEREDRSTGKARHERLWHAPGAIRSYLGASEPGTDVAVEATGNWYWIVEEIEQAGLRPLLVHPRKAKLMMGQVNKTDHLDAQGLNRLQRNGTLPTVWIPPGPLRDLRELTRTRLVLVAQRTRLKNRISATLAKYGAPPSEASDPYGKRGRAELENNLGRLPEQARWVSEQLLAQLDFVSAQVKQLEKRLGELVEATEEMQWLMTMPGVAVILAATIALEIGEVQRFPTAMHLASYAGTTPRVHASGGKVRYGTLRADVNRYLKWAFAEAANSVAVNHGRHPEWHVTQLYARLRLRKGHAKAIGAVARHLAEAAFHVLRKRQMYRDPTLGRGRTSEV

SEQ ID NO: 486490 - protein, 416 aa, unidentified
MKLFVGLDVSSDKLDACFLTDTLTILHQGSYANDIEGATQIKEAIVNMFEQFAFDKVVIGMESTSMYSAHPLIFFHEDEDLKNMHCVVTIEDPFKIHNYAKVFNADKTDTNDAFFIADFLRSERYSHSPLKEEQFISLQRLTRSRMQLVNMLVETKQHFIENLYYKCNTLSRELRDEESLSTTVFSTSIIELITSDMGLDEIAQLPLNKLAETLQTLGRGRFKHPEKLAKTIQKAIRSSYRLSPTFETSIDIVLATLVGQMRSLEASIKQLEKGIERIVKAMPEYQCLTSIPGVGLVYAAGIIAEVGQIERFENQAKLAKYAGLHWKKSESGNYKSENTPLTKRGNRYLRYYLIEAANSVRRHLPEYNEFYRKKYQETPKHQHKRAIVLTARKFVRLVDTLLRNHQLYTSPRSVES

SEQ ID NO: 486491 - protein, 322 aa, unidentified
MSLPNPLCVGIDVSKATLDIAATCEFAQFTTGNDADGFDAIIAELRKHSVALILMEATGGLEAAVVCSLQAEGFEVAVVNPRQARDFARAMGYLAKTDRIDARVLAQMAEVINRHPERERFIRSLPDAERQVLTAMVVRRRQLITMLVSERNRLHPAHPQSRKSINIIIQALENELARIDEDMNRHIQSHFKELAERLISIKGVGTMTAAALLAEVPELGSLSRREISALVGVAPVNRDSGTMRGRRTIFGGRAGARTALYMAALVATRFNPVIKAFYMRLLAAGKAKKVALVACMRKLLTILNAMLRKNEEWNESYHHVAP

SEQ ID NO: 486492 - protein, 407 aa, unidentified
MQVLYPRCAGLDVHKDSVVASVRLAQGAKVTRELRKFGTTTHDLLALLDWLESHAVTHVAMESTGVYWKPVWHVLEGHCTLILANAQEIRNVPGRKSDVNDASWIADLLAHGLTRASFVPPAPIQELRDLTRTRKQLVRERGHHVQRLQKILEDANLKLASVMSDILGQSGRAVLEALVAGETNPERLAELTHRLKATSDELRDALNGRVTPHHRFLLQLHLTQIDACDRAIGALEARATEGLAPFRRAAARLCTIPGVREVTAQVIVAEIGADLTPFPTAGHLLSWAGLCRRLDESAGKRRSERVRRGNRWLKTSLIQAAWAAVKDRDSYLHAQFHRLKSRRGAKKAIVAVAASMLTAAYHMLRHDLDWRDLGADHFDRRHHERLARRLVHRLTQLGYHVDIQKAA

SEQ ID NO: 486493 - protein, 454 aa, unidentified
MKKDDSPKAQGAFLSQKKFGQGLPIYNPHCAGIDVGDTAHDVAIGTDSGHEVRKYQSFTEDLVKMVQWLQSEGITTVAMESTGVYWLNLYLLLEESGIEPCLVNAKHVKNVTGRKKDDTDAIWLQKLHSCGLLQKCFQPESSIRVLRTYVRQRKNVISLSSDTVRRMQKALELMNIKLHTVISDILGKTGIQMIEAILAGERDPNTLIKLKDSRIKANEEEILKSLHGIWKDEYLFMLQQAYDSYAFYQSQLRQCEEKIKDHLLLLAAKVLDGDISDLDIERKKKPQKNGFSFEAGKLLKVIVGVDLCKVECISEVTAVEVISEVGVDLKQWENVKRFSAWLNVVPNTKITGGKIISSKMQKKKNQAGRSLRMAASNLSKSKSPLGDYSRKMRSRLGKKGAVTAGANKLSRIIYHMITCQQEYNPLTLVTNQEKWKEQRIHYLEKQLFQLKKIA

SEQ ID NO: 486494 - protein, 370 aa, unidentified
MDVHTTNYTLCAMEPIIGEDDRVFATIKVTPDYKNILLFIENLKTKLGLNDEYDIQCGYEAGCLGYSLYKQLTAAGVKCVILAPTTMLTPQGVRIKTDMRDAYMIAQCLSYGGYHAVYIPTEDDDSVKEYLRMRNDHKLALKKIKQQINAFCIRHGFCYDGTKWTQAHLKWLKKLEITNQLYRETLDEYMASYEEQEAKIERYDKRIEEIAEQTRYHDKVKKLECFLGIKTHTALSLIVETGDFERFAKGNQYASYLGLAPGENSSSDSIHRLGITKAGNSHLRQLLIEASGGICKGAVGHKSKDLRARQNGNTAEVIAYADKANTRLRSRYYKFIRHGKKRNVAVAAIARELACFVWGMMTDNIEMKAV

SEQ ID NO: 486495 - protein, 409 aa, unidentified
MEELGLRPLYRRVAGIDVHRMLHVVTVLIEQPDGSVQQHTREFGGFKRDCCALAAWLVEMQVELAIMESTGIYWKSVYAHLENAGVNAWVVNAHRVKNVPGRKSDLADSQWLAVLARFGMVKASFIPPQDLRELRLVSRYRRKLGAMLASEVNRLHKTLDDAGIKLGSVVSDINGVSARAIVAALIQGQPVAQLLGLARGRLRKKLDELDASLRGDLSARHLFVLAQQHAHIAALQRQIAEIDAYLLQAMQPYAWAHQLLQTIPGIDQIGAAMILIEIGIDMQRFGKAASLAHWAALSPGNDESAGKRRSGRTGHGNSVIRHILCECANAARMTKSTLAAKYRSLMVRKSHKKTIVALAHKMLRAVYRSAHRLRRHQREEERAALDQATEEDRPLADASAGCRRPLNRR

SEQ ID NO: 486496 - protein, 418 aa, unidentified
MKVVFPTCCGVDVHKSFLVATIIKTPKESLQPSYQKKRFSTFNSDLNHFANWLHENDCLDVCMESTGKYWVPVFNILEKRGIRVTIANPKWVKAVKGNKDDTKDSKWIGDLFRIGLVKSSFIPAKDIRILRELTRYRYKLTSMKSSEKNRFQNAFTVCNVALDSVVSDMFGKSATAITDYLTSDEDFDPQHCVSLLHRSLKKKAEDVLSSIEGYEITLEQKCRIGIVRDHLHYIEKLIERVDICINTMVEKYDGAISLLRTIPGIDRSSAITVISEIGVDMAQFGSSKRLCCWAGLTPGNNESAGKKKSVRISRAGVYLKPVLVQAAHAAVKDKLNPYYALKYERIAKRRGKKRAIVAIARMILTAIYSMLSTGEIWNPVDLFKVDMPEHLKEQQLQKAMKQAVRFLEAQGLTVLDSA

SEQ ID NO: 486497 - protein, 298 aa, unidentified
MIYIGMNIHKNFIQACAMDSKGNVLKEQRIGAEEISDFIKPFKNHSIKAAIESTCNWYHVYDTLESMGIDTVLVNVRRTRVIAESKIKTDRIDAKTIAHCLRTGFIAESWIPPRKTRELRNIVRHRLSLRKEITKFKNRIHSILLRNGIKHEFTDLFGRKGMRFLRNIELEGSDKYKLQSYLRVLESLMEEKQRADNKISQLCRMDEQAMLLTSIKGISYYSAMVIVSEIGDVKRFPNPKKLCSYAGLVPRTIQSGNHVYHGRIIKECNQNLKWILVQCTHVHVMCCMNSPVTKLYYR

SEQ ID NO: 486498 - protein, 318 aa, unidentified
MSDYSVVIGIDVAKAHVDVAAIGAVLAGKRFANDTEGQTALVAALAPLRPAVVLMEATGGYEAELACALQAAGLPVAIINPRQGREFARSMGQLAKTDRIDAQVLAELAAVLARRDDLESYLRPLPDAQQQDLAALVARRRQLVTMLGAERQRLAHARAAVRPSIEAIIRAIRQQLDLVEGEMAEHVTRHHAGIDQLLRSAGGIGPIASATLIADLPELGHLNRRQISALVGVAPFARDSGAMRGRRTVIGGRADVRRTLYMATLTATRYNPAIRDFYQRLLAAGKLPKVALVACMRKLLTILNAMVRNQQHFVSVHG

SEQ ID NO: 486499 - protein, 391 aa, unidentified
MVCVGIDVAKDKHDCCILDSDGMVRADCFTIPNNMDGFKQLLQTIRNCTKKSDKIKVGLEATGHYSYNILGFLLDKDLAVYVMNPLHTNLYRKSLSLRKTKTDRVDARTIATMLLSDVDLKSYTDTAYHNEELKSLTRYRFDKVRERAKLKQSVSRLVTILFPELEKLVPSLHIASVYALLSEYPGAKQISEIHLTKLTNLLATASKGRYEKEKAIQIREAARTSIGSVMSAKSLELKHTIKLIKELTSEIDEIEDSIQQIMDELHPPILSIPGMGVHSAAMILAEIGDFSNFDSPDKVLAYAGCSPSTYQSGKLTNCYAHMEKRGSRYLRYALYNATKYVCHWNPVFAEYLAKKRSEGKHYNVALSHAMKKLVRLIYALQKSGNAYLTAA

SEQ ID NO: 486500 - protein, 366 aa, unidentified
MKKISTMQAFSNEILKEQKLTIGVDLGDRWSFYCVLDEAGKIILEQKVSTTPEAMKQTFGKIPRSLMALETGTHSPWVSRLLTELGHKVIVAHAQKVELITKSNRKDDRHDARTLARLARIDPELLGPVRHRSAKAQIHLTVIRARAELVSARTALVNAARGLVKSFGQRLPKCGTDQVNEKLAEGLSAELRDVLVPLLREVESLSQRIQEYDERMEKIAKEVYPEVSLLQQVKGVGTQIALTYVLTIEDPYRFAKSREVGCFLGLKPGRRNSGKSEPQKRISKEGDRYLRTMMVQGAHYILGPFGEDSDLRRWGRKLAERGGKNAKKRAVVAVARKLAVLLHRLWVSGEVYEPLRNSQKAMRAVA

SEQ ID NO: 486501 - protein, 349 aa, unidentified
MLADEVDYVIGVDTHRDQHTLAVVGAPAGAVVAQTVVGANGAGYAQALRFASRHASGDRAWAIEGAGHYGAGLARYLAGRGETVLEVGRQARVERRLRGKDDPLDAIRAARAGLAAETLTLPRAGQRQEALRVLLLARRSAVDVRRVALVQLRSLIVTAPEQLRDELRRLPLSQLIRRCSHFRRSHSRTPDELAVVLTLRSLARRIEAATTEADELEREIRQHVRALAPELLDEPGVGPIVAAQLIVTWSHRDRVHSEAAFARLAGVAPLPASSGQTIRHRLSRGSDRQLNRALHTVVLHRRQHDPATRDYIARRVAEGKTSREATRVLKRYLARHLFRVMQNATPLTT

SEQ ID NO: 486502 - protein, 485 aa, unidentified
MFRSTLTGLWCCEPVSKSGGGEHSCCPREPWIVALSTSVRILIHPLSSEHTPLVQIKPATRWSKRKVRCVVEVVHPRCAGIDISKKDAKVCVRIQGGGGRRTSSTVTTWGSMTNQVLALRDHLVAAQVSVVVMEATSDYWRPFYYLLESDFQVMLVNAREAKNVPGRKSDVSDAAWLADLGAHGLLRASFVPPEPIRQLRDLTRARTVITRERTREVQRLEKLLEDAGIKLSSVASDITGVSGRLMLQALIDTGGAIDPAGVADLAKRRLRSKIDDLTEALTGHFSGHHAFMARLFLDRIDSHSRDIVALSARVEELMEPFLPIRVLLESVPGFSQIVAEIFIAETGGDMRQFPTAGHLASWSGVSPGSNESAGRIKSTKTRPGNRYLKGALGIAALTAARCKNTFLSAKYRRIASSRGPMKAVVAVEHAIIVAAWNMLTGGEFYRDPGPDFYTRRDPGRAQARAVKQLEALGFHVTIEPLSAAG

SEQ ID NO: 486503 - protein, 355 aa, unidentified
MAPFGSPSPSKIAARVVFQSPNSCLGRPVRAEPVIQQGGDTEMSELYVGVDVSKEHLDVASSDGTSLRVGNDAAGHQELVTRFSAAPPALVLMEATGGLERALAVQLSAAGVALRIVNARHVRHFAKATGLLAKTDRLDAQALVHFAQTLKPEPRAIQPEQTLALQALIVRRRQLVEMLTMERNRLRTAHRGVRKDLQSSIRWLEKRLAGVDDDIDGALRECGVWREKVQLLESVPGIARVISVNMLASLPELGELNRHQISALAGVAPFNRDSGRWQGRRSIYGGRPLVRSALYMAALVGARHNPVLRTFYQRLRAAGKPAKVALTACMRKLLVILNTMLKTGQPWGGHLSAHA

SEQ ID NO: 486504 - protein, 343 aa, unidentified
MDQYIGLDVSLKDTAISIRQDGKRIWRGKCPSDPKVLAQVIRKHAPHARRVVFETGPLSTWFYHALTAEGVPAICIEARHAQKVLDETLNKTDANDADGLAQLAEAGFYKAVRVKSFDAMLTRTLVGARNQLLSISTQLSNQIRGLMKTFGLIVPNGTGRVFDGNVRELLDGNDGLARIILPLLEAWRDIRKRAADLGRQLVAAARQSQATKLLMTIPGIGAVTAVSYVAAIEDPGNFRTSRSVGAWLGLTTRRYQSGEVDYDGHISRRGDNHLRGLLYEAATVILTRTSARNESRLKSWGLKLRERLGFKRAAVAVARKLAVIMHSMLKTGEVFNTLAGATA

SEQ ID NO: 486505 - protein, 412 aa, unidentified
MQTLVERGCGLDVHQATVVACLLIVGKDGKVQKQMRTFGTTTRELLNLREWLLSQGCTHAAMESTGVYWKPVYAILEGGLEIVVANAQHVKKVPGRKTDVKDAEWIADLLCHGLLRSSFVPPKAIRELRDLTRYRRKLVESQAAERNRLLKLLESANIKLASVATDVFGTSGRLMLRALIAGKATAQEMAELAQRKLRSKIPQLQLALEGKLEGHHRFLLKLQLDRLERAEGDLAVLEQRIQEKLEPYAAQLALLREIPGVDWTLAAVIIAELGVDMSVFQSVSQVASWAGVCPGNNESAGKRKSSRIPKGNVYLKTALVEAAHAAARTKGTYLRDKFYRLKARRGYKRAVVAIGHKILVSVYHMVSQNVSYNDLGDLYLDKLNKNHLTRNLVHRLERLGYSVILAPQQKAA

SEQ ID NO: 486506 - protein, 429 aa, unidentified
MKKNDKTQTKKSPAGKGGTGRGPIQRDAKEVMAELVAKLSQRLEPGSATATVGERKQQASLGPNRDRVTVGVDLGDRWSDFCVLGLDGEILTEGKLRTTREDFAELFQSLAAARVVMEVGTHSAWVRDVVAGCGHEVLVANPRQMEGPKKRKRKNDRIDAHKLARVGRMDPQSLFPIHHRSVEVRQDLVAVRARDAVVGARKDLINAARGLAKGLGGRLPKCSTASFPRKVKEGLPAEAREMLLPLVELVESLGNCIKTYDDAIERLGREKYPQTKLLRQVKGVGPITSLAYLLTLENPERFKRSRDVGPYLGLVPKQEDSGDRQPQLRITKMGDMMVRRLLVGSAQHILGPFGPDTDLRRYGLRLSERGGKNAKKRAAVAVARRLAVLLHHLWVSGEVYEPLRHGQAQAAQEDARRTGSTEASEAAAA

SEQ ID NO: 486507 - protein, 347 aa, unidentified
MEHVAIDLGRPNSVLCELGPAGTKVLRRFRLDRPSLDRIFKDRPRCRVLIESSTESEWVAQHIEGLGHEVVVADPNYAAMYGERNRRVKTDGRDADALFEANRLGVYRVAHRRSEGQRRVIAVLRVRGALVGTRTRWINVVRALIRRAGYRVRSGEAASFADRTDELKLPAELRELVRPLLGLLVPLNEQIKQLDREMAGFGKADPRVVLLQTAPMVGPQTAAALVALIDDVSRFPKAHKVEGYLGLIPSEWSSSERRIKGGITKRGDSLVRWLLVEAGWSILDSRRPDCFELQRWAQGIAGRGGRKVAAVALARRLAGILYAMLRDNKPFDPTRLGNNNRQRRKVA

SEQ ID NO: 486508 - protein, 425 aa, unidentified
MEVIHRRCSGLDVHKETVVACVRLVLDGKITREVRRFETTTSGLLLLLAWLTEMGCTHVAMEATGVYWKPVWNILSDGDFELVLANAAHIKNVPGRKTDVSDAAWIADLLAHGLIRSSFVPEQEIQELRELLRTRKQLTRQQSRHILRLQKTLEGANIKLDSVITDIVGKSGRAMIQALIGGETDPVKLAALADRRIKASAQELREALRGRVTDHQRFLLHLHLQHIDFADSAIQDIDRNVSALIARMDQEVEAGQTRATFQSLILLLMTIPGIDVLSARIILSEIGRDMGRFSTAGHLLSWAGLCPRNDESAGKRRSTRLRKGAPWLKTLLVQCAQAAARKKGSYFNAQFLRLRGRRGPKKATCAVAASLLTTIYHMLKDGTQFQDLGANHFDRRAKDVRAKRLVAQLANLGFDAKLTPFAQAA

SEQ ID NO: 486509 - protein, 354 aa, unidentified
MSGLNSGIAAIGIDIGKNSFHVVGQDERGTLVLRQKWSRGQVEARLANLPACLIGMEACVGAHHLSRKLQELGHDARLMPAKYVRPYSKGQKNDFRDAEAIAEAVQRPTMKFVATKTAEQLDLQALHRVRERLVGQRTGVINQIRAFLLERGIAVRQGLRFLRTELPAILATRIDVLSPRMLRLVEDLAGDWRRLDARIEGLSNEIEALAHQDQACERLMTVPGIGPIISSAMVAAIGTGDAFSKGRDFGAWLGLVPKQISTGDRTILGSISKRGNRYLRALFVQAAWVVLVKLGKKWERYGLRSWIEAAKKRLHRNVLAVALANKLARIAWAVLHRGRAFECVKRDEIASRPA

SEQ ID NO: 486510 - protein, 318 aa, unidentified
MAHSGTLVGIDIAKGKVDVAIRSAALQAWFANSEEGQQRLLACLKEHGVDKAVMEASGGYERSWAVLLGAAGLEVVIVDPKRVRHFARSAGCLAKNDPIDARMIAWFGEVFCDTPGKPQDEARQELDQLVTARLGLVRLKGQIESWGEHDQPETVQKVHQALLKAVAGQLAKLHKVIVAKLEKTPQFAQRAEIIQSVPGLGDAATAGLIALLPELGHVDRQAAAALLGTAPFDDDSGERRGQRHIKGGRRKLRNLLFMPILGAATQHNPVLKAHYQRLLAKGKHPKVALVACMRKLIGILNTMLARGEKWDPTKHALA

SEQ ID NO: 486511 - protein, 340 aa, unidentified
MESTTVAVDLAKSVYQLSFANRAGRVQVRKRLSRPQFEKLLASEPPTRIVMEACASAHHWARRAQAAGHEPVLLPPHHVSPYVRGNKTDSADADALVRAAADPSLHPVAVKSEDLQALQGLVRIRQQYQDTRRARINLVRGLLTEFGVVLPRGAAGIVPRLRQALGSLPRRLSATLHEVVEEIAALEDRIASLDRELAELARERDDTARLMTLPGIGPLTATAFVGAVPDIHGFRSARQFSSWLGLTPRERSSGNTRRLGAISKRGNVHLRTLLIHGARAALLAARRRARSGKALTRLQHWAVHLQDRIGHNKAAVALANRMGRIIWAMWTRELDYDSAR

SEQ ID NO: 486512 - protein, 355 aa, unidentified
MLADRVDYIIGVDTHTATHTAAVVTPTGAALAHRTVPADADGYLHVYRFAIEQAPGRRVWAIEGTGSYGAGLTTHLLEQGEWVVEVDRPARPARRNGTKTDDLDAVRAAREALGREHLAQPRQRGDREAIRVLVTTRQSAMQARTCAINHLKALVVNAPERLRQQLRALATDQLLARCARLRSHPTQPIEYRATIAALRRTAQRSLALAAEADDLHAELDTLIRRRAPWLLAEPGIGVICAAQLLNAWSHAGRLRSEAAFAMLGGAAPIEASSGKVVRHRLNRSGDRQLNRALHTIVLSRMAYHAETRAYVARRIAEGKTAREIQRCLKRYLARRLFKLLEAPPAHAQKEKIATT

SEQ ID NO: 486513 - protein, 338 aa, unidentified
MSVYAGLDVSDKTTHICVVDVEGRVVRRDVVVSDPDALAKWLNRHCPDLVRVVLETGTLSTFLYHGLAERGVTVECICARHAKGVLSARVNKSDVHDAEGLAQLARTGWYKRVHMKASATHIDRAALRIRSQLITARTSMANQLRGLLKLFGLRMGTARTPGRRAERLAALYAQRPDLKALFAPLIASMEAVEEQLRASNRLLNERAKADEVCSRLMSVPGVGPITALTFTSTIEDPHRFARSDDVGAYAGLVPRRSQSGERDTNGHISKAGDPMLRRALYEAANVALSQVKRPFALQEWGRKMAEAKGAKRARTAVARKLAALLHSLWLNETEFRWA

SEQ ID NO: 486514 - protein, 429 aa, unidentified
MNSLFISVGVDVGSDFSYMSLALPNQTIFGKPFKIVHNNLNSLEKAVQVIREASEVHSLPSRIVMESTGVYHYPLYCYLRDKGFYVVVINPIISKNSTNMDIRKVENDKSSSKKLALIGLKPDLKISVMPSDTVLDLRNLVREYYNLVDCRSAYVNKLRGILKVSFPGYAGIFSKLTVQTSLALLEKYPSAADFLSAKKSSITKIITKTARFGKAYAEAKYQAIIEAAKSAGVFGHFVPSNSTQVRLCVSFIRQYDKEVKDILAAIHKFVAQHDDELFVRQIRLIETIPGAGFLSAVTVICEIGDFSAFKSPKQLFAYFGIDPAVKQSGNFTGTQVKMSKRGSAVARRAIFIVAVVGIGIKCNGTANNPVLRQYYEHKCKSKPKMVALGAVMHKVCNIIFAVLRDNQPFTLISNDEHIRIYQEKLAAAN

SEQ ID NO: 486515 - protein, 479 aa, unidentified
MIDDRRLVGIDLGIASDHTVRVLDGRGGEVCRRRARPTVESLAAVETAALAGVAPGTRLEVVIEPTGPAWLPIAVFFTARGHQVFRVSSAKAADLRRFLSRHAKSNGIDADTLARLPLLAPASLHPLELATTAETAALDRRVRACDRLTQQGALHQRRIKDLVRQLMPVTPLTGELTKTDLAVLGRWPDPRALLGAGRARLLTVITTVSLGHQGLDRAEQWRAAAAAAVELYAGHPAMAWADLAAEVATEVALLAAARAELAGHAAARAEAYRFTDPARLAASLPGLAEVGAPTVTAIVGRAARFRTGRQFRSFTGLAPRASETGQTDRKGQPMSKAGNRLLRTTLIRAADNARRHDPQLAKIYYVQMVERGAEHLKACCVVAAHLAERLHAVLVRGMPYVVCDTDGTPVDPATAKQIIAEHWTVPREVRARRRSRKPEPGSRAGKAPQHVLAGHDRSDPRRVDRRGDLPRAASCSRPA

SEQ ID NO: 486516 - protein, 353 aa, unidentified
MSRMQEKIIDKSTIAVAGIDVGKSQLDVFIHPANIRLKISNEKRAIRTLICELTKHDVALVTLEATGKYHVLAHEMIHDGGIDVAVVNPFRSRQFSDSMGKLAKTDTIDAEVLAHFAQRMQPEASTPMSKQVKMLRDLHSARRQVVQEISDLKRKLHTTDNRFIARQIKSRIAMGERHKVSLESEIHTGISSCPELLEKFNILISIPNVGKITAATMLADLSELGQANAKEIAALAGVAPMNWDSGAKHGKRMIRGGRQSVRNALYMCAVSSIKRNDPFGKTYRNLVKRGKNPKVALTAVMRKIVIVANTLITQRRTWKEVPPPSSPLAYFYSGRASLELCGDSAQHGLKKIA

SEQ ID NO: 486517 - protein, 389 aa, unidentified
MPTMTYPSTASEQTYIEVTGGVDTHKDTHTAAALDASGRLLGHREFAATAAGYAALLAWLGTLGQLVRVGVEGSGVYGAGLARFLQAAGVELVEVDRPDRKTRRWQGKSDPVDAEAAARAAQAGRASGVPKTRGGKVDALRALRVARRSAVAARADAQRQIKALIVTAPDALRMTLRGLGDRELIAHCATRRPDRAAVGDPTVATMLALRALARRHQQLSVEIDELDALIGPLVTAINPTLIGLSGVGTDVAGQLLVTAGDNPQRLRSEAAFAMLCGAAPLPASSGRTHRHRLNRGGDRQANAALYRIVLCRLRWDLRTRAYALRRTTEGMSKPEIIRCLKRYIIREIYTALLNPQPSSVPAITSTAPEESTWSARSAARTNDVDTDKR

SEQ ID NO: 486518 - protein, 341 aa, unidentified
MGEVSTVGIDLAKSVFQVHGSDQSGTGIFRKKLRRDQVLPFFSSLPRCVVAMEACASAHYWAREIAAVGHDTRLIPPAYVKPFMKRQKNDMADAEATCEAAQRPTMRFVQGKSAEAQASAAVFRTRDLLVRQRTQLINALRGHLTEFGYIVRQGVGHVGKLVEIVGDPTSDVPAEARLVLAVIADSLKALQAQIALLDREIASRAKADPVAKRLMTIPGVGPVIATALVALAPAASTFRRGRDFAAWLGLVPRQHSSGGKERLGRTTKMDERSLRRLLILGASSATKVAARDPDRAGAWLAGMLARKPRILVTVALANKMARTVWALMAHSGSYRAPAAAV

SEQ ID NO: 486519 - protein, 339 aa, unidentified
MQVTTIGVDLAKNIFQVHGITEADEVAFNRPLRRAQVLPFFARLDPCLVGMEACSTSHFWARELTRLGHDVRLIPPMYVKPYVKRGKSDAIDAAAICEAVTRPTMRFVENKSIDQQALLSLHRARSLMVRQRTQLINALRSMLAEFGVYVAKGLARIIGFSQGVLAGTMLELPEIAQDVVHNLCGQLDLLCEQVRWYETRLRLEAKCDPRVKLLQTIPGVGPVTASALAATVGSGHQFKNGREFAAWLGLTPTNRSSGGKERLGKITKMGDQYLRQLLVVGMTSLVRQTKSHPERANKWLTALLERKPARLATVAMANKTARIVWAVLTKNEPYMPRTT

SEQ ID NO: 486520 - protein, 316 aa, unidentified
MYLGIDVSKLTIDCCLITDGQNHQKKFQNNEGGFEQLTKWLQSHKVSDKLHCVCEATGTYYEALAEYLYSRYTITVENPRKIKGYAIAELQRSKTDTQDAKLIAQYCQDRKHKLKAWQPPAKEQKQLQEIARYLDYLKQQRATEKAKQHEAPDYIKSHIQTTISNLTAQIQTVKKQLLQFYKDNPSYNNLRKRLKTITGIGEQATAVLLSTYKRHEFKNAKQFTAYLGLDPRKYQSGTSVNGKSRISKIGSSEIRKSLYMPAVVAYRCNAFPEFVGRLKKKGKHIKLILIAIMRKLAVIAFTLMKNGQDFQMERYK

SEQ ID NO: 486521 - protein, 359 aa, unidentified
METQSNKIDFSNQNIYVGFDVHLRNWKVTILTEKVAVKTFSQDPNPELLYQYLKRNFPGGIYHSAYEAGFCGYWIHNKLKSLGINSIVVNPADIPTTNKERVQKEDQRDSKKIARSLRSGDLRAIYVPGIKTLEDRSLLRARSTMVKDLTRFKNRIKSFLYFHGIDFPESFNKAQSHWSKRFMTWLESIELTEESGKITLDSFIHQSKNLRASVLDLTKKMQKLSQSEPYQNNVTLLRSIPGIGILSAMTILTELETILRFGNLDQLCCFIGLVPSTNSSGEKEITGDITPRGHSILRNAIIESAWVAVQHDPVLMKSHNDYCKRMDPNKSIVRIAKKLMSRIKFVLKNKQPYVSSWPK

SEQ ID NO: 486522 - protein, 369 aa, unidentified
MDKDTTYVALDDSKRKIVAGILRPGDAPPELREIANEPRQIRRLFERLKREGPVAACYEAGVSGYDLHRQLTALGVACSVIAPALTPRRPGQRIKTDRRDAVKLVRLFRAGELTAIHVLDESEEAVRDLVRCRDDIRRDVLRWRHRVLKLLARHGRAYLTGKNWSHAHWRWIREQRFELPPLQRAFEATVFALEQALARQAELDKELAALAATAPYREPVGWLRCFRGIDTRSAIILLAEVGDFQRFRRPRELMAYLGLVPSEYSSGETQRRGALTKAGNSHARRVLVEAAWHYRHRPTIGRALADRSQGQPDEIVSHAWRAQQRLHRRYRHLLGHGKRTPVAVAAIARELVGFIWAAMTRHESRRQAA

SEQ ID NO: 486523 - protein, 368 aa, unidentified
MREHITHVAFDMHQASITAAWLLPSANTPELRTIPHEPKPFRRLVKEILTQGPACACYEAGPLGYAPQRQLEAWGLPCAVIAPSLIPRRPGQRIKTDKRDATKLVGRSRAGELTAIRIPTPAEEDVRELVRCREACGTDALRAQQRLRTFLLRRGLRSPDGPAGSQAWWAWVQALRLPDPAAQRTLDEYCLAATTLRARWKALDPEVAALASRDPWVAPVARLRCLRGIDTLTAVTVLLEVFDFRRFNTPRPFMSFVGLVPREHSSGGKVARGGITQTGNAHLRRVLVEAAWHYRVPPGCRPRPNQAVQARRAGQPPAVVALAEQAEARLHRRFARLLARGKRPVIAATAVARELCGFLWAMMVAVPA

SEQ ID NO: 486524 - protein, 360 aa, unidentified
MSNKVIFNVDELFISVGIDVGADFSWMSIALPNQQFVGKPYKILHNSMDSLTAAVSKIKEAEELYSLESRIFLESTGIYHYPLFCYLRDKGFNVSVINPIITKNSTNINIRKVHNDRFDSKKAALVGLKPDLKVSLMPSDLALNCRNLCREYYDLMDNRSAYVNKLQGELRMAFPQYLGIFSKVTVNTSLTLLETYTSPAAFIEADRQEIIDAIKSTARFGLTYALNKYNAIIQAANEANEFGYIIDSNIKRIRLYIGFIRKYDEEIKGILGSMHELVDANEATDFVKQIHLIETFKGAGFLSAVSLMGEIGDFSAFSKPKQLFAYFGLDPAVKQSGKFEGTKTQMSKRGSAIARRVCHT

SEQ ID NO: 486525 - protein, 370 aa, unidentified
MLDTTTFVGLDVHARSIKAVSLDVMTGEVRAATFGYDAGAVAEWVRSVDPGARCVYESGVTGFDLQKRLSGLGVDCVVGAVSKMIKPSADRRRKNDRNDAEFLARMLSVGNVVEVWVPDDECEAARDLTRALEDARDDLSRSKQRLSKFLLRHGLAFDERTPTGRRKGNWTRAHWSWIESIRFAERADEEVLAYYVDAVRRAAEEKARLERLVEGEARKPRWRRRVDSLRCLKGVDTASAADLVFEAGEFSRFRNARSFAAWVGLTPSEHSSGESDRRGAITKAGNKHLRKTLVEAAWHYLTCSGRPKDLAKGQAPDRGARRHAAKGVRRLVERREALLARGVHGSKANVATARELACWVWAVGLMAEEA

SEQ ID NO: 486526 - protein, 318 aa, unidentified
MHMLADLVDVVIGVDTHKHTHTAAVVVAATGAMVAQVTVAATPAGYRQLLKLAGEQPGRRVWAIEGTGGDGAGLTRFLAAHQEQVVELDRPKRAARRHGAKSDPIDATRAAREALGRDRLAQPRAAGQRAALSVRLTARRSAVQATTDAQRQLHALVVAAPEAIRERLRSLTTPRLVSTCGRLRQQTTWDTETTTVAASLRAVARRIQLLDTEIAEHTRAITTLVRAWRPDLLSRTGVGPIVAAIVLCAWSHPGRCPSDAAFAMLGGAAPIPASSGQTVRVRLNRSGDRHLNQALHVIEGVRDARVMWGLGAASDRGR

SEQ ID NO: 486527 - protein, 336 aa, unidentified
MYKSMNNFYFIGVDVSKKKLDFCVMFENKVIHEEVVANHQGAVIALIRQLENDYGIDNTQMLVCAEHTGQYTYPLVCACESVECKLWLEHPSNIKYSSGVQRGKNDKIDARRIAIYAARFEDKVRYYERPEQEIERLKQLEAERSLYVVDLAKYKAQLKDQREYMPERSYNDKAKRLKKLMEGLEDAIKSITDEMENIISSTEVLGRQYELLQSIDGVGPVVALNMIVVTEGFTRFDNARQFNCFAGLAPFQYTSGSSQHSRARVSHRADKCIKTLLHLSAVSVISKAGGELKEYYLRKVEEGKNKMTVINALRAKIVARMFAVIKKNDFYKPILS

SEQ ID NO: 486528 - protein, 482 aa, unidentified
MKKQNIYQNRSQELYALFENAGNNSKVMCIPVDYAKKHHLAMFCNGCGDIIRKPFPVKNSPEGLNYLVDQVKRSCSHRNIQLQHVFFGGEDISSYSESFIHSLRSMGWLVASVNAHEAKKQRENLQASTDRLDLMGIATMLISHRANTCPAQSGIYKNLRTIVRHRKKLVKIKTEVKNRIHALVDQLFPGFLDETRSGIMPFSKSSLYLMSDRFSTRQIKRRKCQSLTKKLNRFGTKNPDKTATKLQSYAANAFSAPKPHMHTLQLSLSCHVKHYLCLVENIKYLEKETALVLSQTQGAFLTSIKGIGIILAAGICSEIGDPFIQKSATNLSSYAGVVPRVKQSGGPDSAPRTGSVSKRNNHILKDYLVQASNHIGRHGPEDLNQDFKRRKCQGQNAEFGMARRLMRITMCMMKTWQIYLPDNLRTERADKKDRACYYLSIWPYITKKWSKLTALDKVFAKEQPLGQWRDVVQKIYKVNLDL

SEQ ID NO: 486529 - protein, 324 aa, unidentified
MAKRITICAGIDTGKRKLDVAIDGSSLQLQVENTAEGHKVLLEWLRRHKVKRIGIEASGGYELPVVTELRRKRFVVVVFQPAQVRAYAKFHLQLAKNDKIDAALIAACTAAVKKIHAAPDPRLQPFAEHLTLIEQIGEDIKLYKNRIETCRDPRIQKLWKEEISRLVKRERAELKALVAAIRQHRDRAQRLELIYSVSGAGMPTAVAILVRMPEIGTLSREQVAALAGLAPYDDDSGERSGARHIDGGRKRLRRALYTAALPASFRWNPHLIALYQRLRAAGKGHKSALIACARKLLIFVNTVVARGTPWQEQQPVPATNPAAA

SEQ ID NO: 486530 - protein, 311 aa, unidentified
MELYVGIDVAKDSLEVATSNGESFSAHNDAAGIAQLLERLLKLSPALVVLEASGGYEQALLVELVAAQIDCARVNPVDVRYFARMQRQFAKTDRLDAKVLAAFAAQRGSELIPARLDPERDELKLLVNRRSQLLQMLTAERNRLARAPKWLRKSIARTIHALERDLGAIDHEIAERVNASARLKPLQQQLTSVPGVGRVLASVLLARLPELGHLNRREIAALVGVAPFSRQSGRWQGHEPIFGGRASVRTVLYMATLSAVRCNPALRTFYCRLRNNGKPSKVALTAAMRKLLTVLNAMLKTQSSWSPLCPA

SEQ ID NO: 486531 - protein, 319 aa, unidentified
MGAVLGIDVGKANFHCALLIDGQSRSNSFSNSLTGFGKLLGWLRNRDVAHVHACLESTGGWSEELAKFLHEHGHDVSVVNPAAVKAFGQSELSRTKTDKADAALIARYCHAMAPRLWTPPSPSQQRLQRLSRRRVALDDMRVQENNRLQGPGIEDVRSSIEATIAFLSRQIAEIDAEIAALIDGDSSLRGKRELLKSIPGIGERVATTILGELPQITEFRNGKALAAFIGLCPREYRSGTSIGASWLSKIGNGHVRRVLYMPAITAMRCNPVLSAFAGRLRANGKRPKQIIAAVMRRLIVIAYGVLKSAKPFYARGSRC

SEQ ID NO: 486532 - protein, 367 aa, unidentified
MEKHSTARKSSGGLRRTSAGCTIGLDLGDRSSRYCVVDERGEVIQEGSVATTRKGLDRVLGAARRCRLAMEVGTHSPWVSRYLARLGYEVIVANARRVRLITESSRKDDKLDAKTLARLARIDPELLSPIRHRGEQAQADLMMVRARAVLVETRTALINAARGLTKSYGERLPSCGTYQMGRDQAESLSPAIRAALDPLLAEVETLTERIREYDEQLEELCKNRYPETKLLKQVHGVGTLIALTFVLTVEDPHRFHKSRAVGCYVGLRPKRRQSGQSRPELGISKEGDAYLRTLLVQGAHHVLGPFGKDSDLRRWGLKLAAQGGKNAKKRAVVAVARKLAVLLHKLWVSGETYEPLRLTNRAQIVAA

SEQ ID NO: 486533 - protein, 404 aa, unidentified
MNADVLAGLDWATATHAVCIIDAAARVLERFTVAHDRDGLAELLRRLGRYGSRVRIAIERPSGLIVDALVEAGHQVFPIHPNAVAATRSRYRSHGAKSDASDAYLLADLLRTDGHRWAPLSPQSDSIRALRALVRARDDLVAARIALANQLRSTLETFWPGAGRIFAAVDSPIGLAFLRRYPCPAKAVGLTQSQLARFLRAQHYSGRRTSAQLLARLRAAALGRSGELTAATMADVVLAMVAVLEPLVEQLATLTRRIEHFVQSLPDGQLIMSFPRAGRVCAAQILAEMGDVRERYPSDDRLAAEAGVVPLTYESGKRRYVGFRWACNHRLRRAITTLADNSRHANLWARSIYTAARARGCDHPHAVRILARAWLRVIWRAWVDHKPYDPQLHLGALKASAQGG

SEQ ID NO: 486534 - protein, 319 aa, unidentified
MAQNDLVVAGIDVAKDKVDVCVRSLSLKRTFASTAEGRRELTSWLRRRKVGKAVMEASGGYERDWAKALRNAKIEVRIVDPKRVRSFAQSAGRLAKNDTIDAEMIAWFAEIFDEARGQAYDATREQLHQMVNARQALKDMQTKLESQGEHALPATVQRIHARIMKTIAVELVKIEAAISAVVEATPRFTELAEIIESVPGIGRTTSAALIAAMPELGQANNKIVAALLGVAPYDDDSGRRRGERHIKGGRRRTRNVFYMACLGAATQHNPVLKAFYDRLVAKGKQKKVALVACMRKLISILNIMIERRQKWDASRYAVS

SEQ ID NO: 486535 - protein, 313 aa, unidentified
MKIKVEDAFVGIDISKDELEVAIWQEQTTEQYANTGAGIRKLIAELSKKSISLVVVEATGGYEYQLVLLMLAVGLPVALVNPTRIRRFAQAGGNLAKTDKLDAQVLAHYGQAMRPEVRVQKSELEEQLSLKITRRRQLIGMITAEKNRLGTARGTNIESIKRHLEWMKIELDLLEAEMMGLLQTHPSYQKMVDNLISVPGVGPVTALTLVAQMPELGLVNRQEIAALAGVAPLNKDSGKRKGRRHTFGGRSSVRSALYMAALSATRCNPVIKAFYERLLENGKEKKVALTACMRKLLVILNAMARDQQSWNQA

SEQ ID NO: 486536 - protein, 386 aa, unidentified
MQKLNDLSRSLTALEPNGTLIAVIEMSLSSWLVGGIVPGVERQPLKKLAVDESALLKLLHRWREEAEKAGRRIGRIAVAFEAGRDGFWLARWLKARGIEAYVIHASSVAVSREHRRAKTDRLDTELLKRSFLGWLRGERDHCKMVEIPTMKDEDAKRPNREHDSLIGERSRIVNRMKAALVRLGIRGFNPKLKRATTRLDGLHTPEGEPIPPNALAELRRDMERRRLVNNQIRQIEEERLERIEQAPCDGAHVMVRLLARVMGVGIETADMLVHEVLSRNMRDRRAVARYAGLTGSPDESGRKRREKGLARSGNARVRRGMIQLAWRFLLHQKNSALTKWFRSRTENARGTRKPMIVALARKLLIALWRLMREGIVPDGVVLRPAQ

SEQ ID NO: 486537 - protein, 451 aa, unidentified
MRVVYQTCAGMDVQKKDVKVCLVTYDSQGQRQEDVRSFRTMTRDILAMRAWLQAQGCTMIAIESTGVYWKPIFNLLEGDFTILLVNPAHMKQVPGRKTDVKDCRWIAALLEHGLLRGSFIPPLAMRDLRDLTRYRRQLVHTHSAEVHRLQKVLEDANIKLASVATDVMGVSGRAILGALLAGVESPEALADLAKGRLRKQKPALQAALEGRLRPHHAGLLTHILAHIEFLEESIAACEAHLETLCRPYAEAIALLDTIPGVSQRTAQDLIAEIGIEMAWFPSAKHLCSWAKVSPGNNESAGKRKSSRTGKGNKWLRAVLVECAHAAGHTKGTYLGTKFRRFASRKGKKQAAIMVAHRLLEAAYFILRDKVPYRELGEQYLEAQHREHLIRHHMRRLESLGLHLDIRELPQTGGSPRGRFSEEYPNVYCPICHSRAHFSDINTCCIKGYSEP

SEQ ID NO: 486538 - protein, 372 aa, unidentified
MDQHSRLFIGLDVSKLKISVAVADGERGGEVRFFGDIPSDPASVSSIVQKLAKRGAKLHFCYEAGPTGYELYRQLTEMGHDCVVVAPALIPKRPGDRVKTNRRDAVSLARLHRAGELAAVWVPDRGHEAMRDLVRAREAAQEAQKRARQQLQSFLLRHGRIYSGRSSWSLAHMRWISTLKFEHPAHFIVLKEYCQAIEDAEVRLKRLTDLISETVKSWTMAPVVEAYQALRGVSLIAAVVFVAEIGDIRRFENPRQLMAFLGLVPSESSTGEHVKRGGITKAGNSRARRMLVEGAWAYRFPARVSRTKQAQLEGLPRTVREIAWKGQLRLCSRYRKMIIAGKHKAIAITAIAREMGAFLWAIGQEVQPAHHA

SEQ ID NO: 486539 - protein, 390 aa, unidentified
MTAQTVDTLPPVTADHDPVRCLLAIELSKKSWIVAINTPLSDKISRYTLEACDWKGLLELMERVRTRVAREVGRPVEMISCYEAGYDGFWLHRLLEGQGVCSHVIDPASVQVDRRARRAKTDHIDAARLLRSLMAYLRGEPKVWSVLRVPSVAEEDDRRLHRERDRLIAERGQHVNRIKGLCAIHGIYDYEPMRRDRMRRLEQLRTGDGRELPPRLKAEIARELRRLELILGMLKEIEVERDAIASAENVSVHTNAKKIQNLVKLKAIGAEIATVLTGEVFYRPFNNRHQVASYVGLTPSPFQSGPKCRDQGISKAGNPKARSTMIELAWLWLRHQPDSPLSLWFRERVGTLKGRIRRITIVAVARKLLIALWRYLETGVVPTGAILKSS

SEQ ID NO: 486540 - protein, 446 aa, unidentified
MKRKQKRPYRSVKVNSVRVDSLLERTQSERLLVAIDVAKEKMVAAVLDEDERVLVTVKWSHPVESEAFYDFVNRLGAERRLEVVMEPTGTYGDALRFHLRKRNVAVYQVSPKLVHDARELYDGVPSCHDSKSCGIIGMLHLNGRSRLFEGVSAARRRMKAATSTLYRYEKQFIRERCQLAAMLARFWPGLTDVLSVGTKSLLTFLSEMGSAAAVAADPNRARQILLKASKKALSVARVEEVLDNAASGYGEVPCPEEVDAMRLLAGDALRTRERVGAARKTLESMAVKDEATKPLIHLLGKATSGALVAEAGDLRDFDSPASVVRFFGLNLKEVSSGQFKGRLRITKRGSSRARHYLFYAALRLIYRDRIVRAWVAKKRARSPSSGLNGVVAVMRKLALALWHVARGNEFDAEKLYDIKHLNLTTSAKDVRLPIDGVDEEQLDDAA

SEQ ID NO: 486541 - protein, 378 aa, unidentified
MRFYNQAHRFYCGVDLHARTMYLCILDHRGQVVLHKEVPCEPAAFLEAIGPFRDGLVVACECLFCWYWLADLCQAQNITFVLGHALYMKAIHGGKAADDKTDSAKIAHLLRGGNLPIAYVYPKGLRETRDLLRRRMYLVHKRAEVVAHVVNTNSQYNLPPFGKKLIYARNRQALKIAQRFSDASVKKSIEVNLRLLDCLDDLIADVELYLERTVKVDDADTFYRLRSIPGVGKILALVLLYEIHDIKRFAGEGEFLSYARLIRPVKTSAGKVKGSGGGKIGNAHLKWSFSEAACLLARESDQAKRFLARKEKKHGKPKALGILAARLGRAVYHMLWQKKPFDPKRFWNGEPGVTPEKLKKSVVKRPRRAKGSRCVLQA

SEQ ID NO: 486542 - protein, 345 aa, unidentified
MDHIGIDLHKRESQICIETELGEVIEKRIRTDRERFEALLGGRPRAKILIEAMTEAEWVARLLEDLGHEVIVADPNYAAMYATRSRRVKTDRRDAVTLADACRLGAYRTAHRASDRQRHVRAELAVRDTLVRTRVKCVALVGALLRRHGIHLPSGNVDGFVKRVERQAIPEAQRLEIAPLLALIGTASAEIDAADDRIAAIAAEDPVIRRLRTVPGVGPVTGTAFVATLDTWERFAGPHQVEAYLGLAPSEKSSGEKQHKGRITKAGNSRARWLLVEAAWAILRSRRDDTEPLRRWAQRVALRRGTKVGIVALARKLAGILYAMWRDGTTYEKREGREVGETAVA

SEQ ID NO: 486543 - protein, 383 aa, unidentified
MSDHSEAFVAFDTSKLRNAVAIADGSRGDEVRFLGEFDNTPAATAKLVRKLTGKYERVTFCYEAGPTGYELHRQIKSLGHECIVAAPSLIPKKPGDRVKTNRRDAISLAKLLRSGDLTAVWVPDRQHEAMRELTRARETAMNDLRAKRQQISAFLLRRGVHYPPDKKTWGKMHINWLMSQKFEFAEERIVFEELMEAMRQAQGRLERLAAAIRAAVPDWSLCRLVTALMAMRGLDIISAATIVAEVGDLSRFRTPRELMAYVGIVPSEDSTGDKVKRGPITKTGNRRVRRMLVECAWSYQFPPRLSQDKQVKVAAVPQAVREIAWKAQSRLNQRYRALLRRGKLKNVAITAVAREFVGFIWAVAQAVGAAPAATHTKAPAVTS

SEQ ID NO: 486544 - protein, 410 aa, unidentified
MEVLHTHCAGLDVHKESVVACVRHMTDGKVTTHVKTFKTTTQELIALSDWLSAEAATHIAMEATGVYWKPVWHILSDGEFELILANAAHVKNVPGRKTDVNDAVWLADLMAHGLIKASFVPDEPTQQMRDLLRTRKQIVRERSSHIQRIQKTLEDANIKLDSVVTNILGLSGRRIIEALIAGQTVPNALATLAHRNLKATTDELEASLRGRVTSHHRFLLKLHLDQIDAIDAAVARIDEEVNVNVEPFRVAIEMLSAIPGVGDLSATVIVSEIGIDMSRFETAGHLISWAGLCPKNDESAGKRRSNRMKKGAPWLKSTLVQCAWCASRTKGSYLQAQYLRLRSRRGAKKAVCAVAASILTAAYHMLKNGTVYQDLGASYFDNRAKDKQAMRLVNRLKNLGFEVQITSLAA

SEQ ID NO: 486545 - protein, 400 aa, unidentified
MRVIGIDVHRSFAVVAMLEDGAMRSGGRVELVRHQILAFGRTLRPDDELVLEATGNTMAIVRLLRPFVGRIAVANPRQVRAIAHARVKTDKVDAATLAKLHASGFLPEVWQPDEATEGLRRVVAQRARVVAQMTRLKNRVQAVLHANLIPEYRGVLFSGRGRRWLTEQPLAEDEREAVRRHLAELDRLTVDRAAFDQRLAQQALADERVRRLMTINGVHVTVAVSLLAAIGDIARFRSAAKLASYFGLTPRIRQSGNSPAQHGRISKEGRAHARAMLVEAARAAKSTPGPLRAFFRRIVIKRGQPVAAVATARKLAVLVWHLLSQGEDYAWSRPALLAAKLRRAALDAGAPSERGKPGAASAYSFKAVRERERAWIEQAEGAYERFVANWLTAPVRKPGA

SEQ ID NO: 486546 - protein, 581 aa, unidentified
MFLVRAAQYVHGASTLSEVCHSIGPKRARPISCSVVGDLEMRDQLPCARANPAIALRLPSTPPAGRVADMCSEVIHPAARRRATKSPQPTVNNFAATKFAAGDKSVSGRIAPRRRRSSVAQPARLKLRTPPGVAAPAPTSERTSPHEGPYISTTPGRPTMHGKAARMHTFEQLTHFAGFDWAKDHHDAVILDRQGATVASVTFAHTAEGWAQWREMIKAYPALGVAIETNQGAAVEQLLQSQITVYPMQPKAAERYRDRHVPSGSKTDQTDAWCFGDALRVDGQHWRPLAPEDPLTEELRLLCRDEVELITQRTALVNQLQAALCEYYPAALEAFDDWTAPFSWEFIAAFPTPQQLVGAGRRRWEKFLHTHKLWRPDTAPKRLEIFGRADRFGGSEAVTRAKSRLAVSTAQVLRTLQKQLEEYRSAIEKLFAQHPDHDLFGSLPGAGAKLAPRLLSEIGADREQYPDAQGLQCVAGTAPVSFESGKIRRAKIRWHCNRHLRHAVHLWADCSRKFCAWAGTYYKAQREKGKSHACALRCLGQRWLKILWKIWQSRQPYDETMHALNQQKHGSWLLQLKPKTT

SEQ ID NO: 486547 - protein, 327 aa, unidentified
MKKSAPPVYVGMDIAKATLQVHLQGHQFEFINDAKGHAQLSGRLAKLTLPHVVCEATGGYERPVVEACHKAGIRISVLNPAHTLAASQAQGKRAKTDPCDAAALTDYGQRFQPEPTAAVAPAVREITELTLWLKQLIDHRAVVKAQAEQHANAFVGQQHEALLTHYDCQVKTVEKEIKKLVQAQALFQQRVDCLTQISGVGFRTALLTLVFMPELGSMNRGGAAALAGLAPWTRDSGTMKGQRCIGGGRAQVRPVLYMAALSASRRNPILAPFYQGLKKRGKPSKVALTAVMRKLLIHMNSELKKLAAKPTDEKLQNATKTKKSIAK

SEQ ID NO: 486548 - protein, 334 aa, unidentified
MSIMSMHLQGGVAKDAARPNAGIDVSKEHLDVCCGHDERRVSNDVRGWDELTAMLRAAGVDLVVVEATGGYERGLVCALQGAELCVARVNPRQARDFAKSMGVLAKTDAVDARTLRDFADVLARHAQRQRYITPMLEQARRDLSELMTRRRQLVDMRVAEHNRLEHAGARAARSIHSVLKLLDKQIVALDRQIDDHMDRHFKSQRALLDSVKGVGPVTVLTLTAALPELGRLGRRQIAKLVGLAPLADDSGRRQGKRRTWGGRSNVRAVLYMATIVAMRHNPVIREFYERLVRAGKPKKVAIVACMRKLLTILNAMLRDQSMWNAAHHLNSPSA

SEQ ID NO: 486549 - protein, 356 aa, unidentified
MSHNLNSAIAVIGIDIGKNSFHVVGQDQRGAIVLRQKWSRGQVEARLANLSPCLIGMEACVGAHHLSRKLKALGHDARLMPAKYVHPYNKGQKNDFRDAEAIAEAVQRPTMRFVATKTTDQLDLQALHRVRERLVGQRTGIINQIRAFLLERGIAVRQGLRFLRAELPGVLAKRTDVLSPRMLRIIEGLADDWHRLDERIEGLSSEIGALASQDKGCERLMTVPGIGPIISSAMVAAIGSGDAFAKGRDFGAWLGLVPKQISTGDRTILGSISKRGNRYLRALFVQAAWVVLVKVGPKHWDRYGLKSWIEAAKKRLHHNVLAIALANKLARIAWAVLHKGRAFECVKTNATATRPA

SEQ ID NO: 486550 - protein, 417 aa, unidentified
MKEEFTFYVGVDWGVEFHQACILDAHGEKICQRRIEHSGPGMLEFCDFLQALTNGEASALAVAIEVPRGPIVEALLEHNYAVFSINPKQLDRFRDRHTVAGAKDDRRDALVAADSLRTDQHCFRRVRPEHPDVIRLRELSRTEETLGIDLRRCVNQLSQLLLRYFPQLLRLCSTPDEPWLWALLELAPTPQQAAKLTEKRLKQLLAKYRIRRWTAEKVGEILTAPPLPLAAGSAEAISEHALLLLPQLRLLHLQRKQVADRTQQLLDQMVTSTNDFPMSQEHRDIPVLLSLPGVGRIITATMLAEGSHILSLRDYHAMRAHAGIAPVTKQSGKSRQVLMRYRCNQRLRNAFYHWARTSIQHDPRSKQHYARLRQVGHDHGRALRGVADRLLAMLIAMLKSGQTYDPNRRSTTNLTAA

SEQ ID NO: 486551 - protein, 377 aa, unidentified
MSKVLFVGLDVHAETIAVAVAEQGGEVRSLGSIPNRLESIRKMVHKLGAVQHLRVCYEAGPTGYVLYWQLTQLGVACEVIAPSLVPTKAGDRVKTDRRDAEKLARCHRAGELTAVGVPSAEQEALRDLVRAREAAKRDQLKARHRLGKFLLRHGRQRPDGVKAWTKKHREWIKSHVRFEEAALEATLADYVEEVDHVGGRIVKLEKAIDEAIQQAPPQIRAVIEALQALRGVAQTTAASIVSEVGSLSRFPTAPQLMGYSGLVASEHTTGNRVQRGSITKTGNGHLRRVLVEAAWAYQHRPNVIGHLLRRQKSLAISDEVKNIAWKAQQRLHKRYKAMSARGKNKNQIVAALGRELLGFIWAIGIKTEQQQKLIKAA

SEQ ID NO: 486552 - protein, 341 aa, unidentified
MNKCHLNTELSSHEGTRGQFNGGRCAIKLGIDVHQDFYVVVEQMGGTNPKPPQRFGKQAFLHWATKLKQSGAEVQAVYEACGFGFALQRQLSALGIVCHVVCPQKLDERNKRVKTDGLDAKALCLKLDRFIQGNRDAMALVRVPTEQEEQQRAIHRQREQLVGARKRLEAQGRSLMVNHGFEPVKSWWKRGNFGALQVPEWMKELLGNSQPILLGLQQKIAALTLQLQVAAASKQPRGLGAMTSVIIDREIGDWNRFNNRRQVGSYTGLCPGEYSSGNTRVQSCVTKHGNPRLRAALVELAWRLVRFQPSYKPVLKWRAILAKGALATGAARKKAIVAVAR

SEQ ID NO: 486553 - protein, 459 aa, unidentified
MAQRVDPTRHRADGTSIEPLSIKHPHAAGIDIGGASHYVAVPPDRVGKGEHAVREFGPHTENLVAIADWLCTCRIDTVALESTGVYWIALYELLQARGFDVWLVDAKSVRHVKARKSDVLDCQWLQQLHSFGLLSKAHRPDEQVCALREMSRLRDITIEERARHTQRMQKALTQMNVQLTNVITDITGETGMNIIRAIVAGERDRMVLAQMRNYRIHASTEQIAKALEGRWSREHLFSLGHELKAYDFASEQIAGLDTEIEVLLEAMRVFDKTPVANANKGRRKNTLAFDGRRALMNWCGVDLTEVPGIDVGTAMKILSELGSSLTRFDTVKHFCSWLGLCPGTRISGNKKLSGASKRIPNRVARALKLAALGLSRSRCAMGAYYRKLALRMGSPKAITAVAHKLARIVYAMLSGQARYVKEDQAKHDARYRARTIKALQKRAQELGLTLSPNPVSEPA

SEQ ID NO: 486554 - protein, 392 aa, unidentified
MVVSVGIDVSKDKHDCFIVSSDGEVLADVFTISNTLDGFHGLLQRIQECSAPQDKIKVGLEATGHYSYNLLGFLLDNGLATYVLNPLRTNLYRKSLSLRKTKTDRVDARTIASMLLSDAGLKPYTDTAYHNEELKSLTRYRFDKVKERAKLKSSIARLVCILFPELEKLVPSLHIASVYALLEEFPGAKQVAAAHLARLKALLETASNGHYKRDMALEIRDTAKNSIGSQMPAKSLELQHTIRLIRELNREIDEIEEQIQSIMDELHSPITTIPGLGFRMAAMILAEVGDFTRFDSPDKLLAYAGMSPSTYQSGQLKNCYPHMEKRGSRYLRYALYNATKYVCHWDSAFADYLAKKRAEGKHYNIAISHAAKKLIRLIFAMEKSRQPYCSAA

SEQ ID NO: 486555 - protein, 345 aa, unidentified
MELHTIGIDLGKTVFHLVGVNLRGEVVVRKKFSRKQLLHFTANLRVKLIGMEACGGAHFLGRALQEQGHEVRLMPAQYVKPYVKTNKSDYIDAEAIAEAVGRPRMRFVPIKTDDQLDLQSLHRVRERWVARRTAVINQIRGLLLERGITLRKGRCHVDAALPGILEDASAKLSGALRVLLAQLRLELAHLETRINEADAVINKTAGENEACRRLVAIPGIGPVTATAIVAAIGNGAAFRKGREFAAWLGVVRREYSTGGKQKLLGISKRGNSYLRRLFVQGARAVLQQSAKQSSGLSAWLAQLTSRTHRNVAGVALANKLARMAWAVLAKNEKYRPPMLAGAATA

SEQ ID NO: 486556 - protein, 408 aa, unidentified
MERYYLGVDWADKFHQVWVSDAQGQKVAENKVVENMEGLAEFSRWLNESRARGIELWAAIEKPQGRIVDFLLDHGVVVYPVNPKALDRARDRFRMSQSKSDSFDAHVLAEFLRTDHGHLRALEPNSDDAQELKLLTRDQHRLGRQKTRLLNQIRVTLKEYYPRPLEVFSDLEAQIARDFLKQYPTPRALSDLTQRKWNRFAKREHHLGEGRCKELWEKLNQPQLQVPDHVVRAKAQLLLVLLAQLEALSDAVQTYNERVKHFFASMPAAKLVKTLPGAKTGTIVAMLWAELGDSNNRWESFHHLQAEAGVVPVTKASGKSHVVHFRFSCNKVMRHASYWLAFVSLNQSEWANHYYRDQRAKGHNHHQALRALGAKWLKIIFVMWRDHKPYDENYHLANITRQKMRQAA

SEQ ID NO: 486557 - protein, 315 aa, unidentified
MQDILEICCGLDVHKETVVACLLKGNVGEEPTKIIRTFSTLLAGLEELKAWLEAEDCRHVAMESTGVYWQPVYNVLEEAFDGSIVLIVANARHMKNVPGKKTDMKDAEWIATLLRAGLLEGSFIPSKPIRELRNLTRYRKSIIEEIASQKNRIEKHLQSCGFKLSTFLTDIFGVSGRAIMDHLCRHGKISAREVETLVKGRAKCKLQEIKQAVNGKMDVHQREFLKLLLGWLDQHYKHLHQVEQKLEEKLGQYQRQLEQLDGIPGIDKTAAAAILAEIGIDMSRFKTAEHICSWAGLSPGNNESAGKKVHSHHPR

SEQ ID NO: 486558 - protein, 341 aa, unidentified
MLKFTIGADISKDKINFALRFLNDYLLEKEVENTTSALNKFIKEVQSLVKSIAKEKKSEYTIEFIMEHTGIYGNLLLECLAGQKVPMYVVAGLEIKNSTGISRGKNDKIDAKRIADYGVRFADKLKPYTLCDQTLSELKGLNTLRTQMVRIKAQLTQANDDNKKFQSKELQKKSANLKKRVVNELDQAIEKIEAQMLELIKSDESIYENYKIAQSVPGVGKIVAVAFICATNNFTKFESAKALGSYCGVVPFGKESGRYKGKDKVSPIANKALKTLLHLGAVASIGGNNPFAVYYKRKVTEDKKNKMLALNNIRNKMVKTMFACIKNKTKYKADYSFSFAA

SEQ ID NO: 486559 - protein, 342 aa, unidentified
MYYIGLDVHKKTISYCVKDVGGRVHQEGKLGATRCELDLWMRTLPQPWTVAMEATIFTGWIYDHLHPHATQVKVAHPLMLRAIAAAKKKNDRVDASKIADCLRCDFLPECHMASPETRDRRRTLRYRGLLVRQMVQTKNRISGLLMETGVTYNKQRLHKVGYFRELLASNEEVNESIRPLLRLSRDTIARLQKTERALVSSLQRDPLLTERIKRLRTVPGVGPITALTWALEMGEISRFRSIRQAISYCGLCGDERSSAEKSIRTPISKQRNKNIQFVLIEAAKLAPRQDHDLALLYEREKQKGNANRATLAVARKMVAYLLAVDRGQRDFVTAEDGRCDAA

SEQ ID NO: 486560 - protein, 416 aa, unidentified
MKVVYQTCCGVDVHKSFLVATIIKTISGVEPSYQKKRFSTFNNSILQFKNWLIENQCRDVCMESTGKYWGPVFNLLEDEMNVTIANPKWVKAVKGNKDDTKDSKWIGDLFRLGLVPGSYIPCKPIRILREFTRYRYKLTSCRTSEKNRYQNALTVCNVALDSVVSDIFGKSATSVIDYLIERSDNSINHEEIASRLLRSLKKKSDSVIESIEGYQMTDSQKYRMRLVRAHLDYITSTINDIDTMLDSLIAPYENAVQLLCTIPGVDRNSAITVISEIGTDMTPFSNSKRLCCWAGLTPGNNESAGKKKSVRITRAGVYLKPALVQVAHAAVKSDKSPYYKQKYERIMKRRGKKRAIIAIARMILTAIYQMLSTGEAWNPTDLYKIDIPEPLKEKQKEKAIKQAKKLLIREGILSES

SEQ ID NO: 486561 - protein, 338 aa, unidentified
MKETGFTQMVSAGCGIDVHQSLIVASIRKSSDEVETREFAAYTSSLTSLREWCKSEGVTHVAMESTGVYWKPVFNVLEEDFEVILVNARHVKNVPGHKTDKKDSRWLSKLLLSGLLKGSFIPPRDIRELRDLVRYRKKVVGQIASEKNRIIKILEDANIKLSSVLSNVDGAVGTKIINDLIEGETSVDKLLRHYHGKQKVSRVEFCKALEGRVTDHRRLMLRIHKNSISDKEAQLRSLDEAIDNATKAYSVETDLLQTIPGVGKDSAISIISEVGVDMSRFPDETHLSSWAGMSPGNCETGGKKKRKNGSWQQSFTKHTCRMRLGSHPQKGLLFQAQV

SEQ ID NO: 486562 - protein, 401 aa, unidentified
MSGLKGSFGWFVGIDISKDKFDTCGITGKEAKLFQFSATMDRKGFDKLKGHIASVPVSSVLIGMESTASYHVNLFSYLVSEGYNVILINPLLISNYVKMQLRKTKTDKKDAVVIAQFLRTNGDSLIQRVTSSLISDLRDLARQRESLVDEMTALKMEIKRLLNITFPELEHMVGIFTKSILKLLQRYPSAFALRDADLGQLSQTLIADSYGHKREAFATELIKTAHASIGSSSPAKEMILKQKIALLLHLEDALQEITDVLIEMSRKLMEEDINIMTSIKGIGNKTAVNFLIEMGCDISQYDRSGKIIAMAGLDPAVYQSGNHEGKGRITKRGNRHLRRVIWLMTTRVIHYSDIFKAYYLRRRKEGLPYKMAVLATAHKLIRVIYAMLTQRTSFCPQANSL

SEQ ID NO: 486563 - protein, 316 aa, unidentified
MSLPLLFVGIDVAKAECVVAVRPTGATWTVPQTEAGWTALAARLQALAPTLVLCEATGGLELPLASVLAAGGLPLAIVNPRQVRDFAKAKGLLAKTDALDAAVLAHFAEAIRPLPRAVPDATTQALAALVTRRRQLVEMATAEENRLGSAPPRLRGRLQAHLRWLRRELAALDADLDTTIRTHPGWRVQDELLQSTPGVGPILARTLLGGLPELGTLSRGAIAALVGVAPWARDSGRHRGARRCWGGRADVRAVLYMATLAAVRCNPVLRAFYQRLLAAGKLKKVALVACMRKLLTILNAMVKMQTPWAPRLAGDC

SEQ ID NO: 486564 - protein, 334 aa, unidentified
MNAKLNKQASNPTDVAIYCGIDVGKKVFVVSLSCKDKTKTFSNTGGDIKQAVAYLNTNAGIHLSLVVLESTGGLEIPLAKALYQAGFRVVIANPNKTSQFAGSYSNAKTDNQDAKMLALYAKFLTLDELELTKHLYAPPSKEQEHLEALVVRRTQLVSMRVQEKNRLHQIHQSQLDSVKQVISYLDEQIARLEQDIDTLNKHFDDTTKKFKDIKGVGNLTLATLMSMLPELGTLNNKQIASLVGVTPYPKESGTMKWKSRCTGGRQSVRNVLYNATNVARQHEPKFKQFYERLINKGKPFKVAINACMRKLLTVINAIVKNDSVWQADYHLRCC

SEQ ID NO: 486565 - protein, 384 aa, unidentified
MLTTATHNEHYTETPTTEPVLFLAFELSEKTWKLGFTTGHGQKPRERTMAARDLKRLLDEVAHAKSRFSLCATAPGVSCYEAGRGGFWLHRFLQAHRLTNQVVDSSSIEVNRRKRRAKSDGLDVRKLLSMLMRYHHGERQVWRVVHVPSVAAEAQRHLHRDVETLKQERARTTTRIKGLLSSQGVRLTSLSKLPEQLDALRLWDGSPLPSGMRRRVLRVYAHHQFLSEQIAELEADRRAMLQTAQEAPLEKVRQLMHLRGIGINGSWLLVMAFFGWRALKNRREVGGLAGVIPTPYQSGESAREQGITKAGNRHVRWMTMELAWSWVRYQPESARSCWFRARFGGGGKRLRRIGIVAVARKLLIALWRFLETGVLPEGAVLKEA

SEQ ID NO: 486566 - protein, 322 aa, unidentified
MAIAVVGLDLAKHVFQVHAVDETGRAVLRRQLRRAGVEAFFKILPPCIVGIEACASAHYWARRITALGHEVRLIAPAKVKPYVQRGKKNDANDAAAIVEAVMRPHMVFVPIKNEEQQAVLMLHRTRDLLVRQRTMLVNAIRAHLAEFGIVAAQGRRKVKELIAGLDNTEMPELARIALWQIADQIDECDKRIDALERRILAWHKSDESSCNLATIPGIGPITASAMAATVPSPSAFRNGRQLAAWLGLVPRQNSSGGKDRLSGITKTGNTYIRRLLVIGATSVIRFARSKAPGTAEWLKKLLERKSARLASILFILRSEWRW

SEQ ID NO: 486567 - protein, 398 aa, unidentified
MTTEYAVFCGLDVGKEAHHACALDVTGRRLFDAALPQDEARLRELFSRLAEHGLVLVVVDQPNTIGALPIAVARAMGLGVAYLPGLAMRRIADLHPGSAKTDARDAHVIADAARVMPHTLRRVDVGEEALAELNVLVGFDDDLAAEVTRVTNRLRGLLTQVHPALERVLGPRIATKAVLALLGRYGGPAGLSTAGRTRLLQTARKANPRGAAELVDQLIAALGEQTVVVPGTAAAEQVLPKLAASLRDSLDQRAAIAVQVEKVLDAHPLACVLTSMPGVGVRTAARILLEVGDANSFPSAGHLAAYAGLAPVTRRSGISIRGEHPPHSGNKHLKRALFLSAFAALRSDPVSRAYYNRKRAEGKRHNAALICLARRRTDVLYAMIKNQLPYQVRLPTAA

SEQ ID NO: 486568 - protein, 396 aa, unidentified
MDGPIISFDVSKGSSHMRGFLDHGKPAGKATVIRHDLEGFAKLDALRGRIREETGSDPVAVYEFTGVYSHTLERYLDSIGMRRYGVSPLESAKVRKAMIRPTKNDSLDCRTIAEVYYLRPLREGRSDDEIHVGLRDMGRFYHYLLEVKIVEKGRYRRCLDDVWPCFDKVIEPDSPKSLAIISHYGHPSKIRSKEQVKNFLMKLPRRGRASTDELAEKIAAYAKTHVSGASPNSYKTEEVKLMSARVKGIIDESERVMDSMISTAENLLEFASLKTIPGIADVTAARLIAEIGDISAYPKADSLIAYAGLDPAVMQSGQMTGEHMHITKKGNPHLRATLYVAVTNMIMSKAENMITRYVLKKKNSGLSYKAAVIAGCSKLLRLIHAMLRNGTCYSDK

SEQ ID NO: 486569 - protein, 347 aa, unidentified
MKHYAGIDVSLNSSSVCVVDESGKIVREVKVASEPVALIHCIKSLGVRVERIGLEAGPLSQWLYGALRESGLPVELLETRHVKAALSAMPVKTDRNDARGLAQLMRLGWFRPVHCKSMAAQEVRALLTARKLVQSKLYDIEMSLRGILRGFGLKVGPTTSRSFAARINHLAAGHPSLEMVAQALLSTHAAALCAFKDLEKNVRQISRADARVRLLMSTPGVGPLVALTYVSAIDDPKRFTSSKRVGAHFGLTPKKYQSGETDISGRISKIGDSSVRAVLYEAAHIILTRPIHGGALKSWAMRLAKRAGMKKAKVALARKLAVVLHRMWVSASTFDFEKANGCMRAAA

SEQ ID NO: 486570 - protein, 384 aa, unidentified
MRRTQKRGPGPSHLLLTPDHAGNVVGIDPHKQTLTATVVDPRGGIVASEHFRVSGGGHRALEAWARQFGAIARWGVENAAGWGRHTAIFLIGRGYDVRDVCANRTPRSDRARQRGKSDMLDSERIARETLAHSLLPKAFKRSGADQGPDELHQLLSLWHNRRRSILTSRQHLVGEAESLLCELPLELREQLPDSKSVRPRLAALQRRNRRRRYDLPTRLRLQLLDGYYQQIQALDREEKQVVAALEALVRQSGSTLGELCGLCTRSVAELLVETGDARRFTEGGYRRFNGTAPLPASTAEGPGEPLRHRYNPGGNRRINAVLHRMAVTQLRCEPRAQTIYANARANGHTKKEARRVLKRHLSDVVYRRMIRDLAAQSAEPLIAA

SEQ ID NO: 486571 - protein, 338 aa, unidentified
MNATTIGLDIAKSVFQLHGEDAEGRLVVQKRLSRRGMAEFFAKLAPCVVALEACGTSHYWGRTLRAMGHEVRLIPAAYVKPFVRRNKTDARDAAAICVAARRPDMRPVAIKSEEQQASRALERSRELLIKQRTQLMNSLRAMLAEFGIVAAQGARGFAELRARLASGDGLPKTLVTALRLVAAQLDGLTPAIESMEDKIKTIVRADPTMRRLSRIPGVGFITAHAVVAAIGDGRQFVSSRCFAAWGGMTPRETSSAGKRRTKGLSRQGESRLRKLFALGAATLMRNARSRDDRASAWQRGILARRPMKVAVMAQAAKTARIAWAVLTSGKDYAPPAAA

SEQ ID NO: 486572 - protein, 343 aa, unidentified
MDHFAGLDVSVKETSICIVDDTGRIVREVKVASEPEALLQVLGNPIYRFKRIGLEAGPLSQWLFSALAEAGLPVICVETRHMRAVLQAQINKADRNDARGMAQMMRAGLYRPVHVKTLRSQKLRMLLTHRKLLQSKAIAIDNDLRGTLRNFGLKVGMVGTVKFEARIKELVENLPDLAVLVEPLLMVRRVLREQFSILHRRLLAIVRDDEVCRRLMTTPGVGPVVALTYRATVDVPARFRNSKAVGAVFGLTPSKYQSGEINRTGAISKCGDEMMRVMLYEAAQIMLVRTAKWSWLKAWAMKIARHRGMKKAIVALARRLAVIMHRIWVDGTEFRWTREVTAA

SEQ ID NO: 486573 - protein, 366 aa, unidentified
MKERKKCEPRHVGIDLGKRTYVMAIVSGNGKAAMSNGRTTVDGRMKLYKKLTKHDKVALEACSLAFTMAKEMEASVGCEVKVLNPYQLPLIYKSMKKTDKEDALKLAHLLEDCKEERLPVVAVPSDREMKRRKLLAGYRREQRTKVQALNRLHGLFLAQGITNVVKSELATGEDRAERVKALSGLERDEADHLLDCLKLYEKRIGALEKQMGEEAAGDEPIERLQSVPGVGPKVSFAFVAHVAPERFENASQVSNFLGLVPRVYISGDSVRHGRITKRGNGYLRALLVQASWAMVRSKKGGALKERYKYMTEERGVSKKKAIVAVARRMSELLYALMKNGTEYEVRKFRAGQVNLTERLAQLALSA

SEQ ID NO: 486574 - protein, 405 aa, unidentified
MISVGIDVSKGKSTVCILKPYGEIMCSPFEMLHGEKELNALDDLLNKLDGEIRIVMEATGIYHLPILTFFHEKGYFVSVINPFAMKKYAKDSSIRGAKTDKLDSIMIANYGIEKWFKLQRYKGDEEIYAELKLLGRRYRHYMELHVKALQELTHILDYVMPGIKKMFNSWNEANGKDKLSDFVEQFWHFDLITAMSLEKFTEEYLDWAKEKKYHRSRSKAEAVYELASNGISTLSSGTPSTKMLVQEAISVLRTVDSSLFLILTRMQELAKTLPEYSTVREMGGVGDVLAVKLIAEIGDIRRLHSAKALIAWAGIDPPPYESGQFIGSKRKITKRGSSTLRKVGYEVMRVLKSHPAPKDDAVYNYILKKESEGKSKKHAKIAGLNKFLRIYYARVKEYLNTQEIA

SEQ ID NO: 486575 - protein, 277 aa, unidentified
MNKQSAKQFRVGVDVSQETLDVRARTDSGVEQRTAQFANTAAGHRQLIKWSTKGGRTARVVLEATGVYSLDLALALDAAPRCEVMVVNPRAARKFAEACLQRSSTDATMALALQEYAARMEFVAWTPPSVAVRELRAIARRIATLTVEKTRETNRRHAAGAAEDILVLPADMSVRQWVAHSGLDVRHVRSGTSVHKVPRISKQGNAHLRRALYMPALVATQHEPHVRAFYEQLLAAGKKPLQAVVAVMRKLLHAIYGMLKTNTPFDGSKFRKLPQAA

SEQ ID NO: 486576 - protein, 319 aa, unidentified
MRRMLDCCAALDVHKKAVTVSARVSGRDGSREELMAEFATMAADLLALRDWLKELGVTHVAMEATGVYWKPVYYALEDDFELLLVNAQHVKNVPGRKTDTLDAQWLCQLLECGLLRASFVPPKPIRALRDLTRYRKSLIQERQREANRLHKMLEDAGIKLSCVATDVLGVSGRQMLAALLAGTRDPELLAELAKGKLRAKLPMLRRALAGNFQAHHALIVSQILAHLDYLEEMIAALTEEVQQRLVPFGEKVELLCTIPGVGARNSQVIIAELGPDMERFVTDRHAASWAGICPGNNESAGKRLAPDAPARATPTCASR

SEQ ID NO: 486577 - protein, 343 aa, unidentified
MQTVTTIGLDIAKSVFQVHGVDAAGRVVIRRQLKRRHVLAFFQKLPPCLVGIEACASSHHWGRELQVLGHTVRLMPPAYVKPYVKRHKNDATDAEAICEAVTRANMRFVAIKTPEQQSCLILHRTRHLLIRQQTSVINAIRAHLAEFGIVAAVGRNGVEQLLGVVADANDKRLPEVARACLAALGVQLRVLKAQILEFDRMINAWHRSNETSRRLDKAPGIGPVLATALVATVPDPKTFRSGRNFSAWIGLVPLQHSSGGKDRLGHISKQGDRYLRNLFVAGALAVIRYAKIHGTQHRPWLTALLARRPTKIAAIALANKIARMAWAMMVKGEHYKEPVALAA

SEQ ID NO: 486578 - protein, 473 aa, unidentified
MKSKDPGRGSRANVRSKKRSAKRLPKSLRQVNLNAAGIDVGSASHFVAVPDDRASAPVREFPSFTADLNRLADWLRECGIETVAMESTGIYWLPLYEILEERGFEVLLVNARHVKNVPGRKTDVLDCQWLQQLHTFGLLRGSFRPDQEARTLRAYLRQRENLVRYASHHVQHVQKALALMNVQLRNVISDVVGATGMRIVRDIVAGKTDPHTLAQHRDHRCRASEEEIARSLTGNYRAEHVFALKQALDLYDRYQESLRECDERIEQVVLHLEVHATQPSGSLPRPRRNVKPGGNEPRFEIRGPLHHVTGVDLTQIPGIGPYTALRIVSEIGLDMSRWPTAKHFTSWLALAPGSKISGGKVLDARTKPFKNRAAAALRIAATSLRSTQTALGAFYRRIAFRCGAAKAVTATARKLAVYIYTALRNQSPHSDPGADAYEVRYRDRVLRNLKHRAADLGYLLVPAPPSPEQPVSG

SEQ ID NO: 486579 - protein, 351 aa, unidentified
MSEYIAFDSHKRYTWVDREDHSTRKNSGHRLEHAPGAVRDYLSGCEPGTAVAVEATGNWYWIIDEIEQAGLQPRLVHPRKAKLMMGLTNKTDKLDAQGLNRLQRNGTLPTVWIPPGPLRDLRELTRTRLVLVAQRTRLKNRLSATLAKYGAPASEASDPYGKRGRAELEKHLERLPEQARWVSGQLLAQLDFVSAQVRQLEQRLNQLVEVTPEMQWLLTMPGVGVILAATIALEIGEVERFPSALHLASYAGTTPRVHASGGKVRYGPLRADVNRYLKWAFAEAGNSVAVNHVRCPDRHVSQLYRRLRQRKGHPKAIGAVARHLAEAAFHVLRKKQMYQDPSLGRGRTSQV
